United States Patent Application Publication US 2026/0055430 A1 - sequence listing, part 4

SEQ ID NO: 8188 - protein, 458 aa, Unknown
  Description of Unknown: Integrase B8189 sequence
  PTHR30461:SF3,IPR036162,PS51737,IPR011109,PTHR30461, PS00397,PF00239,G3DSA:1.10.10.2600,IPR006119,SSF53041, cd00338,SM00857,IPR025827,IPR038109,PS51736, IPR006118,PF13408,G3DSA:3.40.50.1390,PF07508,Coil
MKKAGIYIRVSTPEQEKNGYSLNAQEEKLKSFALAKDYEVKKVYRDGGFSGAKLERPAMLEMIDDIENNRLDLVLVYKLDRLSRSQKNTMYLIEDVFLKNNVDFISMQESFDTTTSFGRAMIGILSVFAQLERDNIRERMTLGRMERIKRGFYMGGGKVSFGYRYNQESNVLEIDEGEATAVRRMFELFLGGNSIYSLINTLKKEFPHYEKTFYDASVRRRLANEHYIGNSQYDGKIYVNTHEPIIDDLTFNQAQLMLSTRSHGNAFKHKYLFSGMITCKKCGKSYNGFESVCGKYSNKYYRCSSTTYKFKKKNGWECSGKRFRCEDVDKYILDKIKSIATDQVVSKKSKSTSLPIKKEIDKLKAQQAKLLDLYLDDRIDTNVLDEKSKHIKDLLEKLNKQLKEKPAIEKKVFDESVDKLANNFESLSFEQQRILIGNVIEKIEVVGGDMNVYFFDTK

SEQ ID NO: 8189 - protein, 458 aa, Unknown
  Description of Unknown: Integrase B8190 sequence
  PTHR30461:SF3,SM00857,G3DSA:1.10.10.2600,IPR036162,PF13408, PS51737,IPR025827,G3DSA:3.40.50.1390,IPR006119,IPR038109, PF07508,IPR011109,SSF53041,PF00239,PTHR30461, PS51736,Coil,cd00338
MKNGFVVVNEYIDRAISGKTDNRPSFQRLIKDSEKGHFDAVIMYTLDRFARNRYDSAIYKAKLKKNGVRVFYAKQPMPDTPEGIILESVLEGYAEYYSENLARSIKRGMKENALHTIAMGSLGLGYKIGEDRKYEIDPVGAKAVRAIFTMYAEGKSKTEIVNWLNEHGFKTSQGNQFNKNSLSRILRNDKYIGVYRYADVVVENAIPPIIDKHLFDKVQALLKHNFASRARNKAKEDYLLSTKLFCGHCGSPMIGESGTSKLGRVYHYYKCSKRKRERDCSKKVEKKDWLEELVVRYTVHHVLTDENIELIATKAMELIEKDLQDTSVLVGLQGMLKDINKKIKNLMSAIEQGIITSSTKERLEELELERLNIEGQIAREEMKKPLLSKERIVYWLTSFKSGDIQDIEYQRRIIDTLVNSVFVYDDDGNGRRIVLTFNISGNNTLTIECSDIEGIAPP

SEQ ID NO: 8190 - protein, 458 aa, Unknown
  Description of Unknown: Integrase B8191 sequence
  cd03768,PTHR30461:SF3,SM00857,G3DSA:1.10.10.2600,IPR036162, PS51737,G3DSA:3.40.50.1390,IPR006119,IPR038109,PF07508, IPR011109,SSF53041,PTHR30461,PS51736,Coil, PF00239
MNYERRYLRSCQVSTLEQKEHGYSIEEQERKLKSFCEINDWSVSDVFIDAGFSGAKRDRPELQRMMNDIKRFDLVLVYKLDRLTRNVRDLLDLLEIFEQNNVAFRSATEVYDTSTAMGRLFVTLVGAMAEWERETIRERVMMGKRAAIKQGMILTPPPFYYDRVDNTYIPNDYKKVVLWAYDEVMKGNSSKAIARKLNDSDIPPPNGKRWEDRTITRALRNPITRGHYTWGDVFIENSHEPIITEEMYQQIKERLEERINTKIVSHVSVFRGKFICPRCGGTLTMNTATRKRKKGYVTYKTYYCNTCKTRKQSFGFSENEALRVFRDYLSKLDLDKYEVKTKQKDDVVTIDIDKIMEQRKRYHKLYAKGLMQEEELFELIKETDETIAEYEKQKELVPRKILDIDKIKSFKNVLLESWNIFSLEDKADFIKMAIKSIDIEYVELKNRHSIEIKEIEFY

SEQ ID NO: 8191 - protein, 458 aa, Unknown
  Description of Unknown: Integrase B8192 sequence
  cd03768,PTHR30461:SF3,SM00857,G3DSA:1.10.10.2600,IPR036162, PS51737,G3DSA:3.40.50.1390,IPR006119,IPR038109,PF07508, IPR011109,SSF53041,PTHR30461,PS51736,Coil, PF00239
MNYERSYLRSCQVSTLEQKEHGYSIEEQERKLKSFCEINDWSVSDVFIDAGFSGAKRERPELQRMMNDIKRFDLVLVYKLDRLTRNVRDLLDLLEIFEQNNVAFRSATEVYDTSTAMGRLFVTLVGAMAEWERETIRERVMMGKRAAIKQGMILTPPPFYYDRVDNTYIPNDYKKVVLWAYDEVMKGVSSKAIARKLNDSDIPPPNGKRWEDRTITRALRSPITRGHYTWGDVFIENSHESIITEEMYQQIKERLEERINTKIVSHISVFRGKFICPSCNGTLTMNTATRKRKKGYVTYKTYYCNTCKTKKQSFGFSENEALRVFRDYLSKLDLDKYEVKTKQNDDVVTIDIDKIMEQRKRYHKLYAKGLMQEEELFELIKETDETIAEYEKQKELVPRKTLDIDKIKGFKNVLLESWKIFSLEDKADFIKMAIKSIDIEYIKLKNRHSIEIKDIEFY

SEQ ID NO: 8192 - protein, 458 aa, Unknown
  Description of Unknown: Integrase B8193 sequence
  PTHR30461:SF3,SM00857,IPR036162,PF13408,PS51737, G3DSA:3.40.50.1390,IPR025827,IPR006119,SSF53041,IPR011109, PTHR30461,Coil,PS51736,cd00338,PF00239
MKKDTPVGESLPLRAALYPRVSTEEQAKYGLSIHDQQGDLEEYARAHGMRIVGVFADAGYSARKNVEYRPAMLALLEAVKRDEVDIVLVTKLDRWFRNIGEYYKVQEILEAHNVSWRTIYEDYDTSTAAGRLKINIMLAVAQDEADRTSERIKKVFDGKRARLEPLTGDKPFGYTIEGKRYVKDPETEAAVDAFFRKYMACGSVSATQDYIRSEYGIFIPYQGADKLLRSTAYYGRYFGTDGMCPAYITKAQYDAIQLMRKRVMRRPAQNRVYLFSGLIFCPVCGGRMGGRKNQNVVSSHYNCSNHFCRRIPCTNNRSISEAKLERYLLSALDAKFAEYKRQTSRLSGARRKDYSSEIAALKGKLSRLKELYLNELIFLDEYKRDRAGFMAKLDELEAKQAALAVPAPSGEKIDGLLQGDWKGMYADLPKDKQQEFWRIVIKEIRLYPDRHIEFDLNL

SEQ ID NO: 8193 - protein, 458 aa, Unknown
  Description of Unknown: Integrase B8194 sequence
  PTHR30461:SF3,SM00857,IPR036162,PF13408,IPR025827, G3DSA:3.40.50.1390,IPR006119,SSF53041,PTHR30461,PS51736, cd00338,PF00239
MKDKIIRCAIYDRVSTEGQVKDGLSLDAQEEALTEYALSHHYKIVDYYADEGITARKKMQNRKDLIRLLNDVKADKIDLILVTKLDRWFRNIKDYHNTQAILEAHNCNWKTIFEEYDTSTSNGRFAINIMLSVNENECDRDSDRIKNVFEYKKKQREHLNGKPAYGYISVNKKLVKDPETKYIVEDTIEHYFSCYSKKATVKYILSKYANEQNPPTMYQINRILTCETYTGRKYGIDNYCEAYITQEQYKKIVSTSDAKIIPHQTKPFLFSSMIKCPICGKNMSGFVKRQKLKNGNVSEYKRYRCGAKFTAYHNGACISESVIEAYLLDNVMGELNLELLQIKTKEQEEKQKKPASNPVKIMNEINRLNLMYQKGRIDDEYYDKQYAILNEKLSAAQQPQEHRTIENYTSIMETLNDGWYEMYKKLDITHKKAFWKGIIKEIYIDKESRQICGFKFLL

SEQ ID NO: 8194 - protein, 458 aa, Unknown
  Description of Unknown: Integrase B8195 sequence
  cd03768,PTHR30461:SF3,SM00857,G3DSA:1.10.10.2600,IPR036162, PS51737,G3DSA:3.40.50.1390,IPR006119,IPR038109,PF07508, IPR011109,SSF53041,PTHR30461,PS51736,Coil, PF00239
MNYERSYLRSCQVSTLEQKEHGYSIEEQERKLKSFCEINDWSVSDVFIDAGFSGAKRDRPELQRMMNDIKRFDLVLVYKLDRLTRNVRDLLDLLEVFEQNNVAFRSATEVYDTSTAMGRLFVTLVGAMAEWERETIRERVMMGKRAAIKQGMILTPPPFYYDRVDNTYIPNDYKKVVLWAYDEVMKGNSSKAIARKLNDSDIPPPNGKRWEDRTITRALRNPITRGHYTWGDVFIENSHEPIITEEMYQQIKERLEERINTKIVSHVSVFRGKFICPRCGGTLTMNTATRKRKKGYVTYKTYYCNTCKTKKQSFGFSENEALRVFRDYLSKLDLDKYEVKTKQKDDVVTIDIDKIMEQRKRYHKLYAKGLMQEEELFELIKETDETIAEYEKQKELVPSKTLDVDKIKKFKNALLESWEIFSLEDKADFIKMAIKSIDIDYVKLKNRHSIEIKDIEFY

SEQ ID NO: 8195 - protein, 458 aa, Unknown
  Description of Unknown: Integrase B8196 sequence
  PTHR30461:SF3,SM00857,IPR006118,IPR036162,PF13408, IPR025827,G3DSA:3.40.50.1390,PS51737,IPR006119,SSF53041, IPR011109,PF00239,PTHR30461,PS00397,PS51736, Coil,cd00338
MKRILRAALYIRVSTEEQAKEGESLPAQESALVEYANEHGYRIVDIYKDAGVSGTRKVEKRPEMMRLLDDVKQDKIDIVLFIKINRWFRSVSEYWRVQRILDDHDVMWNAITEDFKNETAMDKAMINFALTFSEYFAGVQGEHIRFTLERMAKNGEPISGNQPYGYMIIQGPKHKMIAKDLATGDYIPDMYQKYIECHNIAETTRYLNAKYPDQKFAETYTTRRRICTRAYTGYHWARPDYYPPYVTQETFDEANAILKARAERQAHNRHTPPKLFSGLIICPDCGRKLATTYKKPTKGYPNGFRKYRCSMAWNRTGKCSYRHELYQWVIEKYCVEHAMSELKSFTLKAKTIDTEALKAEQEQEKLEAQLERLNDMYLYGKMDFEYYKRHMDEVTDKLDRIKRGVKPADRSVEELEALHIDNFESAYAALNEENRAMFWHKLLKGITVEKTHVTGLIF

SEQ ID NO: 8196 - protein, 458 aa, Unknown
  Description of Unknown: Integrase B8197 sequence
  PTHR30461:SF3,SM00857,G3DSA:1.10.10.2600,IPR036162,PF13408, PS51737,IPR025827,G3DSA:3.40.50.1390,IPR006119,IPR038109, PF07508,IPR011109,SSF53041,PTHR30461,PS51736, cd00338,PF00239
MKKAKSETTLVRAALYIRVSGEEQKIKGLSLEAQEERLRDFCKERGWLICGVFIDAAKTARKNIRKRVEFQHMIDGVKKDQYDILVFCRLDRWFRSVADYYKIMDILNAHNCGWVTSDEDYDTTTANGRLYINVKLSIAQNESDICSERISVVFDSKIQHGTVLSGFSPFWLDVKDKKLVVNDERAAIVRDAIDYFEKDMTQNGTVRYIRNKYGINWDINMLKRVFKNKLLIGVYDSNGRYNDHFCDPIISVDQFNRVQSIFDKRIKVVPTKRVYIFTSILKCPVCGCRLSGQAAGTNTRYYYRCNRHFIRKDCSYGKITNERLIEKWLLENLKSKLSECEVAWNVKQVKKRLEPSAKQKASLKRKLSKLKDLYLNELIDLEDYKRDYIMYSSALSELSTSQKEETPPDFAAVHRILDNDFLSTYNTMDRTEKRTFWQSIIKEMVLDDNGHVTSLSFV

SEQ ID NO: 8197 - protein, 458 aa, Unknown
  Description of Unknown: Integrase B8198 sequence
  PTHR30461:SF3,SM00857,IPR006118,IPR036162,PF13408, IPR025827,PS51737,G3DSA:3.40.50.1390,IPR006119,IPR011109, SSF53041,PF00239,PTHR30461,PS00397,PS51736, Coil,cd00338
MKRILRAALYIRVSTEEQAKEGESLPAQESALVEYANEHGYRIVDIYKDAGVSGTRKVEKRPEMMRLLEDVKQDKIDIVLFIKINRWFRSVSEYWRVQRILDDHNVMWNAITEDFKNETAMDKAMINFALTFSEYFAGVQGEHIRFTLERMAKNGEPISGNQPYGYMIIQGPKHKMIAKDLSTGDYIPDMYQKYIECHNIAETTRYLNAKYPDQKFAETYTTRRRICTRAYTGYHWARPDYYPPYVTQETFDEANAILKARAERQAHSKHTPPKLFSGLIICPCCGRRLATTYKKPTKGYPNGFRKYRCSMAWNRTGKCSYRHELYQWVIEKYCVEHAMSELKSFTLKAKTIDTEALKTEQEREKLEAQLERLNDMYLYGKMDFEYYKRHMDEVTDKLDRIKRGVKPADRSVEELEALHIDNFESAYAALNEENRAMFWHKLLKGITVEKTHVTGLIF

SEQ ID NO: 8198 - protein, 458 aa, Unknown
  Description of Unknown: Integrase B8199 sequence
  SM00857,IPR036162,PF13408,IPR025827,G3DSA:3.40.50.1390, PS51737,IPR006119,SSF53041,IPR011109,PTHR30461, Coil,PS51736,cd00338,PF00239
MKEKIIRCAIYDRVSTDGQVKEGLSLDAQQEALTEYALSHHYKIVDYYADEGITARKKMQNRKDLIRLLNDVKADKIDLILVTKLDRWFRNVKDYHNTQAILESHNCNWKTIFEEYDTSTSNGRFAINIMLSVNENECDRDSDRIKNVFDYKKKQREHLNGKPAYGYISVKKKLVKDPETRHIVEETFNHYFGCYSKNATIKYILGKYANEQNPPTMYQVKRILTCETYAGRKYGIDNYCEAYITWEQYKKIVSTSDAKIIPHQTEPFLFSSMIKCPICGKNMSGFVKRQKLKNGSVSEYKRYRCGAKFTEYHNGACISESVIEAYLLDNVMGELDRELLQIKSKEQEEKQKKPAANPVKIMGEINRLNLMYQKGRIDDEYYDKQYSILNEKLSAAQQPHEHRTIESYTAIRETLNDGWYEMYKRLDITHKKAFWKGIIKEIYVDKDSRQICGFIFML

SEQ ID NO: 8199 - protein, 458 aa, Unknown
  Description of Unknown: Integrase B8200 sequence
  cd03768,PTHR30461:SF3,SM00857,G3DSA:1.10.10.2600,IPR036162, PS51737,G3DSA:3.40.50.1390,IPR006119,IPR038109,PF07508 ,IPR011109,SSF53041,PTHR30461,PS51736,Coil, PF00239
MNYERSYLRSCQVSTLEQKEHGYSIEEQERKLKSFCEINDWSISDVFIDAGFSGAKRERPELQRMMNDIKRFDLVLVYKLDRLTRNVRDLLDLLEVFEQNNVAFRSATEVYDTSTAMGRLFVTLVGAMAEWERETIRERVMMGKRAAIKQGMILTPPPFYYDRVDNTYIPNDYKKVVLWAYDEVMKGNSSKAIARKLNDSDIPPPNGKRWEDRTITRALRNPITRGHYTWGDVFIENSHEPIITEEMYQQIKERLEERINTKIVSHVSVFRGKFICPRCGGTLTMNTATRKRKKGYVTYKTYYCNTCKTRKQSFGFSENEALRVFRDYLSKLDLDKYEVKTKQKDDVVTIDIDKIMEQRKRYHKLYAKGLMQEEELFELIKETDETIAEYEKQKELVPRKILDIDKIKSFKNVLLESWNIFSLEDKADFIKMAIKSIDIEYVELKNRHSIEIKEIEFY

SEQ ID NO: 8200 - protein, 458 aa, Unknown
  Description of Unknown: Integrase B8201 sequence
  PTHR30461:SF3,SM00857,G3DSA:1.10.10.2600,IPR036162,PF13408, IPR025827,G3DSA:3.40.50.1390,PS51737,IPR006119,IPR038109, PF07508,IPR011109,SSF53041,PTHR30461,PS51736, cd00338,PF00239
MKKAKSETTLVRAALYIRVSGEEQKIKGLSLEAQEERLRDFCKERGWLICGVFIDAAKTARKNIRKRIEFQHMIEGVKKDQYDILVFCRLDRWFRSVADYYKIMDILNAHNCGWVTSDEDYDTTTANGRLYINVKLSIAQNESDICSERISVVFDSKIQHGTVLSGFSPFWLDVKDKKLVVNDERAAIVRDAIDYFEKDMTQNGTVRYIRNKYGINWDINMLKRVFKNKLLIGVYDSNGRYNDHFCDPIISVDQFNRVQSIFDKRIKVVPTKRVYIFTSILKCPVCGCRLSGQAVGTNTRYYYRCNRHFIRKDCSYGKITNERLIEKWLLENLKSKLSECEVAWSVKQAKKKLEPSAKQKASLKRKLSKLKDLYLNELIDLEDYKRDYIMYSSALSELSTLQKEETPPDFAAVHRILDNDFLSTYNTMDRTEKRTFWQSIIKEMVLDDNGHVTSLSFV

SEQ ID NO: 8201 - protein, 458 aa, Unknown
  Description of Unknown: Integrase B8202 sequence
  cd03768,PTHR30461:SF3,SM00857,G3DSA:1.10.10.2600,IPR036162, PS51737,G3DSA:3.40.50.1390,IPR006119,IPR038109,PF07508, IPR011109,SSF53041,PTHR30461,PS51736,Coil, PF00239
MNYERSYLRSCQVSTLEQKEHGYSIEEQERKLKSFCEINDWSVSDVFIDAGFSGAKRERPELQRMMNDIKRFDLVLVYKLDRLTRNVRDLLDLLEVFEQNNVAFRSATEVYDTSTAMGRLFVTLVGAMAEWERETIRERVMMGKRAAIKQGMILTPPPFYYDRVDNTYIPNDYKKVVLWAYDEVMKGNSSKAIARKLNDSDIPPPNGKRWEDRTITRALRNPITRGHYTWGDVFIENSHEPIITEEMYQQIKERLEERINTKIVSHVSVFRGKFICPRCGGTLTLNTVTRKRKKGYVTYKTYYCNTCKAKKESFGFSENEALRVFRDYLSKLDLEKYEVKKKQKDDVVTIDIDKVMEQRKRYHKLYAKGLMQEEELFELIKETDETIAEYEKQKELVPRKSLDIDKIKKFKNALLESWKIFSLEDKADFIKMAIKSIDIEYVKIKNRHSIKISDIEFY

SEQ ID NO: 8202 - protein, 458 aa, Unknown
  Description of Unknown: Integrase B8203 sequence
  PTHR30461:SF3,cd00338,SM00857,IPR006118,IPR036162, PF13408,IPR025827,PS51737,G3DSA:3.40.50.1390,IPR006119, SSF53041,IPR011109,PTHR30461,PS00397,PS51736, Coil,PF00239
MKRILRAALYIRVSTEEQAKEGESLPAQESALVEYANEHGYRIVDIYKDAGVSGTRKVEKRPEMMRLLEDVKQDKIDIVLFIKINRWFRSVSEYWRVQRILDDHSVMWNAITEDFKNETAMDKAMINFALTFSEYFAGVQGEHIRFTLERMAKNGEPISGNQPYGYMIIQGPKHKMIAKDLSTGDYIPDMYQKYIECHNIAETTRYLNAKYPDQKFAEAYTTRRRICTRAYTGYHWARPDYYPPYVTQETFDEANAILKARAERQAHSKHTPPKLFSGLIICPCCGRRLATTYKKPTKGYPNGFRKYRCSMAWNRTGKCSYRHELYQWVIEKYCVEHAMSELKSFTLKAKTIDTEALKTEQEREKLEAQLERLNDMYLYGKMDFEYYKRHMDEVTDKLDRIKRGVKPADRSVDELEALHIDNFESAYAALNEENRAMFWHKLLKGITVEKTHVTGLIF

SEQ ID NO: 8203 - protein, 458 aa, Unknown
  Description of Unknown: Integrase B8204 sequence
  PTHR30461:SF3,SM00857,IPR006118,IPR036162,PF13408, IPR025827,PS51737,G3DSA:3.40.50.1390,IPR006119,IPR011109, SSF53041,PF00239,PTHR30461,PS00397,PS51736, Coil,cd00338
MKRILRAALYIRVSTEEQAKEGESLPAQESALVEYANEHGYRIVDIYKDAGVSGTRRVEKRPEMMRLLEDVKQDKIDIVLFIKINRWFRSVSEYWRVQRILDDHSVMWNAITEDFKNETAMDKAMINFALTFSEYFAGVQGEHIRFTLERMAKNGEPISGNQPYGYMIIQGPKHKMIAKDLSTGDYIPDMYQKYIECHNIAETTRYLNAKYPDQKFAETYTTRRRICTRAYTGYHWARPDYYPPYVTQETFDEANAILKARAERQAHSKHTPPKLFSGLIICPCCGRRLATTYKKPTKGYPNGFRKYRCSMAWNRTGKCSYRHELYQWVIEKYCVEHAMSELKSFTLKAKTIDTEALKTEQEREKLEAQLERLNDMYLYGKMDFEYYKRHMDEVTDKLDRIKRGVKPADRSVEELEALHIDNFESAYAALNEENRAMFWHKLLKGITVEKTHVTGLIF

SEQ ID NO: 8204 - protein, 458 aa, Unknown
  Description of Unknown: Integrase B8205 sequence
  PTHR30461:SF3,SM00857,IPR006118,IPR036162,PF13408, IPR025827,G3DSA:3.40.50.1390,PS51737,IPR006119,SSF53041, IPR011109,PF00239,PTHR30461,PS00397,PS51736, Coil,cd00338
MKRILRAALYIRVSTEEQAKEGESLPAQESALVEYANEHGYRIVDIYKDAGVSGTRRVEKRPEMMRLLEDVKQDKIDIVLFIKINRWFRSVSEYWRVQRILDDHNVMWNAITEDFKNETAMDKAMINFALTFSEYFAGVQGEHIRFTLERMAKNGEPISGNQPYGYMIIQGPKHKMIAKDLATGDYIPDMYQKYIECHNIAETTRYLNAKYPDQKFAETYTTRRRICTRAYTGYHWARPDYYPPYVTQETFDEANAILKARAERQAHNRHTPPKLFSGLIICPDCGRKLATTYKKPTKGYPNGFRKYRCSMAWNRTGKCSYRHELYQWVIEKYCVEHAMSELKSFTLKAKTIDTEALKAEQEQEKLEAQLERLNDMYLYGKMDFEYYKRHMDEVTDKLDRIKRGVKPADRSVEELEALHIDNFESAYAALNEENRAMFWHKLLKGITVEKTHVTGLIF

SEQ ID NO: 8205 - protein, 458 aa, Unknown
  Description of Unknown: Integrase B8206 sequence
  PTHR30461:SF3,IPR036162,PS51737,IPR011109,PTHR30461, PS00397,PF00239,G3DSA:1.10.10.2600,IPR006119,SSF53041, cd00338,SM00857,IPR025827,IPR038109,PS51736, IPR006118,PF13408,G3DSA:3.40.50.1390,PF07508,Coil
MNKVIRCACYVRVSTDNQLENYSIKEQTERLTAFCKAKDYLIVKFYTDGAFSGGSINRPALQQMLGDIEKGLIDAVIVYKLDRLSREQKDTLMLIEDKFLANHVDFISLCENFDTSTPFGLAMIGILSAFSQLEKNQITERFTMGRIGRAKNGLFHGGSVAPTGYDYIDGQLVINEYEALQVRDLYTRFSKGYSLHNCWQYMQKHYYTKYGGWKSETLVRNVLKNDVYIGKVKFNGQSYPGIHEPIIPEELFQTVQDIFEHSRRDMPSFKRSPFKANTLLSGLIYCGKCGARCHGEHGNYTCYSRSKGDKRQIKDPDCKNKKWKIEELDVLVIKYVSELDFEETESVEVPVQTKVDYGKRISEIEKQLSKLIDLYQISDISFETISEKIEKLSKEKNALIEESEKELPEQTSNADRLKFQERFLALLDNGPLPEKRACLTQLIERITITDEDIEITLK

SEQ ID NO: 8206 - protein, 458 aa, Unknown
  Description of Unknown: Integrase B8207 sequence
  PTHR30461:SF3,SM00857,IPR036162,PF13408,IPR025827, PS51737,G3DSA:3.40.50.1390,IPR006119,SSF53041,IPR011109, PTHR30461,Coil,PS51736,cd00338,PF00239
MKDKIIRCAIYDRVSTEGQVKDGLSLDAQEEALTEYALSHHYKIVDYYADEGITARKKMQNRKDLIRLLNDVKADKIDLILVTKLDRWFRNVKDYHNTQAILEAHNCNWKTIFEEYDTSTSNGRFAINIMLSVNENECDRDSDRIKNVFEYKKKQREHLNGKPAYGYISVKKKLVKDPETQYIVEDTFKHYFSCYSKNATIKYILEKYANETNPPTMYQVKRILTCETYAGRKYGIDNYCESYITWDQYKKIVSTSDAKIIPHQTEPFLFSSMIKCPICGKNMSGFVKRQKLKNGNVSEYKRYRCGAKFTEYHNGACISESVIEAYLLDNVMGELDRELLQIKSKEQEEKQRKPAANPVKIMNEISRLNIMYQKGRINDDYYDKQYAILNDKLSAAQQPQERTSIESYTSILETLNDGWYEMYKKLDITHKKAFWKGIIKEIYVDKDSRQICGFKFLL

SEQ ID NO: 8207 - protein, 458 aa, Unknown
  Description of Unknown: Integrase B8208 sequence
  PTHR30461:SF3,SM00857,IPR036162,PF13408,IPR025827, PS51737,G3DSA:3.40.50.1390,IPR006119,IPR011109,SSF53041, PTHR30461,Coil,PS51736,cd00338, PF00239
MKKDTPAGESLPLRAALYPRVSTEEQAKYGLSIHDQQGDLEEYARAHGMRIVGVFADAGYSARKKVEKRPAMLALLEAVKRDEVDIVLVTKLDRWFRNIGEYYKVQEILEAHNVSWRTIYEDYDTSTAAGRLKINIMLAVAQDEADRTSERIKKVFDGKRARLEPLTGDKPFGYTIEGKRYVKDPETEAAVSAFFRKYMACGSVSATQDYIKSEYGIFIPYQGADKLLRSTAYYGRYFGADGMCPAYITKAQYDAIQLMRKRVMRRPAQNRVYLFSGLIFCPVCGGRMGGRKNQNVVSSHYNCSNHFCRRIPCTNNRSISEAKLERYLLSALDAKFAEYKRQTSRLSGARRKDYSSEIAALKGKLSRLKELYLNELIFLDEYKRDRAGFMAKLDELEAKQAALAVPAPSGEKIDGLLQGDWKGMYADLPKDKQQEFWRIVIKEIRLYPDRHIEFDLNL

SEQ ID NO: 8208 - protein, 458 aa, Unknown
  Description of Unknown: Integrase B8209 sequence
  cd03768,PTHR30461:SF3,SM00857,G3DSA:1.10.10.2600,IPR036162, PS51737,G3DSA:3.40.50.1390,IPR006119,IPR038109,PF07508, IPR011109,SSF53041,PTHR30461,PS51736,Coil, PF00239
MNYERSYLRSCQVSTLEQKEHGYSIEEQERKLKSFCEINDWSVSDVFIDAGFSGAKRERPELKRMMNDIKRFDLVLVYKLDRLTRNVRDLLDLLEVFEQNNVAFRSATEVYDTSTAMGRLFVTLVGAMAEWERETIRERVMMGKRAAIKQGMILTPPPFYYDRVDNTYIPNDYKKVVLWAYDEVMKGNSSKAIARKLNDSDITPPNGKKWEDRTITRALRSPITRGHYTWGDVFIENSHEPIITEEMYQQIKERLEERINTKIVSHVSVFRGKFICPRCGGTLTMNTATRKRKKGYVTYKTYYCNTCKGKKKSFGFAENEALRVFHDYLSKLDLEKYEVKTKQKDDVVTIDIDKIMEQRKRYHKLYAKGLMQEEELFELIKETDETIAEYEKQKELVPRKSLDIDKIKKFKNALLESWEIFSLEDRADFIKMAIKSINIDYVKLKNRHSIKINDIEFY

SEQ ID NO: 8209 - protein, 458 aa, Unknown
  Description of Unknown: Integrase B8210 sequence
  PTHR30461:SF3,SM00857,IPR036162,PF13408,IPR025827, G3DSA:3.40.50.1390,IPR006119,SSF53041,PF00239,PTHR30461, PS51736,Coil,cd00338
MKILRAGLFSRVSTEDQKRHGFSIATQKEELEEYCKKNNMRIVSHYCDEGVSAGLPYKKRPEMMRLLNDIEANKIDIVLFVSLDRWFRSIKQYYLVQEILEKHDVVWKATREDYSTADANGRFSVNIFLAIAEQERSRTSERIKAVFEHKRKNRESFFGANSIPFGYTEQLDENGVRRLVKDPELEEALDMFFQIAVKYENVSKAARDVNLEYGLTKARHKWMELSKMEIYTGTYRGVKDYCPAYISREDWLRLNNRNKIKANTKNNRVYLFTGLIECPMCHNNMRGTYCSQKRKSGETVEYYSYKCEYKTAHICDYKHTISQLNIEKFLLDNLEDLLKGEIANVEIEKKKKRPKPKTNVSALKEKLRRLEVIYMTGNKSDEEYITEAKQINDAIKKAEAETRNAADDRDLTNIKDILSTDFKSIYNTLSPEDKRRFWRTLIKRIYINGNRVEHVEFN

SEQ ID NO: 8210 - protein, 458 aa, Unknown
  Description of Unknown: Integrase B8211 sequence
  cd03768,PTHR30461:SF3,SM00857,G3DSA:1.10.10.2600, IPR036162,PS51737,G3DSA:3.40.50.1390,IPR006119, IPR038109,PF07508,IPR011109,SSF53041, PTHR30461,PS51736,Coil,PF00239
MNYERSYLRSCQVSTLEQKEHGYSIEEQERKLKSFCEINDWSVSDVFIDAGFSGAKRERPELKRMMNDIKRFDLVLVYKLDRLTRNVRDLLDLLEVFEQNNVAFRSATEVYDTSTAMGRLFVTLVGAMAEWERETIRERVMMGKRAAIKQGMILTPPPFYYDRVDNTYIPNDYKKVVLWAYDEVMKGNSSKAIARKLNDSDIPPPNGKRWEDRTITRALRNPITRGHYTWGDVFIENSHEPIITEEMYQQIKERLEERINTKIVSHVSVFRGKFICPRCGGTLTMNTATRKRKKGYVTYKTYYCNTCKTKKQSFGFSENEALRVFRDYLSKLDLDKYEVKTKQKDDVVTIDIDKIMEQRKRYHKLYAKGLMQEEELFELIKETDETIAEYEKQKELVPRKSLDIDKIKKFKNALLESWKIFSLEDKADFIKMAIKSIDIDYVKLKNRHSIKINDIEFY

SEQ ID NO: 8211 - protein, 458 aa, Unknown
  Description of Unknown: Integrase B8212 sequence
  PTHR30461:SF3,SM00857,G3DSA:1.10.10.2600,IPR036162,PF13408, IPR025827,G3DSA:3.40.50.1390,PS51737,IPR006119,IPR038109, PF07508,IPR011109,SSF53041,PTHR30461,PS51736, cd00338,PF00239
MKKAKSETTLVRAALYIRVSGEEQKIKGLSLEAQEERLRDFCKERGWLICGVFIDAAKTARKNIRKRIEFQHMIEGVKKDQYDILVFCRLDRWFRSVADYYKIMDILNAHNCGWVTSDEDYDTTTANGRLYINVKLSIAQNESDICSERISVVFDSKIQHGTVLSGFSPFWLDVKDKKLVVNEERAAIVRDAIDYFEKDMTQNGTARYVRNRYGINWDINMLKRVFKNKLLIGVYDSNGRYNDHFCDPIISVDQFNRVQSIFDKRIKVVPTKRVYIFTSILKCPVCGCRLSGQAAGTNTRYYYRCNRHFIRKDCSYGKITNERLIEKWLLENLKSKLSECEVAWSVKQAKKKLEPSAKQKASLKRKLSKLKDLYLNELIDLEDYKRDYIMYSSALSELSTSQKEETPPDFAAVHRILDNDFLSTYNTMDRTEKRTFWQSIIKEMVLDDNGHVTSLSFV

SEQ ID NO: 8212 - protein, 458 aa, Unknown
  Description of Unknown: Integrase B8213 sequence
  cd03768,PTHR30461:SF3,SM00857,G3DSA:1.10.10.2600,IPR036162, PS51737,G3DSA:3.40.50.1390,IPR006119,IPR038109,PF07508, SSF53041,IPR011109,PTHR30461,PS51736,Coil, PF00239
MNYERSYLRSCQVSTLEQKEHGYSIEEQERKLKSFCEINDWSVSDVFIDAGFSGAKRERPELQRMMNDIKRFDLILVYKLDRLTRNVRDLLDLLEIFEQNNVAFRSATEVYDTSTAMGRLFVTLVGAMAEWERETIRERVMMGKRAAIKQGMILTPPPFYYDRVDNTYIPNDYKKVVLWAYDEVLKGVSSKGIARKLNDSDIPPPNGKRWEDRTITRALRSPITRGHYTWGDVFIENSHEPIITEEMYQQIKERLEERINTKIVSHVSVFRGKFICPRCGGTLTMNTATRKRKKGYVTYKTYYCNTCKVKKESFGFAENEALRVFRDYLSKLDLEEYEVKTKQKDDVVTIDIDKIMEQRKRYHKLYAKGLMQEEELFELIKETDETIAEYEKQKELAPRKTLNVDKIKKFKNALLESWKIFSLEDKADFIKMAIKSIDIDYVKLKNRHSIKINDIEFY

SEQ ID NO: 8213 - protein, 458 aa, Unknown
  Description of Unknown: Integrase B8214 sequence
  cd03768,PTHR30461:SF3,SM00857,G3DSA:1.10.10.2600,IPR036162, PS51737,G3DSA:3.40.50.1390,IPR006119,IPR038109,PF07508, IPR011109,SSF53041,PTHR30461,PS51736,Coil, PF00239
MNYERSYLRSCQVSTLEQKEHGYSIEEQERKLKSFCEINDWSVSDVFIDAGFSGAKRERPELQRMMNDIKRFDLVLVYKLDRLTRNVRDLLDLLEIFEQNNVAFRSATEVYDTSTAMGRLFVTLVGAMAEWERETIRERVMMGKRAAIKQGMILTPPPFYYDRVDNTYIPNDYKKVVLWAYDEVMKGNSSKAIARKLNDSDIPPPNGKRWEDRTITRALRSPITRGHYTWGDVFIENSHEPIITEEMYQQIKERLEERINTKIVSHVSVFRGKFICPKCGGTLTMNTATRKRKKGYVTYKTYYCNTCKVKKESFGFAENEALRVFRDYLSKLDLEEYEVKTKQKDDVVTIDIDKIMEQRKRYHKLYAKGLMQEEELFELIKETDETIAEYEKQKELVPSKTLDVAKIKKFKNALLESWKIFSLEDKADFIKMAIKSIDIDYVKLKNRHSIKINDIEFY

SEQ ID NO: 8214 - protein, 458 aa, Unknown
  Description of Unknown: Integrase B8215 sequence
  cd03768,PTHR30461:SF3,SM00857,G3DSA:1.10.10.2600,IPR036162, PS51737,G3DSA:3.40.50.1390,IPR006119,IPR038109,PF07508, SSF53041,IPR011109,PTHR30461,PS51736,Coil, PF00239
MNYERSYLRSCQVSTLEQKEHGYSIEEQERKLKSFCEINDWSVSDVFIDAGFSGAKRDRPELQRMMNDIKRFDLVLVYKLDRLTRNVRDLLDLLEVFEQNNVAFRSATEVYDTSTAMGRLFVTLVGAMAEWERETIRERVMMGKRAAIKQGMILTPPPFYYDRVDNTYIPNDYKKVVLWAYNEVMKGNSSKAIARKLNDSDIPPPNGKRWEDRTITRALRSPITRGHYTWGDVFIENSHEPIITEKMYQQIKERLEERINTKIVSHVSVFRGKFICPRCGGTLTLNTVTRKRKKGYVTYKTYYCNTCKAKKESFGFSENEALRVFRDYLSKLDLDKYKVKTKQNDDVVTIDIDKIMEQRKRYHKLYAKGLMQEEELFELIKETDETIAEYEKQRELVPRKSLDIDKIKKFKNALLESWEIFSLEDKADFIKMAIKSIDIKYVKLKNRHSIKISDIEFY

SEQ ID NO: 8215 - protein, 458 aa, Unknown
  Description of Unknown: Integrase B8216 sequence
  PTHR30461:SF3,cd00338,SM00857,IPR006118,IPR036162, PF13408,IPR025827,G3DSA:3.40.50.1390,PS51737,IPR006119, IPR011109,SSF53041,PTHR30461,PS00397,PS51736, Coil,PF00239
MKRILRAALYIRVSTEEQAKEGESLPAQESALVEYANEHGYRIVDIYKDAGVSGTRKVEKRPEMMRLLEDVKQDKIDIVLFIKINRWFRSVSEYWRVQRILDDHDVMWNAITEDFKNETAMDKAMINFALTFSEYFAGVQGEHIRFTLERMAKNGEPITGNQPYGYMIIQGPKHKMIAKDLSTGDYIPDMYQKYIECHNIAETTRYLNAKYPDQKFAETYTTRRRICTRAYTGYHWARPDYYPPYVTQETFDEANAILKARAERQAHSKHTPPKLFSGLIICPCCGRRLATTYKKPTKGYPNGFRKYRCSMAWNRTGKCSYRHELYQWVIEKYCVEHAMSELKSFTLKAKTIDTEALKTEQEREKLEAQLERLNDMYLYGKMDFEYYKRHMDEVTDKLDRIKRGVKPADRSVEELEALHIDNFESAYAALNEENRAMFWHKLLKGITVEKTHVTGLIF

SEQ ID NO: 8216 - protein, 458 aa, Unknown
  Description of Unknown: Integrase B8217 sequence
  cd03768,PTHR30461:SF3,SM00857,G3DSA:1.10.10.2600,IPR036162, PS51737,G3DSA:3.40.50.1390,IPR006119,IPR038109,PF07508, IPR011109,SSF53041,PTHR30461,PS51736,Coil, PF00239
MNYERSYLRSCQVSTLEQKEHGYSIEEQERKLKSFCEINDWSVSDVFIDAGFSGAKRDRPELQRMMNDIKRFDLVLVYKLDRLTRNVRDLLDLLEVFEQNNVAFRSATEVYDTSTAMGRLFVTLVGAMAEWERETIRERVMMGKRAAIKQGMILTPPPFYYDRVDNTYIPNDYKKVVLWAYDEVMKGVSSKGIARKLNDSDIPPPNGKRWEDRTITRALRSPITRGHYTWGDVFIENSHEPIITEEMYQQIKERLEERINTKIVSHVSVFRGKFICPRCGGTLTLNTVTRKRKKGYVTYKTYYCNTCKAKKESFGFSENEALRVFRDYLSELDLDKYKVKTKQNDDVVTIDIDKIMEQRKRYHKLYAKGLMQEEELFELIKETDETIAEYEKQKELVPRKSLDIDKIKKFKNALLESWEIFSLEDKADFIKMAIKSIDIEYAKLKNRHSIEIKDIEFY

SEQ ID NO: 8217 - protein, 458 aa, Unknown
  Description of Unknown: Integrase B8218 sequence
  PTHR30461:SF3,SM00857,G3DSA:1.10.10.2600,IPR036162,PS51737, G3DSA:3.40.50.1390,IPR006119,IPR038109,IPR011109,SSF53041, PTHR30461,PS51736,cd00338,PF00239
MTFLVENPYDRVLRAALYERVSTTEQSMNGYSIDAQKDNLEEHAKKNNMKIVGHYTDAGISGTKPPLKRPDLKRLLDDVEAGKVDIILFTKLDRWFRSVKEYFKVQEILDTYGVQWRAIHENYDTTTANGQMAITMFLAIAQNERDRTAERIKVVLEHKRKNKEACFGGNAIPLGYKKEADENGVMRLVKDPETQQAVEEFWDIMIKTNNLNKAIRHMVNAYGINKDWKSWMRMTRSDFYCGIHRGVQDYCEPYVSPEDFLALHEKRPQKATPTGRIYLLRGLIRCPECCQKLCGDADTRKNKVYKTYRCAYRARGCSNHGSYSELKLMKQLVNGLDGYLREEIAAAEIELAKPRPKPKTNIKELKEKQRRLTVAYMAGNKTDKEYLQEDAELKSLIAKAEKTAPPEPRNIQPLKDLLESDFKSIYESLTEEEKQLFWTKLIKEIKLDGKQIKRVIFF

SEQ ID NO: 8218 - protein, 458 aa, Unknown
  Description of Unknown: Integrase B8219 sequence
  PTHR30461:SF3,SM00857,IPR006118,IPR036162, PF13408,IPR025827,PS51737,G3DSA:3.40.50.1390, IPR006119,IPR011109,SSF53041,PF00239, PTHR30461,PS00397,PS51736,Coil,cd00338
MKRILRAALYIRVSTEEQAKEGESLPAQESALVEYANEHGYRIVDIYKDAGVSGTRKVEKRPEMMRLLEDVKQDKIDIVLFIKINRWFRSVSEYWRVQRILDDHNVMWNAITEDFKNETAMDKAMINFALTFSEYFAGVQGEHIRFTLERMAKNGEPISGNQPYGYMIIQGPKHKMIAKDLSTGDYIPDMYQKYIECHNIAETTRYLNAKYPDQKFAETYTTRRRICTRAYTGYHWARPDYYPPYITQETFDEANAILKARAERQAHSKHTPPKLFSGLIICPDCGRRLATTYKKPTKGYPNGYRKYRCSMAWNRTGKCSYRHELYQWVIEKYCVEHAMSELKSFTLKAKTIDTEALKTEQEREKLEAQLERLNDMYLYGKMDFEYYKRHMDEVTDKLDRIKRGVKPADRSVEELEALHIDNFESAYAALNEENRAMFWHKLLKGITVEKTHVTGLIF

SEQ ID NO: 8219 - protein, 458 aa, Unknown
  Description of Unknown: Integrase B8220 sequence
  cd03768,PTHR30461:SF3,SM00857,G3DSA:1.10.10.2600,IPR036162, PS51737,G3DSA:3.40.50.1390,IPR006119,IPR038109,PF07508, IPR011109,SSF53041,PTHR30461,PS51736,Coil, PF00239
MNYERSYLRSCQVSTLEQKEHGYSIEEQERKLKSFCEINDWSVSDVFIDAGFSGAKRDRPELQRMMNDIKRFDLVLVYKLDRLTRNVRDLLDLLEVFEQNNVAFRSATEVYDTSTAMGRLFVTLVGAMAEWERETIRERVMMGKRAAIKQGMILTPPPFYYDRVDNTYIPNDYKKVVLWAYDEVMKGNSSKAIARKLNDSDIPPPNGKRWEDRTITRALRNPITRGHYTWGDVFIENSHEPIITEEMYQQIKERLEERINTKIVSHVSVFRGKFICPRCGGTLTLNTVTRKRKKGYVTYKTYYCNTCKTKKQSFGFSENEALRVFRDYLSKLDLDKYEVKTNQKDDVVTIDIDKIMEQRKRYHKLYAKGLMQEEELFELIKETDETIAEYEKQKELVPSKTLDVDKIKKFKNALLESWEIFSLEDKADFIKMAIKSIDIEYVKLKNRHSIKINDIEFY

SEQ ID NO: 8220 - protein, 458 aa, Unknown
  Description of Unknown: Integrase B8221 sequence
  PTHR30461:SF3,SM00857,IPR036162,PF13408,IPR025827, PS51737,G3DSA:3.40.50.1390,IPR006119,SSF53041,IPR011109, PTHR30461,Coil,PS51736,cd00338,PF00239
MKEKIIRCAIYDRVSTDGQVKDGLSLDAQEEALTEYALSHHYKIVDYYADEGITARKKMQNRKDLIRLLNDVKADKIDLILVTKLDRWFRNVKDYHNTQAILEAHNCNWKTIFEEYDTSTSNGRFAINIMLSVNENECDRDSDRIKNVFEYKKKQREHLNGKPAYGYISVKKKLVKDPETQYIVEDTFKHYFSCYSKNATIKYILEKYANETNPPTMYQVKRILTCETYAGRKYGIDNYCESYITWDQYKKIVSTSDAKIIPHQTEPFLFSSMIKCPICGKNMSGFVKRQKLKNGNVSEYKRYRCGAKFTEYHNGACISESVIEAYLLDNVMGELDRELLQIKSKEQEEKQRKPAANPVKIMNEISRLNIMYQKGRINDDYYDKQYAILNDKLSAAQQPQERTSIESYTSILETLNDGWYEMYKKLDITHKKAFWKGIIKEIYVDKDSRQICGFKFLL

SEQ ID NO: 8221 - protein, 458 aa, Unknown
  Description of Unknown: Integrase B8222 sequence
  cd03768,PTHR30461:SF3,SM00857,G3DSA:1.10.10.2600, IPR036162,PS51737,G3DSA:3.40.50.1390,IPR006119, IPR038109,PF07508,IPR011109,SSF53041, PTHR30461,PS51736,Coil,PF00239
MNYERSYLRSCQVSTLEQKEHGYSIEEQERKLKSFCEINDWSVSDVFIDAGFSGAKRDRPELQRMMNDIKRFDLVLVYKLDRLTRNVRDLLDLLEVFEQNNVAFRSATEVYDTSTAMGRLFVTLVGAMAEWERETIRERVMMGKRAAIKQGMILTPPPFYYDRVDNTYTPNDYKKVVLWAYDEVMKGNSSKAIARKLNDSDIPPPNGKRWEDRTITRSLRSPITRGHYTWGDVFIENSHEPIITEEMYQQIKERLEERINTKIVSHVSVFRGKFICPRCGGTLTLNTVTRKRKKGYVTYKTYYCNTCKTKKQSFGFSENEALRVFRDYLSKLDLDKYEVKTNQKDDVVTIDIDKIMEQRKRYHKLYAKGLMQEEELFELIKETDETIAEYEKQKELVPSKTLDVDKIKKFKNALLESWEIFSLEDKADFIKMAIKSIDIEYVKLKNRHSIKINDIEFY

SEQ ID NO: 8222 - protein, 458 aa, Unknown
  Description of Unknown: Integrase B8223 sequence
  PTHR30461:SF3,SM00857,G3DSA:1.10.10.2600,IPR036162,PF13408, IPR025827,G3DSA:3.40.50.1390,PS51737,IPR006119,IPR038109, PF07508,IPR011109,SSF53041,PTHR30461,PS51736, cd00338,PF00239
MKKAKSETTLVRAALYIRVSGEEQKIKGLSLEAQEERLRDFCKERGWLICGVFIDAAKTARKNIRKRIEFQHMIEGVKKDQYDILVFCRLDRWFRSVADYYKIMDILNAHNCGWVTSDEDYDTTTANGRLYINVKLSIAQNESDICSERISVVFDSKIQHGTVLSGFSPFWLDVKDKKLVVNDERAAIVRDAIDYFEKDMTQNGTVRYIRNKYGINWDINMLKRIFKNKLLIGVYDSNGRYNDHFCDPIISVDQFNRVQSIFDKRIKVVPTKRVYIFTSILKCPVCGCRLSGQAAGTNTRYYYRCNRHFIRKDCSYGKITNERLIEKWLLENLKSKLSECEVAWSVKQAKKKLEPSAKQKASLKRKLSKLKDLYLNELIDLDDYKRDYIMYSSALSELSTSQKEETPPDFAAVHRILDNDFLSTYNTMDRTEKRTFWQSIIKEMVLDDNGHVTSLSFV

SEQ ID NO: 8223 - protein, 458 aa, Unknown
  Description of Unknown: Integrase B8224 sequence
  cd03768,SM00857,G3DSA:1.10.10.2600,IPR036162,PS51737, G3DSA:3.40.50.1390,IPR006119,IPR038109,PF07508,IPR011109, SSF53041,PTHR30461,PS51736,Coil,PF00239
MKVAIYTRVSTLEQANEGYSIGEQERKLKQFCDINDWKVVDVYVDAGISGGSLKRPSLQKLLNDIDKFDMILVYKLDRLTRSVRDLLDLLEIFDQNNVAFRSATEVYDTTNAMGRLFVTLVGAMAEWERATTRERTLYGKEGALESGKYLGHVPFYYDLVDNKLIPNENRKYVDYIIKRLKENISATQIGKELSNMKDTPVKFNKTMVIQILHSPTAHGHTKYGKFFKENTHEPVITQEDYNTAIKILSTRRHTYKQNHTSIFRGKIECPNNCGRFLHLNVNKIKRADGSYYLRQYYKCDKCSREKKPSTIIRYDMMQQAFMKYLNNLSFDTIEPPENNDDQEQFEIDIAKVMRQREKYQKAWAMDLMTDDEFKARMKETDTLLKQASEKEVENNELEFEQVVKIQKLLQKSWKNLSEDKKEDLIAATIDKIQIELIRGNKTVNSPNEVKIKDVSFLL

SEQ ID NO: 8224 - protein, 458 aa, Unknown
  Description of Unknown: Integrase B8225 sequence
  PTHR30461:SF3,IPR036162,PS51737,IPR011109,PTHR30461, PS00397,PF00239,G3DSA:1.10.10.2600,IPR006119,SSF53041, cd00338,SM00857,IPR025827,IPR038109, PS51736,IPR006118,PF13408,G3DSA:3.40.50.1390,PF07508,Coil
MLRVALYIRVSTDEQALHGDSIATQKDALTFYARSNNMNIIDYYIDEGYTATNLKRPNLQRLLNDVKENKIDMILFTKIDRWSRGVRNYYKIQDILDANKVNWKTIFEDYDTSTASGRLHINIMLSVAENESAQTSERIKAVFKNKLAKGEVCSGKIPRGYKIENKKLVVDHEVAPMIQDIFNYYESVNSLNKLVDYVKNNYYHIHQLTLKRILTNTLYKGTHTSEYAVTENYCEAIISETQFDNVQRLLTINQKKYNNKFSDSIYLFSGLLICKECEHKLVGNRQIKENKTRGKYIYKVYKCQNHFKEHVCPNNYNIPEENILEKYLVDNIQSELKKYIIQYNRENSKKTYINLSNKKGALKRKLERLKDLYIDELIDKETYKNDYEKLTNELNKLKEENKNKIIPFNKNKIDEILNVNLKEDYYKLNENARRSFWTSIIDKIIIGNNRNDITIHFL

SEQ ID NO: 8225 - protein, 458 aa, Unknown
  Description of Unknown: Integrase B8226 sequence
  cd03768,PTHR30461:SF3,SM00857,G3DSA:1.10.10.2600,IPR036162, PS51737,G3DSA:3.40.50.1390,IPR006119,IPR038109,PF07508, IPR011109,SSF53041,PTHR30461,PS51736,Coil, PF00239
MNYERRYLRSCQVSTLEQKEHGYSIEEQERKLKSFCEINDWSVSDVFIDAGFSGAKRDRPELQRMMNDIKRFDLVLVYKLDRLTRNVRDLLDLLEIFERNNVAFRSATEVYDTSTAMGRLFVTLVGAMAEWERETIRERVMMGKRAAIKQGMILTPPPFYYDRVDNTYIPNDYKKVVLWAYDEVMKGNSSKAIARKLNDSDIPPPNGKRWEDRTITRALRNPITRGHYTWGDVFIENSHEPIITEEMYQQIKERLEERINTKIVSHVSVFRGKFICPRCGGTLTMNTATRKRKKGYVTYKTYYCNTCKTRKQSFGFSENEALRVFRDYLSKLDLDKYEVKTKQKDDVVTIDIDKIMEQRKRYHKLYAKGLMQEEELFELIKETDETIAEYEKQKELVPRKILDIDKIKSFKNVLLESWNIFSLEDKADFIKMAIKSIDIEYVELKNRHSIEIKEIEFY

SEQ ID NO: 8226 - protein, 458 aa, Unknown
  Description of Unknown: Integrase B8227 sequence
  PTHR30461:SF3,SM00857,IPR006118,IPR036162,PF13408, PS51737,IPR025827,G3DSA:3.40.50.1390,IPR006119,IPR011109, SSF53041,PF00239,PTHR30461,PS00397,PS51736, Coil,cd00338
MKRILRAALYIRVSTEEQAKEGESLPAQESALVEYANEHGYRIVDIYKDAGVSGTRKVEKRPEMMRLLEDVKQDKIDIVLFIKINRWFRSVSEYWRVQRILDDHNVMWNAITEDFKNETAMDKAMINFALTFSEYFAGVQGEHIRFTLERMAKNGEPISGNQPYGYMIIQGPKHKMIAKDLSTGDYIPDMYQKYIECHNIAETTRYLNAKYPDQKFAETYTTRRRICTRAYTGYHWARPDYYPPYVTQETFDEANTILKARAERQAHNRHTPPKLFSGLIICPDCGRKLATTYKKPTKGYPNGYRKYRCSMAWNRTGKCSYRHELYQWVIEKYCVEHAMSELKSFTLKAKTIDTEALKTEQEREKLEAQLERLNDMYLYGKMDFEYYKRHMDEVTDKLDRIKRGVKPADRSVEELEALHIDNFESAYATLNEENRAMFWHKLLKGITVEKTHVTGLIF

SEQ ID NO: 8227 - protein, 458 aa, Unknown
  Description of Unknown: Integrase B8228 sequence
  PTHR30461:SF3,SM00857,G3DSA:1.10.10.2600,IPR036162,PF13408, IPR025827,PS51737,G3DSA:3.40.50.1390,IPR006119,IPR038109, PF07508,IPR011109,SSF53041,PTHR30461,PS51736, cd00338,PF00239
MIKKELSSAGPLRVALYIRVSGEEQKIKGLSLEAQQERLEEYARQQGWVVVGTYIDAAKTARKDMRKRSEFQKMINAVKRDEIDLLLFCRLDRWFRSVADYYKIMEILQAHHCDWKTTDEEYDTSTANGRLYINVKLSIAQNEADICSERISVVFDSKVQHGTVVSGSCPFGYVVNEEKRLVIDPDAAAIVRDAFNYYESSISQRGTIRHIRETYGVNWCDATFRRMLSERLYTGVYDSRGRYNENFCEPIISKEQFEHVRALTSRNARSVPSGKVYIFTSVLKCAECNHNLVGYVTGPYYYYRCNQHFQRDRCSHNKSVRESYVEEWLFEHLGEELERCKLEWDVQAAERKKKMRSTDKAVLKRKLTKLKELYMDDLINIEEYKKDYQIYTAALQQIPDETPEETPPDFSAVERMLQADFKSIYDSLTREEKRTLWRSVISEIRVDRDNNITGIIFG

SEQ ID NO: 8228 - protein, 458 aa, Unknown
  Description of Unknown: Integrase B8229 sequence
  PTHR30461:SF3,cd00338,SM00857,IPR006118,IPR036162, PF13408,IPR025827,PS51737,G3DSA:3.40.50.1390,IPR006119, SSF53041,IPR011109,PTHR30461,PS00397,PS51736, Coil,PF00239
MKRILRAALYIRVSTEEQAKEGESLPAQESALVEYANEHGYRIVDIYKDAGVSGTRKVEKRPEMMRLLEDVKQDKIDIVLFIKINRWFRSVSEYWRVQRILDDHSVMWNAITEDFKNETAMDKAMINFALTFSEYFAGVQGEHIRFTLERMAKNGEPISGNQPYGYMIIQGPKHKMIAKDLSTGDYIPDMYQKYIECHNIAETTRYLNAKYPDQKFAETYTTRRRICTRAYTGYHWARPEYYPPYVTQETFDEANAILKARAERQAHSKHTPPKLFSGLIICPCCGRRLATTYKKPTKGYPNGFRKYRCSMAWNRTGKCSYRHELYQWVIEKYCVEHAMSELKSFTLKAKTIDTEALKTEQEREKLEAQLERLNDMYLYGKMDFEYYKRHMDEVTDKLDRIKRGVKPADRSVDELEALHIDNFESAYAALNEENRAMFWHKLLKGITVEKTHVTGLIF

SEQ ID NO: 8229 - protein, 458 aa, Unknown
  Description of Unknown: Integrase B8230 sequence
  cd03768,PTHR30461:SF3,SM00857,G3DSA:1.10.10.2600,IPR036162, PS51737,G3DSA:3.40.50.1390,IPR006119,IPR038109,PF07508, IPR011109,SSF53041,PTHR30461,PS51736,Coil, PF00239
MNYERSYLRSCQVSTLEQKEHGYSIEEQERKLKSFCEINDWSVSDVFIDAGFSGAKRERPELQRMMNDIKRFDLVLVYKLDRLTRNVRDLLDLLEIFEQNNVAFRSATEVYDTSTAMGRLFVTLVGAMAEWERETIRERVMMGKRAAIKQGMILTPPPFYYDRVDNTYIPNDYKKVVLWAYDEVMKGVSSKAIARKLNDSDIPPPNGKRWEDRTITRALRSPITRGHYTWGDVFIENSHEPIITEEMYQQIKERLEERINTKIVSHVSVFRGKFICPRCGGTLTMNTATRKRKKGYVTYKTYYCNTCKTKKQSFGFSENEALRVFRDYLSKLDLDKYEVKTKQNDDVVTIDIDKIMEQRKRYHKLYAKGLMQEEELFELIKETDETIAEYEKQKELVPRKTLDIDKIKGFKNVLLESWKIFSLEDKADFIKMAIKSIDIEYINLKNRHSIEIKDIEFY

SEQ ID NO: 8230 - protein, 458 aa, Unknown
  Description of Unknown: Integrase B8231 sequence
  cd03768,PTHR30461:SF3,SM00857,G3DSA:1.10.10.2600,IPR036162, PS51737,G3DSA:3.40.50.1390,IPR006119,IPR038109,PF07508, IPR011109,SSF53041,PTHR30461,PS51736,Coil, PF00239
MNYERSYLRSCQVSTLEQKEHGYSIEEQERKLKSFCEINDWSISDVFIDAGFSGAKRERPELKRMMNDIKRFDLVLVYKLDRLTRNVRDLLDLLEIFEQNNVAFRSATEVYDTSTAMGRLFVTLVGAMAEWERETIRERVMMGKRAAIKQGMILTPPPFYYDRVDNTYIPNDYKKVVLWAYDEVLKGVSSKGIARKLNDSDIPPPNGKKWEDRTITRALRSPITRGHYTWGDVFIENSHEPIITEEMYQQIKERLEERINTKIVSHVSVFRGKFICPRCGGTLTMNTATRKRKKGYVTYKTYYCNTCKTKKQSFGFSENEALRVFRDYLSKLDLEKYEVKTKQNDDVVTIDIDKVMEQRKRYHKLYAKGLMQEEELFELIKETDETIAEYEKQKELAPRKTLNVDKIKKFKSVLLESWEIFSLEDRADFIKMAIKSIDIDYVKLKNRHSIKINDIEFY

SEQ ID NO: 8231 - protein, 457 aa, Unknown
  Description of Unknown: Integrase B8232 sequence
  PTHR30461:SF3,SM00857,G3DSA:1.10.10.2600,IPR036162,PF13408, IPR025827,G3DSA:3.40.50.1390,PS51737,IPR006119,IPR038109, PF07508,IPR011109,SSF53041,PTHR30461,PS51736, cd00338,PF00239
MIKKELSTGPLRVALYIRVSGEEQKIKGLSLEAQQERLEEYARQQGWVVVGIYIDAAKTARKDMRKRSEFQKMINSVKRDEIDLLLFCRLDRWFRSVADYYKIMEILQAHHCDWKTTDEEYDTSTANGRLYINVKLSIAQNEADICSERISVVFDSKVQHGTVVSGNCPFGYVVNEEKRLVIDPDAAAIVRDAFNYYESSISQRGTIRHIRETYGVNWCDATFRRMLSERLYTGVYDSRGRYNENFCEPIISKEQFEHVQVLIGRNARSVPSGKVYIFTSVLKCAECNHNLVGYVTGPYYYYRCNQHFQRGRCSHNKSVRESYVEEWLFEHLGEELERCKLEWDVQAAERKKKMHSTDKAVLKRKLTKLKELYMDDLINIEEYKKDYQIYTAALQQIPDETPEETPPDFSAVERMLQADFKSIYDSLTREEKRTLWRSVISEIRVDRDNNITGIIFG

SEQ ID NO: 8232 - protein, 457 aa, Unknown
  Description of Unknown: Integrase B8233 sequence
  SM00857,IPR006118,IPR036162,PF13408,PS51737, G3DSA:3.40.50.1390,IPR025827,Coil,IPR006119,IPR011109, SSF53041,PTHR30461,PS00397,PS51736,cd00338, PF00239
MLKTPPACRAGIYIRVSTEEQHLNGLSLPAQRMALEDYASKNGYIIVGVYADEGISARKSMSHRKGLLRLLEDVRQNKIDMILVTKLDRWFRNIKDYNITEEILREHHCYWKTIFENYDSSTANGQMVINIMLSVNQAECDRTSERIKAVFDYKRAKGMCVTGKCAPYGYIIENGYIKKDPATRSIVEDAIQYYFSCFSIRHTTRYIADKYGENGPSYYKVDKIFHNPKYAGIDKDGKPYCEPYMTMDQYHALLKSRQAKSWSPSGYTYIFSSLITCPICGCKFSGRQRKAVRKNGNVYCDTRYNCMGKFRYHSGASLRESAIEEYLLEHMDSILEAARIDICLEPSGASAKPARSTQSIQDEINRLNTMYQKGRLSDDYYDQEYIRLTAALSEVSDQKAELQKKNLKCVSERFSGDWKSLYVRLDNEHKRAFWKQTIEEILVDPETRQIKDVKLLL

SEQ ID NO: 8233 - protein, 457 aa, Unknown
  Description of Unknown: Integrase B8234 sequence
  SM00857,G3DSA:1.10.10.2600,IPR036162,PF13408,PS51737, G3DSA:3.40.50.1390,IPR025827,IPR006119,IPR038109,PF07508, SSF53041,IPR011109,PTHR30461,PS51736,cd00338, PF00239
MIKKELSTGPLRVALYIRVSGEEQKIKGLSLEAQQERLEEYARQQGWVVVGIYIDAAKTARKDMRKRSEFQKMINAVKRDEIDLLLFCRLDRWFRSVADYYKIMEILQTHHCDWKTTDEEYDTSTANGRLYINVKLSIAQNEADICSERISVVFDSKVQHGTVVSGNCPFGYVVNEEKRLAIDPDAAAIVRDAFNYYESSISQRGTIRHIRETYGVNWCDATFRRMLAERLYTGAYDSKGRYNENFCEAIISKEQFERVQVLTSRNARSVPSGKVYIFTSILKCAECNHNLVGYVAGPYYYYRCNQHFQRGRCSHNKSVRESYVEEWLFEHLGEELERCKLEWDVQAAERKKKTRSTDKAVLKRKLTKLKELYMDDLITIEEYKKDYQIYTAALQQIPDETPEETPPDFSAVERMLQADFKSIYDSLTREEKRTLWRSVISEIRVDRDNNITGIIFG

SEQ ID NO: 8234 - protein, 457 aa, Unknown
  Description of Unknown: Integrase B8235 sequence
  PTHR30461:SF3,IPR036162,PS51737,IPR011109,PTHR30461, PS00397,PF00239,G3DSA:1.10.10.2600,IPR006119,SSF53041, SM00857,IPR025827,IPR038109,PS51736,cd03768, IPR006118,PF13408,G3DSA:3.40.50.1390,PF07508,Coil
MIKGACYVRVSTDNQLENYSIEEQTDRLRAYCKAKDIHIVKFYTDGGYSGGNLNRPALQQMLTDIDYGIIDLVVVYKLDRLSRSQKDTLTLIEDCFLSKNVDFISINENFDTSTPFGRAMIGILSVFAQLEKDQITERFTMGRIGRAKSGYFHGGPTAPTGYDYIDGNLIVNEYEAMQVRDLYARFLKGYSVYDCWQYMQKKYTTKYGGWKSETLVRNVLKNEVYTGKVKFKGTIYHGNHPAIIPEAQFRQVQELFSSSHRSSDTFKRSPFKASTLLASLIYCGKCGARFHGEHGNYSCYSRTKGDKKYIIDPNCRNKKWKIPELDALVTDYIARLNFSDLENKTPSPQPPIDYSARLGEIDRQIGKLIDLYQVGSIPIETISKKIEILSKEKSTLEEAARQKSTPSSSLKEMITARSTFMSIIKTGTLEEKRACLTLLIDRIVIDDDNVNIILHKI

SEQ ID NO: 8235 - protein, 457 aa, Unknown
  Description of Unknown: Integrase B8236 sequence
  PTHR30461:SF3,SM00857,G3DSA:1.10.10.2600,IPR036162,PF13408, PS51737,IPR025827,G3DSA:3.40.50.1390,IPR006119,IPR038109, SSF53041,IPR011109,PTHR30461,Coil,PS51736, cd00338,PF00239
MECVAYMRVSTEKQAEEGNGLESQKRDIENYCKKNEYIITDYYIDDGYTGANMDRPELQRLISDCVAKRIKCVVTFKLDRLSRSMVDGIYIIERVFQANNILFKCVHDSISYDSPMEQAYTQMMAVFAQLDKNTMMLRMRGGMLERVKQGYWMGGGNTPYCYNYDKEKGILVAIPERKKQANQALDLFIDGYSDAAIKKMLNFKHEHTVKMILTSPVNVGMIPYKGNLYQGLHEPIFDKDRFQLAQEVRKNRRKKKTVSLNKEPNLLTGLCYCGVCGCKMRYQKWGSESDAPKKIYCCSRNKDLFYLPNYNKDCDNSIEWAANIEKQVEAEIMKISLNLSSQKPVAKQSKIEIIQSQIKKEENRRKRLFNLYADGNDDVLDMIKQSDDTISSLKEQLETELSSKEANKKKSVAYENIKKIADVWDNIDKRNKNMILKSIIDKIIIVNGDIEIQLKNF

SEQ ID NO: 8236 - protein, 457 aa, Unknown
  Description of Unknown: Integrase B8237 sequence
  PTHR30461:SF3,SM00857,G3DSA:1.10.10.2600,IPR036162,PF13408, IPR025827,G3DSA:3.40.50.1390,PS51737,IPR006119,IPR038109, SSF53041,IPR011109,PTHR30461,PS51736,cd00338, PF00239
MECVAYMRVSTEKQAEDGNGLESQKRDIDNYCNKNGYIISDYYIDDGYTGANMDRPELQRLISDCVAKRIKCVVAFKLDRLSRSMVDGIYIIERVFQANNILFKCVHDSISYDSPMEQAYTQMMAVFAQLDKNTMMLRMRGGMLERVKQGYWMGGGNTPYCYKYDKEKGILVPIPERKEQANQALDLFIDGYSDVAIKKMLNFTHEHTVKMVLTSPVNIGMIPYKGNLYKGLHEPIFDKDRFQLAQEARKNRRKKKTVSLNKEPNLLTGLCYCGVCGCKMRYQKWGSESDAPKKIYCCSRNKDLFYLPNYNKDCDNSIEWATDIEKQVEAEIIKISLNLSSQKPIAKQSKIDIIQSQIKKEKYRRKRLFNLYADGNDDVLNIIKQSDDTISSLKEQLEIELLSKEANKKKSIAYENIKKIADVWDSIDKRNKNMILKTIIDKIIIVNGDIEIQLKNF

SEQ ID NO: 8237 - protein, 457 aa, Unknown
  Description of Unknown: Integrase B8238 sequence
  SM00857,IPR006118,IPR036162,PF13408,IPR025827, PS51737,G3DSA:3.40.50.1390,Coil,IPR006119,IPR011109, SSF53041,PTHR30461,PS00397,PS51736,cd00338, PF00239
MLKTPPACRAGIYIRVSTEEQHLNGLSLPAQRMALEDYASKNGYIIVGVYADEGISARKSMSHRKGLLRLLEDVRQNKIDMILVTKLDRWFRNIKDYNITEEILREHHCYWKTIFENYDSSTANGQMVINIMLSVNQAECDRTSERIKAVFDYKRAKGMCVTGKCAPYGYIIENGYIKKDPATRSIVEDAIQYYFSCFSIRHTTRYIADKYGENGPSYYKVDKIFHNPKYAGIDKDGKPYCEPYMTRDQYHALLKSRQAKSWSPSGYTYIFSSLITCPICGCKFSGRQRKAVRKNGNVYCDTRYNCMGKFRYHSGASLRESAIEEYLLEHMDSILEAARIDICLEPSGASAKPTRSTQSIQDEINRLNTMYQKGRLSDDYYDQEYIRLTAALSEVSDQKAELQKKNLKCVSERFSGDWKSLYVRLDNEHKRAFWKQTIEEILVDPETRQIKDVKLLL

SEQ ID NO: 8238 - protein, 457 aa, Unknown
  Description of Unknown: Integrase B8239 sequence
  PTHR30461:SF3,SM00857,G3DSA:1.10.10.2600,IPR036162,PF13408, IPR025827,PS51737,G3DSA:3.40.50.1390,IPR006119,IPR038109, SSF53041,IPR011109,PTHR30461,PS51736,cd00338, PF00239
MECVAYMRVSTEKQAEDGNGLESQKRDIDNYCNKNGYIISDYYIDDGYTGANMDRPQLQRLISDCVSKRVKCVVAFKLDRLSRSMVDGIYIIERVFQANNILFKCVHDSISYDSPMEQAYTQMMAVFAQLDKNTMMLRMRGGMLERVKQGYWMGGGNTPYCYKYDKEKGILVPIPERKEQANQALDLFIDGYSDVAIKKMLNFTHEHTVKMVLTSPVNIGMIPYKGNLYKGLHEPIFDKDRFQLAQEARKNRRKKKTVSLNKEPNLLTGLCYCGVCGCKMRYQKWGSESDAPKKIYCCSRNKDLFYLPNYNRDCDNSIEWATDIEKQVEAEIIKISLNLSSQKPIAKQSKIDIIQSQIKKEKYRRKRLFNLYADGNDDVLNIIKQSDDTISSLKEQLEIELLSKEANKKKSIAYENIKKIADVWDSIDKRNKNMILKTIIDKIIIVNGDIEIQLKNF

SEQ ID NO: 8239 - protein, 457 aa, Unknown
  Description of Unknown: Integrase B8240 sequence
  PTHR30461:SF3,SM00857,G3DSA:1.10.10.2600,IPR036162,PF13408, IPR025827,PS51737,G3DSA:3.40.50.1390,IPR006119,IPR038109, PF07508,IPR011109,SSF53041,PTHR30461,Coil, PS51736,cd00338,PF00239
MDNIKRAGLYIRVSHEEQVKDGFSLDAQKDNLIKYAKQNNYKIIDIYADEGISARKSYTKRKEFMRLIEDVKSNKIDIILFIKLDRWFRNVAEYHKIQEILEKYNVGWKATTENYDTTTANGRLYLNIRLAVAQDEADRTSERIKFVFEKKIQDGEYLSGKPTFGYKVENKHLVIDEEEAKVVRFVFETYLKLKSKRATVFATIKEFQRDFTYKVINCIFTNEKYIGKFRGNESYCDPIISKEVFETVQKTLKERRMRYSYSTSNKTNYNYIFSGIVRCPICGACLTGNKSSKINKTTGQKFKYYRCPNHLNQKSCLNSHTVNERNLENYLIENILQKLKDYKVEYQLKQKSKKTPNLNSKNKIENKIKRLQDLYVNELIEIEDYKKQYSKLKDELSQFEVIEEKEKDFTEIDNILNSDFEIIYNKLTPLNKRIFWQSIIEKITPTEDRNIFNIFLK

SEQ ID NO: 8240 - protein, 457 aa, Unknown
  Description of Unknown: Integrase B8241 sequence
  SM00857,IPR006118,IPR036162,PF13408,IPR025827, PS51737,G3DSA:3.40.50.1390,Coil,IPR006119,IPR011109, SSF53041,PTHR30461,PS00397,PS51736,cd00338, PF00239
MLKTPPACRAGIYIRVSTEEQHLNGLSLPAQRMALEDYASKNGYIIVGVYADEGISARKSMSHRKGLLRLLEDVRQNKIDMILVTKLDRWFRNIKDYNITEEILREHHCYWKTIFENYDSSTANGQMVINIMLSVNQAECDRTSERIKAVFDYKRAKGMCVTGKCAPYGYIIENGYIKKDPATRSIVEDAIQYYFSCFSIRHTTRYIADKYGENGPSYYKVDKIFHNPKYAGIDKDGKPYCEPYMTMDQYHTLLKSRQAKSWSPSGYTYIFSSLITCPICGCKFSGRQRKAVRKNGNVYCDTRYNCMGKFRYHSGASLRESAIEKYLLEHMDSILEAARIDICLEPSGVSAKPVRSTQSIQDEINRLNTMYQKGRLSDDYYDQEYIRLTAALSEVSDQKAELQKKNLKCVSERFSGDWKSLYVRLDNEHKRAFWKQTIEEILVDPETRQIKDVKLLL

SEQ ID NO: 8241 - protein, 457 aa, Unknown
  Description of Unknown: Integrase B8242 sequence
  PTHR30461:SF3,SM00857,G3DSA:1.10.10.2600,IPR036162,PF13408, IPR025827,G3DSA:3.40.50.1390,PS51737,IPR006119,IPR038109, IPR011109,SSF53041,PTHR30461,PS51736,cd00338, PF00239
MECVAYMRVSTEKQAEDGNGLESQKRDIDNYCNKNGYIIGDYYIDDGYTGANMDRPELQRLISDCVAKRIKCVVAFKLDRLSRSMVDGIYIIERVFQANNILFKCVHDSISYDSPMEQAYTQMMAVFAQLDKNTMMLRMRGGMLERVKQGYWMGGGNTPYCYKYDKEKGILVPIPERKEQANQALDLFIDGYSDVAIKKMLNFTHEHTVKMVLTSPVNIGMIPYKGNLYKGLHEPIFDKDRFQLAQEARKNRRKKKTVSLNKEPNLLTGLCYCGVCGCKMRYQKWGSESDAPKKIYCCSRNKDLFYLPNYNKDCDNSIEWATDIEKQVEAEIIKISLNLSSQKPIAKQSKIDIIQSQIKKEKYRRKRLFNLYADGNDDVLNIIKQSDDTISSLKEQLEIELLSKEANKKKSIAYENIKKIADVWDSIDKRNKNMILKTIIDKIIIVNGDIEIQLKNF

SEQ ID NO: 8242 - protein, 457 aa, Unknown
  Description of Unknown: Integrase B8243 sequence
  SM00857,G3DSA:1.10.10.2600,IPR036162,PF13408,PS51737, IPR025827,G3DSA:3.40.50.1390,IPR006119,IPR038109,PF07508, SSF53041,IPR011109,PTHR30461,PS51736,cd00338, PF00239
MIKKELSTGPLRVALYIRVSGEEQKIKGLSLEAQQERLEEYARQQGWVVVGIYIDAAKTARKDMRKRSEFQKMINAVKRDEIDLLLFCRLDRWFRSVADYYKIMEILQTHHCDWKTTDEEYDTSTANGRLYINVKLSIAQNEADICSERISVVFDSKVQHGTVVSGNCPFGYVVNEEKRLAIDPDAAAIVRDAFNYYESSISQRGTIRHIRETYGVNWCDATFRRMLAERLYTGVYDSKGRYNENFCEAIISKEQFERVQVLTSRNARSVPSGKVYIFTSILKCAECNHNLVGYVAGPYYYYRCNQHFQRGRCSHNKSVRESYVEEWLFEHLGEELERCKLEWDVQAAERKKKTRSTDKAVLKRKLTKLKELYMDDLITIEEYKKDYQIYTAALQQIPDEAPEETPPDFSAVERMLQTDFKSIYDSLTREEKRTLWRSVISEIRVDRDNNITGIIFG

SEQ ID NO: 8243 - protein, 457 aa, Unknown
  Description of Unknown: Integrase B8244 sequence
  SM00857,G3DSA:1.10.10.2600,IPR036162,PF13408,PS51737, IPR025827,G3DSA:3.40.50.1390,IPR006119,IPR038109,PF07508, IPR011109,SSF53041,PTHR30461,PS51736,cd00338, PF00239
MIKKELSTGPLRVALYIRVSGEEQKIKGLSLEAQQERLEEYARQQGWVVVGIYIDAAKTARKDMRKRSEFQKMINAVKRDEIDLLLFCRLDRWFRSVADYYKIMEILQTHHCDWKTTDEEYDTSTANGRLYINVKLSIAQNEADICSERISVVFDSKVQHGTVVSGNCPFGYVVNEEKRLAIDPDAAAIVRDAFNYYESSISQRGTIRHIRETYGVNWCDATFRRMLAERLYTGVYDSNGRYNENFCEAIISKEQFERVQVLTSRNARSVPSGKVYIFTSILKCAECNHNLVGYVAGPYYYYRCNQHFQRGRCSHNKSVRESYVEEWLFEHLGEELERCKLEWDVQAAERKKKTRSTDKAVLKRKLTKLKELYMDDLITIEEYKKDYQIYTAALQQIPDEAPEETPPDFSAVERMLQADFKSIYDSLTREEKRTLWRSVISEIRVDRDNNITGIIFG

SEQ ID NO: 8244 - protein, 457 aa, Unknown
  Description of Unknown: Integrase B8245 sequence
  PTHR30461:SF3,SM00857,G3DSA:1.10.10.2600,IPR036162,PF13408, PS51737,G3DSA:3.40.50.1390,IPR025827,IPR006119,IPR038109, SSF53041,IPR011109,PTHR30461,PS51736,cd00338, PF00239
MECVAYMRVSTEKQAEDGNGLESQKRDIDNYCNKNGYIISDYYIDDGYTGANMDRPELQRLISDCVAKRIKCVVAFKLDRLSRSMVDGIYIIERVFQANNILFKCVHDSISYDSPMEQAYTQMMAVFAQLDKNTMMLRMRGGMLERVKQGYWMGGGNTPYCYKYDKEKGILVPIPERKEQANQALDLFIDGYSDVAIKKMLNFTHEHTVKMVLTSPVNIGMIPYKGNLYKGLHEPIFDKDRFQLAQEARKNRRKKKTVSLNKEPNLLTGLCYCGVCGCKMRYQKWGSESDAPKKIYCCSRNKDLFYLPNYNKDCDNSIEWATDIEKQVEAEIIKISLNLSSQKPIAKQSKIDIIQSQIKKEKYRRNRLFNLYADGNDDVLDMIKQSDNTISSLKEQLETELSSKEANKKKSIAYENIKKIADVWDSIDKRNKNMILKTIIDKIIIVNGDIEIQLKNF

SEQ ID NO: 8245 - protein, 457 aa, Unknown
  Description of Unknown: Integrase B8246 sequence
  PTHR30461:SF3,SM00857,G3DSA:1.10.10.2600,IPR036162,PF13408, IPR025827,G3DSA:3.40.50.1390,PS51737,IPR006119,IPR038109, SSF53041,IPR011109,PTHR30461,PS51736,cd00338, PF00239
MECVAYMRVSTEKQAEDGNGLESQKRDIDNYCNKNGYIISDYYIDDGYTGANMDRPELQRLISDCVAKRIKCVVAFKLDRLSRSMVDGIYIIERVFQANNILFKCVHDSISYDSPMEQAYTQMMAVFAQLDKNTMMLRMRGGMLERVKQGYWMGGGNTPYCYKYDKEKGILVSIPERKEQANQALDLFIDGYSDVAIKKMLNFTHEHTVKMVLTSPVNIGMIPYKGNLYKGLHEPIFDKDRFQLAQEARKNRRKKKTVSLNKEPNLLTGLCYCGVCGCKMRYQKWGSESDAPKKIYCCSRNKNLFYLPNYNKDCDNSTEWAIDIEKQVEAEIIKISLNLSSQKPIAKQSKIDIIQSQIKKEKYRRNRLFNLYADGNDDVLDMIKQSDNTISSLKEQLETELSSKEANEKKSIAYENIKKIADVWDSIDKRNKNMILKTIIDKIIIVNGDIEIQLKNF

SEQ ID NO: 8246 - protein, 457 aa, Unknown
  Description of Unknown: Integrase B8247 sequence
  SM00857,IPR006118,IPR036162,PF13408,PS51737, G3DSA:3.40.50.1390,IPR025827,Coil,IPR006119,IPR011109, SSF53041,PTHR30461,PS00397,PS51736,cd00338, PF00239
MLKTPPACRAGIYIRVSTEEQHLNGLSLPAQRMALEDYANKNGYIIVGVYADEGISARKSMSHRKGLLRLLEDVRQNKIDMILVTKLDRWFRNIKDYNITEEILREHHCYWKTIFENYDSSTANGQMVINIMLSVNQAECDRTSERIKAVFDYKRAKGMCVTGKCAPYGYIIENGYIKKDPATRSIVEDAIQYYFSCFSIRHTTRYIADKYGENGPSYYKVDKIFHNPKYAGIDKDGKPYCEPYMTMDQYHALLKSRQAKSWSPSGYTYIFSSLITCPICGCKFSGRQRKAIRKNGNVYCDTRYNCMGKFRYHSGASLRESAIEEYLLEHMDSILEAARIDICLEPSGASAKPARSTQSIQDEINRLNTMYQKGRLSDDYYDQEYIRLTAALSEVSDQKAELQKKNLKCVSERFSGDWKSLYVRLDNEHKRAFWKQTIEEILVDPETRQIKDVKLLL

SEQ ID NO: 8247 - protein, 457 aa, Unknown
  Description of Unknown: Integrase B8248 sequence
  SM00857,G3DSA:1.10.10.2600,IPR036162,PF13408,PS51737, G3DSA:3.40.50.1390,IPR025827,IPR006119,IPR038109,SSF53041, IPR011109,PTHR30461,Coil,PS51736,cd00338, PF00239
MKKAKSETTLVRAALYIRVSGEEQKIKGLSLEAQEERLRDFCKERGWLICGVFIDAAKTARKNIKKRVEFQNMIDGVKQDEYDVLVFCRLDRWFRSVADYYKIMDILNAHNCGWVTSDEDYDTTTANGRLYINVKLSISQNESDICSERIGVVFDSKVQHGTVLSGNAPFWLKVQDKRYVLDPEKVEIIRDALDYFEKEMTQRGTVTYIREKYGINWCYASFARMIRDKLLIGVYDKNGRYNENFCPAAISKQQFDNIQRILGKNVKRTPAGRIYIFTSVLKCYECGHNLCGQLNKGIYYYRCNDFALRKRCTHNRFIREDKIEKYLLENLERELNKCELEWTMKAKKKQNNPVIIQRATLKRKLSKLKDLYLNELIELDEYKKDFEMYSNALDRLNDQIEKEEPAPNFKRVHELLDNNFTEMYKSLDRKEKRMFWQSVLKEVVIDRDLNIVSVSFA

SEQ ID NO: 8248 - protein, 457 aa, Unknown
  Description of Unknown: Integrase B8249 sequence
  SM00857,G3DSA:1.10.10.2600,IPR036162,PF13408,PS51737, IPR025827,G3DSA:3.40.50.1390,IPR006119,IPR038109,PF07508, IPR011109,SSF53041,PTHR30461,PS51736,cd00338, PF00239
MIKKELSTGPLRVALYIRVSGEEQKIKGLSLEAQQERLEEYARQQGWVVVGIYIDAAKTARKDMRKRSEFQKMINAVKRDEIDLLLFCRLDRWFRSVADYYKIMEILQTHHCDWKTTDEEYDTSTANGRLYINVKLSIAQNEADICSERISVVFDSKVQHGTVVSGNCPFGYVVNEEKRLSIDPDAAAIVRDAFNYYESSISQRGTIRHIRETYGVNWCDATFRRMLAERLYTGVYDSKGRYNENFCEAIISKEQFERVQVLTSRNARSVPSGKVYIFTSILKCAECNHNLVGYVAGPYYYYRCNQHFQRGRCSHNKSVRESYVEEWLFEHLGEELERCKLEWDVQAAERKKKTRSTDKAVLKRKLTKLKELYMDDLITIEEYKKDYQIYTAALQQIPDEAPEETPPDFSAVERMLQADFKSIYDSLTREEKRTLWRSVISEIRVDRDNNITGIIFG

SEQ ID NO: 8249 - protein, 457 aa, Unknown
  Description of Unknown: Integrase B8250 sequence
  SM00857,G3DSA:1.10.10.2600,IPR036162,PS51737,G3DSA:3.40.50.1390, IPR006119,IPR038109,PF07508,SSF53041,IPR011109, PTHR30461,Coil,PS51736,cd00338,PF00239
MNKITAIYCRESTEKQNISTLVDMCVEHAKKLGLKNIKVYDDVASGYTHERDEYIQLKNDIQDNKIETLVLYESSRLTRDELEHHIFYRLLKVYDVKLYTVTHGWIDLNNEDDTFLTSLLNLLDAREGRKTAKRSKDRKLEIARQGYWTGGTPPLGYRTDEHKVLQIVPEEAEVVKEVFKMFLEGNTRNNIAIHFGLDPKKIRRMLINPTYIGKIRYRLKIVKNKKVIKNPNDPLLFPGKHNPIISELTFNLTQNKLSKTIRETNSNNIYIFKDLITCACGAKMHKISTQNAYFCPVATKKDRECSVHMLTENYLIENIFPVLKELINNLDVDNLQNTSDSSLDKQLKLYSNEISNIEKQQEKLTRQLLNETVSEELFEKLQIELKEKKESILTRITDLQNKINNRKNNKSNSEILKKYWKKIENEKDPKKLNTFLKIIINDIRLVNDYRFYINLKI

SEQ ID NO: 8250 - protein, 457 aa, Unknown
  Description of Unknown: Integrase B8251 sequence
  SM00857,G3DSA:1.10.10.2600,IPR036162,PF13408, IPR025827,G3DSA:3.40.50.1390,PS51737,IPR006119, IPR038109,PF07508,IPR011109,SSF53041, PTHR30461,PS51736,cd00338,PF00239
MAKKVTVIPAKQVRANSTKAISAVRKTRVAAYCRVSTDAEEQLNSFDNQVEYYTRYINENPAYEMVGIYADEGISGTNTKKRKEFQRMIADCEARKIDLVIVKSISRFARNTQDCLTYSRKLKNLGIGIFFEKEHINTLDATGELLFTILSSLAQDESRNISENCKWGIRSKFQEGKPHINTYKFMGFDKNEEGRLVINEEEAKVVRRIFQEFLEGYNPADIARRLNEDGVPGVSGKPKWITPTILGMLQQEKYMGDSILQKWVTTDFLMHSLRRNTGQVAQYYVENSHPAIIDKDIWNAVQEELERREIYCQNYHLSMYAYRADKNPLNGKIVCGHCGHTFARKSWTNRGIAYWTCKSDTCKGNIKEEVIHKAFITAWNHTVKNKDRFMERWQQALDGEDSLARLRAKQMIDLTNEGTINTLVPELMLMVLGKITVHDLEHFTVSFLDGTEKEILV

SEQ ID NO: 8251 - protein, 457 aa, Unknown
  Description of Unknown: Integrase B8252 sequence
  SM00857,G3DSA:1.10.10.2600,IPR036162,PF13408,PS51737, G3DSA:3.40.50.1390,IPR025827,IPR006119,IPR038109,SSF53041, IPR011109,PTHR30461,Coil,PS51736,cd00338, PF00239
MKKAKSETTLVRAALYIRVSGEEQKIKGLSLEAQEERLRDFCKERGWLICGVFIDAAKTARKNIKKRVEFQNMIDGVKQDAYDVLVFCRLDRWFRSVADYYKIMDILNAHNCGWVTSDEDYDTTTANGRLYINVKLSISQNESDICSERIGVVFDSKVQHGTVLSGNAPFWLKVQDKRYVLDPEKVEIIRDALDYFEKEMTQRGTVTYIREKYGINWCYASFARMIRDKLLIGVYDKNGRYNENFCPAAISKQQFDNIQRILGKNVKRTPAGRIYIFTSVLKCYECGHNLCGQLNKGIYYYRCNDFALRKRCTHNRFIREDKIEKYLLENLERELNKCELEWTMKAKKKQNNPVIIQRATLKRKLSKLKDLYLNELIELDEYKKDFELYSNALDRLNDQIEKEEPAPNFKRVHELLDNNFTEMYKSLDRKEKRMFWQSVLKEVVIDRDLNIVSVSFA

SEQ ID NO: 8252 - protein, 457 aa, Unknown
  Description of Unknown: Integrase B8253 sequence
  SM00857,IPR006118,IPR036162,PF13408,PS51737, G3DSA:3.40.50.1390,IPR025827,Coil,IPR006119,IPR011109, SSF53041,PTHR30461,PS00397,PS51736,cd00338, PF00239
MLKTPPACRAGIYIRVSTEEQHLNGLSLPAQRMALEDYASKNGYIIVGVYADEGISARKSMSHRKGLLCLLEDVRQNKIDMILVTKLDRWFRNIKDYNITEEILREHHCYWKTIFENYDSSTANGQMVINIMLSVNQAECDRTSERIKAVFDYKRAKGMCVTGKCAPYGYIIENGYIKKDPATRSIVEDAIQYYFSCFSIRHTTRYIADKYGENGPSYYKVDKIFHNPKYAGIDKDGKPYCEPYMTMDQYHALLKSRQAKSWSPSGYTYIFSSLITCPICGCKFSGRQRKAVRKNGNVYCDTRYNCMGKFRYHSGASLRESAIEEYLLEHMDSILEAARIDICLEPSGASAKPARSTQSIQDEINRLNTMYQKGRLSDDYYDQEYIRLTAALSEVSDQKAELQKKNLRCVSERFSGDWKSLYVRLDNEHKRAFWKQTIEEILVDPETRQIKDVKLLL

SEQ ID NO: 8253 - protein, 457 aa, Unknown
  Description of Unknown: Integrase B8254 sequence
  SM00857,IPR006118,IPR036162,PF13408,PS51737, G3DSA:3.40.50.1390,IPR025827,Coil,IPR006119,IPR011109, SSF53041,PTHR30461,PS00397,PS51736,cd00338, PF00239
MLKTPPACRAGIYIRVSTEEQHLNGLSLPAQRMALEDYASKNGYIIVGVYADEGISARKSMSHRKGLLRLLEDVRQNKIDMILVTKLDRWFRNIKDYNITEEILREHHCYWKTIFENYDSSTANGQMVINIMLSVNQAECDRTSERIKAVFDYKRAKGMCVTGKCAPYGYIIENGYIKKDPATRSIVEDAIQYYFSCFSIRHTTRYIADKYGENGPSYYKVDKIFHNPKYAGIDKDGKPYCEPYMTMDQYHALLKSRQAKSWSPSGYTYIFSSLITCPICGCKFSGRQRKAVRKNGNVYCDTRYNCMGKFRYHSGASLRESAIEEYLLEHMDSILEAARIDICLEPSGASAKPARSTQSIQDEINRLNTMYQKGRLSDDYYDQEYIRLTAALSEVSDQKAELQKKNLRCVSERFSGDWKSLYVRLDNEHKRAFWKQTIEEILVDPETRQIKDVKLLL

SEQ ID NO: 8254 - protein, 457 aa, Unknown
  Description of Unknown: Integrase B8255 sequence
  SM00857,IPR006118,IPR036162,PF13408,PS51737, G3DSA:3.40.50.1390,Coil,IPR025827,IPR006119,IPR011109, SSF53041,PTHR30461,PS00397,PS51736,cd00338, PF00239
MLKTPPACRAGIYIRVSTEEQHLNGLSLPAQRMALEDYANKNGYIIVGVYADEGISARKSMSHRKGLLRLLEDVRQNKIDMILVTKLDRWFRNIKDYNITEEILREHHCYWKTIFENYDSSTANGQMVINIMLSVNQAECDRTSERIKAVFDYKRAKGMCVTGKCAPYGYIIENGYIKKDPATRSIVEDAIQYYFSCFSIRHTTRYIADKYGENGPSYYKVDKIFHNPKYAGIDKDGKPYCEPYMTMDQYHALLKSRQAKSWSPSGYTYIFSSLITCPICGCKFSGRQRKAVRKNGNVYCDIRYNCMGKFRYHSGASLRESAIEEYLLEHMDSILEAARIDICLEPSGASAKPARSTQSIQDEINRLNTMYQKGRLSDDYYDQEYIRLTAALSEVSDQKAELQKKNLRCVSERFSGDWKSLYVRLDNEHKRAFWKQTIEEILVDPETRQIKDVKLLL

SEQ ID NO: 8255 - protein, 457 aa, Unknown
  Description of Unknown: Integrase B8256 sequence
  PTHR30461:SF3,cd00338,SM00857,G3DSA:1.10.10.2600,IPR036162, PF13408,IPR025827,G3DSA:3.40.50.1390,PS51737,IPR006119, IPR038109,SSF53041,IPR011109,PTHR30461,PS51736, Coil,PF00239
MECVAYMRVSTEKQAEDGNGLESQKRDIDNYCNKNGYIISDYYIDDGYTGANMDRPQLQRLISDCVSKRVKCVVAFKLDRLSRSMVDGIYIIERVFQANNILFKCVHDSISYDSPMEQAYTQMMAVFAQLDKNTMMLRMRGGMLERVKQGYWMGGGNTPYCYKYDREKGILVPIPERKKQANQALDLFIDGYSDVAIKKMLNFTHEHTVKMVLTSPVNIGMIPYKGNLYKGLHEPIFDKDRFQLAQEARKNRRKKKTVSLNKEPNLLTGLCYCGVCGCKMRYQKWGSESDAPKKIYCCSRNKDLFYLPNYNKDCDNSTEWAVDIEKQVEAEIMKISLNLSSQKSVAKQSKIEIIQAQIQKEEKRRKRLFNLYADGNDDVLDMIKQSDNTISSLKEQLETELSSKEANKKKSIAYENIKKIADVWDSIDKRNKNMILKTIIDKIIIVNGDIEIQLKNF

SEQ ID NO: 8256 - protein, 457 aa, Unknown
  Description of Unknown: Integrase B8257 sequence
  PTHR30461:SF3,SM00857,G3DSA:1.10.10.2600,IPR036162,PS51737, G3DSA:3.40.50.1390,IPR006119,IPR038109,PF07508,IPR011109, SSF53041,PTHR30461,Coil,PS51736,cd00338, PF00239
MKIGIYTRVSTEEQAVHGVSLIAQENALMEYAKKHDYKVVDVYSDEGLSATTLDRPGLQRLLEDVRQGRIDLILITKLDRLSRGVANYYKIADVLENNNCGWKTILEDYDSTTASGRLHINIMLSVAENEAAVTRERINFVFKDKLSKGEIISGQKMFGYKIENKRYVIDPYEAEIVKYIFDDFLVTSSKGKTLKHVRDKFDIDMSFWTISNILKRKLYIGIYVSKGKEYPNFAPNIIPEDVYYNVQSLLNANTKFAKDPNKVFLFSKLIKCSKFKRNLTHTNMNTKYGVYSYIKCNSVCPYYKNGECNKRLPGMRVDKLEKDLVDLLVSQLTKEYKLENHIKTNNCANASYEKKVRKIKRKMSKLEDMYLDDLISKDKYKKQYNDCKSELEYYNTLIAENNKTRFASIDQDFVEFINTSDFKTLYYSLDNSKKHTFWASLVECIEVSETSHNLIFK

SEQ ID NO: 8257 - protein, 457 aa, Unknown
  Description of Unknown: Integrase B8258 sequence
  PTHR30461:SF3,cd00338,SM00857,IPR006118,IPR036162, PF13408,IPR025827,G3DSA:3.40.50.1390,PS51737,IPR006119, IPR011109,SSF53041,PTHR30461,PS00397,PS51736, Coil,PF00239
MPNKIERCAIYIRVSTTEQMMHGKSLEAQKEYLTNYAKEHNMAVVGVYADEGLKKRKAIHSLLQDVQAGKIDVIIFWRIDRWFRNLSDFYKVQDILDSHNVRWISTSEPGINMETRDGRLQLNVVLSIGQNEVDTTSERIKFVNEASIRSGKLIFGDVNMGYGYKSGIVDGQKRMVKDPDREHVVDAFYKYFFKHQNKCATLRYIQETYDPDFSFGIMRTLLSSEFYKGTYRGFPYCPAYLTEDEWNKLQKIQKRNVKATPSGRIYLFAGMIRCPECGQLLCGTGCSSIINRKTGAKRTYCYYRCNRAMIDHICSYRHRLSQNLVENYLLDNLEDEYKNYKVKCEKIEKEKEKQKKKLSPEKLRKELDRLNFLFQKGRIDWDYYNEEYGRVESELNDLQSVLPEPVTNYGYLEELLDTDFRTMYDQLSQENRRAFWRSIIQEIHVNEDHAITSVDFL

SEQ ID NO: 8258 - protein, 457 aa, Unknown
  Description of Unknown: Integrase B8259 sequence
  PTHR30461:SF3,cd00338,SM00857,G3DSA:1.10.10.2600,IPR036162, PF13408,IPR025827,G3DSA:3.40.50.1390,PS51737,IPR006119, IPR038109,SSF53041,IPR011109,PTHR30461,PS51736, Coil,PF00239
MECVAYMRVSTEKQAEDGNGLESQKRDIDNYCNKNGYIISDYYIDDGYTGANMDRPELQRLISDCVAKRIKCVVAFKLDRLSRSMVDGIYIIERVFQANNILFKCVHDSISYDSPMEQAYTQMMAVFAQLDKNTMMLRMRGGMLERVKQGYWMGGGNTPYCYKYDKEKGILVPIPERKEQANQALDLFIDGYSDVAIKKMLNFTHEHTVKMVLTSPVNIGMIPYKGNLYKGLHEPIFDKDRFQLAQEARKNRRKKKTVSLNKEPNLLTGLCYCGVCGCKMRYQKWGSESDAPKKIYCCSRNKDLFYLPNYNKDCDNSTEWAVDIEKQVEAEIMKISLNLSSQKPVAKQSKIEIIQAQIQKEEKRRKRLFNLYADGNDDVLDMIKQSDDTISSLKEQLETELSSKEANKKKSIAYENIKKIADVWDSIDKRNKNMILKTIIDKIIIVNGDIEIQLKNF

SEQ ID NO: 8259 - protein, 457 aa, Unknown
  Description of Unknown: Integrase B8260 sequence
  SM00857,G3DSA:1.10.10.2600,IPR036162,PF13408,IPR025827, PS51737,G3DSA:3.40.50.1390,IPR006119,IPR038109,IPR011109, SSF53041,PF00239,PTHR30461,PS51736,Coil, cd00338
MKKKEIISGPLRVALYIRVSGEEQKIKGLSLKAQQERLVAFAKEQGWIVTGIYIDAAKTARKNMYKRSEFQRMLDSVKRNEVDLLLFCRLDRWFRSVADYYKIMEILEAHNCGWKTIDEEYDTSTANGRLYINVKLSIAQNEADIDAERISVVFDSKIQNGTVLSGKCPFWIRITEEKKYELIPEKVAILQDAFDYFEQSTSQRATIKHIRETYGVNWCDATFRRMLHDKLAIGVYDKNGRYNPNFCPAAIRKEQFNRVQELCKRNSKAYPKGKVYFFTGILVCEECRHNLVGYQAREYYYYRCNQHFQRGRCTHNHSVREDYIESWLFEHLEEEINKYEIAWNVQNAKLKKDGFNIERAVLKRKLTKLKELYVNDLINLEDYKKDFEMYSAALSKMEEAQVIEKRVDLSGVRKIVSKNFRTIYNTLSRAEKRSLWKSVLREIRVDNDRNITGISFF

SEQ ID NO: 8260 - protein, 457 aa, Unknown
  Description of Unknown: Integrase B8261 sequence
  SM00857,G3DSA:1.10.10.2600,IPR036162,PF13408,PS51737, G3DSA:3.40.50.1390,IPR025827,IPR006119,IPR038109,SSF53041, IPR011109,PTHR30461,Coil,PS51736,cd00338, PF00239
MKKAKSETTLVRAALYIRVSGEEQKIKGLSLEAQEERLRDFCKERGWLICGVFIDAAKTARKNIKKRVEFQNMIDGVKQDAYDVLVFCRLDRWFRSVADYYKIMDILNAHNCGWVTSDEDYDTTTANGRLYINVKLSISQNESDICSERIGVVFDSKVQHGTVLSGNAPFWLKVQDKRYVLDPEKVEIIRDALDYFEKEMTQRGTVTYIREKYGINWCYASFARMIRDKLLIGVYDKNGRYNENFCPAAISKQQFDNIQRILGKNVKRTPAGRIYIFTSVLKCYECGHNLCGQLNKGIYYYRCNDFALRKRCTHNRFIREDKIEKYLLENLERELNKCELEWTMKAKKKQNNPVIIQRATLKRKLSKLKDLYLNELIELDEYKKDFEMYSNALDRLNDQIEKEEPAPNFKRVHELLDNNFTEMYKSLDRKEKRMFWQSVLKEVVIDRDLNIVSVSFA

SEQ ID NO: 8261 - protein, 456 aa, Unknown
  Description of Unknown: Integrase B8262 sequence
  PTHR30461:SF3,SM00857,G3DSA:1.10.10.2600,IPR036162,PF13408, IPR025827,G3DSA:3.40.50.1390,PS51737,IPR006119,IPR038109, PF07508,IPR011109,SSF53041,PF00239,PTHR30461, PS51736,Coil,cd00338
MRNKEIAPALVRVALYIRVSGEEQKIKGLSLEAQQERLEAYARERGWVIVGIYIDAAKTARKNIHKRTEFQRMMDSVKRDEVDILLFARLDRWFRSVADYYKVMEVLQAHNCDWKTTDEEYDTTTANGRLYINVKLSIAQNEADIDGERIDVVFDSKIAHGTVVSGSAPFGFRVNEEKRLEVVPEDAAIVQDAFNYFENTVSQRATVRYVRETYGVNWCDATFRRMLKEKLYTGVYDRGGRYNDQFCPAIISRQQFDRVQALLTRNVRSAPSGKVYIFTSILTCAECGHKLVGYKSSDYFYYRCNQHFQRGRCSHNHSAREDVVEQWLFEHLGEELERCQLEWGVEAAKKKASIARTDKAALKRKLTKLKELYVNDLIDIEDYKKDYQIYVSALNQIPEPAQEAPPDFAAVRRLLDNSFRTIYDTLTREEKRTLWRSVIKEIRIDNDQNITGVVFG

SEQ ID NO: 8262 - protein, 456 aa, Unknown
  Description of Unknown: Integrase B8263 sequence
  PTHR30461:SF3,IPR036162,PS51737,IPR011109,PTHR30461, PS00397,PF00239,G3DSA:1.10.10.2600,IPR006119,SSF53041, cd00338,SM00857,IPR025827,IPR038109,PS51736, IPR006118,PF13408,G3DSA:3.40.50.1390,Coil
MKYVACYCRVSTDEQAKFGFSIQAQKDALEKYCKENGYKYEFYIDEGISASSMKKRKALNEMLSKCNVFDIILFTKLDRLSRNVLDANNINKLLIDNKCTMKAIDEDDIDTSTADGTFIFNLKVSLAQREIGKTSERIKFVFQNKREKGEVTSGTKKYGYDIVDKKFVINKKEAENILNLYNEFINNNGNLKETYKYFIQHFENKGYDAMIHYLHDTSYIGKYKLYRKNIYIDNYIPHIMNNALFYSVQNLFKKREKTSIKTSNISLFSGLIFCGICNTRMCKKQDNRSTKKLIRYCCDNASRRKVGSMEYKCDNHKLIREEYIEKYLLDNIKSIAKNYINANVVISNQTTKNDNSNEIKRIENKILKLKDLYLDDLIDKKTYRSDYESLNKKMNELKNEAISTPQRDSSKLKEIMNLDIYKIYCLFSDEEKRTFWLKIIDKIYIENGKIKEITFS

SEQ ID NO: 8263 - protein, 456 aa, Unknown
  Description of Unknown: Integrase B8264 sequence
  PTHR30461:SF3,SM00857,G3DSA:1.10.10.2600,IPR036162,PF13408, IPR025827,G3DSA:3.40.50.1390,PS51737,IPR006119,IPR038109, PF07508,IPR011109,SSF53041,PTHR30461,PS51736, cd00338,PF00239
MRNKEIAPALVRVALYIRVSGEEQKIKGLSLEAQQERLEAYARERGWVIVGIYIDAAKTARKNIHKRTEFQRMMEAVKRDEVDILLFARLDRWFRSVADYYKVMEILQAHNCDWKTTDEEYDTTTANGRLYINVKLSIAQNEADIDGERIDVVFDSKIAHGTVVSGSSPFGFRVSEEKRLEIVPEDAAIVQDAFNYFENTVSQRATTKYIREKYGVNWCYATFHRMLIEELYTGVYNRGGRYNANFCPAIIQREQFDRVQALLKKNVRRAPSGRVYIFTSVLTCEECRHKLNGYISQGIYYYRCNQHLQRGRCTHNHSVREDRVEQWLFDHLGEELERCKLEWEVQAAEKKRSVTSRDKAALRRKLTKLKELYVNELIDIDDYKKDYEIYTAALNQIPDTTQEAPPDFAAVEKLLQKDFRKIYDTLTREEKRTLWRSVIKEIRIDNDQNITGVVFG

SEQ ID NO: 8264 - protein, 456 aa, Unknown
  Description of Unknown: Integrase B8265 sequence
  PTHR30461:SF3,SM00857,G3DSA:1.10.10.2600,IPR036162,PF13408, PS51737,G3DSA:3.40.50.1390,IPR025827,IPR006119,IPR038109, PF07508,IPR011109,SSF53041,PTHR30461,Coil, PS51736,cd00338,PF00239
MRNKEIAPALVRVALYIRVSGEEQKIKGLSLEAQQERLEAYARERGWVIVGIYIDAAKTARKNIHKRTEFQRMMDSVKRDEVDILLFARLDRWFRSVADYYKVMEILQAHNCDWKTTDEEYDTTTANGRLYINVKLSIAQNEADIDGERIDVVFDSKIAHGTVVSGSAPFGFRVNEEKRLEVVPEDAAIVQDAFNYFENTVSQRATVRYVRETYGVNWCDATFRRMLKEKLYTGVYDRGGRYNDQFCPAIINRQQFDRVQALLTRNVRSAPSGKVYIFTSILTCAECGHKLVGYKSSDYYYYRCNQHFQRGRCSHNHSAREDVVEQWLFEHLGEELERCQLEWDVEAAKKKASVARTDKAALKRKLTKLKELYVNDLIDIEDYKKDYQIYVSALNQIPEPAQEAPPDFAAVRRLLDNSFRTIYDTLTREEKRTLWRSVIKEIRIDNDQNITGVVFG

SEQ ID NO: 8265 - protein, 456 aa, Unknown
  Description of Unknown: Integrase B8266 sequence
  PTHR30461:SF3,SM00857,G3DSA:1.10.10.2600,IPR036162,PF13408, IPR025827,PS51737,G3DSA:3.40.50.1390,IPR006119,IPR038109, PF07508,SSF53041,IPR011109,PTHR30461,Coil, PS51736,cd00338,PF00239
MRNKEIAPALVRVALYIRVSGEEQKIKGLSLEAQQERLEAYARERGWVIVGIYIDAAKTARKNIHKRTEFQRMMDSVKRDEVDILLFARLDRWFRSVADYYKVMEVLQAHNCDWKTTDEEYDTTTANGRLYINVKLSIAQNEADIDGERIDVVFDSKIAHGTVVSGSSPFGFRVSEEKRLEIVPEGAAIVQDAFNYFENTVSQRATVRYIRETYGVNWCDATFRRMLKEKLYTGVYDRGGRYNDQFCPAIISRQQFDRVQALLTRNVRSAPSGKVYIFTSILTCAECGHKLVGYKSSDYFYYRCNQHFQRGRCSHNHSAREDVVEQWLFEHLGEELDRCQLEWDVEAAKKKASVARTDKAALKRKLTKLKELYVNDLIDIEDYKKDYQIYVSALNQIPEPAQEAPPDFAAVRRLLDNSFRTIYDTLTREEKRTLWRSVIKEIRIDNDQNITGVVFG

SEQ ID NO: 8266 - protein, 456 aa, Unknown
  Description of Unknown: Integrase B8267 sequence
  PTHR30461:SF3,SM00857,G3DSA:1.10.10.2600,IPR036162,PF13408, PS51737,IPR025827,G3DSA:3.40.50.1390,IPR006119,IPR038109, PF07508,IPR011109,SSF53041,PTHR30461,Coil, PS51736,cd00338,PF00239
MRNKEIAPALVRVALYIRVSGEEQKIKGLSLEAQQERLEAYARERGWVIVGIYIDAAKTARKNIHKRTEFQRMMDSVKRDEVDILLFARLDRWFRSVADYYKVMEILQAHNCDWKTTDEEYDTTTANGRLYINVKLSIAQNEADIDGERIDVVFDSKIAHGTVVSGSAPFGFRVNEEKRLEVVPEDAAIVQDAFNYFENTVSQRATVRYVRETYGVNWCDATFRRMLKEKLYTGVYDRGGRYNDQFCPAIINRQQFDRVQALLTRNVRSAPSGKVYIFTSILTCAECGHKLVGYKSSDYFYYRCNQHFQRGRCSHNHSAREDVVEQWLFEHLGEELDRCQLEWDVEAAKKKASVARTDKAALKRKLTKLKELYVNDLIDIEDYKKDYQIYVSALNQIPEPAQEAPPDFAAVRRLLDNSFRTIYDTLTREEKRTLWRSVIKEIRIDNDQNITGVVFG

SEQ ID NO: 8267 - protein, 456 aa, Unknown
  Description of Unknown: Integrase B8268 sequence
  PTHR30461:SF3,SM00857,G3DSA:1.10.10.2600,IPR036162,PF13408, IPR025827,G3DSA:3.40.50.1390,PS51737,IPR006119,IPR038109, PF07508,SSF53041,IPR011109,PTHR30461,Coil, PS51736,cd00338,PF00239
MYKKELAPDLVRVALYIRVSGEEQKIKGLSLEAQQERLEAYARERGWVIVGIYIDAAKTARKNIHKRTEFQRMMDSVKRDEVDILLFARLDRWFRSVADYYKVMEILQAHNCDWKTTDEEYDTTTANGRLYINVKLSIAQNEADIDGERIDVVFDSKIAHGTVVSGSAPFGFRVNEEKRLEVVPEDAAIVQDAFNYFENTVSQRATVRYVRETYGVNWCDATFRRMLKEKLYTGVYDRGGRYNDQFCPAIIDRQQFDRVQALLTRNVRSAPSGKVYIFTSILTCAECGHKLVGYKSSDYYYYRCNQHFQRGRCSHNHSAREDVVEQWLFEHLGEELERCQLEWDVEAAKKKASVARTDKAALKRKLTKLKELYVNDLIDIEDYKKDYQIYVSALNQIPEPAQEAPPDFAAVRRLLDNSFRTIYDTLTREEKRTLWRSVIKEIKIDNDQNITGVVFG

SEQ ID NO: 8268 - protein, 456 aa, Unknown
  Description of Unknown: Integrase B8269 sequence
  PTHR30461:SF3,SM00857,G3DSA:1.10.10.2600,IPR036162,PF13408, PS51737,IPR025827,G3DSA:3.40.50.1390,IPR006119,IPR038109, PF07508,IPR011109,SSF53041,PTHR30461,Coil, PS51736,cd00338,PF00239
MYKKELAPDLVRVALYIRVSGEEQKIKGLSLEAQQERLEAYARERGWVIVGIYIDAAKTARKNIHKRTEFQRMMDSVKRDEVDILLFARLDRWFRSVADYYKVMEVLQAHNCDWKTTDEEYDTTTANGRLYINVKLSIAQNEADIDGERIDVVFDSKIAHGTVVSGSAPFGFRVNEEKRLEVVPEDAAIVQDAFNYFENTVSQRATVRYVRETYGVNWCDATFRRMLKEKLYTGVYDRGGRYNDQFCPAIINRQQFDRVQALLTRNVRSAPSGKVYIFTSILTCAECGHKLVGYKSSDYFYYRCNQHFQRGRCSHNHSACEDVVEAWLFDHLGEELERCQLEWDVEAAKKKASVARTDKAALKRKLTKLKELYVNDLIDIEDYKKDYQIYVSALNQIPEPVQEAPPDFAAVRRLLDNSFRTIYDTLTREEKRTLWRSVIKEIRIDNDQNITGVVFG

SEQ ID NO: 8269 - protein, 456 aa, Unknown
  Description of Unknown: Integrase B8270 sequence
  PTHR30461:SF3,SM00857,G3DSA:1.10.10.2600,IPR036162,PF13408, IPR025827,G3DSA:3.40.50.1390,PS51737,IPR006119,IPR038109, PF07508,SSF53041,IPR011109,PTHR30461,Coil, PS51736,cd00338,PF00239
MRNKEIAPALVRVALYIRVSGEEQKIKGLSLEAQQERLEAYARERGWVIVGIYIDAAKTARKNIHKRTEFQRMMDSVKRDEVDILLFARLDRWFRSVADYYKVMEILQAHNCDWKTTDEEYDTTTANGRLYINVKLSIAQNEADIDGERIDVVFDSKIAHGTVVSGSAPFGFRVNEEKRLEVVPEDAAIVQDAFNYFENTVSQRATVRYVRETYGVNWCDATFRRMLKEKLYTGVYDRGGRYNDQFCPAIIDRQQFDRVQALLTRNVRSAPSGKVYIFTSILTCAECGHKLVGYKSSDYFYYRCNQHFQRGRCSHNHSAREDVVEQWLFEHLGEELERCQLEWDVEAAKKKASVARTDKAALKRKLTKLKELYVNDLIDIEDYKKDYQIYVSALNQIPEPAQEAPPDFAAVRRLLDNSFRTIYDTLTREEKRTLWRSVIKEIRIDNDQNITGVVFG

SEQ ID NO: 8270 - protein, 456 aa, Unknown
  Description of Unknown: Integrase B8271 sequence
  PTHR30461:SF3,SM00857,G3DSA:1.10.10.2600,IPR036162,PF13408, IPR025827,PS51737,G3DSA:3.40.50.1390,IPR006119,IPR038109, PF07508,IPR011109,SSF53041,PTHR30461,Coil, PS51736,cd00338,PF00239
MRNKEIAPALVRVALYIRVSGEEQKIKGLSLEAQQERLEAYARERGWVIVGIYIDAAKTARKNIHKRTEFQRMMGSVKRDEVDILLFARLDRWFRSVADYYKVMEILQAHNCDWKTTDEEYDTTTANGRLYINVKLSIAQNEADIDGERIDVVFDSKIAHGTVVSGSAPFGFRVNEEKRLEVVPEDAAIVQDAFNYFENTVSQRATVRYVRETYGVNWCDATFRRMLKEKLYTGVYDRGGRYNDQFCPSIIDRQQFDRVQALLTRNVRSAPSGKVYIFTSILTCAECGHKLVGYKSSDYFYYRCNQHFQRGRCCHNHSAREDVVEAWLFDHLGEELERCQLEWDVEAAKKKASVARTDKAALKRKLTKLKELYVNDLIDIEDYKKDYQIYVSALNQIPEPAQEAPPDFAAVRRLLDNSFRTIYDTLTREEKRTLWRSVIKEIRIDNDQNITGVVFG

SEQ ID NO: 8271 - protein, 456 aa, Unknown
  Description of Unknown: Integrase B8272 sequence
  PTHR30461:SF3,IPR036162,PS51737,IPR011109,PTHR30461, PS00397,PF00239,G3DSA:1.10.10.2600,IPR006119,SSF53041, cd00338,SM00857,IPR025827,IPR038109,PS51736, IPR006118,PF13408,G3DSA:3.40.50.1390,Coil
MKKEQPNVLHTAIYIRVSTDQQAKKGDSVDEQLDTCREYVEKHDNLILYDTYVDDGVSGQKIKRGDFSRLMTDVRSGQIDLIIFTKLDRWFRSLRHYLNTQATLEANHCAWLAVDQPYFDTSTPHGRAFVAQSMTFAELEAANDSTRIRDVFDYKYKRGEVLSGKAPLGYSIVDKHLVPNKDAEKVIKIFEHYAATSSLSSTVQFMEQELGIVMYSANLKNTILKQKKYIGVFRDNEHFCEPLISRELFDSVQRQLAMNIHSNRKYEYIFTGLIRCADCDHTINGFPQRGGKRKDGSYRIFPAYRCRIAYPYKRCPNRKLFYEAPLERYLVEHLHELLEIEISKYEQKNAKVIDYESKRAAIEKKIERLKDLYINEIITMDELKVSKAKYQEELSQLPAEAAAIEKRDLSALRNMLKMDLPSIYFTLNPQERRRLWRSCIREIRVDHDKNIDIVFL

SEQ ID NO: 8272 - protein, 456 aa, Unknown
  Description of Unknown: Integrase B8273 sequence
  PTHR30461:SF3,SM00857,G3DSA:1.10.10.2600,IPR036162,PF13408, PS51737,G3DSA:3.40.50.1390,IPR025827,IPR006119,IPR038109, PF07508,SSF53041,IPR011109,PF00239,PTHR30461, PS51736,Coil,cd00338
MYKKELAPDLVRVALYIRVSGEEQKIKGLSLEAQQERLEAYARERGWVIVGIYIDAAKTARKNIHKRTEFQRMMDSVKRDEVDILLFARLDRWFRSVADYYKVMEVLQAHNCDWKTTDEEYDTTTANGRLYINVKLSIAQNEADIDGERIDVVFDSKIAHGTVVSGSAPFGFRVNEEKRLEVVPEDAAIVQDAFNYFENTVSQRATVRYVRETYGVNWCDATFRRMLKEKLYTGVYDRGGRYNDKFCPAIINRQQFDRVQALLTRNVRSAPSGKVYIFTSILTCAECGHKLVGYKSSDYFYYRCNQHFQRGRCSHNHSAREDVVETWLFDHLGEELERCQLEWDVEAAKKKASVARTDKAALKRKLTKLKELYVNDLIDIEDYKKDYQIYVSALNQIPEPAQEAPPDFAAVRRLLDNSFRTIYDTLTREEKRTLWRSVIKEIRIDNDQNITGVVFG

SEQ ID NO: 8273 - protein, 456 aa, Unknown
  Description of Unknown: Integrase B8274 sequence
  PTHR30461:SF3,SM00857,G3DSA:1.10.10.2600,IPR036162,PF13408, IPR025827,G3DSA:3.40.50.1390,PS51737,IPR006119,IPR038109, PF07508,SSF53041,IPR011109,PTHR30461,Coil, PS51736,cd00338,PF00239
MRNKEIAPALVRVALYIRVSGEEQKIKGLSLEAQQERLEAYARERGWVIVGIYIDAAKTARKNIHKRTEFQRMMDSVKRDEVDILLFARLDRWFRSVADYYKVMEILQAHNCDWKTTDEEYDTTTANGRLYINVKLSIAQNEADIDGERIDVVFDSKIAHGTVVSGSAPFGFRVNEEKRLEVVPEDAAIVQDAFNYFENTVSQRATVRYVRETYGVNWCDATFRRMLKEKLYTGVYDRGGRYNDQFCPAIISRQQFDRVQALLTRNVRSAPSGKVYIFTSILTCAECGHKLVGYKSSDYFYYRCNQHFQRGRCSHNHSAREDVVEAWLFDHLGEELERCQLEWDVEAAKKKASVARTDKAALKRKLTKLKELYVNDLIDIEDYKKDYQIYVSALNQIPEPAQEAPPDFAAVRRLLDNSFRTIYDTLTREEKRTLWRSVIKEIRIDNDQNITGVVFG

SEQ ID NO: 8274 - protein, 456 aa, Unknown
  Description of Unknown: Integrase B8275 sequence
  PTHR30461:SF3,SM00857,G3DSA:1.10.10.2600,IPR036162,PF13408, IPR025827,G3DSA:3.40.50.1390,PS51737,IPR006119,IPR038109, PF07508,SSF53041,IPR011109,PTHR30461,Coil, PS51736,cd00338,PF00239
MRNKEIAPALVRVALYIRVSGEEQKIKGLSLEAQQERLEAYARERGWVIVGIYIDAAKTARKNIHKRTEFQRMMDSVKRDEVDILLFARLDRWFRSVADYYKVMEILQAHNCDWKTTDEEYDTTTANGRLYINVKLSIAQNEADIDGERIDVVFDSKIAHGTVVSGSAPFGFRVNEEKRLEVVPEDAAIVQDAFNYFESTVSQRATVRYVRETYGVNWCDATFRRMLKEKLYTGVYDRGGRYNDQFCPAIINRQQFDRVQALLTRNVRSAPSGKVYIFTSILTCAECGHKLVGYKSSDYFYYRCNQHFQRGRCSHNHSAREDIVEAWLFDHLGEELERCQLEWDVEAAKKKASVARTDKAALKRKLTKLKELYVNDLIDIEDYKKDYQIYVSALNQIPEPAQEAPPDFAAVRRLLDNSFRTIYDTLTREEKRTLWRSVIKEIRIDNDQNITGVVFG

SEQ ID NO: 8275 - protein, 456 aa, Unknown
  Description of Unknown: Integrase B8276 sequence
  PTHR30461:SF3,SM00857,G3DSA:1.10.10.2600,IPR036162,PF13408, PS51737,G3DSA:3.40.50.1390,IPR025827,IPR006119,IPR038109, PF07508,IPR011109,SSF53041,PTHR30461,Coil, PS51736,cd00338,PF00239
MRNKEIAPALVRVALYIRVSGEEQKIKGLSLEAQQERLEAYARERGWVIVGIYIDAAKTARKNIHKRTEFQHMMDSVKRDEVDILLFARLDRWFRSVADYYKVMEILQAHNCDWKTTDEEYDTTTANGRLYINVKLSIAQNEADIDGERIDVVFDSKIAHGTVVSGSAPFGFRVNEEKRLEVVPEDAAIVQDAFNYFENTVSQRATVRYVRETYGANWCDATFRRMLKEKLYTGVYDRGGRYNDQFCPAIIDRQQFDRVQALLTRNVRSAPSGKVYIFTSILTCAECGHKLVGYKSSDYYYYRCNQHFQRGRCSHNHSAREDVVEQWLFEHLGEELERCQLEWGVEAAKKKVSIARTDKAALKRKLTKLKELYVNDLIDIEDYKKDYQIYVSALNQIPEPAQEAPPDFAAVRRLLDNSFRTIYDTLTREEKRTLWRSVIKEIRIDNDQNITGVVFG

SEQ ID NO: 8276 - protein, 456 aa, Unknown
  Description of Unknown: Integrase B8277 sequence
  PTHR30461:SF3,SM00857,G3DSA:1.10.10.2600,IPR036162,PF13408, IPR025827,G3DSA:3.40.50.1390,PS51737,IPR006119,IPR038109, PF07508,IPR011109,SSF53041,PTHR30461,Coil, PS51736,cd00338,PF00239
MKRKEVAAGLVRVALYIRVSGEEQKIKGLSLEAQQERLEAYARERGWVIVGIYIDAAKTARKNIHKRTEFQRMMDSVKRDEVDILLFARLDRWFRSVADYYKVMEVLQAHNCDWKTTDEEYDTTTANGRLYINVKLSIAQNEADIDGERIDVVFDSKIAHGTVVSGSAPFGFRVNEEKRLEVVPEDAAIVQDAFNYFENTVSQRATVRYVRETYGVNWCDATFRRMLKEKLYTGVYDRGGRYNDQFCPAIIDRQQFDRVQALLTRNVRSAPSGKVYIFTSILTCAECGHKLVGYKSSDYFYYRCNQHFQRGRCSHNHSAREDVVEQWLFEHLGEELERCQLEWDVEAAKKKASVARTDKAALKRKLTKLKELYVNDLIDIEDYKKDYQIYVSALNQIPEPAQEAPPDFAAVRRLLDNSFRTIYDTLTREEKRTLWRSVIKEIRIDNDQNITGVVFG

SEQ ID NO: 8277 - protein, 456 aa, Unknown
  Description of Unknown: Integrase B8278 sequence
  PTHR30461:SF3,SM00857,G3DSA:1.10.10.2600,IPR036162,PF13408, IPR025827,PS51737,G3DSA:3.40.50.1390,IPR006119,IPR038109, PF07508,SSF53041,IPR011109,PF00239,PTHR30461, PS51736,Coil,cd00338
MRNKEIAPALVRVALYIRVSGEEQKIKGLSLEAQQERLEAYARERGWVIVGIYIDAAKTARKNIHKRTEFQRMMDSVKRDEVDILLFARLDRWFRSVADYYKVMEVLQAHNCDWKTTDEEYDTTTANGRLYINVKLSIAQNEADIDGERIDVVFDSKIAHGTVVSGSAPFGFRVNEEKRLEVVPEDAAIVQDAFNYFENTVSQRATVRYVRETYGVNWCDATFRRMLKEKLYTGVYDRGGRYNDQFCPVIINRQQFDRVQALLTRNVRSAPSGKVYIFTSILTCAECGHKLVGYKSSDYFYYRCNQHFQRGRCSHNHSAREDVVEAWLFDHLGEELERCQLEWDVEAAKKKASVARTDKAALKRKLTKLKELYVNDLIDIEDYKKDYQIYVSALNQIPEPAQEAPPDFAAVRRLLDNSFRTIYDTLTREEKRTLWRSVIKEIRIDNDQNITGVVFV

SEQ ID NO: 8278 - protein, 456 aa, Unknown
  Description of Unknown: Integrase B8279 sequence
  PTHR30461:SF3,SM00857,G3DSA:1.10.10.2600,IPR036162,PF13408, IPR025827,G3DSA:3.40.50.1390,PS51737,IPR006119,IPR038109, PF07508,SSF53041,IPR011109,PTHR30461,Coil, PS51736,cd00338,PF00239
MRNKEIAPALVRVALYIRVSGEEQKIKGLSLEAQQERLEAYARERGWVIVGIYIDAAKTARKNIHKRTEFQRMMDSVKRDEVDILLFARLDRWFRSVADYYKVMEILQAHNCDWKTTDEEYDTTTANGRLYINVKLSIAQNEADIDGERIDVVFDSKIAHGTVVSGSAPFGFRVNEEKRLEVVPEDAAIVQDAFNYFESTVSQRATVRYVRETYGVNWCDATFRRMLKEKLYTGVYDRGGRYNDQFCPAIINRQQFDRVQALLTRNVRSAPSGKVYIFTSILTCAECGHKLVGYKSSDYFYYRCNQHFQRGRCSHNHSAREDVVEQWLFEHLGEELERCQLEWGVEAAKKKASIARTDKAALKRKLTKLKELYVNDLIDIEDYKKDYQIYVSALNQIPEPAQEAPPDFAAVRRLLDNSFRTIYDTLTREEKRTLWRSVIKEIRIDNDQNITGVVFG

SEQ ID NO: 8279 - protein, 456 aa, Unknown
  Description of Unknown: Integrase B8280 sequence
  PTHR30461:SF3,SM00857,G3DSA:1.10.10.2600,IPR036162,PF13408, IPR025827,G3DSA:3.40.50.1390,PS51737,IPR006119,IPR038109, PF07508,IPR011109,SSF53041,PTHR30461,PS51736, cd00338,PF00239
MRNKEIAPALVRVALYIRVSGEEQKIKGLSLEAQQERLEAYARERGWVIVGIYIDAAKTARKNIHKRTEFQRMMDSVKRDEVDILLFARLDRWFRSVADYYKVMEILQAHNCDWKTTDEEYDTTTANGRLYINVKLSIAQNEADIDGERIDVVFDSKIAHGTVVSGSAPFGFRVNEEKRLEVVPEDAAIVQDAFNYFENTVSQRATVRYVRETYGVNWCDATFRRMLKEKLYTGVYDRGGRYNDQFCPAIIDRQQFDRVQALLTRNVRSAPSGKVYIFTSILTCAECGHKLVGYKSSDYFYYRCNQHFQRGRCSHNHSAREDVVEAWLFDHLGEELERCQLEWDVEAAKKKASVVRTDKAALKRKLTKLKELYVNDLIDIEDYKKDYQIYVSALNQIPEPAQEAPPDFAAVRRLLDNSFRTIYDTLTREEKRTLWRSVIKEIRIDNDQNITGVVFG

SEQ ID NO: 8280 - protein, 456 aa, Unknown
  Description of Unknown: Integrase B8281 sequence
  PTHR30461:SF3,SM00857,G3DSA:1.10.10.2600,IPR036162,PF13408, IPR025827,G3DSA:3.40.50.1390,PS51737,IPR006119,IPR038109, PF07508,IPR011109,SSF53041,PF00239,PTHR30461, PS51736,Coil,cd00338
MRNKEIAPALVRVALYIRVSGEEQKIKGLSLEAQQERLEAYARERGWVIVGIYIDAAKTARKNIHKRTEFQRMMDSVKRDEVDILLFARLDRWFRSVADYYKVMEVLQAHNCDWKTTDEEYDTTTANGRLYINVKLSIAQNEADIDGERIDVVFDSKIAHGTVVSGSAPFGFRVNEEKRLEVVPEDAAIVQDAFNYFENTVSQRATVRYVRETYGVNWCDATFRRMLKEKLYTGVYDRGGRYNDQFCPAIISRQQFDRVQALLTRNVRSAPSGKVYIFTSILTCAECGHKLVGYKSSDYFYYRCNQHFQRGRCSHNHSAREDVVEQWLFEHLGEELDRCQLEWDVEAAKKKASVARTDKAALKRKLTKLKELYVNDLIDIEDYKKDYQIYVSALNQIPEPAQEAPPDFAAVRRLLDNSFRTIYDTLTREEKRTLWRSVIKEIGIDNDQNITGVVFG

SEQ ID NO: 8281 - protein, 456 aa, Unknown
  Description of Unknown: Integrase B8282 sequence
  PTHR30461:SF3,SM00857,G3DSA:1.10.10.2600,IPR036162,PF13408, PS51737,IPR025827,G3DSA:3.40.50.1390,IPR006119,IPR038109, PF07508,IPR011109,SSF53041,PTHR30461,Coil, PS51736,cd00338,PF00239
MRNKEIAPALVRVALYIRVSGEEQKIKGLSLEAQQERLEAYARERGWVIVGIYIDAAKTARKNIHKRTEFQRMMDSVKRDEVDILLFARLDRWFRSVADYYKVMEILQAHNCDWKTTDEEYDTTTANGRLYINVKLSIAQNEADIDGERIDVVFDSKIAHGTVVSGSSPFGFRVSEEKRLEIVPEDAAIVQDAFNYFETTVSQRATTKYIREKYGVNWCYATFHRMLIEELYTGVYNRGGRYNANFCPAIIQREQFDRVQALLKKNVRRAPSGRVYIFTSVLTCEECRHKLNGYISQGIYYYRCNQHLQRGRCTHNHSVREDRVEQWLFDHLGEELERCKLEWEVQAAEKKRSVTSRDKAALKRKLTKLKELYVNELIDIDDYKKDYEIYTAALNQIPDTTQEAPPDFAAVEKLLQKDFRKIYDTLTREEKRTLWRSVIKEIRIDNDQNITGVVFG

SEQ ID NO: 8282 - protein, 456 aa, Unknown
  Description of Unknown: Integrase B8283 sequence
  PTHR30461:SF3,SM00857,G3DSA:1.10.10.2600,IPR036162,PF13408, IPR025827,G3DSA:3.40.50.1390,PS51737,IPR006119,IPR038109, PF07508,IPR011109,SSF53041,PTHR30461,PS51736, cd00338,PF00239
MRNQNTSEVPIRAALYARVSGEEQKIKGLSIEAQKERLVAYAKERGWIIAGLFVDAAKTARKNMHKRSEFQKMLDLVRANGVDMLLFCRLDRWFRSVRDYYKVMEVLEAHNCQWKTTDEEYDTTTANGRLYINVKLSIAQNEADICGERIHVVFDSKIQHGTVLSGKCPFWLRINDERRYELIPENAAIIQDAFNHFESTTSQRATIRYIRETYDVNWCEATFRRMLKDKLTIGVYNKNGRYNEDFCPPVVSREQFDHVQELLKRNSRHNPAGRVYIFTGILVCEECRHHLVGRKQKDFFYYRCNQHFQRGRCTHNHSAREDVIETWLFEHLGEEIEKYEVAWNVQAAERKRTVASIDRSVLRRKLTKLKDLYMNDLIDIDEYKKDYETYTAALSALEEPEEEKHIDLSGVRRIISHDFREIYDSLTREEKRTLWKNTLKEIRVNNANEITGISFF

SEQ ID NO: 8283 - protein, 456 aa, Unknown
  Description of Unknown: Integrase B8284 sequence
  PTHR30461:SF3,SM00857,G3DSA:1.10.10.2600,IPR036162,PF13408, IPR025827,G3DSA:3.40.50.1390,PS51737,IPR006119,IPR038109, PF07508,IPR011109,SSF53041,PTHR30461,Coil, PS51736,cd00338,PF00239
MRNKEIAPALVRVALYIRVSGEEQKIKGLSLEAQQERLEAYARERGWVIVGIYIDAAKTARKNIHKRTEFQRMMDSVKRDEVDILLFARLDRWFRSVADYYKVMEILQAHNCDWKTTDEEYDTTTANGRLYINVKLSIAQNEADIDGERIDVVFDSKIAHGTVVSGSAPFGFRVNEEKRLEVVPEDAAIVQDAFNYFENTVSQRATVRYVRETYGVNWCDATFRRMLKEKLYTGVYDRGGRYNDQFCPAIISRQQFDRVQALLTRNVRSAPSGKVYIFTSILTCAECGHKLVGYKSSDYYYYRCNQHFQRGRCSHNHSAREDVVEQWLFEHLGEELERCQLEWDVEAAKKKASVARTDKAALKRKLTKLKELYVNDLIDIEDYKKDYQIYVSALNQIPEPAQEAPPDFAAVRRLLDNSFRTIYDTLTREEKRTLWRSVIKEIRIDNDQNITGVVFG

SEQ ID NO: 8284 - protein, 456 aa, Unknown
  Description of Unknown: Integrase B8285 sequence
  PTHR30461:SF3,SM00857,G3DSA:1.10.10.2600,IPR036162,PF13408, IPR025827,G3DSA:3.40.50.1390,PS51737,IPR006119,IPR038109, PF07508,IPR011109,SSF53041,PTHR30461,Coil, PS51736,cd00338,PF00239
MRNKEIAPALVRVALYIRVSGEEQKIKGLSLEAQQERLEAYARERGWVIVGIYIDAAKTARKNIHKRTEFQRMMDSVKRDEVDILLFARLDRWFRSVADYYKVMEILQVHNCDWKTTDEEYDTTTANGRLYINVKLSIAQNEADIDGERIDVVFDSKIAHGTVVSGSAPFGFRVNEEKRLEVVPEDAAIVQDAFNYFENTVSQRATVRYVRETYGVNWCDATFRRMLKEKLYTGVYDRGGRYNDQFCPAIISRRQFDRVQALLTRNVRSAPSGKVYIFTSILTCAECGHKLVGYKSSDYYYYRCNQHFQRGRCCHNHSAREDVVEAWLFDHLGEELERCQLEWDVEAAKKKASVARTDKAALKRKLTKLKELYVNDLIDIEDYKKDYQIYVSALNQIPEPAQEAPPDFAAVRRLLDNSFRTIYDTLTREEKRTLWRSVIKEIRIDNDQNITGVVFG

SEQ ID NO: 8285 - protein, 456 aa, Unknown
  Description of Unknown: Integrase B8286 sequence
  PTHR30461:SF3,SM00857,G3DSA:1.10.10.2600,IPR036162,PF13408, PS51737,G3DSA:3.40.50.1390,IPR025827,IPR006119,IPR038109, PF07508,IPR011109,SSF53041,PTHR30461,Coil, PS51736,cd00338,PF00239
MRNKEIAPALVRVALYIRVSGEEQKIKGLSLEAQQERLEAYARERGWVIVGIYIDAAKTARKNIHKRTEFQRMMDSVKRDEVDILLFARLDRWFRSVADYYKVMEVLQAHNCDWKTTDEEYDTTTANGRLYINVKLSIAQNEADIDGERIDVVFDSKIAHGTVVSGSAPFGFHVNEEKRLEVVPEDAAIVQDAFNYFENTVSQRATVRYVRETYGVNWCDATFRRMLKEKLYTGVYDRGGRYNDQFCPAIISRQQFDRVQALLTRNVRSAPSGKVYIFTSILTCAECGHKLVGYKSSDYFYYRCNQHFQRGRCSHNHSAREDVVEQWLFEHLGEELERCQLEWDVEAAKKKASVARTDKAALKRKLTKLKELYVNDLIDIEDYKKDYQIYVSALNQIPEPAQEAPPDFAAVRRLLDNSFRTIYDTLTREEKRTLWRSVIKEIRIDNDQNITGVVFG

SEQ ID NO: 8286 - protein, 456 aa, Unknown
  Description of Unknown: Integrase B8287 sequence
  PTHR30461:SF3,SM00857,G3DSA:1.10.10.2600,IPR036162,PF13408, IPR025827,G3DSA:3.40.50.1390,PS51737,IPR006119,IPR038109, PF07508,SSF53041,IPR011109,PTHR30461,Coil, PS51736,cd00338,PF00239
MRNKEIAPALVRVALYIRVSGEEQKIKGLSLEAQQERLEAYARERGWVIVGIYIDAAKTARKNIHKRTEFQRMMDSVKRDEVDILLFARLDRWFRSVADYYKVMEILQAHNCDWKTTDEEYDTTTANGRLYINVKLSIAQNEADIDGERIDVVFDSKIAHGTVVSGSSPFGFRVSEEKRLEIVPEDAAIVQDAFNYFENTVSQRATTKYIREKYGVNWCYATFHRMLIEELYTGVYNRGGRYNANFCPAIIQREQFDRVQALLKKNVRRAPSGRVYIFTSVLTCEECRHKLNGYISQGIYYYRCNQHLQRGRCTHNHSVREDRVEQWLFDHLGEELERCKLEWEVQAAEKKRSVTSRDKAALKRKLTKLKELYVNELIDIDDYKKDYEIYTAALNQIPDTTQEAPPDFAAVEKLLQKDFRKIYDTLTREEKRTLWRSVIKEIRIDNDQNITGVVFG

SEQ ID NO: 8287 - protein, 456 aa, Unknown
  Description of Unknown: Integrase B8288 sequence
  PTHR30461:SF3,SM00857,G3DSA:1.10.10.2600,IPR036162,PF13408, IPR025827,G3DSA:3.40.50.1390,PS51737,IPR006119,IPR038109, PF07508,IPR011109,SSF53041,PTHR30461,PS51736, cd00338,PF00239
MRNQNTSEVPIRAALYVRVSGEEQKIKGLSIEAQKERLVAYAKERGWIIAGLFVDAAKTARKNMHKRSEFQKMLDLVRADGVDMLLFCRLDRWFRSVRDYYKVMEVLETHNCQWKTTDEEYDTTTANGRLYINVKLSIAQNEADICGERIHVVFDSKIQHGTVLSGKCPFWLRINNERRYELIPENAAIIQDAFNHFESTTSQRATIRYIRETYDVNWCEATFRRMLKDKLTIGVYNKNGRYNEDFCPPVVSREQFDHVQELLKRNSRHNPAGRVYIFTGILVCEECRHHLVGRKQKDFFYYRCNQHFQRGRCTHNHSAREDVIETWLFEHLGEEIEKYEVAWNVQAAERKRTAASIDRSVLRRKLTKLKDLYMNDLIDIDEYKKDYETYTAALSALEEPEEEKHIDLSGVRRIISHDFREIYDSLTREEKRTLWKNTLKEIRVNNANEITGISFF

SEQ ID NO: 8288 - protein, 456 aa, Unknown
  Description of Unknown: Integrase B8289 sequence
  SM00857,G3DSA:1.10.10.2600,IPR036162,PF13408,PS51737, IPR025827,G3DSA:3.40.50.1390,IPR006119,IPR038109,PF07508, IPR011109,SSF53041,PTHR30461,PS51736,cd00338, PF00239
MRNQNTSEVPIRAALYVRVSGEEQKIKGLSIEAQKERLVAYAKERGWIIAGLFVDAAKTARKNMHKRSEFQKMLDLVRADGVDMLLFCRLDRWFRSVRDYYKVMEVLETHNCQWKTTDEEYDTTTANGRLYINVKLSIAQNEADICGERIHVVFDSKIQHGTVLSGKCPFWLRINNERRYELIPENAAIIQDAFNHFENTTSQRATIRYIRETYDVNWCEATFRRMLRDKLTIGVYDKNGRYNDDFCPPVISKEQFEHVQELLRRNSRHNPAGRVYIFTGILVCEECRHNLVGYYSRGYIYYRCSQHFQRGRCIHNHSAREDVIEAWLFDHLGEEIEKYEVAWNVQAAERKRTAASIDRSVLRRKLTKLKDLYMNDLIDIDEYKKDYETYTAALSALEDPEEEKHIDLSGVRRIISHDFREIYDSLTREEKRTLWKNTLKEIRVNNANEITGISFF

SEQ ID NO: 8289 - protein, 456 aa, Unknown
  Description of Unknown: Integrase B8290 sequence
  PTHR30461:SF3,SM00857,G3DSA:1.10.10.2600,IPR036162,PF13408, PS51737,G3DSA:3.40.50.1390,IPR025827,IPR006119,IPR038109, PF07508,SSF53041,IPR011109,PTHR30461,Coil, PS51736,cd00338,PF00239
MRNKEIAPALVRVALYIRVSGEEQKIKGLSLEAQQERLEAYARERGWVIVGIYIDAAKTARKNIHKRTEFQRMMDSVMRDEVDILLFARLDRWFRSVADYYKVMEILQAHNCDWKTTDEEYDTTTANGRLYINVKLSIAQNEADIDGERIDVVFDSKIAHGTVVSGSAPFGFRVNEEKRLEVVPEDAAIVQDAFNYFENTVSQRATVRYVRETYGVNWCDATFRRMLKEKLYTGVYDRGGRYNDQFCPAIIDRQQFDRVQALLTRNVRSAPSGKVYIFTSILTCAECGHKLVGYKSSDYFYYRCNQHFQRGRCSHNHSAREDVVEAWLFDHLGEELERCQLEWDVETAKKKASVARTDKAALKRKLTKLKELYVNDLIDIEDYKKDYQIYVSALNQIPEPAQEAPPDFAAVRRLLDNSFRTIYDTLTREEKRTLWRSVIKEIRIDNDQNITGVVFG

SEQ ID NO: 8290 - protein, 456 aa, Unknown
  Description of Unknown: Integrase B8291 sequence
  PTHR30461:SF3,SM00857,G3DSA:1.10.10.2600,IPR036162,PF13408, PS51737,G3DSA:3.40.50.1390,IPR025827,IPR006119,IPR038109, PF07508,SSF53041,IPR011109,PTHR30461,Coil, PS51736,cd00338,PF00239
MRNKEIAPALVRVALYIRVSGEEQKIKGLSLEAQQERLEAYARERGWVIVGIYIDAAKTARKNIHKRTEFQRMMDSVKRDEVDILLFARLDRWFRSVADYYKVMEILQAHNCDWKTTDEEYDTTTANGRLYINVKLSIAQNEADIDGERIDVVFDSKIAHGTVVSGSAPFGFRVNEEKRLEVVPEDAAIVQDAFNYFENTVSQRATVRYVRETYGVNWCDATFRRMLKEKLYTGVYDRVGRYNDQFCPAIISRQQFDRVQALLTRNVRSAPSGKVYIFTSILTCAECGHKLVGYKSSDYFYYRCNQHFQRGRCSHNHSAREDVVEQWLFEHLGEELERCQLEWDVEAAKKKASVARTDKAALKRKLTKLKELYVNDLIDIEDYKKDYQIYVSALNQIPEPAQEAPPDFAAVRRLLDNSFRTIYDTLTREEKRTLWRSVIKEIRIDNDQNITGVVFG

SEQ ID NO: 8291 - protein, 456 aa, Unknown
  Description of Unknown: Integrase B8292 sequence
  PTHR30461:SF3,SM00857,G3DSA:1.10.10.2600,IPR036162,PF13408, IPR025827,G3DSA:3.40.50.1390,PS51737,IPR006119,IPR038109, PF07508,IPR011109,SSF53041,PTHR30461,Coil, PS51736,cd00338,PF00239
MRNKEIAPVLVRVALYIRVSGEEQKIKGLSLEAQQERLEAYARERGWVIVGIYIDAAKTARKNIHKRTEFQRMMDSVKRDEVDILLFARLDRWFRSVADYYKVMEILQAHNCDWKTTDEEYDTTTANGRLYINVKLSIAQNEADIDGERIDVVFDSKIAHGTVVSGSAPFGFRVNEEKRLEVVPEDAAIVQDAFNYFENTVSQRATVRYVRETYGVNWCDATFRRMLKEKLYTGVYDRGGRYNDQFCPAIISRQQFDRVQALLTRNVRSAPSGKVYIFTSILTCAECGHKLVGYKSSDYYYYRCNQHFQRGRCSHNHSAREDVVEQWLFEHLGEELDRCQLEWDVEAAKKKASVARTDKAALKRKLTKLKELYVNDLIDIEDYKKDYQIYVSALNQIPEPAQEAPPDFAAVRRLLDNSFRTIYDTLTREEKRTLWRSVIKEIRIDNDQNITGVVFG

SEQ ID NO: 8292 - protein, 456 aa, Unknown
  Description of Unknown: Integrase B8293 sequence
  PTHR30461:SF3,SM00857,G3DSA:1.10.10.2600,IPR036162,PF13408, IPR025827,G3DSA:3.40.50.1390,PS51737,IPR006119,IPR038109, PF07508,IPR011109,SSF53041,PTHR30461,Coil, PS51736,cd00338,PF00239
MRNKEIAPALVRVALYIRVSGEEQKIKGLSLEAQQERLEAYARERGWVIVGIYIDAAKTARKNIHKRTEFQRMMDSVKRDEVDILLFARLDRWFRSVADYYKVMEILQAHNCDWKTTDEEYDTTTANGRLYINVKLSIAQNEADIDGERIDVVFDSKIAHGTVVSGSAPFGFRVNEEKRLEVVPEDAAIVQDAFNYFENTVSQRATVRYVRETYGVNWCDATFRRMLKEKLYTGVYDRGGRYNDQFCPAIISRQQFDRVQALLTRNVRSAPSGKVYIFTSILTCAECGHKLVGYKSSDYFYYRCNQHFQRGRCSHNHSAREDVVEQWLFEHLGEELERCQLEWDVEAAKKKASVARTDKAALKRKLTKLKELYVNDLIDIEDYKKDYQIYVSALNQIPEPAQEAPPDFAAVRRLLDNSFRTIYDTLTREEKRTLWRSVIKEIRIDNDQNITGVVFG

SEQ ID NO: 8293 - protein, 456 aa, Unknown
  Description of Unknown: Integrase B8294 sequence
  PTHR30461:SF3,SM00857,G3DSA:1.10.10.2600,IPR036162,PF13408, PS51737,IPR025827,G3DSA:3.40.50.1390,IPR006119,IPR038109, PF07508,IPR011109,SSF53041,PTHR30461,Coil, PS51736,cd00338,PF00239
MRNKEIAPALVRVALYIRVSGEEQKIKGLSLEAQQERLEAYARERGWVIVGIYIDAAKTARKNIHKRTEFQRMMDSVKRDEVDILLFARLDRWFRSVADYYKVMEILQAHNCDWKTTDEEYDTTTANGRLYINVKLSIAQNEADIDGERIDVVFDSKIAHGTVVSGSAPFGFRVNEEKRLEVVPEDAAIVQDAFNYFENTVSQRATVRYVRETYGVNWCDATFRRMLKEKLYTGVYDRGGRYNDQFCPAIINRQQFDRVQALLTRNVRSAPSGKVYIFTSILTCAECGHKLVGYKSSDYFYYRCNQHFQRGRCSHNHSAREDVVEQWLFEHLGEELERCQLEWDVEAAKKKASVARTDKAALKRKLTKLKELYVNDLIDIEDYKKDYQIYVSALNQIPEPAQEAPPDFAAVRRLLDNSFRTIYDTLTREEKRTLWRSVIKEIRIDNDQNITGVVFG

SEQ ID NO: 8294 - protein, 456 aa, Unknown
  Description of Unknown: Integrase B8295 sequence
  PTHR30461:SF3,SM00857,G3DSA:1.10.10.2600,IPR036162,PF13408, IPR025827,PS51737,G3DSA:3.40.50.1390,IPR006119,IPR038109, PF07508,IPR011109,SSF53041,PTHR30461,PS51736, cd00338,PF00239
MRNKEIAPALVRVALYIRVSGEEQKIKGLSLEAQQERLEAYARERGWVIVGIYIDAAKTARKNIHKRTEFQRMMEAVKRDEVDILLFARLDRWFRSVADYYKVMEILQAHNCDWKTTDEEYDTTTANGRLYINVKLSIAQNEADIDGERIDVVFDSKIAHGTVVSGSAPFGFRVNEEKRLEVVPEDAAIVQDAFNYFENTVSQRATVRYVRETYGVNWCDATFRRMLKEKLYTGVYDRGGRYNDQFCPAIIDRQQFDRVQALLTRNVRSAPSGKVYIFTSILTCAECGHKLVGYKSSDYYYYRCNQHFQRGRCSHNHSAREDVVEQWLFEHLGEELERCQLEWDVEATKKKASVVRTDKAALKRKLTKLKELYVNDLIDIEDYKKDYQIYVSALNQIPEPAQEAPPDFAAVRRLLDNSFRTIYDTLTREEKRTLWRSVIKEIRIDNDQNITGVVFG

SEQ ID NO: 8295 - protein, 456 aa, Unknown
  Description of Unknown: Integrase B8296 sequence
  PTHR30461:SF3,SM00857,G3DSA:1.10.10.2600,IPR036162,PF13408, IPR025827,G3DSA:3.40.50.1390,PS51737,IPR006119,IPR038109, PF07508,IPR011109,SSF53041,PTHR30461,Coil, PS51736,cd00338,PF00239
MRNKEIAPALVRVALYIRVSGEEQKIKGLSLEAQQERLEAYARERGWVIVGIYIDAAKTARKNIHKRTEFQRMMDSVKRDEVDILLFARLDRWFRSVADYYKVMEILQAHNCDWKTTDEEYDTTTANGRLYINVKLSIAQNEADIDGERIDVVFDSKIAHGTVVSGSAPFGFRVNEEKRLEVVPEDAAIVQDAFNYFENTVSQRATVRYVRETYGVNWCDATFRRMLKEKLYTGVYDRGGRYNDQFCPAIISRQQFDRVQALLTRNVRSAPSGKVYIFTSILTCAECGHKLVGYKSSDYFYYRCNQHFQRGRCSHNHSAREDVVEQWLFEHLGEELDRCQLEWDVEAAKKKASVARTDKAALKRKLTKLKELYVNDLIDIEDYKKDYQIYVAALNQIPEPAQEAPPDFAAVRRLLDNSFRTIYDTLTREEKRTLWRSVIKEIRIDNDQNITGVVFG

SEQ ID NO: 8296 - protein, 456 aa, Unknown
  Description of Unknown: Integrase B8297 sequence
  PTHR30461:SF3,SM00857,G3DSA:1.10.10.2600,IPR036162,PF13408, IPR025827,G3DSA:3.40.50.1390,PS51737,IPR006119,IPR038109, PF07508,SSF53041,IPR011109,PTHR30461,Coil, PS51736,cd00338,PF00239
MYKKELAPDLVRVALYIRVSGEEQKIKGLSLEAQQERLEAYARERGWVIVGIYIDAAKTARKNIHKRTEFQRMMDSVKRDEVDILLFARLDRWFRSVADYYKVMEILQAHNCDWKTTDEEYDTTTANGRLYINVKLSIAQNEADIDGERIDVVFDSKIAHGTVVSGSAPFGFRVNEEKRLEVVPEDAAIVQDAFNYFENTVSQRATVRYVRETYGVNWCDATFRRMLKEKLYTGVYDRGGRYNDQFCPAIIDRQQFDRVQALLTRNVRSAPSGKVYIFTSILTCAECGHKLVGYKSSDYFYYRCNQHFQRGRCSHNHSAREDVVEQWLFEHLGEELERCQLEWDVEAAKKKASVARTDKAALKRKLTKLKELYVNDLIDIEDYKKDYQIYVSALNQIPEPAQEAPPDFAAVRRLLDNSFRTIYDTLTREEKRTLWRSVIKEIRIDNDQNITGVVFG

SEQ ID NO: 8297 - protein, 456 aa, Unknown
  Description of Unknown: Integrase B8298 sequence
  PTHR30461:SF3,SM00857,G3DSA:1.10.10.2600,IPR036162,PF13408, IPR025827,G3DSA:3.40.50.1390,PS51737,IPR006119,IPR038109, PF07508,IPR011109,SSF53041,PTHR30461,Coil, PS51736,cd00338,PF00239
MRNKEIAPALVRVALYIRVSGEEQKIKGLSLEAQQERLEAYARGRGWVIVGIYIDAAKTARKNIHKRTEFQRMMDSVKRDEVDILLFARLDRWFRSVADYYKVMEILQAHNCDWKTTDEEYDTTTANGRLYINVKLSIAQNEADIDGERIDVVFDSKIAHGTVVSGSAPFGFRVNEEKRLEVVPEDAAIVQDAFNYFENTVSQRATVRYVRETYGVNWCDATFRRMLKEKLYTGVYDRGGRYNDQFCPAIISRQQFDRVQALLTRNVRSAPSGKVYIFTSILTCAECGHKLVGYKSSDYFYYRCNQHFQRGRCSHNHSAREDVVEQWLFEHLGEELERCQLEWDVEAAKKKASVARTDKAALKRKLTKLKELYVNDLIDIEDYKKDYQIYVSALNQIPEPAQEAPPDFAAVRRLLDNSFRTIYDTLTREEKRTLWRSVIKEIRIDNDQNITGVVFG

SEQ ID NO: 8298 - protein, 456 aa, Unknown
  Description of Unknown: Integrase B8299 sequence
  PTHR30461:SF3,SM00857,G3DSA:1.10.10.2600,IPR036162,PF13408, IPR025827,G3DSA:3.40.50.1390,PS51737,IPR006119,IPR038109, PF07508,SSF53041,IPR011109,PTHR30461,PS51736, cd00338,PF00239
MRNKEIAPALVRVALYIRVSGEEQKIKGLSLEAQQERLEAYARERGWVIVGIYIDAAKTARKNIHKRTEFQRMMDSVKRDEVDILLFARLDRWFRSVADYYKVMEILQAHNCDWKTTDEEYDTTTANGRLYINVKLSIAQNEADIDGERIDVVFDSKIAHGTVVSGSSPFGFRVSEEKRLEIVPEDAAIVQDAFNYFENTVSQRATTKYIREKYGVNWCYATFHRMLIEELYTGVYNRGGRYNANFCPAIIQREQFDRVQALLKKNVRRAPSGRVYIFTSVLTCEECRHKLNGYISQGIYYYRCNQHLQRGRCTHNHSVREDRVEQWLFDHLGEELERCKLEWEVQTAEKKRSVTSRDKAALKRKLTKLKELYVNELIDIDDYKKDYEIYTAALNQIPDTTHEAPPDFAAVEKLLQKDFRKIYDTLTREEKRTLWRSVIKEIRIDNDQNITGVVFW

SEQ ID NO: 8299 - protein, 456 aa, Unknown
  Description of Unknown: Integrase B8300 sequence
  PTHR30461:SF3,SM00857,G3DSA:1.10.10.2600,IPR036162,PF13408, PS51737,IPR025827,G3DSA:3.40.50.1390,IPR006119,IPR038109, PF07508,IPR011109,SSF53041,PTHR30461,Coil, PS51736,cd00338,PF00239
MRNKEIAPALVRVALYIRVSGEEQKIKGLSLEAQQERLEAYARERGWVIVGIYIDAAKTARKNIHKRTEFQRMMDSVKRDEVDILLFARLDRWFRSVADYYKVMEILQAHNCDWKTTDEEYDTTTANGRLYINVKLSIAQNEADIDGERIDVVFDSKIAHGTVVSGSSPFGFRVSEEKRLEIVPEDAAIVQDAFNYFETTVSQRATTKYIREKYGVNWCYATFHRMLIEELYTGVYNRGGRYNANFCPAIIQREQFDRVQALLKKNVRRAPSGRVYIFTSVLTCEECRHKLNGYISQGIYYYRCNQHLQRGRCTHNHSVREDRVEQWLFDHLGEELERCKLEWEVQAAEKKRSVTSRDKAALKRKLTKLKELYVNELIDIDDYKKDYEIYTAALNQIPDTAQEAPPDFTAVEKLLQKDFRKIYDTLTREEKRTLWRSVIKEIRIDNDQNITGVVFG

SEQ ID NO: 8300 - protein, 456 aa, Unknown
  Description of Unknown: Integrase B8301 sequence
  PTHR30461:SF3,SM00857,G3DSA:1.10.10.2600,IPR036162,PF13408, IPR025827,G3DSA:3.40.50.1390,PS51737,IPR006119,IPR038109, PF07508,IPR011109,SSF53041,PTHR30461,Coil, PS51736,cd00338,PF00239
MRNKEIAPALVRVALYIRVSGEEQKIKGLSLEAQQERLEAYARERGWVIVGIYIDAAKTARKNIHKRTEFQRMMEAVKRDEVDILLFARLDRWFRSVADYYKVMEILQAHNCDWKTTDEEYDTTTANGRLYINVKLSIAQNEADIDGERIDVVFDSKIAHGTVVSGSAPFGFRVNEEKRLEVVPEDAAIVQDAFNYFENTVSQRATVRYVRETYGVNWCDATFRRMLKEKLYTGVYDRGGRYNDQFCPAIIDRQQFDRVQVLLTRNVRSAPSGKVYIFTSILTCAECGHKLVGYKSSDYYYYRCNQHFQRGRCSHNHSAREDVVEQWLFEHLGEELERCQLEWGVEAAKKKASVARTDKAALKRKLTKLKELYVNDLIDIEDYKKDYQIYVSALNQIPEPAQEAPPDFAAVRRLLDNNFRTIYDTLTREEKRTLWRSVIKEIRIDNDQNITGVVFG

SEQ ID NO: 8301 - protein, 456 aa, Unknown
  Description of Unknown: Integrase B8302 sequence
  PTHR30461:SF3,SM00857,G3DSA:1.10.10.2600,IPR036162,PF13408, PS51737,IPR025827,G3DSA:3.40.50.1390,IPR006119,IPR038109, PF07508,IPR011109,SSF53041,PTHR30461,Coil, PS51736,cd00338,PF00239
MYKKELAPDLVRVALYIRVSGEEQKIKGLSLEAQQERLEAYARERGWVIVGIYIDAAKTARKNIHKRTEFQRMMDSVKRDEVDILLFARLDRWFRSVADYYKVMEILQAHNCDWKTTDEEYDTTTANGRLYINVKLSIAQNEADIDGERIDVVFDSKIAHGTVVSGSAPFGFRVNEEKRLEVVPEDAAIVQDAFNYFENTVSQRATVRYVRETYGVNWCDATFRRMLKEKLYTGVYDRGGRYNDQFCPAIISRQQFDRVQVLLTRNVRSAPSGKVYIFTSILTCAECGHKLVGYKSSDYYYYRCNQHFQRGRCSHNHSAREDVVEQWLFEHLGEELERCQLEWGVEAAKKKASVARTDKAALKRKLTKLKELYVNDLIDIEDYKKDYQIYVSALNQIPEPAQEAPPDFAAVRRLLDNSFRTIYDTLTREEKRTLWRSVIKEIRIDNDQNITGVVFG

SEQ ID NO: 8302 - protein, 456 aa, Unknown
  Description of Unknown: Integrase B8303 sequence
  PTHR30461:SF3,SM00857,G3DSA:1.10.10.2600,IPR036162,PF13408, PS51737,G3DSA:3.40.50.1390,IPR025827,IPR006119,IPR038109, PF07508,SSF53041,IPR011109,PTHR30461,Coil, PS51736,cd00338,PF00239
MYKKELAPDLVRVALYIRVSGEEQKIKGLSLEAQQERLEAYARERGWVIVGIYIDAAKTARKNIHKRTEFQRMMDSVKRDEVDILLFARLDRWFRSVADYYKVMEILQAHNCDWKTTDEEYDTTTANGRLYINVKLSIAQNEADIDGERIDVVFDSKIAHGTVVSGSAPFGFRVNEEKRLEVVPEDAAIVQDAFNYFENTVSQRATVRYVRETYGVNWCDATFRRMLKEKLYTGVYDRGGRYNDQFCPAIINRHQFDRVQALLTRNVRSAPSGKVYIFTSILTCAECGHKLVGYKSSDYYYYRCNQHFQRGRCSHNHSAREDVVEAWLFDHLGEELERCQLEWDVEAAKKKASVARTDKAALKRKLTKLKELYVNDLIDIEDYKKDYQIYVSALNQIPEPAQEAPPDFAAVRRLLDNSFRTIYDTLTREEKRTLWRSVIKEIRIDNDQNITGVVFG

SEQ ID NO: 8303 - protein, 456 aa, Unknown
  Description of Unknown: Integrase B8304 sequence
  PTHR30461:SF3,SM00857,G3DSA:1.10.10.2600,IPR036162,PF13408, IPR025827,PS51737,G3DSA:3.40.50.1390,IPR006119,IPR038109, PF07508,IPR011109,SSF53041,PTHR30461,Coil, PS51736,cd00338,PF00239
MRNKEIAPALVRVALYIRVSGEEQKIKGLSLEAQQERLEAYARERGWVIVGIYIDAAKTARKNIHKRTEFQRMMDSVKRDEVDILLFARLDRWFRSVADYYKVMEILQAHNCDWKTTDEEYDTTTANGRLYINVKLSIAQNEADIDGERIDVVFNSKIAHGTVVSGSAPFGFRVNEEKRLEVVPEDAAIVQDAFNYFESTVSQRATVRYVRETYGVNWCDATFRRMLKEKLYTGVYDRGGRYNDQFCPAIIDRQQFDRVQALLTRNVRSAPSGKVYIFTSILTCAECGHKLVGYKSSDYFYYRCNQHFQRGRCSHNHSAREDVVEQWLFEHLGEELDRCQLEWDVEAAKKKASVARTDKAALKRKLTKLKELYVNDLIDIEDYKKDYQIYVSALNQIPEPAQEAPPDFAAVRRLLDNSFRTIYDTLTREEKRTLWRSVIKEIRIDNDQNITGVVFG

SEQ ID NO: 8304 - protein, 456 aa, Unknown
  Description of Unknown: Integrase B8305 sequence
  PTHR30461:SF3,SM00857,G3DSA:1.10.10.2600,IPR036162,PF13408, IPR025827,PS51737,G3DSA:3.40.50.1390,IPR006119,IPR038109, PF07508,IPR011109,SSF53041,PTHR30461,Coil, PS51736,cd00338,PF00239
MRNKEIVPALVRVALYIRVSGEEQKIKGLSLEAQQERLEAYARERGWVIVGIYIDAAKTARKNIHKRTEFQRMMDSVKRDEVDILLFARLDRWFRSVADYYKVMEILQAHNCDWKTTDEEYDTTTANGRLYINVKLSIAQNEADIDGERIDVVFDSKIAHGTVVSGSAPFGFRVNEEKRLEVVPEDAAIVQDAFNYFENTVSQRATVRYVRETYGVNWCDATFRRMLKEKLYTGVYDRGGRYNDQFCPAIIDRQQFDRVQVLLTRNVRSAPSGKVYIFTSILTCAECGHKLVGYKSSDYYYYRCNQHFQRGRCSHNHSAREDVVEQWLFEHLGEELERCQLEWDVEAAKKKASVARTDKAALKRKLTKLKELYVNDLIDIEDYKKDYQIYVSALNQIPEPAQEAPPDFAAVRRLLDNSFRTIYDTLTREEKRTLWRSVIKEIRIDNDQNITGVVFG

SEQ ID NO: 8305 - protein, 456 aa, Unknown
  Description of Unknown: Integrase B8306 sequence
  PTHR30461:SF3,SM00857,G3DSA:1.10.10.2600,IPR036162,PF13408, IPR025827,PS51737,G3DSA:3.40.50.1390,IPR006119,IPR038109, PF07508,IPR011109,SSF53041,PTHR30461,Coil, PS51736,cd00338,PF00239
MRNKEIAPALVRVALYIRVSGEEQKIKGLSLEAQQERLEAYARERGWVIVGIYIDAAKTARKNIHKRTEFQRMMEAVKRDEVDILLFARLDRWFRSVADYYKVMEILQAHNCDWKTTDEEYDTTTANGRLYINVKLSIAQNEADIDGERIDVVFDSKIAHGTVVSGSAPFGFRVNEEKRLEVVPEDAAIVQDAFNYFENTVSQRATVRYVRETYGVNWCDATFRRMLKEKLYTGVYDRGGRYNDQFCPAIISRQQFDRVQALLTRNVRSAPSGKVYIFTSILTCAECGHKLVGYKSSDYFYYRCNQHFQRGRCSHNHSAREDVVEQWLFEHLGEELERCQLEWDVEAAKKKASVARTDKAALKRKLTKLKELYVNDLIDIEDYKKDYQIYVSALNQIPEPAQEVPPDFAAVRRLLDNSFRTIYDTLTREEKRTLWRSVIKEIRIDNDQNITGVVFG

SEQ ID NO: 8306 - protein, 456 aa, Unknown
  Description of Unknown: Integrase B8307 sequence
  PTHR30461:SF3,SM00857,G3DSA:1.10.10.2600,IPR036162,PF13408, IPR025827,G3DSA:3.40.50.1390,PS51737,IPR006119,IPR038109, PF07508,IPR011109,SSF53041,PTHR30461,Coil, PS51736,cd00338,PF00239
MRNKEIAPALVRVALYIRVSGEEQKIKGLSLEAQQERLEAYARERGWVIVGIYIDAAKTARKNIHKRTEFQRMMDSVKRDEVDILLFARLDRWFRSVADYYKVMEVLQAHNCDWKTTDEEYDTTTANGRLYINVKLSIAQNEADIDGERIDVVFDSKIAHGTVVSGSAPFGFRVNEEKRLEVVPEDAAIVQDAFNYFENTVSQRATVRYVRETYGVNWCDATFRRMLKEKLYTGVYDRGGRYNDQFCPAIIDRQQFDRVQALLTRNVRSAPSGKVYIFTSILTCAECGHKLVGYKSSDYFYYRCNQHFQRGRCSHNHSAREDVVEAWLFDHLGEELERCQLEWDVEAAKKKASVARTDKAALKRKLTKLKELYVNDLIDIEDYKKDYQIYVSALNQIPEPAQEAPPDFAAVRRLLDNSFRTIYDTLTREEKRTLWRSVIKEIRIDNDQNITGVVFW

SEQ ID NO: 8307 - protein, 456 aa, Unknown
  Description of Unknown: Integrase B8308 sequence
  PTHR30461:SF3,SM00857,G3DSA:1.10.10.2600,IPR036162,PF13408, IPR025827,G3DSA:3.40.50.1390,PS51737,IPR006119,IPR038109, PF07508,SSF53041,IPR011109,PTHR30461,Coil, PS51736,cd00338,PF00239
MYKKELAPDLVRVALYIRVSGEEQKIKGLSLEAQQERLEAYARERGWVIVGIYIDAAKTARKNIHKRTEFQRMMDSVKRDEVDILLFARLDRWFRSVADYYKVMEILQAHNCDWKTTDEEYDTTTANGRLYINVKLSIAQNEADIDGERIDVVFDSKIAHGTVVSGSAPFGFRVNEEKRLEVVPEDAAIVQDAFNYFENTVSQRATVRYVRETYGVNWCDATFRRMLKEKLYTGVYDRGGRYNDQFCPAIIDRQQFDRVQALLTRNVRSAPSGKVYIFTSILTCAECGHKLVGYKSSDYFYYRCNQHFQRGRCSHNHSAREDVVEQWLFEHLGEELERYQLEWDVEAAKKKASVARTDKAALKRKLTKLKELYVNDLIDIEDYKKDYQIYVSALNQIPEPAQEAPPDFAAVRRLLDNSFRTIYDTLTREEKRTLWRSVIKEIRIDNDQNITGVVFG

SEQ ID NO: 8308 - protein, 456 aa, Unknown
  Description of Unknown: Integrase B8309 sequence
  PTHR30461:SF3,SM00857,G3DSA:1.10.10.2600,IPR036162,PF13408, IPR025827,G3DSA:3.40.50.1390,PS51737,IPR006119,IPR038109, PF07508,SSF53041,IPR011109,PTHR30461,PS51736, cd00338,PF00239
MRNQNTSETPVRAALYVRVSGEEQKIKGLSIEAQKERLVAYAKERGWIIAGLFVDAAKTARKNMHKRSEFQKMLDLVRADGVDMLLFCRLDRWFRSVRDYYKVMEVLEAHNCQWKTTDEEYDTTTANGRLYINVKLSIAQNEADICGERIHVVFDSKIQHGTVLSGKCPFWLRINNERRYELIPENAAIIRDAFNHFENTTSQRATIRYIRETYDVNWCEATFRRMLRDKLTIGVYDKNGRYNDDFCPPVISKEQFEHVQELLRRNSRHNPAGRVYIFTGILVCEECRHNLVGYYSRDYIYYRCSQHFQRGRCIHNHSAREDVIEAWLFEHLGEEIEKYEVAWNVQAAERKRTAASIDRSVLRRKLTKLKDLYMNDLIDIDEYKKDYETYTAALSALEDPEEEKHIDLSGVRRIISHDFREIYDSLTREEKRTLWKNTLKEIRVNNANEITGISFF

SEQ ID NO: 8309 - protein, 456 aa, Unknown
  Description of Unknown: Integrase B8310 sequence
  PTHR30461:SF3,SM00857,G3DSA:1.10.10.2600,IPR036162,PF13408, IPR025827,G3DSA:3.40.50.1390,PS51737,IPR006119,IPR038109, PF07508,SSF53041,IPR011109,PTHR30461,Coil, PS51736,cd00338,PF00239
MRNKEIAPALVRVALYIRVSGEEQKIKGLSLEAQQERLEAYARERGWVIVGIYIDAAKTARKNIHKRTEFQRMMDSVKRDEVDILLFARLDRWFRSVADYYKVMEILQAHNCDWKTTDEEYDTTTANGRLYINVKLSIAQNEADIDGERIDVVFDSKIAHGTVVSGSAPFGFRVNEEKRLEVVPEDAAIVQEAFNYFETTVSQRATTKYIREKYGVNWCYATFHRMLIEELYTGVYNRGGRYNANFCPAIIQREQFDRVQALLKKNVRRAPSGRVYIFTSVLTCEECRHKLNGYISQGIYYYRCNQHLQRGRCSHNHSAREDRVEQWLFDHLGEELERCKLEWEVQAAEKKRSVTSRDKAALKRKLTKLKELYVNELIDIDDYKKDYEIYTAALNQIPDMTQEAPPDFAAVENLLQKDFRKIYDTLTREEKRTLWRSVIKEIRIDNDQNITGVVFG

SEQ ID NO: 8310 - protein, 456 aa, Unknown
  Description of Unknown: Integrase B8311 sequence
  PTHR30461:SF3,SM00857,G3DSA:1.10.10.2600,IPR036162,PF13408, IPR025827,G3DSA:3.40.50.1390,PS51737,IPR006119,IPR038109, PF07508,SSF53041,IPR011109,PTHR30461,Coil, PS51736,cd00338,PF00239
MYKKELAPDLVRVALYIRVSGEEQKIKGLSLEAQQERLEAYARERGWVIVGIYIDAAKTARKNIHKRTEFQRMMDSVKRDEVDILLFARLDRWFRSVADYYKVMEILQAHNCDWKTTDEEYDTTTANGRLYINVKLSIAQNEADIDGERIDVVFDSKIAHGTVVSGSAPFGFRVNEEKRLEVVPEDAAIVQDAFNYFENTVSQRATVRYVRETYGVNWCDATFRRMLKEKLYTGVYDRGGRYNDQFCPAIIDRQQFDRVQALLTRNVRSAPSGKVYIFTSILTCAECGHKLVGYKSSDYFYYRCNQHFQRGRCSHNHSAREDVVEAWLFDHLGEELERCQLEWDVEAAKKKASVARTDKAALKRKLTKLKELYVNDLIDIEDYKKDYQIYVSALNQIPEPAQEAPPDFAAVRRLLDNSFRTIYDTLTREEKRTLWRSVIKEIRIDNDQNITGVVFG

SEQ ID NO: 8311 - protein, 456 aa, Unknown
  Description of Unknown: Integrase B8312 sequence
  PTHR30461:SF3,SM00857,G3DSA:1.10.10.2600,IPR036162,PF13408, IPR025827,G3DSA:3.40.50.1390,PS51737,IPR006119,IPR038109, PF07508,IPR011109,SSF53041,PTHR30461,PS51736, cd00338,PF00239
MRKQNNSEAPVRAALYVRVSGEEQKIKGLSIEAQKERLVAYAKERGWIIAGLFVDAAKTARKNMHKRSEFQKMLDLVRADGVDMLLFCRLDRWFRSVRDYYKVMEVLETHNCQWKTTDEEYDTTTANGRLYINVKLSIAQNEADICGERIHVVFDSKIQHGTVLSGKCPFWLRINDERRYELIPENAAIIQDAFNHFENTTSQRATIRYIRETYDVNWCEATFRRMLKDKLAIGVYNKNGRYNEDFCPPVISKEQFEHVQELLKRNSRHNPAGRIYIFTGILVCEECRHHLVGRKQKDFFYYRCNQHFQRGRCTHNHSAREDVIETWLFEHLGEEIKKYEVAWNVQAAERKRTAASIDRSVLRRKLTKLKDLYMNDLIDIDEYKKDYETYTAALSALEEPEEEKHIDLSGVHRIISHDFREIYDSLTREEKRTLWKNTLKEIRVNNANEITGISFF

SEQ ID NO: 8312 - protein, 456 aa, Unknown
  Description of Unknown: Integrase B8313 sequence
  cd00338,SM00857,IPR036162,PF13408,IPR025827, PS51737,G3DSA:3.40.50.1390,IPR006119,SSF53041,IPR011109, PTHR30461,PS51736,Coil,PF00239
MEKKIRCAIYDRVSHELQVERGHSLEAQKELLTQYAVSQGYEIVGYYEDEGISARKKMGDRKELLRLLEDVKKDKVDIILVTKLDRWFRSVKDYHNTQAILDNHNCSWRTILEDYDSSTADGQLKINIMLSVSQNEADRTSERIKTVFDYKKRHKKAISGSVPFGYMIDDEKNVIKNPDQSEIVEAAFKKYLSTFNKWGTLDYLRDIYGDDAPTENQLLAMFEHPAYIGTLFGIEGFCEPYINAEQREKIMAVKSQRKRVMTGTVYLFSSMIVCPWCGKKWSGLSNKYHRQDGGITIHPAYRCSKYYYTGKGRHPHPSLSERKIEDYLRANLFRLIREQIYDIEQEEKDKPRQRKNRIKSIQLEMQRLNFLFQKGRIGMDYYDENYAALEEEVKALQEESKVVQIQQLRKMIDIGESNWLGMYDALDRQHKKAFWKGIIKEIYIDKEKRITKVIFL

SEQ ID NO: 8313 - protein, 456 aa, Unknown
  Description of Unknown: Integrase B8314 sequence
  PTHR30461:SF3,SM00857,G3DSA:1.10.10.2600,IPR036162, PF13408,IPR025827,G3DSA:3.40.50.1390,PS51737, IPR006119,IPR038109,PF07508,SSF53041, IPR011109,PTHR30461,Coil,PS51736,cd00338,PF00239
MYKKELAPDLVRVALYIRVSGEEQKIKGLSLEAQQERLEAYARERGWVIVGIYIDAAKTARKNIHKRTEFQRMMDSVKRDEVDILLFARLDRWFRSVADYYKVMEILQAHNCDWKTTDEEYDTTTANGRLYINVKLSIAQNEADIDGERIDVVFDSKIAHGTVVSGSAPFGFRVNEEKRLEVVPEDAAIVQDAFNYFENTVSQRATVRYVRETYGVNWCDATFRRMLKEKLYTGVYDRGGRYNDQFCPAIIDRQQFDRVQALLTRNVRSAPSGKVYIFTSILTCAECGHKLVGYKSSDYYYYRCNQHFQRGRCSHNHSAREDVVEAWLFDHLGEELERCQLEWDVEAAKKKASVARTDKAALKRKLTKLKELYVNDLIDIEDYKKDYQIYVSALNQIPEPAQEAPPDFAAVRRLLDNSFRTIYDTLTREEKRTLWRSVIKEIRIDNDQNITGVVFG

SEQ ID NO: 8314 - protein, 456 aa, Unknown
  Description of Unknown: Integrase B8315 sequence
  PTHR30461:SF3,SM00857,G3DSA:1.10.10.2600,IPR036162,PF13408, IPR025827,G3DSA:3.40.50.1390,PS51737,IPR006119,IPR038109, PF07508,SSF53041,IPR011109,PTHR30461,PS51736, cd00338,PF00239
MRNKEIAPALVRVALYIRVSGEEQKIKGLSLEAQQERLEAYARERGWVIVGIYIDAAKTARKNIHKRTEFQRMMDSVKRDEVDILLFARLDRWFRSVADYYKVMEILQAHNCDWKTTDEEYDTTTANGRLYINVKLSIAQNEADIDGERIDVVFDSKIAHGTVVSGSAPFGFRVNEEKRLEVVPEDAAIVQDAFNYFESTVSQRATVRYVRETYGVNWCDATFRRMLKEKLYTGVYDRGGRYNDQFCPAIINRQQFDRVQALLTRNVRSAPSGKVYIFTSILTCAECGHKLVGYKSSDYFYYRCNQHFQRGRCSHNHSAREDIVEAWLFDHLGEELERCQLEWDVEAAKKKASVVRTDKAALKRKLTKLKELYVNDLIDIEDYKKDYQIYVSALNQIPEPAQEAPPDFAAVRRLLDNSFRTIYDTLTREEKRTLWRSVIKEIRIDNDQNITGVVFG

SEQ ID NO: 8315 - protein, 456 aa, Unknown
  Description of Unknown: Integrase B8316 sequence
  PTHR30461:SF3,SM00857,G3DSA:1.10.10.2600,IPR036162,PF13408, PS51737,IPR025827,G3DSA:3.40.50.1390,IPR006119,IPR038109, PF07508,IPR011109,SSF53041,PTHR30461,Coil, PS51736,cd00338,PF00239
MRNKEIAPALVRVALYIRVSGEEQKIKGLSLEAQQERLEAYARERGWVIVGIYIDAAKTARKNIHKRTEFQRMMEAVKRDEVDILLFARLDRWFRSVADYYKVMEILQAHNCDWKTTDEEYDTTTANGRLYINVKLSIAQNEADIDGERIDVVFDSKIAHGTVVSGSAPFGFRVSEEKRLEIVPEDAAIVQDAFNYFENTVSQRATVRYVRETYGVNWCDATFRRMLKEKLYTGVYDRGGRYNDQFCPAIIDRQQFDRVQALLTRNVRSAPSGKVYIFTSILTCAECGHKLVGYKSSDYFYYRCNQHFQRGRCSHNHSAREDVVEQWLFEHLGEELERCQLEWDVEAAKKKASVARTDKAALKRKLTKLKELYVNDLIDIEDYKKDYQIYVSALNQIPEPAQEAPPDFAAVRRLLDNSFRTIYDTLTREEKRTLWRSVIKEIRIDNDQNITGVVFG

SEQ ID NO: 8316 - protein, 456 aa, Unknown
  Description of Unknown: Integrase B8317 sequence
  PTHR30461:SF3,SM00857,G3DSA:1.10.10.2600,IPR036162,PF13408, IPR025827,G3DSA:3.40.50.1390,PS51737,IPR006119,IPR038109, PF07508,IPR011109,SSF53041,PTHR30461,Coil, PS51736,cd00338,PF00239
MRNKEIAPALVRVALYIRVSGEEQKIKGLSLEAQQERLEAYARERGWVIVGIYIDAAKTARKNIHKRTEFQRMMEAVKRDEVDILLFARLDRWFRSVADYYKVMEILQAHNCDWKTTDEEYDTTTANGRLYINVKLSIAQNEADIDGERIDVVFDSKIAHGTVVSGSAPFGFRVNEEKRLEVIPEDAAIVQDAFNYFENTVSQRATVRYIRETYGVNWCDATFRRMLKEKLYTGVYDRGGRYNDQFCPAIINRQQFDRVQALLTRNVRSAPSGKVYIFTSILTCAECGHKLVGYKSSDYFYYRCNQHFQRGRCSHNHSAREDIVEAWLFDHLGEELERCQLEWDVEAAKKKASVARTDKAALKRKLTKLKELYVNDLIDIEDYKKDYQIYVSALNQIPEPVQEAPPDFAAVRRLLDNSFRTIYDTLTREEKRTLWRSVIKEIRIDNDQNITGVVFG

SEQ ID NO: 8317 - protein, 456 aa, Unknown
  Description of Unknown: Integrase B8318 sequence
  PTHR30461:SF3,SM00857,G3DSA:1.10.10.2600,IPR036162,PF13408, IPR025827,G3DSA:3.40.50.1390,PS51737,IPR006119,IPR038109, PF07508,SSF53041,IPR011109,PTHR30461,Coil, PS51736,cd00338,PF00239
MYKKELAPDLVRVALYIRVSGEEQKIKGLSLEAQQERLEVYARERGWVIVGIYIDAAKTARKNIHKRTEFQRMMDSVKRDEVDILLFARLDRWFRSVADYYKVMEILQAHNCDWKTTDEEYDTTTANGRLYINVKLSIAQNEADIDGERIDVVFDSKIAHGTVVSGSAPFGFRVNEEKRLEVVPEDAAIVQDAFNYFENTVSQRATVRYVRETYGVNWCDATFRRMLKEKLYTGVYDRGGRYNDQFCPAIIDRQQFDRVQALLTRNVRSAPSGKVYIFTSILTCAECGHKLVGYKSSDYFYYRCNQHFQRGRCSHNHSAREDVVEQWLFEHLGEELERCQLEWGVEAAKKKASIARTDKAALKRKLTKLKELYVNDLIDIEDYKKDYQIYVSALNQIPEPAQEAPPDFAAVRRLLDNSFRTIYDTLTREEKRTLWRSVIKEIRIDNDQNITGVVFG

SEQ ID NO: 8318 - protein, 456 aa, Unknown
  Description of Unknown: Integrase B8319 sequence
  PTHR30461:SF3,SM00857,G3DSA:1.10.10.2600,IPR036162,PF13408, IPR025827,G3DSA:3.40.50.1390,PS51737,IPR006119,IPR038109, PF07508,IPR011109,SSF53041,PTHR30461,Coil, PS51736,cd00338,PF00239
MRNKEIAPALVRVALYIRVSGEEQKIKGLSLEAQQERLEAYARERGWVIVGIYIDAAKTARKNIHKRTEFQRMMDSVKRDEVDILLFARLDRWFRSVADYYKVMEVLQAHNCDWKTTDEEYDTTTANGRLYINVKLSIAQNEADIDGERIDVVFDSKIAHGTVVSGSSPFGFRVSEEKRLEIVPEDAAIVQDAFNYFENTVSQRATTKYIREKYGVNWCYATFHRMLIEELYTGVYNRGGRYNANFCPAIIQREQFDRVQALLKKNVRRAPSGRVYIFTSVLTCEECRHKLNGYISQGIYYYRCNQHLQRGRCTHNHSVREDRVEQWLFDHLGEELERCKLEWEVQAAEKKRSVTSRDKAALKRKLTKLKELYVNELIDIDDYKKDYEIYTAALNQIPDTTQEAPPDFAAVEKLLQKDFRKIYDTLTREEKRTLWRSVIKEIRIDNDQNITGVVFG

SEQ ID NO: 8319 - protein, 456 aa, Unknown
  Description of Unknown: Integrase B8320 sequence
  PTHR30461:SF3,SM00857,G3DSA:1.10.10.2600,IPR036162,PF13408, PS51737,IPR025827,G3DSA:3.40.50.1390,IPR006119,IPR038109, PF07508,SSF53041,IPR011109,PTHR30461,PS51736, cd00338,PF00239
MRNKEIAPALVRVALYIRVSGEEQKIKGLSLEAQQERLEAYARERGWVIVGIYIDAAKTARKNIHKRTEFQRMMDSVKRDEVDILLFARLDRWFRSVADYYKVMEILQAHNCDWKTTDEEYDTTTANGRLYINVKLSIAQNEADIDGERIDVVFDSKIAHGTVVSGSAPFGFRVNEEKRLEVVPEDAAIVQDAFNYFENTVSQRATVRYVRETYGVNWCDATFRRMLKEKLYTGVYDRGGRFNDHFCPAIISKQQFDRVQALLERNARSVPSGKVYIFTSILTCAECGHKLVGYKSSDYYYYRCNQHFQRGRCSHNHSAREDVVEKWLFEHLAEELERCQLEWEVAAAKKKASVARTDKAALKRKLTKLKELYVNDLIDIEDYKRDYQIYTAALKQIPEPSIEPPPDFAAVRRLLDNDFKTIYENLTREEKRTLWRSVIKEIRIDNDQNITGVVFG

SEQ ID NO: 8320 - protein, 456 aa, Unknown
  Description of Unknown: Integrase B8321 sequence
  PTHR30461:SF3,SM00857,G3DSA:1.10.10.2600,IPR036162,PF13408, PS51737,IPR025827,G3DSA:3.40.50.1390,IPR006119,IPR038109, PF07508,IPR011109,SSF53041,PTHR30461,Coil, PS51736,cd00338,PF00239
MRNKEIAPALVRVALYIRVSGEEQKIKGLSLEAQQERLEAYARERGWVIVGIYIDAAKTARKNIHKRTEFQRMMDSVKRDEVDILLFARLDRWFRSVADYYKVMEILQAHNCDWKTTDEEYDTTTANGRLYINVKLSIAQNEADIDGERIDVVFDSKIAHGTVVSGSAPFGFRVNEEKRLEVVPEDAAIVQDAFNYFENTVSQRATVRYVRETYGVNWCDATFRRMLKEKLYTGVYDRGGRYNDQFCPAIISRQQFDRVQVLLTRNVRSAPSGKVYIFTSILTCAECGHKLVGYKSSDYFYYRCNQHFQRGRCSHNHSAREDVVEQWLFEHLGEELERCQLEWDVEAAKKKASVARTDKAALKRKLTKLKELYVNDLIDIEDYKKDYQIYVSALNQIPEPAQEAPPDFAAVRRLLDNSFRTIYDTLTREEKRTLWRSVIKEIRIDNDQNITGVVFG

SEQ ID NO: 8321 - protein, 456 aa, Unknown
  Description of Unknown: Integrase B8322 sequence
  PTHR30461:SF3,SM00857,G3DSA:1.10.10.2600,IPR036162,PF13408, PS51737,IPR025827,G3DSA:3.40.50.1390,IPR006119,IPR038109, PF07508,IPR011109,SSF53041,PTHR30461,Coil, PS51736,cd00338,PF00239
MRNKEIAPALVRVALYIRVSGEEQKIKGLSLEAQQERLEAYARERGWVIVGIYIDAAKTARKNIHKRTEFQRMMDSVKRDEVDILLFARLDRWFRSVADYYKVMEILQAHNCDWKTTDEEYDTTTANGRLYINVKLSIAQNEADIDGERIDVVFDSKIAHGTVVSGSAPFGFRVNEEKRLEVVPEDAAIVQDAFNYFENTVSQRATVRYVRETYGVNWCDATFRRMLKEKLYTGVYDRGGRYNDQFCPAIINRQQFDRVQALLTRNVRSAPSGKVYIFTSILTCAECGHKLVGYKSSDYFYYRCNQHFQRGRCSHNHSAREDVVEQWLFEHLGEELERCQLEWDVEAAKKKASVARTDKAALKRKLTKLKELYVNDLIDIEDYKKDYQIYVSALNQIPEPAQEAPPDFAAVHRLLDNSFRTIYDTLTREEKRTLWRSVIKEIRIDNDQNITGVVFG

SEQ ID NO: 8322 - protein, 456 aa, Unknown
  Description of Unknown: Integrase B8323 sequence
  PTHR30461:SF3,SM00857,G3DSA:1.10.10.2600,IPR036162,PF13408, IPR025827,G3DSA:3.40.50.1390,PS51737,IPR006119,IPR038109, PF07508,SSF53041,IPR011109,PTHR30461,Coil, PS51736,cd00338,PF00239
MRNKEIAPALVRVALYIRVSGEEQKIKGLSLEAQQERLEAYARERGWVIVGIYIDAAKTARKNIHKRTEFQRMMEAVKRDEVDILLFARLDRWFRSVADYYKVMEVLQAHNCDWKTTDEEYDTTTANGRLYINVKLSIAQNEADIDGERIDVVFDSKIAHGTVVSGSAPFGFRVNEEKRLEIVPEDAAIVQDAFNYFENTVSQRATVRYVRETYGVNWCDATFRRMLKEKLYTGVYDRGGRYNDQFCPAIISRQQFDRVQALLTRNVRSAPSGKVYIFTSILTCAECGHKLVGYKSSDYFYYRCNQHFQRGRCSHNHSAREDVVEQWLFEHLGEELERCQLEWDVEAAKKKASVARTDKAALKRKLTKLKELYVNDLIDIEDYKKDYQIYVSALNQIPEPAQEAPPDFAAVHRLLDNSFRTIYDTLTREEKRTLWRSVIKEIRIDNDQNITGVVFG

SEQ ID NO: 8323 - protein, 456 aa, Unknown
  Description of Unknown: Integrase B8324 sequence
  PTHR30461:SF3,SM00857,G3DSA:1.10.10.2600,IPR036162,PF13408, IPR025827,G3DSA:3.40.50.1390,PS51737,IPR006119,IPR038109, PF07508,SSF53041,IPR011109,PTHR30461,Coil, PS51736,cd00338,PF00239
MRNKEIAPALVRVALYIRVSGEEQKIKGLSLEAQQERLEAYARERGWVIVGIYIDAAKTARKNIHKRTEFQRMMDSVKRDEVDILLFARLDRWFRSVADYYKVMEILQAHNCDWKTTDEEYDTTTANGRLYINVKLSIAQNEADIDGERIDVVFDSKIAHGTVVSGSAPFGFRVNEEKRLEVVPEDAAIVQDAFNYFENTVSQRATVRYVRETYGVNWCDATFRRMLKEKLYTGVYDRGGRYNDQFCPAIIDRQQFDRVQALLTRNVRSAPSGKVYIFTSILTCAECGHKLVGYKSSDYYYYRCNQHFQRGRCSHNHSAREDVVEAWLFEHLGEELERCQLEWDVEAAKKKASVARTDKAALKRKLTKLKELYVNDLIDIEDYKKDYQIYVSALNQIPEPAQEAPPDFAAVRRLLDNNFRTIYDTLTREEKRTLWRSVIKEIRIDNDQNITGVVFG

SEQ ID NO: 8324 - protein, 456 aa, Unknown
  Description of Unknown: Integrase B8325 sequence
  PTHR30461:SF3,SM00857,G3DSA:1.10.10.2600,IPR036162,PF13408, PS51737,IPR025827,G3DSA:3.40.50.1390,IPR006119,IPR038109, PF07508,IPR011109,SSF53041,PTHR30461,Coil, PS51736,cd00338,PF00239
MRNKEIAPALVRVALYIRVSGEEQKIKGLSLEAQQERLEAYARERGWVIVGIYIDAAKTARKNIHKRTEFQRMMDSVKRDEVDILLFARLDRWFRSVADYYKVMEILQAHNCDWKTTDEEYDTTTANGRLYINVKLSIAQNEADIDGERIDVVFDSKIAHGTVVSGSAPFGFRVNEEKRLEVVPEDAAIVQDAFNYFENTVSQRATVRYVRETYGVNWCDATFRRMLKEKLYTGVYDRGGRYNDQFCPAIINRQQFDRVQALLTRNVRSAPSGKVYIFTSILTCAECGHKLVGYKSSDYFYYRCNQHFQRGRCSHNHSAREDVVEQWLFEHLGEELDRCQLEWDVEAAKKKASVARTDKAALKRKLTKLKELYVNDLIDIEDYKKDYQIYVSALNQIPEPAQEAPPDFAAVRRLLDNSFRTIYDTLTREEKRTLWRSVIKEIKIDNDQNITGVVFG

SEQ ID NO: 8325 - protein, 456 aa, Unknown
  Description of Unknown: Integrase B8326 sequence
  PTHR30461:SF3,SM00857,G3DSA:1.10.10.2600,IPR036162,PF13408, IPR025827,G3DSA:3.40.50.1390,PS51737,IPR006119,IPR038109, PF07508,IPR011109,SSF53041,PTHR30461,Coil, PS51736,cd00338,PF00239
MRNKEIAPALVRVALYIRVSGEEQKIKGLSLEAQQERLEAYARERGWVIVGIYIDAAKTARKNIHKRTEFQRMMDSVKRDEVDILLFARLDRWFRSVADYYKVMEVLQAHNCDWKTTDEEYDTTTANGRLYINVKLSIAQNEADIDGERIDVVFDSKIAHGTVVSGSAPFGFRVNEEKRLEIVPEDAAIVQDAFNYFENTVSQRATVRYVRETYGVNWCDATFRRMLKEKLYTGVYDRGGRYNDQFCPAIISRQQFDRVQALLTRNVRSAPSGKVYIFTSILTCAECGHKLVGYKSSDYFYYRCNQHFQRGRCSHNHSAREDVVEQWLFEHLGEELERCQLEWDVEAAKKKASVARTDKAALKRKLTKLKELYVNDLIDIEDYKKDYQIYVSALNQIPEPAQEAPPDFAAVRRLLDNSFRTIYDTLTREEKRTLWRSVIKEIRIDNDQNITGVVFG

SEQ ID NO: 8326 - protein, 456 aa, Unknown
  Description of Unknown: Integrase B8327 sequence
  PTHR30461:SF3,SM00857,G3DSA:1.10.10.2600,IPR036162,PF13408, IPR025827,PS51737,G3DSA:3.40.50.1390,IPR006119,IPR038109, PF07508,SSF53041,IPR011109,PTHR30461,Coil, PS51736,cd00338,PF00239
MRNKEIAPALVRVALYIRVSGEEQKIKGLSLEAQQERLEAYARERGWVIVGIYIDAAKTARKNIHKRTEFQRMMEAVKRDEVDILLFARLDRWFRSVADYYKVMEILQAHNCDWKTTDEEYDTTTANGRLYINVKLSIAQNEADIDGERIDVVFDSKIAHGTVVSGSAPFGFRVNEEKRLEVVPEDAAIVQDAFNYFESTVSQRATVRYVRETYGVNWCDATFRRMLKEKLYTGVYDRGGRYNDQFCPAIIDRQQFDRVQALLTRNVRSAPSGKVYIFTSILTCAECGHKLVGYKSSDYYYYRCNQHFQRGRCSHNHSAREDVVEQWLFEHLGEELERCQLEWDVEAAKKKASVARTDKAALKRKLTKLKELYVNDLIDIEDYKKDYQIYVSALNQIPEPAQEAPPDFAAVRRLLDNSFRTIYDTLTREEKRTLWRSVIKEIMIDNDQNITGVVFG

SEQ ID NO: 8327 - protein, 456 aa, Unknown
  Description of Unknown: Integrase B8328 sequence
  PTHR30461:SF3,SM00857,G3DSA:1.10.10.2600,IPR036162,PF13408, IPR025827,G3DSA:3.40.50.1390,PS51737,IPR006119,IPR038109, PF07508,IPR011109,SSF53041,PTHR30461,Coil, PS51736,cd00338,PF00239
MRNKEIAPALVRVALYIRVSGEEQKIKGLSLEAQQERLEAYARERGWVIVGIYIDAAKTARKNIHKRTEFQRMMDSVKRDEVDILLFARLDRWFRSVADYYKVMEVLQAHNCDWKTTDEEYDTTTANGRLYINVKLSIAQNEADIDGERIDVVFDSKIAHGTVVSGSAPFGFRVNEEKRLEVVPEDAAIVQDAFNYFENTVSQRATVRYVRETYGVNWCDATFRRMLKEKLYTGVYDRGGRYNDQFCPAIISRQQFDRVQALLTRNVRSAPSGKVYIFTSILTCAECGHKLVGYKSSDYFYYRCNQHFQRGRCSHNHSAREDVVEQWLFEHLGEELERCQLEWDVEAAKKKASVARTDKAALKRKLTKLKELYVNDLIDIEDYKKDYQIYVSALNQIPEPAQEAPPDFAAVRRLLDNSFRTIYDTLTREEKRTLWRSVIKEIRIDNDQNITGVVFG

SEQ ID NO: 8328 - protein, 456 aa, Unknown
  Description of Unknown: Integrase B8329 sequence
  PTHR30461:SF3,SM00857,G3DSA:1.10.10.2600,IPR036162,PF13408, IPR025827,G3DSA:3.40.50.1390,PS51737,IPR006119,IPR038109, PF07508,SSF53041,IPR011109,PTHR30461,Coil, PS51736,cd00338,PF00239
MRNKEIAPALVRVALYIRVSGEEQKIKGLSLEAQQERLEAYARERGWVIVGIYIDAAKTARKNIHKRTEFQRMMDSVKRDEVDILLFARLDRWFRSVADYYKVMEILQAHNCDWKTTDEEYDTTTANGRLYINVKLSIAQNEADIDGERIDVVFDSKIAHGTVVSGSAPFGFRVNEEKRLEVVPEDAAIVQDAFNYFENTVSQRATVRYVRETYGVNWCDATFRRMLKEKLYTGVYDRGGRYNDQFCPAIIDRQQFDRVQALLTRNVRSAPSGKVYIFTSILTCAECGHKLVGYKSSDYFYYRCNQHFQRGRCSHNHSAREDVVEQWLFEHLGEELERCQLEWDVEAAKKKASVARTDKAALKRKLTKLKELYVNDLIDIEDYKKDYQIYVSALNQIPEPAQEAPPDFAAVRRLLDNSFRTIYDTLTREEKRTLWRSVIKEIKIDNDQNITGVVFG

SEQ ID NO: 8329 - protein, 456 aa, Unknown
  Description of Unknown: Integrase B8330 sequence
  PTHR30461:SF3,IPR036162,PS51737,IPR011109,PTHR30461, PS00397,PF00239,G3DSA:1.10.10.2600,IPR006119,SSF53041, cd00338,SM00857,IPR025827,IPR038109,PS51736, IPR006118,PF13408,G3DSA:3.40.50.1390,Coil
MKNAACYCRVSTDEQVKFGFSIQAQVDALKKYCKENNYKYEFYIDEGISASTMKRPALQAMLKKINSFDIVLFTKLDRLSRNVLDANNINKILNDNNCTMKAIDEDDIDTSTADGTFIFNLKVSLAQREIGKTSERIKFVFQNKREKREVTSGTCKYGYKIENKKFVINNEEAENIINLYKYFISVNGSISKAYQYFIEHFNGKGYDAFSSYLRDTAYIGKYKLYRKNIYIDDYIPRIMEDELFYNVQDLLKKKQYSLSKNKEIALFAGILYCNKCGIRLTKNQDNRSKKMVIRYFCDNARRFKVGSLSKKCSNKSYIREDNIENYLLKNLYNEAQKYKAKYSISNLPSKIADNTSKINTLKKKLSKLKDLYLEDLIDKSEYEHDYTKYKKELSDLQSNYEEKIQRKDFSKLNKILNSGIINIYNSLSREEKRKFWLSIIDKIYVEDNQIKKITFL

SEQ ID NO: 8330 - protein, 456 aa, Unknown
  Description of Unknown: Integrase B8331 sequence
  PTHR30461:SF3,SM00857,G3DSA:1.10.10.2600,IPR036162,PF13408, IPR025827,G3DSA:3.40.50.1390,PS51737,IPR006119,IPR038109, PF07508,SSF53041,IPR011109,PTHR30461,Coil, PS51736,cd00338,PF00239
MYKKELAPDLVRVALYIRVSGEEQKIKGLSLEAQQERLEAYARERGWVIVGIYIDAAKTARKNIHKRTEFQRMMDSVKRDEVDILLFARLDRWFRSVADYYKVMEILQAHNCDWKTTDEEYDTTTANGRLYINVKLSIAQNEADIDGERIDVVFDSKIAHGTVVSGSAPFGFRVNEEKRLEVVPEDAAIVQDAFNYFENTVSQRATVRYVRETYGVNWCDATFRRMLKEKLYTGVYDRGGRYNDQFCPAIIDRQQFDRVQALLTRNVRSAPSGKVYIFTSILTCAECGHKLVGYKSSDYFYYRCNQHFQRGRCSHNHSAREDVVEQWLFEHLGEELERCQLEWDVEAAKKKASIARTDKAALKRKLTKLKELYVNDLIDIEDYKKDYQIYVSALNQIPEPAQEAPPDFAAVRRLLDNSFRTIYDTLTREEKRTLWRSVIKEIRIDNDQNITGVVFG

SEQ ID NO: 8331 - protein, 456 aa, Unknown
  Description of Unknown: Integrase B8332 sequence
  PTHR30461:SF3,IPR036162,PS51737,IPR011109,PTHR30461, PS00397,PF00239,G3DSA:1.10.10.2600,IPR006119,SSF53041, cd00338,SM00857,IPR025827,IPR038109,PS51736, IPR006118,PF13408,G3DSA:3.40.50.1390,Coil
MKYVACYCRVSTDEQAKFGFSIQAQKDALEKYCKENGYKYEFYIDEGISASSMKKRKALNEMLSKCNVFDMILFTKLDRLSRNVLDANNINKLLIDNKCTMKAIDEDDVDTSTADGTFIFNLKVSLAQREIGKTSERIKFVFKNKREKGEITSGTKKYGYDIVNKKYQINQSEAQNIINLYNYFIKVNGNTQETYKYFIQHFKNKGYDAMSNYLRETSYIGKYKLYRKNIYIDNYIPRIMNDDLFYTVQNLLKKREKTSIRTSNPSLFSGLIFCNICNTRMCKKQDNRSTKKLIRYCCDNASRRKVGSMEYKCSNHKLIREEYVEKYLLDNIASIAKKYINTNAVNSNQIIKKNNSKEIKQIENKILKLKDLYLDDLIDKKTYKTDYETLNRKLNELKNEEIIVPQKDFSKLKEIINLDIYKIYGVLSDEEKRTFWLRIIDKIYIENGEIKEVTFL

SEQ ID NO: 8332 - protein, 456 aa, Unknown
  Description of Unknown: Integrase B8333 sequence
  PTHR30461:SF3,SM00857,G3DSA:1.10.10.2600,IPR036162,PF13408, IPR025827,PS51737,G3DSA:3.40.50.1390,IPR006119,IPR038109, PF07508,SSF53041,IPR011109,PTHR30461,Coil, PS51736,cd00338,PF00239
MYKKELAPDLVRVALYIRVSGEEQKIKGLSLEAQQERLEAYARERGWVIVGIYIDAAKTARKNIHKRTEFQRMMDSVKRDEVDILLFARLDRWFRSVADYYKVMEILQAHNCDWKTTDEEYDTTTANGRLYINVKLSIAQNEADIDGERIDVVFDSKIAHGTVVSGSAPFGFRVNEEKRLEVVPEDAAIVQDAFNYFENTVSQRATVRYVRETYGVNWCDATFRRMLKEKLYTGVYDRGGRYNDQFCPVIINRQQFDRVQALLTRNVRSAPSGKVYIFTSILTCAECGHKLVGYKSSDYFYYRCNQHFQRGRCSHNHSAREDVVEAWLFDHLGEELERCQLEWDVEAAKKKASVARTDKAALKRKLTKLKELYVNDLIDIEDYKKDYQIYVSALNQIPEPAQEAPPDFAAVRRLLDNSFRTIYDTLTREEKRTLWRSVIKEIRIDNDQNITGVVFG

SEQ ID NO: 8333 - protein, 456 aa, Unknown
  Description of Unknown: Integrase B8334 sequence
  PTHR30461:SF3,SM00857,G3DSA:1.10.10.2600,IPR036162,PF13408, PS51737,IPR025827,G3DSA:3.40.50.1390,IPR006119,IPR038109, PF07508,IPR011109,SSF53041,PTHR30461,Coil, PS51736,cd00338,PF00239
MRNKEIAPALVRVALYIRVSGEEQKIKGLSLEAQQERLEAYARERGWVIVGIYIDAAKTARKNIHKRTEFQRMMDSVKRDEVDILLFARLDRWFRSVADYYKVMEILQAHNCDWKTTDEEYDTTTANGRLYINVKLSIAQNEADIDGERIDVVFDSKIAHGTVVSGSAPFGFRVNEKKRLEVVPEDAAIVQDAFNYFENTVSQRATVRYVRETYGVNWCDATFRRMLKEKLYTGVYDRGGRYNDQFCPAIINRQQFDRVQALLTRNVRSAPSGKVYIFTSILTCAECGHKLVGYKSSDYYYYRCNQHFQRGRCSHNHSAREDVVEQWLFEHLGEELERCQLEWDVEAAKKKASVARTDKAALKRKLTKLKELYVNDLIDIEDYKKDYQIYVSALNQIPEPAQEAPPDFAAVRRLLDNSFRTIYDTLTREEKRTLWRSVIKEIRIDNDQNITGVVFG

SEQ ID NO: 8334 - protein, 456 aa, Unknown
  Description of Unknown: Integrase B8335 sequence
  PTHR30461:SF3,SM00857,G3DSA:1.10.10.2600,IPR036162,PF13408, PS51737,IPR025827,G3DSA:3.40.50.1390,IPR006119,IPR038109, PF07508,IPR011109,SSF53041,PTHR30461,Coil, PS51736,cd00338,PF00239
MRNKEIAPALVRVALYIRVSGEEQKIKGLSLEAQQERLEAYARERGWVIVGIYIDAAKTARKNIHKRTEFQRMMEAVKRDEVDILLFARLDRWFRSVADYYKVMEILQAHNCDWKTTDEEYDTTTANGRLYINVKLSIAQNEADIDGERIDVVFDSKIAHGTVVSGSAPFGFRVNEEKRLEVVPEDAAIVQDAFNYFENTVSQRATVRYVRETYGVNWCDATFRRMLKEKLYTGVYDRGGRYNDQFCPAIINRQQFDRVQALLTRNVRSAPSGKVYIFTSILTCAECGHKLVGYKSSDYFYYRCNQHFQRGRCSHNHSAREDVVEQWLFEHLGEELERCQLEWDVEAAKKKASVARTDKAALKRKLTKLKELYVNDLIDIEDYKKDYQIYVSALNQIPEPAQEAPPDFAAVRRLLDNSFRTIYDTLTREEKRTLWRSVIKEIRIDNDQNITGVVFG

SEQ ID NO: 8335 - protein, 456 aa, Unknown
  Description of Unknown: Integrase B8336 sequence
  PTHR30461:SF3,SM00857,G3DSA:1.10.10.2600,IPR036162,PF13408, IPR025827,G3DSA:3.40.50.1390,PS51737,IPR006119,IPR038109, PF07508,SSF53041,IPR011109,PTHR30461,Coil, PS51736,cd00338,PF00239
MRNKEIAPALVRVALYIRVSGEEQKIKGLSLEAQQERLEAYARERGWVIVGIYIDAAKTARKNIHKRTEFQRMMEAVKRDEVDILLFARLDRWFRSVADYYKVMEVLQAHNCDWKTTDEEYDTTTANGRLYINVKLSIAQNEADIDGERIDVVFDSKIAHGTVVSGSSPFGFRVSEEKRLEIVPEDAAIVQDAFNYFENTVSQRATTKYIREKYGVNWCYATFHRMLIEELYTGVYNRGGRYNANFCPAIIQREQFDRVQALLKKNVRRAPSGRVYIFTSVLTCEECRHKLNGYISQGIYYYRCNQHLQRGRCTHNHSVREDRVEQWLFDHLGEELERCKLEWEVQAAEKKRSVTSRDKAALKRKLTKLKELYVNELIDIDDYKKDYEIYTAALNQIPDTTQEAPPDFAAVEKLLQKDFRKIYDTLTREEKRTLWRSVIKEIRIDNDQNITGVVFG

SEQ ID NO: 8336 - protein, 456 aa, Unknown
  Description of Unknown: Integrase B8337 sequence
  PTHR30461:SF3,SM00857,G3DSA:1.10.10.2600,IPR036162,PF13408, IPR025827,G3DSA:3.40.50.1390,PS51737,IPR006119,IPR038109, PF07508,SSF53041,IPR011109,PTHR30461,Coil, PS51736,cd00338,PF00239
MRNKEIAPALVRVALYIRVSGEEQKIKGLSLEAQQERLEAYARERGWVIVGIYIDAAKTARKNIHKRTEFQRMMDSVKRDEVDILLFARLDRWFRSVADYYKVMEVLQAHNCDWKTTDEEYDTTTANGRLYINVKLSIAQNEADIDGERIDVVFDSKIAHGTVVSGSAPFGFRVNEEKRLEVVPEDAAIVQDAFNYFENTVSQRATVRYVRETYGVNWCDATFRRMLKEKLYTGVYDRGGRYNDQFCPAIISRQQFDRVQALLTRNVRSAPSGKVYIFTSILTCAECGHKLVGYKSSDYFYYRCNQHFQRGRCSHNHSAREDVVEAWLFDHLGEELERCQLKWDVEAAKKKASVARTDKAALKRKLTKLKELYVNDLIDIEDYKKDYQIYVSALNQIPEPAQEAPPDFAAVRRLLDNSFRTIYDTLTREEKRTLWRSVIKEIRIDNDQNITGVVFG

SEQ ID NO: 8337 - protein, 456 aa, Unknown
  Description of Unknown: Integrase B8338 sequence
  PTHR30461:SF3,SM00857,G3DSA:1.10.10.2600,IPR036162,PF13408, PS51737,IPR025827,G3DSA:3.40.50.1390,IPR006119,IPR038109, PF07508,IPR011109,SSF53041,PTHR30461,PS51736, cd00338,PF00239
MRNKEIAPALVRVALYIRVSGEEQKIKGLSLEAQQERLEAYARERGWVIVGIYIDAAKTARKNIHKRTEFQRMMDSVKRDEVDILLFARLDRWFRSVADYYKVMEILQAHNCDWKTTDEEYDTTTANGRLYINVKLSIAQNEADIDGERIDVVFDSKIAHGTVVSGSAPFGFRVNEEKRLEVVPEDAAIVQDAFNYFENTVSQRATVRYIRETYGVNWCDATFRRMLKEKLYTGVYDRGGRYNDQFCPAIISRQQFDRVQALLTRNVRSAPSGKVYIFTSILTCAECGHKLVGYKSSDYFYYRCNQHFQRGRCSHNHSAREDVVEQWLFEHLGEELERCQLEWDVEAAKKKTSVARTDKAALKRKLTKLKELYVNDLIDIEDYKKDYQIYVSALNQIPEPAQEAPPDFAAVRRLLDNSFRTIYDTLTREEKRTLWRSVIKEIRIDNDQNITGVVFG

SEQ ID NO: 8338 - protein, 456 aa, Unknown
  Description of Unknown: Integrase B8339 sequence
  PTHR30461:SF3,SM00857,G3DSA:1.10.10.2600,IPR036162,PF13408, IPR025827,PS51737,G3DSA:3.40.50.1390,IPR006119,IPR038109, PF07508,SSF53041,IPR011109,PF00239,PTHR30461, PS51736,Coil,cd00338
MRNKEIAPALVRVALYIRVSGEEQKIKGLSLEAQQERLEAYARERGWVIVGIYIDAAKTARKNIHKRTEFQRMMDSVKRDEVDILLFARLDRWFRSVADYYKVMEVLQAHNCDWKTTDEEYDTTTANGRLYINVKLSIAQNEADIDGERIDVVFDSKIAHGTVVSGSAPFGFRVNEEKRLEVVPEDAAIVQDAFNYFENTVSQRATVRYVRETYGVNWCDATFRRMLKEKLYTGVYDRGGRYNDQFCPVIINRQQFDRVQALLTRNVRSAPSGKVYIFTSILTCAECGHKLVGYKSSDYFYYRCNQHFQRGRCSHNHSAREDVVEAWLFDHLGEELERCQLEWDVEAAKKKASVARTDKAALKRKLTKLKELYVNDLIDIEDYKKDYQIYVSALNQIPEPAQEAPPDFAAVRRLLDNSFRTIYDTLTREEKRTLWRSVIKEIRIDNDQNITGVVFG

SEQ ID NO: 8339 - protein, 456 aa, Unknown
  Description of Unknown: Integrase B8340 sequence
  PTHR30461:SF3,SM00857,G3DSA:1.10.10.2600,IPR036162,PF13408, PS51737,G3DSA:3.40.50.1390,IPR025827,IPR006119,IPR038109, PF07508,SSF53041,IPR011109,PTHR30461,Coil, PS51736,cd00338,PF00239
MRNKEIAPALVRVALYIRVSGEEQKIKGLSLEAQQERLEAYARERGWVIVGIYIDAAKTARKNIHKRTEFQRMMDSVKRDEVDILLFARLDRWFRSVADYYKVMEILQAHNCDWKTTDEEYDTTTANGRLYINVKLSIAQNEADIDGERIDVVFDSKIAHGTVVSGSAPFGFRVNEEKRLEVVPEDAVIVQDAFNYFENTVSQRATVRYVRETYGVNWCDATFRRMLKEKLYTGVYDRGGRYNDQFCPAIINRQQFDRVQALLTRNVRSAPSGKVYIFTSILTCAECGHKLVGYKSSDYYYYRCNQHFQRGRCSHNHSAREDVVEQWLFEHLGEELERCQLEWDVEAAKKKASVARTDKAALKRKLTKLKELYVNDLIDIEDYKKDYQIYVSALNQIPEPAQEAPPDFAAVRRLLDNSFRTIYDTLTREEKRTLWRSVIKEIRIDNDQNITGVVFG

SEQ ID NO: 8340 - protein, 456 aa, Unknown
  Description of Unknown: Integrase B8341 sequence
  PTHR30461:SF3,SM00857,G3DSA:1.10.10.2600,IPR036162,PF13408, PS51737,G3DSA:3.40.50.1390,IPR025827,IPR006119,IPR038109, PF07508,IPR011109,SSF53041,PTHR30461,Coil, PS51736,cd00338,PF00239
MRNKEIAPALVRVALYIRVSGEEQKIKGLSLEAQQERLEAYARERGWVIVGIYIDAAKTARKNIHKRTEFQRMMDSVKRDEVDILLFARLDRWFRSVADYYKVMEILQAHNCDWKTTDEEYDTTTANGRLYINVKLSIAQNEADIDGERIDVVFDSKIAHGTVVSGSAPFGFRVNEEKRLEVVPEDAAIVQDAFNYFENTVSQRATVRYVRETYGVNWCDATFRRMLKEKLYTGVYDRGGRYNDQFCPAIINRQQFDRVQALLTRNVRSAPSGKVYIFTSILTCAECGHKLVGYKSSDYYYYRCNQHFQRGRCSHNHSAREDVVEQWLFEHLGEELERCQLEWDVEAAKKKASVARTDKAALKRKLTKLKELYVNDLIDIEDYKKDYQIYVSALNQIPEPAQEAPPDFAAVRRLLDNSFRTIYDTLTREEKRTLWRSVIKEIKIDNDQNITGVVFG

SEQ ID NO: 8341 - protein, 456 aa, Unknown
  Description of Unknown: Integrase B8342 sequence
  PTHR30461:SF3,SM00857,G3DSA:1.10.10.2600,IPR036162,PF13408, PS51737,IPR025827,G3DSA:3.40.50.1390,IPR006119,IPR038109, PF07508,IPR011109,SSF53041,PTHR30461,Coil, PS51736,cd00338,PF00239
MRNNEIVPALVRVALYIRVSGEEQKIKGLSLEAQQERLEAYARERGWVIVGIYIDAAKTARKNIHKRTEFQRMMDSVKRDEVDILLFARLDRWFRSVADYYKVMEILQAHNCDWKTTDEEYDTTTANGRLYINVKLSIAQNEADIDGERIDVVFDSKIAHGTVVSGSAPFGFRVNEEKRLEVVPEDAAIVQDAFNYFENTVSQRATVRYVRETYGVNWCDATFRRMLKEKLYTGVYDRGGRYNDQFCPAIINRQQFDRVQALLTRNVRSAPSGKVYIFTSILTCAECGHKLVGYKSSDYFYYRCNQHFQRGRCSHNHSAREDVVEAWLFDHLGEELERCQLEWDVEAAKKKASVARTDKAALKRKLTKLKELYVNDLIDIEDYKKDYQIYVSALNQIPEPAQEAPPDFAAVRRLLDNSFRTIYDTLTREEKRTLWRSVIKEIRIDNDQNITGVVFG

SEQ ID NO: 8342 - protein, 456 aa, Unknown
  Description of Unknown: Integrase B8343 sequence
  PTHR30461:SF3,SM00857,G3DSA:1.10.10.2600,IPR036162,PF13408, PS51737,G3DSA:3.40.50.1390,IPR025827,IPR006119,IPR038109, PF07508,IPR011109,SSF53041,PTHR30461,Coil, PS51736,cd00338,PF00239
MRNKEIAPALVRVALYIRVSGEEQKIKGLSLEAQQERLEAYARERGWVIVGIYIDAAKTARKNIHKRTEFQRMMDSVKRDEVDILLFARLDRWFRSVADYYKVMEILQAHNCDWKTTDEEYDTTTANGRLYINVKLSIAQNEADIDGERIDVVFDSKIAHGTVVSGSAPFGFRVNEEKRLEVVPEDAAIVQDAFNYFENTVSQRATVRYVRETYGVNWCDATFRRMLKEKLYTGVYDRGGRYNDQFCPAIINRQQFDRVQALLTRNVRSAPSGKVYIFTSILTCAECGHKLVGYKSSDYYYYRCNQHFQRGRCSHNHSAREDVVEAWLFDHLGEELERCQLEWDVEAAKKKASVARTDKAALKRKLTKLKELYVNDLIDIEDYKKDYQIYVSALNQIPEPAQEAPPDFAAVRRLLDNSFRTIYDTLTREEKRTLWRSVIKEIRIDNDQNITGVVFG

SEQ ID NO: 8343 - protein, 456 aa, Unknown
  Description of Unknown: Integrase B8344 sequence
  PTHR30461:SF3,SM00857,G3DSA:1.10.10.2600,IPR036162,PF13408, IPR025827,G3DSA:3.40.50.1390,PS51737,IPR006119,IPR038109, PF07508,IPR011109,SSF53041,PTHR30461,Coil, PS51736,cd00338,PF00239
MRNKEIAPALVRVALYIRVSGEEQKIKGLSLEAQQERLEAYARERGWVIVGIYIDAAKTARKNIHKRTEFQRMMDSVKRDEVDILLFARLDRWFRSVADYYKVMEVLQAHNCDWKTTDEEYDTTTANGRLYINVKLSIAQNEADIDGERIDVVFDSKIAHGTVVSGSAPFGFRVNEEKRLEVVPEDAAIVQDAFNYFENTVSQRATVRYVRETYGVNWCDATFRRMLKEKLYTGVYDRGGRYNDQFCPAIISRQQFDRVQALLTRNVRSAPSGKVYIFTSILTCAECGHKLVGYKSSDYFYYRCNQHFQRGRCSHNHSAREDVVEQWLFEHLGEELDRCQLEWDVEAAKKKASVARTDKAALKRKLTKLKELYVNDLIDIEDYKKDYQIYVSALNQIPEPAQEAPPDFAAVRRLLDNSFRTIYDTLTREEKRTLWRSVIKEIRIDNDQNITGVVFG

SEQ ID NO: 8344 - protein, 456 aa, Unknown
  Description of Unknown: Integrase B8345 sequence
  PTHR30461:SF3,SM00857,G3DSA:1.10.10.2600,IPR036162,PF13408, IPR025827,G3DSA:3.40.50.1390,PS51737,IPR006119,IPR038109, PF07508,IPR011109,SSF53041,PTHR30461,Coil, PS51736,cd00338,PF00239
MRNKEIAPALVRVALYIRVSGEEQKIKGLSLEAQQERLEAYARERGWVIVGIYIDAAKTARKNIHKRTEFQRMMDSVKRDEVDILLFARLDRWFRSVADYYKVMEILQAHNCDWKTTDEEYDTTTANGRLYINVKLSIAQNEADIDGERIDVVFDSKIAHGTVVSGSAPFGFRVNEEKRLEVVPEDAAIVQDAFNYFENTVSQRATVRYVRETYGVNWCDATFRRMLKEKLYTGVYDRGGRYNDQFCPAIIDRQQFDRVQALLTRNVRSAPSGKVYIFTSILTCAECGHKLVGYKSSDYYYYRCNQHFQRGRCSHNHSAREDVVEQWLFEHLGEELERCQLEWDVEAAKKKASVARTDKAALKRKLTKLKELYVNDLIDIEDYKKDYQIYVSALNQIPEPAQEAPPDFAAVRRLLDNSFRTIYDTLTREEKRTLWRSVIKEIKIDNDQNITGVVFG

SEQ ID NO: 8345 - protein, 456 aa, Unknown
  Description of Unknown: Integrase B8346 sequence
  SM00857,G3DSA:1.10.10.2600,IPR036162,PF13408,IPR025827, PS51737,G3DSA:3.40.50.1390,IPR006119,IPR038109,PF07508, IPR011109,SSF53041,PTHR30461,PS51736,cd00338, PF00239
MRNQNTSEVPIRAALYVRVSGEEQKIKGLSIEAQKERLVAYAKERGWIIAGLFVDAAKTARKNMHKRSEFQKMLDLVRADGVDMLLFCRLDRWFRSVRDYYKVMEVLETHSCQWKTTDEEYDTTTANGRLYINVKLSIAQNEADICGERIHVVFDSKIQHGTVLSGKCPFWLRINNERRYELIPENAAIIQDAFNHFESTTSQRATIRYIRETYDVNWCEATFRRMLRDKLTIGVYDKNGRYNDDFCPPVISKEQFEHVQELLRRNSRHNPAGRVYIFTGILVCEECRHNLVGYYSRGYIYYRCSQHFQRGRCTHNHSAREDVIEAWLFDHLGEEIEKYEVAWNVQAAERKRTAASIDRSVLRRKLTKLKDLYMNDLIDIDEYKKDYETYTAALSALEEPEEEKHIDLSGVRRIISHDFREIYDSLTREEKRTLWKNTLKEIRVNNANEITGISFF

SEQ ID NO: 8346 - protein, 456 aa, Unknown
  Description of Unknown: Integrase B8347 sequence
  PTHR30461:SF3,SM00857,G3DSA:1.10.10.2600,IPR036162,PF13408, IPR025827,PS51737,G3DSA:3.40.50.1390,IPR006119,IPR038109, PF07508,SSF53041,IPR011109,PTHR30461,Coil, PS51736,cd00338,PF00239
MRNKEIAPALVRVALYIRVSGEEQKIKGLSLEAQQERLEAYARERGWVIVGIYIDAAKTARKNIHKRTEFQRMMDSVKRDEVDILLFARLDRWFRSVADYYKVMEILQAHNCDWKTTDEEYDTTTANGRLYINVKLSIAQNEADIDGERIDVVFDSKIAHGTVVSGSAPFGFRVNEEKRLEVVPEDAAIVQDAFNYFENTVSQRATVRYIRETYGVNWCDATFRRMLKEKLYTGVYDRGGRYNDQFCPAIISRQQFDRVQALLTRNVRSAPSGKVYIFTSILTCAECGHKLVGYKSSDYFYYRCNQHFQRGRCSHNHSAREDVVEQWLFEHLGEELDRCQLEWDVEAAKKKASVARTDKAALKRKLTKLKELYVNDLIDIEDYKKDYQIYVSALNQIPEPAQEAPPDFAAVRRLLDNSFRTIYDTLTREEKRTLWRSVIKEIRIDNDQNITGVVFG

SEQ ID NO: 8347 - protein, 456 aa, Unknown
  Description of Unknown: Integrase B8348 sequence
  PTHR30461:SF3,SM00857,G3DSA:1.10.10.2600,IPR036162,PF13408, IPR025827,G3DSA:3.40.50.1390,PS51737,IPR006119,IPR038109, PF07508,SSF53041,IPR011109,PTHR30461,Coil, PS51736,cd00338,PF00239
MRNKEIAPALVRVALYIRVSGEEQKIKGLSLEAQQERLEAYARERGWVIVGIYIDAAKTARKNIHKRTEFQRMMDSVKRDEVDILLFARLDRWFRSVADYYKVMEILQAHNCDWKTTDEEYDTTTANGRLYINVKLSIAQNEADIDGERIDVVFDSKIAHGTVVSGSAPFGFRVNEEKRLEVVPEDAAIVQDAFNYFENTVSQRATVRYVRETYGVNWCDATFRRMLKEKLYTGVYDRGGRYNDQFCPAIIDRQQFDRVQALLTRNVRSAPSGKVYIFTSILTCAECGHKLVGYKSSDYFYYRCNQHFQRGRCSHNHSAREDVVEQWLFEHLGEELDRCQLEWDVEAAKKKASVARTDKAALKRKLTKLKELYVNDLIDIEDYKKDYQIYVSALNQIPEPAQEAPPDFAAVRRLLDNSFRTIYDTLTREEKRTLWRSVIKEIRIDNDQNITGVVFG

SEQ ID NO: 8348 - protein, 456 aa, Unknown
  Description of Unknown: Integrase B8349 sequence
  PTHR30461:SF3,SM00857,G3DSA:1.10.10.2600,IPR036162,PF13408, IPR025827,G3DSA:3.40.50.1390,PS51737,IPR006119,IPR038109, PF07508,SSF53041,IPR011109,PTHR30461,Coil, PS51736,cd00338,PF00239
MRNKEIAPALVRVALYIRVSGEEQKIKGLSLEAQQERLEAYARERGWVIVGIYIDAAKTARKNIHKRTEFQRMMEAVKRDEVDILLFARLDRWFRSVADYYKVMEILQAHNCDWKTTDEEYDTTTANGRLYINVKLSIAQNEADIDGERIDVVFDSKIAHGTVVSGSAPFGFRVNEEKRLEVVPEDAAIVQDAFNYFENTVSQRATVRYVRETYGVNWCDATFRRMLKEKLYTGVYDRGGRYNDQFCPAIIDRQQFDRVQALLTRNVRSAPSGKVYIFTSILTCAECGHKLVGYKSSDYFYYRCNQHFQRGRCSHNHSAREDVVEQWLFEHLGEELDRCQLEWDVEAAKKKASVARTDKAALKRKLTKLKELYVNDLIDIEDYKKDYQIYVSALNQIPEPAQEAPPDFAAVRRLLDNSFRTIYDTLTREEKRTLWRSVIKEIRIDNDQNITGVVFG

SEQ ID NO: 8349 - protein, 456 aa, Unknown
  Description of Unknown: Integrase B8350 sequence
  PTHR30461:SF3,SM00857,G3DSA:1.10.10.2600,IPR036162,PF13408, IPR025827,PS51737,G3DSA:3.40.50.1390,IPR006119,IPR038109, PF07508,IPR011109,SSF53041,PF00239,PTHR30461, PS51736,Coil,cd00338
MRNKEIAPALVRVALYIRVSGEEQKIKGLSLEAQQERLEAYARERGWVIVGIYIDAAKTARKNIHKRTEFQRMMDSVKRDEVDILLFARLDRWFRSVADYYKVMEVLQAHNCDWKTTDEEYDTTTANGRLYINVKLSIAQNEADIDGERIDVVFDSKIAHGTVVSGSAPFGFRVNEEKRLEVVPEDAAIVQDAFNYFENTVSQRATVRYVRETYGVNWCDATFRRMLKEKLYTGVYDRGGRYNDQFCPVIINRQQFDRVQALLTRDVRSAPSGKVYIFTSILTCAECGHKLVGYKSSDYFYYRCNQHFQRGRCSHNHSAREDVVEAWLFDHLGEELERCQLEWDVEAAKKKASVARTDKAALKRKLTKLKELYVNDLIDIEDYKKDYQIYVSALNQIPEPAQEAPPDFAAVRRLLDNSFRTIYDTLTREEKRTLWRSVIKEIRIDNDQNITGVVFG

SEQ ID NO: 8350 - protein, 456 aa, Unknown
  Description of Unknown: Integrase B8351 sequence
  PTHR30461:SF3,SM00857,G3DSA:1.10.10.2600,IPR036162,PF13408, IPR025827,PS51737,G3DSA:3.40.50.1390,IPR006119,IPR038109, PF07508,IPR011109,SSF53041,PTHR30461,Coil, PS51736,cd00338,PF00239
MRNKEIAPALVRVALYIRVSGEEQKIKGLSLEAQQERLEAYARERGWVIVGIYIDAAKTARKNIHKRTEFQRMMEAVKRDEVDILLFARLDRWFRSVADYYKVMEILQAHNCDWKTTDEEYDTTTANGRLYINVKLSIAQNEADIDGERIDVVFDSKIAHGTVVSGSAPFGFRVNEEKRLEVVPEDAAIVQDAFNYFKNTVSQRATVRYVRETYGVNWCDATFRRMLKEKLYTGVYDRGGRYNDQFCPAIINRQQFDRVQALLTRNVRSAPSGKVYIFTSILTCAECGHKLVGYKSSDYFYYRCNQHFQRGRCCHNHSAREDVVEAWLFDHLGEELERCQLEWDVEAAKKKASVARTDKAALKRKLTKLKELYVNDLIDIEDYKKDYQIYVSALNQIPEPAQEAPPDFAAVRRLLDNSFRTIYDTLTREEKRTLWRSVIKEIRIDNDQNITGVVFG

SEQ ID NO: 8351 - protein, 456 aa, Unknown
  Description of Unknown: Integrase B8352 sequence
  PTHR30461:SF3,SM00857,G3DSA:1.10.10.2600,IPR036162,PF13408, PS51737,G3DSA:3.40.50.1390,IPR025827,IPR006119,IPR038109, PF07508,IPR011109,SSF53041,PTHR30461,Coil, PS51736,cd00338,PF00239
MRSKEIAPALVRVALYIRVSGEEQKIKGLSLEAQQERLEAYARERGWVIVGIYIDAAKTARKNIHKRTEFQRMMEAVKRDEVDILLFARLDRWFRSVADYYKVMEILQAHNCDWKTTDEEYDTTTANGRLYINVKLSIAQNEADIDGERIDVVFDSKIAHGTVVSGSAPFGFRVNEEKRLEVVPEDAAIVQDAFNYFENTVSQRATVRYVRETYGVNWCDATFRRMLKEKLYTGVYDRGGRYNDQFCPAIINRQQFDRVQALLTRNVRSAPSGKVYIFTSILACAECGHKLVGYKSSDYFYYRCNQHFQRGRCSHNHSAREDVVEAWLFDHLGEELERCQLEWDVEAAKKKASVARTDKAALKRKLTKLKELYVNDLIDIEDYKKDYQIYVSALNQIPEPAQEAPPDFAAVRRLLDNSFRTIYDTLTREEKRTLWRSVIKEIRIDNDQNITGVVFG

SEQ ID NO: 8352 - protein, 456 aa, Unknown
  Description of Unknown: Integrase B8353 sequence
  PTHR30461:SF3,SM00857,G3DSA:1.10.10.2600,IPR036162,PF13408, IPR025827,G3DSA:3.40.50.1390,PS51737,IPR006119,IPR038109, PF07508,IPR011109,SSF53041,PTHR30461,Coil, PS51736,cd00338,PF00239
MRNKEIAPALVRVALYIRVSGEEQKIKGLSLEAQQERLEAYARERGWVIVGIYIDAAKTARKNIHKRTEFQRMMDSVKRDEVDILLFARLDRWFRSVADYYKVMEILQAHNCDWKTTDEEYDTTTANGRLYINVKLSIAQNEADIDGERIDVVFDSKIAHGTVVSGSAPFGFRVNEEKRLEVVPEDAAIVQDAFNYFENTVSQRATVRYVRETYGVNWCDATFRRMLKEKLYTGVYDRGGRYNDQFCPAIISRQQFDRVQALLTRNVRSAPSGKVYIFTSILTCAECGHKLVGYKSSDYYYYRCNQHFQRGRCSHNHSAREDVVEQWLFEHLGEELERCQLEWGVEAAKKKASVARTDKAALKRKLTKLKELYVNDLIDIEDYKKDYQIYVSALNQIPEPAQEAPPDFAAVRRLLDNSFRTIYDTLTREEKRTLWRSVIKEIRIDNDQNITGVVFG

SEQ ID NO: 8353 - protein, 456 aa, Unknown
  Description of Unknown: Integrase B8354 sequence
  PTHR30461:SF3,SM00857,G3DSA:1.10.10.2600,IPR036162,PF13408, PS51737,G3DSA:3.40.50.1390,IPR025827,IPR006119,IPR038109, PF07508,IPR011109,SSF53041,PTHR30461,Coil, PS51736,cd00338,PF00239
MRNKEIAPALVRVALYIRVSGEEQKIKGLSLEAQQERLEAYARERGWVIVGIYIDAAKTARKNIHKRTEFQRMMEAVKRDEVDILLFARLDRWFRSVADYYKVMEILQAHNCDWKTTDEEYDTTTANGRLYINVKLSIAQNEADIDGERIDVVFDSKIAHGTVVSGSAPFGFRVNEEKRLEVVPEDAAIVQDAFNYFENTVSQRATVRYVRETYGVNWCDATFRRMLKEKLYTGVYDRGGRYNDQFCPAIINRQQFDRVQALLTRNVRSAPSGKVYIFTSILTCAECGHKLVGYKSSDYYYYRCNQHFQRGRCSHNHSAREDVVEQWLFEHLGEELERCQLEWDVEAAKKKASVARTDKAALKRKLTKLKELYVNDLIDIEDYKKDYQIYVSALNQIPEPAQEAPPDFAAVRRLLDNSFRTIYDTLTREEKRTLWRSVIKEIRIDNDQNITGVVFG

SEQ ID NO: 8354 - protein, 456 aa, Unknown
  Description of Unknown: Integrase B8355 sequence
  PTHR30461:SF3,SM00857,G3DSA:1.10.10.2600,IPR036162,PF13408, IPR025827,G3DSA:3.40.50.1390,PS51737,IPR006119,IPR038109, PF07508,IPR011109,SSF53041,PTHR30461,Coil, PS51736,cd00338,PF00239
MRNKEIAPALVRVALYIRVSGEEQKIKGLSLEAQQERLEAYARERGWVIVGIYIDAAKTARKNIHKRTEFQRMMDSVKRDEVDILLFARLDRWFRSVADYYKVMEILQAHNCDWKTTDEEYDTTTANGRLYINVKLSIAQNEADIDGERIDVVFDSKIAHGTVVSGSAPFGFRVNEEKRLEVVPEDAAIVQDAFNYFENTVSQRATVRYIRETYGVNWCDATFRRMLKEKLYTGVYDRGGRYNDKFCPVIISRQQFDRVQALLTRNVRSAPSGKVYIFTSILTCAECGHKLVGYKSSDYFYYRCNQHFQRGRCSHNHSAREDVVEAWLFDHLGEELERCQLEWDVEAAKKKASVARTDKAALKRKLTKLKELYVNDLIDIEDYKKDYQIYVSALNQIPEPAQEAPPDFAAVRRLLDNSFRTIYDTLTREEKRTLWRSVIKEIKIDNDQNITGVVFG

SEQ ID NO: 8355 - protein, 456 aa, Unknown
  Description of Unknown: Integrase B8356 sequence
  PTHR30461:SF3,SM00857,G3DSA:1.10.10.2600,IPR036162,PF13408, IPR025827,G3DSA:3.40.50.1390,PS51737,IPR006119,IPR038109, PF07508,SSF53041,IPR011109,PTHR30461,Coil, PS51736,cd00338,PF00239
MRNKEIAPALVRVALYIRVSGEEQKIKGLSLEAQQERLEAYARERGWVIVGIYIDAAKTARKNIHKRTEFQRMMDSVKRDEVDILLFARLDRWFRSVADYYKVMEILQAHNCDWKTTDEEYDTTTANGRLYINVKLSIAQNEADIDGERIDVVFDSKIAHGTVVSGSSPFGFRVSEEKRLEIVPEDAAIVQDAFNYFENTVSQRATTKYIREKYGVNWCYATFHRMLIEELYTGVYNRGGRYNANFCPAIIQREQFDRVQALLKKNVRRAPSGRVYIFTSVLTCEECRHKLNGYISQGIYYYRCNQHLQRGRCTHNHSVREDRVEQWLFDHLGEELERCKLEWEVQAAEKKRSVTSRDKAALKRKLTKLKELYVNELIDIDDYKKDYEIYTAALNQIPDTTQEAPPDFSAVEKLLQKDFRKIYDTLTREEKRTLWRSVIKEIRIDNDQNITGVVFG

SEQ ID NO: 8356 - protein, 456 aa, Unknown
  Description of Unknown: Integrase B8357 sequence
  PTHR30461:SF3,SM00857,G3DSA:1.10.10.2600,IPR036162,PF13408, IPR025827,G3DSA:3.40.50.1390,PS51737,IPR006119,IPR038109, PF07508,IPR011109,SSF53041,PTHR30461,Coil, PS51736,cd00338,PF00239
MRNKEIAPALVRVALYIRVSGEEQKIKGLSLEAQQERLEAYARERGWVIVGIYIDAAKTARKNIHKRTEFQRMMDSVKRDEVDILLFARLDRWFRSVADYYKVMEILQAHNCDWKTTDEEYDTTTANGRLYINVKLSIAQNEADIDGERIDVVFDSKIAHGTVVSGSAPFGFRVNEEKRLEVVPEDAAIVQDAFNYFESTVSQRATVRYVRETYGVNWCDATFRRMLKEKLYTGVYDRGGRYNDQFCPAIINRQQFDRVQALLTRNVRSAPSGKVYIFTSILACAECGHKLVGYKSSDYFYYRCNQHFQRGRCSHNHSAREDVVEAWLFDHLGEELERCQLEWDVEAAKKKASVARTDKAALKRKLTKLKELYVNDLIDIEDYKKDYQIYVSALNQIPEPAQEAPPDFAAVRRLLDNSFRTIYDTLTREEKRALWRSVIKEIRIDNDQNITGVVFG

SEQ ID NO: 8357 - protein, 456 aa, Unknown
  Description of Unknown: Integrase B8358 sequence
  PTHR30461:SF3,SM00857,G3DSA:1.10.10.2600,IPR036162,PF13408, IPR025827,G3DSA:3.40.50.1390,PS51737,IPR006119,IPR038109, PF07508,IPR011109,SSF53041,PTHR30461,Coil, PS51736,cd00338,PF00239
MRNKEIAPALVRVALYIRVSGEEQKIKGLSLEAQQERLEAYAREHGWVIVGIYIDAAKTARKNIHKRTEFQRMMEAVKRDEVDILLFARLDRWFRSVADYYKVMEVLQAHNCDWKTTDEEYDTTTANGRLYINVKLSIAQNEADIDGERIDVVFDSKIAHGTVVSGSAPFGFRVNEEKRLEVVPEDAAIVQDAFNYFENTVSQRATVRYVRETYGVNWCDATFRRMLKEKLYTGVYDRGGRYNDQFCPAIISRQQFDRVQALLTRNVRSAPSGKVYIFTSILTCAECGHKLVGYKSSDYFYYRCNQHFQRGRCSHNHSAREDVVEQWLFEHLGEELDRCQLEWDVEAAKKKASVARTDKAALKRKLTKLKELYVNDLIDIEDYKKDYQIYVSALNQIPEPAQEAPPDFAAVRRLLDNSFRTIYDTLTREEKRTLWRSVIKEIRIDNDQNITGAVFG

SEQ ID NO: 8358 - protein, 456 aa, Unknown
  Description of Unknown: Integrase B8359 sequence
  PTHR30461:SF3,SM00857,G3DSA:1.10.10.2600,IPR036162,PF13408, IPR025827,G3DSA:3.40.50.1390,PS51737,IPR006119,IPR038109, PF07508,IPR011109,SSF53041,PTHR30461,Coil, PS51736,cd00338,PF00239
MRNKEIAPALVRVALYIRVSGEEQKIKGLSLEAQQERLEAYARERGWVIVGIYIDAAKTARKNIHKRTEFQRMMGSVKRDEVDILLFARLDRWFRSVADYYKVMEVLQTHNCDWKTTDEEYDTTTANGRLYINVKLSIAQNEADIDGERIDVVFDSKIAHGTVVSGSAPFGFRVNEEKRLEVVPEDAAIVQDAFNYFENTVSQRATVRYVRETYGVNWCDATFRRMLKEKLYTGVYDRGGRYNDQFCPAIIDRQQFDRVQALLTRNVRSAPSGKVYIFTSILTCAECGHKLVGYKSSDYFYYRCNQHFQRGRCSHNHSAREDVVEQWLFEHLGEELDRCQLEWDVEAAKKKASVARTDKAALKRKLTKLKELYVNDLIDIEDYKKDYQIYVSALNQIPEPAQEAPPDFAAVRRLLDNSFRTIYDTLTREEKRTLWRSVIKEIRIDNDQNITGVVFG

SEQ ID NO: 8359 - protein, 456 aa, Unknown
  Description of Unknown: Integrase B8360 sequence
  PTHR30461:SF3,SM00857,G3DSA:1.10.10.2600,IPR036162,PF13408, IPR025827,G3DSA:3.40.50.1390,PS51737,IPR006119,IPR038109, PF07508,SSF53041,IPR011109,PTHR30461,Coil, PS51736,cd00338,PF00239
MRNKEIAPALVRVALYIRVSGEEQKIKGLSLEAQQERLEAYARERGWVIVGIYIDAAKTARKNIHKRTEFQRMMDSVKRDEVDILLFARLDRWFRSVADYYKVMEILQAHNCDWKTTDEEYDTTTANGRLYINVKLSIAQNEADIDGERIDVVFDSKIAHGTVVSGSAPFGFRVNEEKRLEVVPEDAAIVQDAFNYFENTVSQRATVRYVRETYGVNWCDATFRRMLKEKLYTGVYDRGGRYNDQFCPAIIDRQQFDRVQALLTRNVRSAPSGKVYIFTSILTCAECGHKLVGYKSSDYYYYRCNQHFQRGRCSHNHSAREDVVEAWLFDHLGEELERCQLEWDVEAAKKKASVARTDKAALKRKLTKLKELYVNDLIDIEDYKKDYQIYVSALNQIPEPAQEAPPDFAAVRRLLDNSFRTIYDTLTREEKRTLWRSVIKEIRIDNDQNITGVVFG

SEQ ID NO: 8360 - protein, 456 aa, Unknown
  Description of Unknown: Integrase B8361 sequence
  PTHR30461:SF3,SM00857,G3DSA:1.10.10.2600,IPR036162,PF13408, IPR025827,G3DSA:3.40.50.1390,PS51737,IPR006119,IPR038109, PF07508,IPR011109,SSF53041,PTHR30461,Coil, PS51736,cd00338,PF00239
MRNKEIAPALVRVALYIRVSGEEQKIKGLSLEAQQERLEAYARERGWVIVGIYIDAAKTARKNIHKRTEFQRMMDSVKRDEVDILLFARLDRWFRSVADYYKVMEVLQAHNCDWKTTDEEYDTTTANGRLYINVKLSIAQNEADIDGERIDVVFDSKIAHGTVVSGSAPFGFRVNEEKRLEVVPEDAAIVQDAFNYFENTVSQRATVRYVRETYGVNWCDATFRRMLKEKLYTGVYDRGGRYNDQFCPAIIDRQQFDRVQALLTRNVRSAPSGKVYIFTSILTCAECGHKLVGYKSSDYFYYRCNQHFQRGRCSHNHSAREDVVEAWLFDHLWEELERCQLEWDVEAAKKKASVARTDKAALKRKLTKLKELYVNDLIDIEDYKKDYQIYVSALNQIPEPAQEAPPDFAAVRRLLDNSFRTIYDTLTREEKRTLWRSVIKEIRIDNDQNITGVVFG

SEQ ID NO: 8361 - protein, 456 aa, Unknown
  Description of Unknown: Integrase B8362 sequence
  PTHR30461:SF3,SM00857,G3DSA:1.10.10.2600,IPR036162,PF13408, IPR025827,G3DSA:3.40.50.1390,PS51737,IPR006119,IPR038109, PF07508,SSF53041,IPR011109,PTHR30461,PS51736, cd00338,PF00239
MYKKELAPDLVRVALYIRVSGEEQKIKGLSLEAQQERLEAYARERGWVIVGIYIDAAKTARKNIHKRTEFQRMMDSVKRDEVDILLFARLDRWFRSVADYYKVMEVLQAHNCDWKTTDEEYDTTTANGRLYINVKLSIAQNEADIDGERIDVVFDSKIAHGTVVSGSAPFGFRVNEEKRLEVVPEDAAIVQDAFNYFENTVSQRATVRYVRETYGVNWCDATFRRMLKEKLYTGVYDRGGRYNDKFCPAIINRQQFDRVQALLERNARSVPSGKVYIFTSILTCAECGHKLVGYKSSDYYYYRCNQHFQRGRCSHNHSAREDVVEKWLFEHLAEELECCQLEWEVAAAKKKASVARTDKAALKRKLTKLKELYVNDLIDIEDYKRDYQIYTAALKQIPEPSIEPPPDFAAVRRLLDNDFKTIYENLTREEKRTLWRSVIKEIRIDNDQNITGVVFG

SEQ ID NO: 8362 - protein, 456 aa, Unknown
  Description of Unknown: Integrase B8363 sequence
  PTHR30461:SF3,SM00857,G3DSA:1.10.10.2600,IPR036162,PF13408, PS51737,G3DSA:3.40.50.1390,IPR025827,IPR006119,IPR038109, PF07508,SSF53041,IPR011109,PF00239,PTHR30461, PS51736,Coil,cd00338
MRNKEIAPALVRVALYIRVSGEEQKIKGLSLEAQQERLEAYARERGWVIVGIYIDAAKTARKNIHKRTEFQRMMDSVKRDEVDILLFARLDRWFRSVADYYKVMEVLQAHNCDWKTTDEEYDTTTANGRLYINVKLSIAQNEADIDGERIDVVFDSKIAHGTVVSGSAPFGFRVNEEKRLEVVPEDAAIVQDAFNYFESTVSQRATVRYVRETYGVNWCDATFRRMLKEKLYTGVYDRGGRYNDQFCPAIINRQQFDRVQALLTRNVRSAPSGKVYIFTSILTCAECGHKLVGYKSSDYFYYRCNQHFQRGRCSHNHSAREDVVETWLFDHLGEELERCQLEWDVEAAKKKASVARTDKAALKRKLTKLKELYVNDLIDIEDYKKDYQIYVSALNQIPEPAQEAPPDFAAVRRLLDNSFRTIYDTLTREEKRTLWRSVIKEIRIDNDQNITGVVFG

SEQ ID NO: 8363 - protein, 456 aa, Unknown
  Description of Unknown: Integrase B8364 sequence
  PTHR30461:SF3,SM00857,G3DSA:1.10.10.2600,IPR036162,PF13408, IPR025827,G3DSA:3.40.50.1390,PS51737,IPR006119,IPR038109, PF07508,IPR011109,SSF53041,PF00239,PTHR30461, PS51736,Coil,cd00338
MKRAVAYGRYSTDMQREESIDAQFRAIGDYCQRNEIELVSTYADEGISGTTDNRPEFQRMIKDAELGAFDYVIVHKLDRFSRSKYDSAIYKRKLKLLNVQLLSVLENLDGSPESLILESVLEGMSEYYSRNLSREVKKGMRENALKCKFNGGTPPLGYDVDENKNYVINAHEAEAIKLIFDMFTKNYSYSQMMRKLNDLGYKTKRGREFTRNSFYEILNNERYVGTYFYSKEDYDGFKGKRNYHKKRNKNNMIRIENGVPAIIDKETWAKAQEKLKNNRNLNRTNKNGRFYLLKGLLFCGECGSPMSGNMQSNNQGNRYYYYKCNRKSRTHKCHAPVVRAEKIEKEVLDCFEDVIFTKTNKDAVIDSMLKFLDKETDTTDHKKSLEKELAVVEKQIDNILDAIMSGISSPSVNDKLKELETKKETLKASISRCNIIGSIINSVGEKSSALFLYGNV

SEQ ID NO: 8364 - protein, 456 aa, Unknown
  Description of Unknown: Integrase B8365 sequence
  PTHR30461:SF3,SM00857,G3DSA:1.10.10.2600,IPR036162,PF13408, IPR025827,PS51737,G3DSA:3.40.50.1390,IPR006119,IPR038109, PF07508,SSF53041,IPR011109,PTHR30461,Coil, PS51736,cd00338,PF00239
MRNKEIAPALVRVALYIRVSGEEQKIKGLSLEAQQERLEAYARERGWVIVGIYIDAAKTARKNIHKRTEFQRMMDSVKRDEVDILLFARLDRWFRSVADYYKVMEILQAHNCGWKTTDEEYDTTTANGRLYINVKLSIAQNEADIDGERIDVVFDSKIAHGTVVSGSAPFGFRVNEEKRLEVVPEDAAIVQDAFNYFENTVSQRATVRYVRETYGVNWCDATFRRMLKEKLYTGVYDRGGRYNDQFCPAIIDRQQFDRVQALLTRNVRSAPSGKVYIFTSILTCAECGHKLVGYKSSDYYYYRCNQHFQRGRCSHNHSAREDVVEAWLFDHLGEELERCQLEWSVEAAKKKASIARTDKAALKRKLTKLKELYVNDLIDIEDYKKDYQIYVSALNQIPEPAQEAPPDFAAVRRLLDNSFRTIYDTLTREEKRTLWRSVIKEIRIDNDQNITGVVFG

SEQ ID NO: 8365 - protein, 456 aa, Unknown
  Description of Unknown: Integrase B8366 sequence
  PTHR30461:SF3,SM00857,G3DSA:1.10.10.2600,IPR036162,PF13408, PS51737,G3DSA:3.40.50.1390,IPR025827,IPR006119,IPR038109, PF07508,IPR011109,SSF53041,PTHR30461,Coil, PS51736,cd00338,PF00239
MRNKEIAPALVRVALYIRVSGEEQKIKGLSLEAQQERLEAYARERGWVIVGIYIDAAKTARKNIHKRTEFQRMMEAVKRDEVDILLFARLDRWFRSVADYYKVMEILQAHNCDWKTTDEEYDTTTANGRLYINVKLSIAQNEADIDGERIDVVFDSKIAHGTVVSGSAPFGFRVNEEKRLEVVPEDAAIVQDAFNYFENTVSQRATVRYVRETYGVNWCDATFRRMLKEKLYTGVYDRGGRYNDQFCPAIINRQQFDRVQALLTRNVRSSPSGKVYIFTSILTCAECGHKLVGYKSSDYYYYRCNQHFQRGRCSHNHSAREDVVEAWLFDHLGEELERCQLEWDVEAAKKKASVARTDKAALKRKLTKLKELYVNDLIDIEDYKKDYQIYVSALNQIPEPAQEAPPDFAAVRRLLDNSFRTIYDTLTREEKRTLWRSVIKEIRIDNDQNITGVVFG

SEQ ID NO: 8366 - protein, 456 aa, Unknown
  Description of Unknown: Integrase B8367 sequence
  PTHR30461:SF3,SM00857,G3DSA:1.10.10.2600,IPR036162,PF13408, PS51737,G3DSA:3.40.50.1390,IPR025827,IPR006119,IPR038109, PF07508,IPR011109,SSF53041,PTHR30461,Coil, PS51736,cd00338,PF00239
MRNKEIAPALVRVALYIRVSGEEQKIKGLSLEAQQERLEAYARERGWVIVGIYIDAAKTARKNIHKRTEFQRMMEAVKRDEVDILLFARLDRWFRSVADYYKVMEILQAHNCDWKTTDEEYDTTTANGRLYINVKLSIAQNEADIDGERIDVVFDSKIAHGTVVSGSAPFGFRVNEEKRLEVVPEDAAIVQDAFNYFENTVSQRATVRYVRETYGVNWCDATFRRMLKEKLYTGVYDRGGRYNDQFCPAIINRQQFDRVQALLTRNVRSAPSGKVYIFTSILACAECGHKLVGYKSSDYFYYRCNQHFQRGRCSHNHSAREDVVEAWLFDHLGEELERCQLEWDVEAAKKKASVARTDKAALKRKLTKLKELYVNDLIDIEDYKKDYQIYVSALNQIPEPAQEAPPDFAAVRRLLDNSFRTIYDTLTREEKRTLWRSVIKEIRIDNDQNITGVVFG

SEQ ID NO: 8367 - protein, 456 aa, Unknown
  Description of Unknown: Integrase B8368 sequence
  PTHR30461:SF3,SM00857,G3DSA:1.10.10.2600,IPR036162,PF13408, IPR025827,G3DSA:3.40.50.1390,PS51737,IPR006119,IPR038109, PF07508,IPR011109,SSF53041,PTHR30461,PS51736, cd00338,PF00239
MRNQNTSEVPIRAALYVRVSGEEQKIKGLSIEAQKERLVAYAKERGWIIVGLFVDAAKTARKNMHKRSEFQKMLDLVRADGVDMLLFCRLDRWFRSVRDYYKVMEVLETHNCQWKTTDEEYDTTTANGRLYINVKLSIAQNEADICGERIHVVFDSKIQHGTVLSGKCPFWLRINDERRYELIPENAAIIQDAFNHFENTTSQRATIRYIRETYDVNWCEATFRRMLRDKLTIGVYDKNGRYNDDFCPPVISKEQFEHVQELLRRNSRHNPAGRVYIFTGILVCEECRHNLVGYYSRGYIYYRCSQHFQRGRCTHNHSAREDVIEAWLFDHLGEEIEKYEVAWNVQAAERKRTASSIDRSVLRRKLTKLKDLYMNDLIDIDEYKKDYETYTAALSALEEPEEEKHIDLSGVRRIISHDFREIYDSLTREEKRTLWKNTLKEIRVNNANEITGISFF

SEQ ID NO: 8368 - protein, 456 aa, Unknown
  Description of Unknown: Integrase B8369 sequence
  PTHR30461:SF3,SM00857,G3DSA:1.10.10.2600,IPR036162,PF13408, PS51737,G3DSA:3.40.50.1390,IPR025827,IPR006119,IPR038109, PF07508,IPR011109,SSF53041,PTHR30461,Coil, PS51736,cd00338,PF00239
MRNREIAPALVRVALYIRVSGEEQKIKGLSLEAQQERLEAYARERGWVIVGIYIDAAKTARKNIHKRTEFQRMMDSVKRDEVDILLFARLDRWFRSVADYYKVMEILQAHNCDWKTTDEEYDTTTANGRLYINVKLSIAQNEADIDGERIDVVFDSKIAHGTVVSGSAPFGFRVNEEKRLEVVPEDAAIVQDAFNYFENTVSQRATVRYVRETYGVNWCDATFRRMLKEKLYTGVYDRGGRYNDQFCPAIINRQQFDRVQALLTRNVRSAPSGKVYIFTSILTCAECGHKLVGYKSSDYFYYRCNQHFQRGRCCHNHSAREDVVEQWLFEHLGEELDRCQLEWDVEAAKKKASVARTDKAALKRKLTKLKELYVNDLIDIEDYKKDYQIYVSALNQIPEPAQEAPPDFAAVRRLLDNSFRTIYDTLTREEKRTLWRSVIKEIRIDNDQNITGVVFG

SEQ ID NO: 8369 - protein, 456 aa, Unknown
  Description of Unknown: Integrase B8370 sequence
  PTHR30461:SF3,SM00857,G3DSA:1.10.10.2600,IPR036162,PF13408, PS51737,G3DSA:3.40.50.1390,IPR025827,IPR006119,IPR038109, PF07508,SSF53041,IPR011109,PTHR30461,Coil, PS51736,cd00338,PF00239
MRNKEIAPALVRVALYIRVSGEEQKIKGLSLEAQQERLEAYARERGWVIVGIYIDAAKTARKNIHKRTEFQRMMDSVKRDEVDILLFARLDRWFRSVADYYKVMEILQAHNCDWKTTDEEYDTTTANGRLYINVKLSIAQNEADIDGERIDVVFDSKIAHGTVVSGSAPFGFRVNEEKRLEVVPEDAAIVQDAFNYFESTVSQRATVRYVRETYGVNWCDATFRRMLKEKLYTGVYDRGGRYNDQFCPAIISRQQFDRVQALLTRNVRSAPSGKVYIFTSILTCAECGHKLVGYKSSDYFYYRCNQHFQRGRCSHNHSAREDVVEAWLFDHLGEELERCQLEWDVEAAKKKASIARTDKAALKRKLTKLKELYVNDLIDIEDYKKDYQIYVSALNQIPEPAQEAPPDFAAVRRLLDNSFRTIYDTLTREEKRTLWRSVIKEIRIDNDQNITGVVFG

SEQ ID NO: 8370 - protein, 456 aa, Unknown
  Description of Unknown: Integrase B8371 sequence
  PTHR30461:SF3,SM00857,G3DSA:1.10.10.2600,IPR036162,PF13408, IPR025827,G3DSA:3.40.50.1390,PS51737,IPR006119,IPR038109, PF07508,SSF53041,IPR011109,PTHR30461,PS51736, cd00338,PF00239
MRNKEIAPALVRVALYIRVSGEEQKIKGLSLEAQQERLEAYARERGWVIVGIYIDAAKTARKNIHKRTEFQRMMDSVKRDEVDILLFARLDRWFRSVADYYKVMEVLQAHNCDWKTTDEEYDTTTANGRLYINVKLSIAQNEADIDGERIDVVFDSKIAHGTVVSGSAPFGFRVNEEKRLEVVPEDAAIVQDAFNYFENTVSQRATVRYVRETYGVNWCDATFRRMLKEKLYTGVYARGGRYNDQFCPAIIDRQQFDRVQTLLTRNVRSAPSGKVYIFTSILTCAECGHKLVGYKSSDYYYYRCNQHFKRGRCSHNHSAREDVVEQWLFEHLGEELERCQLEWDVEAAKKKTSVARTDKAALKRKLTKLKELYVNDLIDIEDYKKDYQIYVSALNQIPEPAQEAPPDFAAVRRLLDNSFRTIYDTLTREEKRTLWRSVIKEIRIDNDQNITGVVFG

SEQ ID NO: 8371 - protein, 456 aa, Unknown
  Description of Unknown: Integrase B8372 sequence
  PTHR30461:SF3,SM00857,G3DSA:1.10.10.2600,IPR036162,PF13408, PS51737,G3DSA:3.40.50.1390,IPR025827,IPR006119,IPR038109, PF07508,IPR011109,SSF53041,PTHR30461,Coil, PS51736,cd00338,PF00239
MRNKEIAPALVRVALYIRVSGEEQKIKGLSLEAQQERLEAYARERGWVIVGIYIDAAKTARKNIHKRTEFQRMMDSVKRDEVDILLFARLDRWFRSVADYYKVMEILQAHNCDWKTTDEEYDTTTANGRLYINVKLSIAQNEADIDGERIDVVFDSKIAHGTVVSGSAPFGFRVNEEKRLEVIPEDAAIVQDAFNYFENTVSQRATVRYIRETYGVNWCDATFRRMLKEKLYTGVYDRGGRYNDQFCPAIINRQQFDRVQALLTRNVRSAPSGKVYIFTSILTCAECGHKLVGYKSSDYFYYRCNQHFQRGRCSHNHSAREDVVEAWLFDHLGEELEHCQLEWDVEAAKKKASVARTDKAALKRKLTKLKELYVNDLIDIEDYKKDYQIYVSALNQIPEPAQEAPPDFAAVRRLLDNNFRTIYDTLTREEKRTLWRSVIKEIRIDNDQNITGVVFG

SEQ ID NO: 8372 - protein, 456 aa, Unknown
  Description of Unknown: Integrase B8373 sequence
  PTHR30461:SF3,SM00857,G3DSA:1.10.10.2600,IPR036162,PF13408, IPR025827,PS51737,G3DSA:3.40.50.1390,IPR006119,IPR038109, PF07508,SSF53041,IPR011109,PTHR30461,Coil, PS51736,cd00338,PF00239
MRNKEIAPALVRVALYIRVSGEEQKIKGLSLEAQQERLEAYARERGWVIVGIYIDAAKTARKNIHKRTEFQRMMDSVKRDEVDILLFARLDRWFRSVADYYKVMEILQAHSCDWKTTDEEYDTTTANGRLYINVKLSIAQNEADIDGERIDVVFDSKIAHGTVVSGSAPFGFRVNEEKRLEVVPEDAAIVQDAFNYFENTVSQRATVRYVRETYGVNWCDATFRRMLKEKLYTGVYDRGGRYNDQFCPAIIDRQQFDRVQALLTRNVRSAPSGKVYIFTSILTCAECGHKLVGYKSSDYFYYRCNQHFQRGRCSHNHSAREDVVEQWLFEHLGEELERCQLEWDVEAAKKKASVARTDKAALKRKLTKLKELYVNDLIDIEDYKKDYQIYVSALNQIPEPAQEAPPDFAAVRRLLDNSFRTIYDTLTREEKRTLWRSVIKEIRIDNDQNITGVVFG

SEQ ID NO: 8373 - protein, 456 aa, Unknown
  Description of Unknown: Integrase B8374 sequence
  PTHR30461:SF3,SM00857,G3DSA:1.10.10.2600,IPR036162,PF13408, IPR025827,G3DSA:3.40.50.1390,PS51737,IPR006119,IPR038109, PF07508,SSF53041,IPR011109,PTHR30461,Coil, PS51736,cd00338,PF00239
MRNKEIAPALVRVALYIRVSGEEQKIKGLSLEAQQERLEAYARERGWVIVGIYIDAAKTARKNIHKRTEFQRMMDSVKRDEVDILLFARLDRWFRSVADYYKVMEILQAHNCDWKTTDEEYDTTTANGRLYINVKLSIAQNEADIDGERIDVVFDSKIAHGTVVSGSAPFGFRVNEEKRLEVVPEDAAIVQDAFNYFENTVSQRATVRYVRETYGVNWCDATFRRMLKEKLYTGVYDRGGRYNDQFCPAIIDGQQFDRVQALLTRNVRSAPSGKVYIFTSILTCAECGHKLVGYKSSDYFYYRCNQHFQRGRCSHNHSAREDVVEAWLFDHLGEELERCQLEWDVEAAKKKASVARTDKAALKRKLTKLKELYVNDLIDIEDYKKDYQIYVSALNQIPEPAQEAPPDFAAVRRLLDNSFRTIYDTLTREEKRTLWRSVIKEIRIDNDQNITGVVFG

SEQ ID NO: 8374 - protein, 456 aa, Unknown
  Description of Unknown: Integrase B8375 sequence
  PTHR30461:SF3,SM00857,G3DSA:1.10.10.2600,IPR036162,PF13408, PS51737,IPR025827,G3DSA:3.40.50.1390,IPR006119,IPR038109, PF07508,IPR011109,SSF53041,PTHR30461,PS51736, cd00338,PF00239
MRNKEIAPALVRVALYIRVSGEEQKIKGLSLEAQQERLEAYARERGWVIVGIYIDAAKTARKNIHKRTEFQRMMDSVKRDEVDILLFARLDRWFRSVADYYKIMEILQAHNCDWKTTDEEYDTTTANGRLYINVKLSIAQNEADIDGERIDVVFDSKIAHGTVVSGSAPFGFRVNEEKRLEVVPEDAAIVQDAFNYFESTVSQRATVRYVRETYGVNWCDATFRRMLKEKLYTGVYDRGGRYNDQFCPAIIDRQQFDRVQALLTRNVRSAPSGKVYIFTSILTCAECGHKLVGYKSSDYFYYRCNQHFQRGRCSHNHSAREDVVEQWLFEHLGEELDRCQLEWDVEAAKKKSSVARTDKAALKRKLTKLKELYVNDLIDIEDYKKDCQIYVSALNQIPEPAQEAPPDFAAVRRLLDNSFRTIYDTLTREEKRTLWRSVIKEIRIDNDQNITGVVFG

SEQ ID NO: 8375 - protein, 456 aa, Unknown
  Description of Unknown: Integrase B8376 sequence
  PTHR30461:SF3,SM00857,G3DSA:1.10.10.2600,IPR036162,PF13408, IPR025827,PS51737,G3DSA:3.40.50.1390,IPR006119,IPR038109, PF07508,SSF53041,IPR011109,PTHR30461,Coil, PS51736,cd00338,PF00239
MRNKEIAPALVRVALYIRVSGEEQKIKGLSLEAQQERLEAYARERGWVIVGIYIDAAKTARKNIHKRTEFQRMMDSVKRDEVDILLFARLDRWFRSVADYYKVMEILQAHNCDWKTTDEEYDTTTANGRLYINVKLSIAQNEADIDGERIDVVFDSKIAHGTVVSGSAPFGFRVNEEKRLEVVPEDAAIVQDAFNYFENTVSQRATVRYIRETYGVNWCDATFRRMLKEKLYTGVYDRGGRYNDQFCPAIISRQQFDRVQALLTRNVRSAPSGKVYIFTSILTCAECGHKLVGYKSSDYFYYRCNQHFQRGRCSHNHSAREDVVEQWLFEHLGEELDRCQLEWDVEAAKKKASVARTDKAALKRKLTKLKELYVNDLIDIEDYKKDYQIYVSALNQIPEPAQEAPPNFAAVRRLLDNSFRTIYDTLTREEKRTLWRSVIKEIRIDNDQNITGVVFG

SEQ ID NO: 8376 - protein, 456 aa, Unknown
  Description of Unknown: Integrase B8377 sequence
  PTHR30461:SF3,IPR036162,PS51737,IPR011109,PTHR30461, PS00397,PF00239,G3DSA:1.10.10.2600,IPR006119,SSF53041, SM00857,IPR025827,IPR038109,PS51736,cd03768, IPR006118,PF13408,G3DSA:3.40.50.1390,Coil
MDKNKKITVPGLLRTAIYIRVSTDQQAKNGDSIGEQTETLTTYVNGRDDLILSGMYIDDGISGQKINRDGFTRLIGDVCAGRIDLIVFTKLDRWFRSLRHYLNVQATLEEHGVNWISVSQPFFDTSTPQGRAFIANSMAFAELEAQNDSERIRAVFDHKYKHGEVLSGKVPLGFSIVDKHLSPNDDAAKVLAIFQRFSRSGSLNDTVRFIESEYGIVMSISNLKKAILANAKYIGIFRDNTNYCPAIIPQELFDDVQRKLTFNVKISQKHTYIFSGLVRCACCGSAASGFQHRSSHSGVVYRYSAYRCRQAFAVKRCHNKKIFIEKSLETYVLQHIKPELQKAIISYEVAAAPAADQKQKRALITRKIEKLKELYVNDLISLEEYKVDKAAYTAQLDELPAEASPEKDLTALRRFLALDLDAVYTSMTPEEKRYLWRSVIKEIRVDEQRNVTIIFL

SEQ ID NO: 8377 - protein, 456 aa, Unknown
  Description of Unknown: Integrase B8378 sequence
  PTHR30461:SF3,SM00857,G3DSA:1.10.10.2600,IPR036162,PF13408, IPR025827,G3DSA:3.40.50.1390,PS51737,IPR006119,IPR038109, PF07508,SSF53041,IPR011109,PTHR30461,Coil, PS51736,cd00338,PF00239
MRNKEIAPALVRVALYIRVSGEEQKIKGLSLEAQQERLEAYARERGWVIVGIYIDAAKTARKNIHKRTEFQRMMDSVKRDEVDILLFARLDRWFRSVADYYKVMEILQAHNCDWKTTDEEYDTTTANGRLYINVKLSIAQNEADIDGERIDVVFDSKIAHGTVVSGSAPFGFRVNEEKRLEVVPEDAAIVQDAFNYFENTVSQRATVRYVRETYGVNWCDATFRRMLKEKLYTGVYDRGGRYNDQFCPAIINRQQFDRVQSLLTRNVRSAPSGKVYIFTSILTCAECGHKLVGYKSSDYFYYRCNQHFQRGRCSHNHSAREDVVEQWLFEHLGEELERCQLEWDVEAAKKKASVARTDKAALKRKLTKLKELYVNDLIDIEDYKKDYQIYVSALNQIPEPAQEAPPDFAAVRRLLDNSFRTIYDTLTREEKRTLWRSVIKEIRIDNDQNITGVVFG

SEQ ID NO: 8378 - protein, 456 aa, Unknown
  Description of Unknown: Integrase B8379 sequence
  PTHR30461:SF3,SM00857,G3DSA:1.10.10.2600,IPR036162,PF13408, PS51737,IPR025827,G3DSA:3.40.50.1390,IPR006119,IPR038109, PF07508,IPR011109,SSF53041,PTHR30461,Coil, PS51736,cd00338,PF00239
MYKKELAPDLVRVALYIRVSGEEQKIKGLSLEAQQERLEAYARERGWVIVGIYIDAAKTARKNIHKRTEFQRMMDSVKRDEVDILLFARLDRWFRSVADYYKVMEILQAHNCDWKTTDEEYDTTTANGRLYINVKLSIAQNEADIDGERIDVVFDSKIAHGTVVSGSAPFGFRVNEEKRLEVVPEDAAIVQDAFNYFENTVSQRATVRYVRETYGVNWCDATFRRMLKEKLYTGVYDRGGRYNDQFCPAIINRQQFDRVQALLTRNVRSAPSGKVYIFTSILTCAECGHKLVGYKSSDYYYYRCNQHFQRGRCSHNHSAREDVVEQWLFEHLGEELERCQLEWGVEAAKKKASVARTDKAALKRKLTKLKELYVNDLIDIEDYKKDYQIYVSALNQIPEPAQEAPPDFAAVRRLLDNSFRTIYDTLTREEKRTLWRSVIKEIRIDNDQNITGVVFG

SEQ ID NO: 8379 - protein, 456 aa, Unknown
  Description of Unknown: Integrase B8380 sequence
  PTHR30461:SF3,SM00857,G3DSA:1.10.10.2600,IPR036162,PF13408, PS51737,IPR025827,G3DSA:3.40.50.1390,IPR006119,IPR038109, PF07508,IPR011109,SSF53041,PTHR30461,Coil, PS51736,cd00338,PF00239
MRNKEIAPALVRVALYIRVSGEEQKIKGLSLEAQQERLEAYARERGWVIVGIYIDAAKTARKNIHKRTEFQRMMDSVKRDEVDILLFARLDRWFRSVADYYKVMEILQAHNCDWKTTDEEYDTTTANGRLYINVKLSIAQNEADIDGERIDVVFDSKIAHGTVVSGSAPFGFRVNEEKRLEVVPEDAAIVQDAFNYFENTVSQRATVRYVRETYGVNWCDATFRRMLKEKLYTGVYDRGGRYNDQFCPAIINRQQFDRVQALLTRNVRSAPSGKVYIFTSILTCAECGHKLVGYKSSDYYYYRCNQHFQRGRCSHNHSAREDVVEQWLFEHLAEELERCQLEWDVEAAKKKASVARTDKAALKRKLTKLKELYVNDLIDIEDYKKDYQIYVSALNQIPEPAQEAPPDFAAVRRLLDNSFRTIYDTLTREEKRTLWRSVIKEIRIDNDQNITGVVFG

SEQ ID NO: 8380 - protein, 456 aa, Unknown
  Description of Unknown: Integrase B8381 sequence
  PTHR30461:SF3,SM00857,G3DSA:1.10.10.2600,IPR036162,PF13408, IPR025827,G3DSA:3.40.50.1390,PS51737,IPR006119,IPR038109, PF07508,SSF53041,IPR011109,PF00239,PTHR30461, PS51736,Coil,cd00338
MRNKEIAPALVRVALYIRVSGEEQKIKGLSLEAQQERLEAYARERGWVIVGIYIDAAKTARKNIHKRTEFQRMMDSVKRDEVDILLFARLDRWFRSVADYYKVMEILQAHNCDWKTTDEEYDTTTANGRLYINVKLSIAQNEADIDGERIDVVFDSKIAHGTVVSGSAPFGFRVNEEKRLEVVPEDAAIVQDAFNYFENTVSQRATVRYVRETYGVNWCDATFRRMLKEKLYTGVYDRGGRYNDQFCPAIIDRQQFDRVQALLTRNVRSAPSGKVYIFTSILTCAECGHKLVGYKSSDYYYYRCNQHFQRGRCSHNHSAREDVVEQWLFEHLGEELERCQLEWGVEAAKKKVSIARTDKAALKRKLTKLKELYVNDLIDIEDYKKDYQIYVSALNQIPEPAQEAPPDFAAVRRLLDNSFRTIYDTLTREEKRTLWRSVIKEIRIDNDQNITGVVFG

SEQ ID NO: 8381 - protein, 456 aa, Unknown
  Description of Unknown: Integrase B8382 sequence
  PTHR30461:SF3,SM00857,G3DSA:1.10.10.2600,IPR036162,PF13408, IPR025827,G3DSA:3.40.50.1390,PS51737,IPR006119,IPR038109, PF07508,SSF53041,IPR011109,PTHR30461,Coil, PS51736,cd00338,PF00239
MRNKEIAPALVRVALYIRVSGEEQKIKGLSLEAQQERLEAYARERGWVIVGIYIDAAKTARKNIHKRTEFQRMMDSVKRDEVDILLFARLDRWFRSVADYYKVMEILQAHNCDWKTTDEEYDTTTANGRLYINVKLSIAQNEADIDGERIDVVFDSKIAHGTVVSGSAPFGFRVNEEKRLEVVPEDAAIVQNAFNYFENTVSQRATVRYVRETYGVNWCGATFRRMLKEKLYTGVYDRGGRYNDQFCPAIINRQQFDRVQALLTRNVRSAPSGKVYIFTSILTCAECGHKLVGYKSSDYFYYRCNQHFQRGRCSHNHSAREDVVEQWLFEHLGEELDRCQLEWDVEAAKKKASVARTDKAALKRKLTKLKELYVNDLIDIEDYKKDYQIYVSALNQIPEPAQEAPPDFAAVRRLLDNSFRTIYDTLTREEKRTLWRSVIKEIRIDNDQNITGVVFG

SEQ ID NO: 8382 - protein, 456 aa, Unknown
  Description of Unknown: Integrase B8383 sequence
  PTHR30461:SF3,SM00857,G3DSA:1.10.10.2600,IPR036162,PF13408, IPR025827,G3DSA:3.40.50.1390,PS51737,IPR006119,IPR038109, PF07508,SSF53041,IPR011109,PTHR30461,PS51736, cd00338,PF00239
MRNKEIAPALVRVALYIRVSGEEQKIKGLSLEAQQERLEAYARERGWVIVGIYIDAAKTARKNIHKRTEFQRMMDSVKRDEVDILLFARLDRWFRSVADYYKVMEILQAHNCDWKTTDEEYDTTTANGRLYINVKLSIAQNEADIDGERIDVVFDSKIAHGTVVSGSAPFGFRVNEEKRLEVVPEDAAIVQDAFNYFESTVSQRATVRYVRETYGVNWCDATFRRMLKEKLYTGVYDRGGRYNDQFCPAIINRQQFDRVQALLTRNVRSAPSGKVYIFTSILTCAECGHKLVGYKSSDYFYYRCNQHFQRGRCSHNHSAREDVVEQWLFEHLGEELERCQLEWDVEAAKKKASVARTDKAALKLKLTKLKELYVNDLIDIEDYKKDYQIYVSALNQIPEPAQEAPPDFAAVRRLLDNSFRTIYDTLTREEKRTLWRSVIKEIRIDNDQNITGVVFG

SEQ ID NO: 8383 - protein, 456 aa, Unknown
  Description of Unknown: Integrase B8384 sequence
  PTHR30461:SF3,SM00857,G3DSA:1.10.10.2600,IPR036162,PF13408, IPR025827,G3DSA:3.40.50.1390,PS51737,IPR006119,IPR038109, PF07508,IPR011109,SSF53041,PTHR30461,PS51736, cd00338,PF00239
MRNKEIAPALVRVALYIRVSGEEQKIKGLSLEAQQERLEAYARERGWVIVGIYIDAAKTARKNIHKRTEFQRMMDSVKRDEVDILLFARLDRWFRSVADYYKVMEILQAHNCDWKTTDEEYDTTTANGRLYINVKLSIAQNEADIDGERIDVVFDSKIAHGTVVSGSAPFGFRVNEEKRLEVVPEDAAIVQDAFNYFENTVSQRATVRYVRETYGVNWCDATFRRMLKEKLYTGVYDRGGRYNDQFCPAIISRQQFDRVQALLTRNVRSAPSGKVYIFTSILTCAECGHKLVGYKSSDYYYYRCNQHFQRGRCSHNHSAREDVVEQWLFEHLGEELERCQLEWDVEAAKKKASVARTGKAALKRKLTKLKELYVNDLIDIEDYKKDYQIYVSALNQIPEPAQEAPPDFAAVRRLLDNSFRTIYDTLTREEKRTLWRSVIKEIKIDNDQNITGVVFG

SEQ ID NO: 8384 - protein, 456 aa, Unknown
  Description of Unknown: Integrase B8385 sequence
  PTHR30461:SF3,SM00857,G3DSA:1.10.10.2600,IPR036162,PF13408, IPR025827,G3DSA:3.40.50.1390,PS51737,IPR006119,IPR038109, PF07508,SSF53041,IPR011109,PTHR30461,Coil, PS51736,cd00338,PF00239
MYKKELAPDLVRVALYIRVSGEEQKIKGLSLEAQQERLEAYARERGWVIVGIYIDAAKTARKNIHKRTEFQRMMDSVKRDEVDILLFARLDRWFRSVADYYKVMEILQAHNCDWKTTDEEYDTTTANGRLYINVKLSIAQNEADIDGERIDVVFDSKIAHGTVVSGSAPFGFRVNEEKRLEVVPEDAAIVQDAFNYFENTVSQRATVRYVRETYGVNWCDATFRRMLKEKLYTGVYDRGGRYNDQFCPAIIDRQQFDRVQALLTRNVRSAPSGKVYIFTSILTCAECGHKLVGYKSSDYYYYRCNQHFQRGRCSHNHSAREDVVEVWLFDHLGEELERCQLEWDVEAAKKKASVARTDKAALKRKLTKLKELYVNDLIDIEDYKKDYQIYVSALNQIPEPAQEAPPDFAAVRRLLDNSFRTIYDTLTREEKRTLWRSVIKEIRIDNDQNITGVVFG

SEQ ID NO: 8385 - protein, 455 aa, Unknown
  Description of Unknown: Integrase B8386 sequence
  SM00857,IPR006118,G3DSA:1.10.10.2600,IPR036162,PF13408, PS51737,IPR025827,G3DSA:3.40.50.1390,IPR006119,IPR038109, IPR011109,SSF53041,PF00239,PTHR30461,PS00397, PS51736,Coil,cd00338
MECVAYIRVSTERQAEEGYGLESQKRDIDEYCRKHQLIIKEYYVDAGLSGMEMSKRVELQRLISDMAKIDVIVVYKLDRLARDTVDALYMIEKIFTPKGICVESVHDFARYETPQDKFQTQVMAAVAEYDRNTMMLRMRGGMLERVKRGFWMGGGNLPFCYSYDKELGILIPIPERAETARNALELYINGYSDGRIARICHYSGEPVARKILTSVVNIGMIPYKGKVYQGKHEPIFDIERYELAQEIRKSRHDAKSWIAHPTNLLTGLCYCGVCGCAMRYQKWGQKEDSPRKIYCCSKNIDLDYLPNYNHDCDSKPQWASDIEKQVEKQMLEISVNLSKYKPKEKETKLQIMQSQLSREKNKLKRLYILYAEGNDTVIELIKQAEEEVKRITAAIEEESKAAKNTQKKEFVYDNIKKLADVWDKIDKQTKNKILKTIISKIVIVNDNIEIQLKNF

SEQ ID NO: 8386 - protein, 455 aa, Unknown
  Description of Unknown: Integrase B8387 sequence
  PTHR30461:SF3,IPR036162,PS51737,IPR011109,PTHR30461, PS00397,PF00239,G3DSA:1.10.10.2600,IPR006119,SSF53041, cd00338,SM00857,IPR025827,IPR038109,PS51736, IPR006118,PF13408,G3DSA:3.40.50.1390,PF07508,Coil
MANEIKQVALYIRVSTDQQAKHGDSLDEQQHTLNEYVRQQGNMRVFKTYIDDGISGQKLYRDEFQKLLDDVKKGKIDTILFTKLDRWFRNLRHYLNIQEILDKNNVTWLAVTQPFFNTETAMGRSFVNQSMGFAELEAQMTSERIRAVFDNKIRKGEVVSGKVPLGYDIKDKHLVPNEKAEIVKEIFQYYLETGSMRATVRHLENHFSMTRDYQSVRQMLTNRKYIGELRDNKNFCEPIVDRDVFERVQLQLSKNIRMNKKRDYMFTGLLVCSECGCNYSATAVISRYVRKDGTTNPNERHLYRCTKNRNNVKKCSNKKGIYETTLENFLLENIEKQAEELSVRMQKEPAVKKTKNINDKIKKKIDRLKKAYLNDVITLEEYKEDREELEALLIPEQDNKIAKIDLSSLHNYSTAEFREGYKQLTISEKSSLWRQVIKNIVVYPDGNLKINFLGY

SEQ ID NO: 8387 - protein, 455 aa, Unknown
  Description of Unknown: Integrase B8388 sequence
  PTHR30461:SF3,IPR036162,PS51737,IPR011109,PTHR30461, PS00397,PF00239,G3DSA:1.10.10.2600,IPR006119,SSF53041, SM00857,IPR025827,IPR038109,PS51736,cd03768, IPR006118,PF13408,G3DSA:3.40.50.1390,PF07508,Coil
MTKDNRKTALYIRVSTDFQAEEGYSIDAQKEKLEQFCKLKDIKNYEFYIDGGWSGSNIDRPQMKQMMSDIKEGMIASVIVYKLDRLSRSQKDTVFLLEDIFIPNNCNFISLNENFDTTTPYGKAMIGILSVFAQLERENIRERTRMGMYERVKEGLWMGGGRVPYGYSYDANKNILVKNADADNVGKIFDLYIQGYSACYIAKLFNLCNDSQVRNILKRKTYLGKIEYKGEVFDGKHIPLVSQEIYDKAQEELSKRTSKDQQKNVYLLTGLIKCGVCGASMRYQKWGKHVKIYCYSQQSSKPKLIRDLNCDNYKNDSDEIEKAVIDDLLRRTENIVGVKDVKNTSISAINILSNKKKTIEEKIKKLYNLCLTMDDDLLKETISECKAELDEINKQIEREKVIGDTINKINEKHNTINNLKSNWDNMTHMEKRTAVKICIKEIIINKDAIDIVYNF

SEQ ID NO: 8388 - protein, 455 aa, Unknown
  Description of Unknown: Integrase B8389 sequence
  SM00857,IPR006118,G3DSA:1.10.10.2600,IPR036162,PF13408, PS51737,G3DSA:3.40.50.1390,IPR025827,IPR006119,IPR038109, IPR011109,SSF53041,PF00239,PTHR30461,PS00397, PS51736,Coil,cd00338
MECVAYIRVSTERQAEEGYGLESQKRDIDEYCRKHQLIIKEYYVDAGLSGMEMSKRVELQRLISDMAKIDVIVVYKLDRLARDTVDALYMIEKIFTPKGICVESVHDFARYETPQDKFQTQVMAAVAEYDRNTMMLRMRGGMLERVKRGFWMGGGNLPFCYSYDKELGILVPIPERAETARNALELYINGYSDGRIARICHYSGEPVTRKILTSVVNIGMIPYKGKVYQGKHEPIFDIERYELAQEIRKSRHDAKSWIAHPTNLLTGLCYCGVCGCAMRYQKWGQKEDSPRKIYCCSKNIDLDYLPNYNHDCDSKPQWASDIEKQVEKQMLEISVNLSKYKPKEKETKLQIMQSQLSREKNKLKRLYILYAEGNDTVIELIKQAEEEVKRITAAIEEESKAAKNTQKKEFVYDNIKKLADVWDKIDKQTKNKILKTIISKIVIVNDNIEIQLKNF

SEQ ID NO: 8389 - protein, 455 aa, Unknown
  Description of Unknown: Integrase B8390 sequence
  PTHR30461:SF3,IPR036162,PS51737,IPR011109,PTHR30461, PS00397,PF00239,G3DSA:1.10.10.2600,IPR006119,SSF53041, cd00338,SM00857,IPR025827,IPR038109,PS51736, IPR006118,PF13408,G3DSA:3.40.50.1390,PF07508,Coil
MANEIKQVALYIRVSTDQQAKHGDSLDEQQHTLNEYVRQQGNMRVFKTYIDDGISGQKLYRDEFQKLLDDVKKGRIDTILFTKLDRWFRNLRHYLNIQEILDKNNVTWLAVTQPFFNTETAMGRSFVNQSMGFAELEAQMTSERIRAVFDNKIRKGEVVSGKVPLGYEIKDKHLVPNEKAEIVKEIFQYYLETGSMRATVRHLENHFSMTRDYQSVRQMLTNRKYIGELRDNKNFCKPIIDRDVFERVQLQLSKNIRMNKKRDYMFTGLLVCSECGCNYSATAVISRYVRKDGTTNPNERHLYRCTKNRNNAKKCSNKKGIYETTLENFLLENIEKQAEELSVKMQQEPEVKKTKNTNDKIKKKIDRLKKAYLNEVITLEEYKKDREELEALLIPERDNKIAKIDLNSLHNYSTAEFRDGYKQLTISEKSSLWRQVIKNIVVYPDGNLKINFLGY

SEQ ID NO: 8390 - protein, 455 aa, Unknown
  Description of Unknown: Integrase B8391 sequence
  PTHR30461:SF3,IPR036162,PS51737,IPR011109,PTHR30461, PS00397,PF00239,G3DSA:1.10.10.2600,IPR006119,SSF53041, SM00857,IPR025827,IPR038109,PS51736,cd03768, IPR006118,PF13408,G3DSA:3.40.50.1390,PF07508,Coil
MTKDNRKTALYIRVSTDFQAEEGYSIDAQKEKLEQFCKLKDIKNYEFYIDGGWSGSNIDRPQMKQMVSDIKEGMIDSVIVYKLDRLSRSQKDTVFLLEDIFIPNNCNFISLNENFDTTTPYGKAMIGILSVFAQLERENIRERTRMGMYERVKEGLWMGGGRVPYGYNYDSNKNILVPNADADNVRKIFDLYLQGYSACYISKLFNLCNDSQVRNILKRKTYLGKIEYKGEVFDGKHIPLISQEIYDKAQEELSKRTSKDQQKNAYLLTGLIKCGVCGASMRYQKWGKHVKIHCYSQQSSKPKLIRDPNCDNYKNDSDEIEKAVIDDLLRRTENIVGVKDVKNTSISAISILNNKKKTIEEKIKKLYNLCLTMDDDLLKETISECKTELDEINKQIEREKAIGDTINKINEKHNTINNLKGNWDNMTHMEKRTAVKICIKEIIINKDAIDIVYNF

SEQ ID NO: 8391 - protein, 455 aa, Unknown
  Description of Unknown: Integrase B8392 sequence
  PTHR30461:SF3,SM00857,IPR006118,G3DSA:1.10.10.2600,IPR036162, PF13408,IPR025827,G3DSA:3.40.50.1390,PS00397,IPR006119, IPR038109,SSF53041,PTHR30461,Coil,PS51736, cd00338,PF00239
MKECVAYIRVSTEKQAEEGHGLDSQRRDIENYCRKNGLLISDWYEDDGYTGSNMNRPALQSLVTDCTKKRVKCVVAFKLDRLSRSMVDGIYLIERVFQPNDVEFLCVHDSVSYDSPMEQAYTQMMAVFAQLDKNTMMLRMRGGMLERVKKGYWQGGGNPPYCYEYSKEKGILIPIPERAEQANKALDLFIDGYSDERIMRTLGYKTEGAVRSILTSVVNIGMIPYKGNVYQGLHEPIFDKKKFELAQKLRASRRNARLYLHNEPKLLTGLCYCGICGCKMRYQKWTHGNYKIYCCSRSKGLEHIPNYNPNCNNTLEWAEDIEKQVEDKILKISVNLSNHKPKEKKNKLDIMGKQLDKEKNKLKRLYGLYADGNDMVIEMIKDLEGNISALEEQIKEERKRSSDNQKSFVYENIKNLADIWENIDKTRKNKILKSIVEKIVIVNGNVEIQLKNFFH

SEQ ID NO: 8392 - protein, 455 aa, Unknown
  Description of Unknown: Integrase B8393 sequence
  SM00857,IPR036162,PF13408,PS51737,G3DSA:3.40.50.1390, IPR025827,IPR006119,IPR011109,SSF53041,PTHR30461, Coil,PS51736,cd00338,PF00239
MEKKIRCAIYDRVSHELQVERGHSLEAQKELLTQYAVSQGYEIVGYYEDEGISARKKMGDRKELLRLLEDVKKDKVDIILVTKLDRWFRSVKDYHNTQAILDNHNCSWRTILEDYDSSTADGQLKINIMLSVSQNEADRTSERIKTVFDYKKRHKKAISGSIPFGYMIDDEKNVIKNPDQSEIVEAAFKKYLSTFNKWGTLDYLRDIYGDDAPTENQLLAMFEHPAYIGTLFGIEGFCEPYINAEQREKILAVKSQRKRVMTGTVYLFSSMIVCPWCGKKLSGLSGKYHRKDGGVTIHPAYRCSKYYMGEGRHPHPSLSERKIEDYLRANLFRLIHERIYDIEQEAKDKPRQRKNRIKSIQLEMQRLNFLFQKGRIGTDYYDKNYTALEEEIKLLQEESKVVQIQQLRKMIDIGESNWLGMYDALDRQHKKAFWKGIIKEIYIDKEKHITKVIFL

SEQ ID NO: 8393 - protein, 455 aa, Unknown
  Description of Unknown: Integrase B8394 sequence
  PTHR30461:SF3,SM00857,G3DSA:1.10.10.2600,IPR036162, PF13408,IPR025827,G3DSA:3.40.50.1390,IPR006119, IPR038109,SSF53041,PTHR30461,PS51736, cd00338,PF00239
MTKTSKRIRCAIYDRVSTDMQVKDGLSLDAQREALTAYAVSHGYEIVGVYSDEGLTARKKLQNRKNLIRLLNDVKADKIDLILVARLDRWFRNVKDYHNTQAILEAHGCNWKTIYEEYDTTTSNGRFAINIMLSVNENECDRDSERIRSVFEYKKLQKQNLCGKPAYGYKMDAQKHLVKDPATKHIVEDIFDHYFTTFSKKETISYILSKYSDNAPTMYQVNRILSSDVYTGKKYGIPDYCEAYITPDQFRKIAETSDSKIIPHQTEPFLFSSMIRCPICGKFMSGFVKRQHLKNGEKSEYKRYRCSAKFVEYHNGACISESVIEQYLLDHIVEQLSYDMMEAKKKEQSAPLNRSRGIRQEIDRLNHMYQKGRISDAYYDEQYNALNERLQNALASENIVSIEAYRPICDLLSDSWQDVYRELDAAHKKAFWRSIIKEIHVDPETRKISGFRLNA

SEQ ID NO: 8394 - protein, 455 aa, Unknown
  Description of Unknown: Integrase B8395 sequence
  SM00857,IPR006118,G3DSA:1.10.10.2600,IPR036162,PF13408, IPR025827,PS51737,G3DSA:3.40.50.1390,IPR006119,IPR038109, IPR011109,SSF53041,PF00239,PTHR30461,PS00397, PS51736,Coil,cd00338
MECVAYIRVSTERQAEEGYGLESQKRDIDEYCRKHQLIIKEYYVDAGLSGMEMSKRVELQRLISDMAKIDVIVVYKLDRLARDTVDALYMIEKIFTPKGICVESVHDFARYETPQDKFQTQVMAAVAEYDRNTMMLRMRGGMLERVKRGFWMGGGNLPFCYSYDKELGILVPIPERAETARNALELYINGYSDGRIARICHYSGEPVARKILTSVVNIGMIPYKGKVYQGKHEPIFDIERYELAQEIRKSRHDAKSWIAHPTNLLTGLCYCGVCGCAMRYQKWGQKEDSPRKIYCCSKNIDLDYLPNYNHDCDSKPQWASDIEKQVEKQMLEISVNLSKYKPKEKETKLQIMQSQLSREKNKLKRLYILYAEGNDTVIELIKQSEEEVKRITAAIEEESKAAKNTQKKEFVYDNIKKLADVWDKIDKQTKNKILKTIISKIVIVNDNIEIQLKNF

SEQ ID NO: 8395 - protein, 455 aa, Unknown
  Description of Unknown: Integrase B8396 sequence
  PTHR30461:SF3,IPR036162,PS51737,IPR011109,PTHR30461, PS00397,PF00239,G3DSA:1.10.10.2600,IPR006119,SSF53041, SM00857,IPR025827,IPR038109,PS51736,cd03768, IPR006118,PF13408,G3DSA:3.40.50.1390,PF07508,Coil
MTKDNRKTALYIRVSTDFQAEEGYSIDAQKEKLEQFCKLKDIKNYEFYIDGGWSGSNIDRPQMKQMMSDIKEGMIDSVIVYKLDRLSRSQKDTVFLLEDIFIPNNCNFISLNENFDTTTPYGKAMIGILSVFAQLERENIRERTRMGMYERVKAGLWMGGGKVPYGYSYDANKNILVTNADADNVRKIFDLYIQGYSACYIAKLFNLCNDSQVRNILKRKTYLGKIEYNGEVFDGKHTPLISQETYDKAQEELSKRTSKDQQKNVYLLTGLIKCGVCGASMRYQKWGKHVKIYCYSQQSSKPKLIRNPNCDNYKNDSDEIEKAVIDDLLRRTENIVGVKDVKNTSISAISILNNKKKTIEEKIKKLYNLCLTMDDDLLKETISECKAELDEINKQIEREKVIGDTINKINEKHNTINNLKSNWDNMTHMEKRMAVKICIKEIIINKDAIDIVYNF

SEQ ID NO: 8396 - protein, 455 aa, Unknown
  Description of Unknown: Integrase B8397 sequence
  PTHR30461:SF3,IPR036162,PS51737,IPR011109,PTHR30461, PS00397,PF00239,G3DSA:1.10.10.2600,IPR006119,SSF53041, cd00338,SM00857,IPR025827,IPR038109,PS51736, IPR006118,PF13408,G3DSA:3.40.50.1390,Coil
MKTVACYCRVSTEEQVKYGFSIQAQKDSLTKYCKENDYKYDVYIDEGISASSMKKRKALQEMLEKSIAYDMILFTKLDRLSRNVLDANNINKILQDNHCTMKAIDEDDVDTSTADGMFMFNLKVSLAQREIGKTSERIRFVFKNKREKGEVTSGTPKYGYKIKDKKFVIDSEEAENIRNLYKYFISVNGDHKKTYSYFVKHFPGKGKDALFNYLRETAYIGKYKLYRKNVYLDNYIPPIMDKELFNEVQNLLPRVEKVLKKENIPSIFAGMLYCYYCKSRLVRKVDYRSKNKIINYFCDKQYKYKVGINEKQCQNSKVISDKSVEEYLINNLKYLCKQYISKSIIKTKPKPQKNNIKINSLKNKLSKLKDLYLDDLISKEDYKQDYIKINKEILKLEEEQKEKPQKDFTYLNELINKDIPDIYNTFNIDEKRKFWLKIIDKIYIKEGKIKEVTFL

SEQ ID NO: 8397 - protein, 455 aa, Unknown
  Description of Unknown: Integrase B8398 sequence
  PTHR30461:SF3,SM00857,G3DSA:1.10.10.2600,IPR036162,PF13408, PS51737,G3DSA:3.40.50.1390,IPR025827,IPR006119,IPR038109, PF07508,IPR011109,SSF53041,PTHR30461,Coil, PS51736,cd00338,PF00239
MVDEYIDRAISGKTDNRPSFQRLIKDSEKGHFDAVIMYTLDRFARNRYDSAIYKAKLKRNGVKIFYAKQPMPDTPEGIILESVLEGYAEYYSENLARSIKRGMKENALHAIAMGSPVLGYRVGSNRQYEIDPVGAKAVTAIFNMYADGVSRTQIVKWLNEQGFKTARGNAFSKNSLSKILRNQKYIGVYKYDDVVLEGAVPAIIDKALFEKVQNTLKHNYTSRAKSKATEDYLLTSKVFCGKCGEPLLGESGTSKTGRIYRYYKCGNRKKRKGCTKKIEKKEWLEQTVVKFAVQQVLTDENIDKIATKAMALIEKEFKDTSVLTGLQERLKETNKRIQNIMAAIEQGIITATTKERLEDLEEERRNLETQIAKEETKKPLLTKERIVFWLESFRKGNIKNIEYQRRIIDTLVNSVFVYDEGEKGRKLVLTFNISGNNTFTLKSSDIESSAPPSPL

SEQ ID NO: 8398 - protein, 455 aa, Unknown
  Description of Unknown: Integrase B8399 sequence
  PTHR30461:SF3,IPR036162,PS51737,IPR011109,PTHR30461, PS00397,PF00239,G3DSA:1.10.10.2600,IPR006119,SSF53041, cd00338,SM00857,IPR025827,IPR038109,PS51736, IPR006118,PF13408,G3DSA:3.40.50.1390,PF07508,Coil
MANEIKQVALYIRVSTDQQAKHGDSLDEQQHTLNEYVRQQGNMRVFKTYIDDGISGQKLYRDEFQKLLDDVKKGRIDTILFTKLDRWFRNLRHYLNIQEILDKNNVTWLAVTQPFFNTETAMGRSFVNQSMGFAELEAQMTSERIRAVFDNKIRKGEVVSGKVPLGYEIKDKHLVPNEKAEIVKEIFQYYLETGSMRATVRHLENHFSMTRDYQSVRQMLTNRKYIGELRDNKNFCEPIIDRDVFERVQLQLSKNIRMNKKRDYMFTGLLVCSECGCNYSATAVISRYVRKDGTTNPNERHLYRCTKNRNNVKKCSNKKGIYETTLENFLLENIEKQAEELSVKMQQEPEVKKTKNTNDKIKKKIDRLKKAYLNEVITLEEYKKDREELEALLIPERDNKIAKIDLNSLHNYSTAEFRDGYKQLTISEKSSLWRQVIKNIVVYPDGNLKINFLGY

SEQ ID NO: 8399 - protein, 455 aa, Unknown
  Description of Unknown: Integrase B8400 sequence
  PTHR30461:SF3,IPR036162,PS51737,IPR011109,PTHR30461, PS00397,PF00239,G3DSA:1.10.10.2600,IPR006119,SSF53041, SM00857,IPR025827,IPR038109,PS51736,cd03768, IPR006118,PF13408,G3DSA:3.40.50.1390,PF07508,Coil
MTKDNRKTALYIRVSTDFQAEEGYSIDAQKEKLEQFCKLKDIKNYEFYIDGGWSGSNIDRPQMKQMMSDIKEGMIDSVIVYKLDRLSRSQKDTVFLLEDIFIPNNCNFISLNENFDTTTPYGKAMIGILSVFAQLERENIRERTRMGMYERVKAGLWMGGGKVPYGYSYDANKNILVTNADADNVRKIFDLYIQGYSACYIAKLFNLCNDSQVRNILKRKTYLGKIEYNGEVFDGKHTPLISQEIYDKAQEELSKRTSKDQQKDVYLLTGLIKCGVCGASMRYQKWGKHVKIYCYSQQSSKPKLIRDPNCDNYKNDSDEIEKAVIDDLLRRTENIVGVKDVKNTSISAISILNNKKKTIEEKIKKLYNLCLTMDDDLLKETISECKTELDEINKQIEREKVIGDTINKINEKHNTINNLKSNWDNMPYMERRMAIKICIKEIIINKDAIDIVYNF

SEQ ID NO: 8400 - protein, 455 aa, Unknown
  Description of Unknown: Integrase B8401 sequence
  SM00857,IPR006118,G3DSA:1.10.10.2600,IPR036162,PF13408, IPR025827,G3DSA:3.40.50.1390,PS00397,PS51737,IPR006119, IPR038109,IPR011109,SSF53041,PTHR30461,Coil, PS51736,cd00338,PF00239
MECVAYIRVSTERQAEEGYGLESQKRDIDEYCRKHQLIIKEYYVDAGLSGMEMSKRVELQRLISDMAKIGIIVVYKLDRLARDTVDALYMIGKIFTPKGICVESVHDFARYETPQDKFQTQVMAAVAEYDRNTMMLRMRGGMLERVKRGFWMGGGNLPFCYSYDKELGILVPIPERAETARNALELYINGYSDGRIARICHYSGEPVARKILTSVVNIGMIPYKGKVYQGKHKPIFDIERYELAQEIRKSRHDAKSWIAHPTNLLTGLCYCGVCGCAMRYQKWGQKEDSPRKIYCCSKNIDLDYLPNYNHDCDSKPQWASDIEKQVEKQMLEISVNLSKYKPKEKETKLQIMQSQLSREKNKLKRLYILYAEGNDTVIELIKQTEEEVKRITAAIEEESKATKNTQKKEFVYDNIKKLADVWNKIDKQAKNKIFKTIISKIVIVNDNIEIQLKNF

SEQ ID NO: 8401 - protein, 455 aa, Unknown
  Description of Unknown: Integrase B8402 sequence
  PTHR30461:SF3,SM00857,G3DSA:1.10.10.2600,IPR036162,PF13408, IPR025827,G3DSA:3.40.50.1390,IPR006119,IPR038109,SSF53041, PTHR30461,PS51736,cd00338,PF00239
MTKTSKRIRCAIYDRVSTDMQVKDGLSLDAQREALTAYAVSHGYEIVGVYSDEGLTARKKLQNRKNLIRLLNDVKADKIDLILVARLDRWFRNVKDYHNTQAILEAHGCNWKTIYEEYDTTTSNGRFAINIMLSVNENECDRDSERIRSVFEYKKLQKQNLCGKPAYGYKMDAQKHLVKDPATKHIVEDIFDHYFTTFSKKETISYILSKYSDHAPTMYQVNRILSSDVYTGKKYGIPDYCEAYITLDQFRKIAETSDSKIIPHQTEPFLFSSMIRCPICGKFMSGFVKRQYLKNGEKSEYKRYRCSAKFVEYHNGACISESVIEQYLLDHIVEQLSYDMMEAKKKEQSAPLNRSRGIRQEIDRLNHMYQKGRISDAYYDEQYNALNERLQNALTSENIVSIEAYRPICDLLSDSWQDVYRELDAAHKKAFWRSIIKEIHVDPETRKISGFRLNA

SEQ ID NO: 8402 - protein, 455 aa, Unknown
  Description of Unknown: Integrase B8403 sequence
  PTHR30461:SF3,cd00338,SM00857,G3DSA:1.10.10.2600, IPR036162,PS51737,G3DSA:3.40.50.1390,IPR006119, IPR038109,IPR011109,SSF53041,PTHR30461, PS51736,Coil,PF00239
MKKIRCAIYDRVSTEIQATSGLSLDTQKELLTEYAKSHGYEIVGYYADEGLTARKKLQNRKDFQRLLGDIQNDKIDLVLVTKLDRWFRNVRDYHNTQAILEEHHCNWKTILEDYDTSTADGQLKINIMLAVAQNESDRTSERIKVVFEHKKRNGEHLTGAAPYGYITVNKKLVKDPATEHIVNDLFRYYFLTFSKRQTILYITEKYGDAAPTVYQANRILKNETYAGKYQDNLDYCEPYISLKQFETINDISATKIHPTTYQVYLFSQLLICPACGAHLTGYVKKQQLKDGSISLYKRYKCPIKFSKIDHKGKYVCITESVIENYMLEHVYPELQNQLYKIQTTKDKHAKKKDATASIRAEMDRLNLMFRKGRISEDAYDTEYDVLEKKLKTEQERNKIVSVDDYAHIREEFSGNWKDIYQKLDDTHKRAFWRRTIKEIRFDENTHKISGFKFLI

SEQ ID NO: 8403 - protein, 455 aa, Unknown
  Description of Unknown: Integrase B8404 sequence
  PTHR30461:SF3,cd00338,SM00857,G3DSA:1.10.10.2600,IPR036162, PS51737,G3DSA:3.40.50.1390,IPR006119,IPR038109,IPR011109, SSF53041,PTHR30461,PS51736,Coil,PF00239
MKKIRCAIYDRVSTEIQATSGLSLDTQKELLTEYAKSHGYEIVGYYADEGLTARKKLQNRKDFQRLLGDIQNDKIDLVLVTKLDRWFRNVRDYHNTQAILEEHHCNWKTILEDYDTSTADGQLKINIMLAVAQNESDRTSERIKVVFEHKKRNGEHLTGAAPYGYITVNKKLVKDPATEHIVNDLFRYYFLTFSKRQTILYITEKYGDAAPTVYQANRILKNETYAGKYQDNLDYCEPYISLKQFETINDISATKIHPTTYQVYLFSQLLICPACGAHLTGYVKKQQLKDGSISLYKRYKCPIKFSKIDHKGKYVCITESVIEDYMLEHVYPELQNQLYKIQTTKDKHAKKKDATASIRAEMDRLNLMFRKGRISEDAYDTEYDVLEKKLKTEQERNKIVSVDDYAHIREEFSGNWKDIYQKLDDTHKRAFWRRTIKEIRFDENTHKISGFKFLI

SEQ ID NO: 8404 - protein, 455 aa, Unknown
  Description of Unknown: Integrase B8405 sequence
  PTHR30461:SF3,IPR036162,PS51737,IPR011109,PTHR30461, PS00397,PF00239,G3DSA:1.10.10.2600,IPR006119,SSF53041, cd00338,SM00857,IPR025827,IPR038109, PS51736,IPR006118,PF13408,G3DSA:3.40.50.1390,PF07508,Coil
MANEIKQVALYIRVSTDQQAKHGDSLDEQQHTLNEYVRQQGNMRVFKTYIDDGISGQKLYRDEFQKLLDDVKKGRIDTILFTKLDRWFRNLRHYLNIQEILDKNNVTWLAVTQPFFNTETAMGRSFVNQSMGFAELEAQMTSERIRAVFDNKIRKGEVVSGKVPLGYDIKDKHLVPNEKAKIVKEIFQYYLETGSMRATVRHLENHFSMTRDYQSVRQMLTNRKYIGELRDNKNFCEPIIDRDIFERVQLQLSKNIRMNKKRDYMFTGLLVCSECGCNYSATAVISRYVRKDGTTNPNERHLYRCTKNRNNAKKCSNKKGIYETTLENFLLENIEKQAEELSVKMQQEPEVKKTKNTNDKIKKKIDRLKKAYLNEVITLEEYKKDREELEALLIPERDNKIAKIDLNSLHNYSTAEFRDGYKQLTISEKSSLWRQVIKNIVVYPDGNLKINFIGY

SEQ ID NO: 8405 - protein, 455 aa, Unknown
  Description of Unknown: Integrase B8406 sequence
  PTHR30461:SF3,IPR036162,PS51737,IPR011109,PTHR30461, PS00397,PF00239,G3DSA:1.10.10.2600,IPR006119,SSF53041, cd00338,SM00857,IPR025827,IPR038109,PS51736, IPR006118,PF13408,G3DSA:3.40.50.1390,Coil
MKTVACYCRVSTEEQVKYGFSIQAQKDALTNYCKENDYKYDVYIDEGISASSMKKRKALQEMLEKSVAYDMILFTKLDRLSRNVLDANNINKILQDNHCTMKAIDEDDVDTSTADGMFMFNLKVSLAQREIGKTSERIRFVFKNKREKGEVTSGTPKYGYKIKDKKFVIDSEEAENIRNLYKYFISVNGDHKKTYSYFVKHFPGKGKDALFNYLRETAYIGKYKLYRKNVYLDNYIPPIMDKELFNEVQNLLPRVEKVLKKENIPSIFAGMLYCYYCKSRLVRKVDYRSKNKIINYFCDKQYKYKVGINEKQCQNSKVISDKSVEEYLINNLKYLCKPYISKSIIKTKPKPQKNNIKINSLKNKLSKLKDLYLDDLISKEDYKQDYIKINKEILKLEEEQKEKPQKDFTYLNELINKDIPDIYNTFNIDEKRKIWLKIIDKIYVKDGKIKEVTFL

SEQ ID NO: 8406 - protein, 455 aa, Unknown
  Description of Unknown: Integrase B8407 sequence
  IPR036162,PS51737,IPR011109,PTHR30461,PS00397, PF00239,G3DSA:1.10.10.2600,IPR006119,SSF53041,cd00338, SM00857,IPR025827,IPR038109,PS51736,IPR006118, PF13408,G3DSA:3.40.50.1390,PF07508,Coil
MKYVACYCRVSTDEQVKFGFSIQAQKDALEKYCKENGYKYEFYIDEGISASSMKKRKALNEMLSKSSTFDMVLFTKLDRLSRNVLDANNINKLLMDNNCTMKAIDEDDIDTSTADGTFIFNLKVSLAQREIGKTSERINFVFKNKREKGEITSGTKKYGYDIVDKHFVVNEKEAENIKNLYKEFINNNGNLKETYKYFIQHFEGKGYDAMSNYLKETAYIGKYKLYRKNIYINNYIPAILDVEIWEKVQNLRKKKTVGRKITYPDLFSGLIYCHNCGNRLAKKTDYRVKNIVVRYVCDNSYRYKVGIDEKHCTNNKVIKEKDIENYLLNNLDKELSNFIAKVSVIPNTKKINNTPKIKSLEKKINKLKDLYLDDLINKETYAKDYKKYTSELLSLKNTTTQEPLKKDYSHLKQILNSDYKKIYNELNKTNKKKFWFSFINKIYVENGEIKEITFL

SEQ ID NO: 8407 - protein, 455 aa, Unknown
  Description of Unknown: Integrase B8408 sequence
  PTHR30461:SF3,IPR036162,PS51737,IPR011109,PTHR30461, PS00397,PF00239,G3DSA:1.10.10.2600,IPR006119,SSF53041, SM00857,IPR025827,IPR038109,PS51736,cd03768, IPR006118,PF13408,G3DSA:3.40.50.1390,PF07508,Coil
MTKDNRKTALYIRVSTDFQAEEGYSIDAQKEKLEQFCKLKDIKNYEFYIDGGWSGSNIDRPQMKQMMSDIKEGMIDSVIVYKLDRLSRSQKDTVFLLEDIFIPNNCSFISLNENFDTTTPYGKAMIGILSVFAQLERENIRERTRMGMYERVKEGLWMGGGRVPYGYNYDSNKNILVPNADADNVRKIFDLYLQGYSACYIAKLFNLCNDSQVRNILKRKTYLGKIEYNGEVFDGKHTPLISQEIYDKAQEELSKRTSKDQQKNVYLLTGLIKCGVCGASMRYQKWGKHVKIYCYSQQSSKPKLIRDLNCDNYKNDSDEIEKAVIDDLLRRTENIVGVKDVKNTSISAISILNNKKKTIEEKIKKLYNLCLTMDDDLLKETISECKAELDEINKQIEREKVIGDTINKINEKHNTINNLKSNWDNMTYMEKRTAVKICIKEIIINKDAIDIVYNF

SEQ ID NO: 8408 - protein, 455 aa, Unknown
  Description of Unknown: Integrase B8409 sequence
  PTHR30461:SF3,IPR036162,PS51737,IPR011109,PTHR30461, PS00397,PF00239,G3DSA:1.10.10.2600,IPR006119,SSF53041, cd00338,SM00857,IPR025827,IPR038109,PS51736, IPR006118,PF13408,G3DSA:3.40.50.1390,Coil
MKTVACYCRVSTEEQVKYGFSIQAQKDALTKYCKENDYKYDFYIDEGISASSMKKRKALQEMLEKSVAYDMILFTKLDRLSRNVLDANNINKILQDNNCTMKAIDEDDVDTSTADGMFMFNLKVSLAQREIGKTSERIKFVFKNKREKGEVTSGTTKYGYKIKDKKFVVDPEEAENIRNLYKYFISVNGDHKKTYSYFVKHFPGKGQDALFNYLRETAYIGKYKLYRKNVYLDNYIPPIMDKELFDEVQNLLPRVEKVFKKENIPSIFAGMLYCYYCKSRLVRKVDYRSKNKIINYFCDKQYKYKVGINEKQCQNSKVISDKSVEEYLINNLKELCKQYISKSTIKTKPKPQKNNIKINSLKNKLSKLKDLYLDDLINKEEYKQDYIRITKEILELEEAQKEEPQKDFTYLNELINKDIPDIYNTFNIDEKRKFWLKIIDKIYIKEGKIKEVTFL

SEQ ID NO: 8409 - protein, 455 aa, Unknown
  Description of Unknown: Integrase B8410 sequence
  PTHR30461:SF3,IPR036162,PS51737,IPR011109,PTHR30461, PS00397,PF00239,G3DSA:1.10.10.2600,IPR006119,SSF53041, cd00338,SM00857,IPR025827,IPR038109,PS51736, IPR006118,PF13408,G3DSA:3.40.50.1390,PF07508,Coil
MANEIKQVALYIRVSTDQQAKHGDSLDEQQHTLNEYVRQQGNMRVFKTYIDDGISGQKLYRDEFQKLLDDVKKGRIDTILFTKLDRWFRNLRHYLNIQEILDKNNVTWLAVTQPFFNTETAMGRSFVNQSMGFAELEAQMTSERIRAVFDNKIRKGEVVSGKVPLGYEIKDKHLVPNEKAEIVKEIFQYYLETGSMRATVRHLENHFSMTRDYQSVRQMLTNRKYIGELRDNKNFCKPIIDRDVFERVQLQLSKNIRMNKKRDYMFTGLLVCSECGCNYSATAVISRYVRKDGTTNPNERHLYRCTKNRNNAKKCSNKKGIYETTLENFLLENIEKQAEELSVKMQQEPEVKKTKNTNDKIKKKIDRLKKAYLNEVITLEEYKKDRKELEALLIPERDNKIAKIDLNSLHNYSTAEFRDGYKQLTISEKSSLWRQVIKNIVVYPDGNLKINFIGY

SEQ ID NO: 8410 - protein, 455 aa, Unknown
  Description of Unknown: Integrase B8411 sequence
  PTHR30461:SF3,cd00338,SM00857,G3DSA:1.10.10.2600,IPR036162, PF13408,PS51737,G3DSA:3.40.50.1390,IPR025827,IPR006119, IPR038109,IPR011109,SSF53041,PTHR30461,PS51736, Coil,PF00239
MQDVVRVALYPRVSTEEQVLNGYSLDAQEEELIKYANDRGYKIVGIYRDEGFSARKPVLKRKVMQELLHDVEAGKIDLIIFTKLDRWFRSIRDYYAVQTILDKHKVAWKTTLEDYQTETADGRLKVNIMLSVAENEADRTSERIRFVFNSRIQNGEYVYGGVATPYGYTVEIIDGVRKLVKDPETVDAMAAFWDKMIKYRNTRRAGRETNLEFGLSRAHKSWMATVRNEVYAGTLRGVQDFCESYISREDWQSLQNPKRMIKSAQGGRFYLFVGLLRCPVCGNTLKATYKTYPNDRTKEYYGYRCNAKSLGYCTYGRQLSERKVEKYLLANVRGELDNYIWEIRESAKKKRRPKIDISKLQEQLRRLNNVYMSGNIEDGEYNEQAAVIKAMIAKANNDEEKKDNLAELEGLREYLYGDFLEVYKGMTREEKQRFWNSIIEEIRLDDNKISRIIFK

SEQ ID NO: 8411 - protein, 455 aa, Unknown
  Description of Unknown: Integrase B8412 sequence
  PTHR30461:SF3,SM00857,G3DSA:1.10.10.2600,IPR036162,PF13408, IPR025827,G3DSA:3.40.50.1390,IPR006119,IPR038109,SSF53041, PTHR30461,PS51736,cd00338,PF00239
MTKTSKRIRCAIYDRVSTDMQVKDGLSLDAQREALTAYAVSHGYEIVGVYSDEGLTARKKLQNRKNLIRLLNDVKADKIDLILVARLDRWFRNVKDYHNTQAILEAHGCNWKTIYEEYDTTTSNGRFAINIMLSVNENECDRDSERIRSVFEYKKLQKQNLCGKPAYGYKMDAQKHLVKDPATKHIVEDIFDHYFTTFSKKETVSYILSKYGNHAPTMYQVNRILSSDVYTGKKYEIPDYCEAYITPDQFRKIAETSDSKIIPHQTEPFLFSSMIRCPICGKFMSGFVKRQYLKNGEKSEYKRYRCSAKFVEYHNGACISESVIEQYLLDHIVEQLSYDMMEAKKKEQSAPLNRSRGIRQEIDRLNHMYQKGRISDAYYDEQYNALNERLQNALASENIVSIEAYRPICDLLSDSWQDVYRELDAAHKKAFWRSIIKEIHVDPETRKISGFQLNA

SEQ ID NO: 8412 - protein, 455 aa, Unknown
  Description of Unknown: Integrase B8413 sequence
  PTHR30461:SF3,IPR036162,PS51737,IPR011109, PTHR30461,PS00397,PF00239,G3DSA:1.10.10.2600, IPR006119,SSF53041,cd00338,SM00857,IPR025827,IPR038109 ,PS51736,IPR006118,PF13408,G3DSA:3.40.50.1390,Coil
MKTVACYCRVSTEEQVKYGFSIQAQKDALSKYCQENEYKYDFYIDEGISASSMKKRKALQKMLEKSIAYDMILFTKLDRLSRNVLDANNINKILQDNHCTMKAIDEDDVDTSTADGMFMFNLKVSLAQREIGKTSERIRFVFKNKREKGEVTSGTPKYGYKIKDKKFVIDSEEAENIRNLYKYFISVNGDHKKTYSYFVKHFPGKGKDALFNYLRETAYIGKYKLYRKNVYLDNYIPPIMDKELFNEVQNLLPRVEKVLKKENIPSIFAGMLYCYYCKSRLVRKVDYRSKNKIINYFCDKQYKYKVGINEKQCQNSKVISDKSVEEYLINNLKYLCKQYISKSIIKTKPKPQKNNIKINSLKNKLSKLKDLYLDDLISKEDYKQDYIKINKEILKLEEEQKEKPQKDFTYLNELINKDIPDIYNTFNIDEKRKFWLKIIDKIYIKEGKIKEVTFL

SEQ ID NO: 8413 - protein, 455 aa, Unknown
  Description of Unknown: Integrase B8414 sequence
  SM00857,IPR006118,G3DSA:1.10.10.2600,IPR036162,PF13408, PS51737,IPR025827,G3DSA:3.40.50.1390,Coil,IPR006119, IPR038109,IPR011109,SSF53041,PTHR30461,PS00397, PS51736,cd00338,PF00239
MECVAYIRVSTERQAEEGYGLESQKRDIDEYCRKHQLIIKEYYVDAGLSGMEMSKRVELQRLISDMAKIDVIVVYKLDRLARDTVDALYMIEKIFTPKGICVESVHDFARYETPQDKFQTQVMAAVAEYDRNTMMLRMRGGMLERVKRGFWMGGGNLPFCYSYDKELGILIPIPERAETARNALELYINGYSDGRIARICHYSGEPVARKILTSVVNIGMIPYKGKVYQGKHEPIFDIERYELAQEIRKSRHDAKSWIAHPTNLLTGLCYCGVCGCAMRYQKWGQKEDSPRKIYCCSKNIDLDYLPNYNHDCDSKPQWASDIEKQVEKQMLEISVNLSKYKPKEKETKLQIMQSQLSREKNKLKRLYILYAEGNDTVIELIKQAEEEVKRITAAIEEESKATKNTQKKEFVYDNIKKLADVWDKIDKQTKNKILKTIISKIVIVNDNIEIQLKNF

SEQ ID NO: 8414 - protein, 455 aa, Unknown
  Description of Unknown: Integrase B8415 sequence
  PTHR30461:SF3,cd00338,SM00857,IPR006118,IPR036162, PF13408,IPR025827,G3DSA:3.40.50.1390,PS51737,IPR006119, IPR011109,SSF53041,PTHR30461,PS00397,PS51736, Coil,PF00239
MAEKEEQKRLDKEGKKRAAIYVRVSTAEQRDHGLSVDSQIDALQKYCRENGLEVAGIYNDAGISARKKYKARPALLQLIEDCQNKKVDIILFTKLDRWFRSVADYYEVQSQLDAAKVPWRAIWEDYETETSAGVFKVNIMLSIAQAESDRTSERIRAVNEYRKSQGYIIVGKMPLGYIRTSASTIDFDPQTKEAMQAFFDTYLNTYSPVQAMDAAAEKGLKMSRKTAHFLLDKEPYYGTYYGVSVPGYITPAQHELIQQARQHYPRQPKADRVYIFTGLIFCASCGARMGSKCTCYTSYGKPKEKLYYQCRMRTVRRGECKNAAFIMEHNLESYMIDHLEELIVDYNASVQKLAAKAKSTEGKIEKIKGRLERLKDIYLDGDMSRAEYLEKTKELKAQLAELESLAAPALPVSQMPDNWKEIYEQLSRQGKRDFWHRVVRRIEIKRHSVDKVYFV

SEQ ID NO: 8415 - protein, 455 aa, Unknown
  Description of Unknown: Integrase B8416 sequence
  PTHR30461:SF3,cd00338,SM00857,G3DSA:1.10.10.2600,IPR036162, PS51737,G3DSA:3.40.50.1390,IPR006119,IPR038109,IPR011109, SSF53041,PTHR30461,PS51736,Coil,PF00239
MKKIRCAIYDRVSTEIQATSGLSLDTQKELLTEYAESHGYEIVGYYADEGLTARKKLQNRKDFQRLLGDIQNDKIDLVLVTKLDRWFRNVRDYHNTQAILEEHHCNWKTILEDYDTSTADGQLKINIMLAVAQNESDRTSERIKVVFEHKKRNGEHLTGAAPYGYITVNKKLVKDPATEHIVNDLFRYYFLTFSKRQTILYITEKYGDAAPTVYQANRILKNETYAGKYQDNLDYCEPYISLKQFETINDISATKIHPTTYQVYLFSQLLICPACGAHLTGYVKKQKLKDGSISLYKRYKCPIKFSKIDHKGKYVCITESVIENYMLEHVYPELQNQLYKIQTTKGKHAKKKDATASIRAEMDRLNLMFRKGRISEDAYDTEYDVLEKKLKTEQERNKIVSVDDYAHIREEFSGNWKDIYQKLDDTHKRAFWRRTIKEIRFDENTHKISGFKFLI

SEQ ID NO: 8416 - protein, 455 aa, Unknown
  Description of Unknown: Integrase B8417 sequence
  PTHR30461:SF3,IPR036162,PS51737,IPR011109,PTHR30461, PS00397,PF00239,G3DSA:1.10.10.2600,IPR006119,SSF53041, cd00338,SM00857,IPR025827,IPR038109, PS51736,IPR006118,PF13408,G3DSA:3.40.50.1390,Coil
MKTVACYCRVSTEEQVKYGFSIQAQKDSLTKYCKENDYKYDVYIDEGISASSMKKRKALQEMLEKSVAYDMILFTKLDRLSRNVLDANNINKILQDNHCTMKAIDEDDVDTSTADGMFMFNLKVSLAQREIGKTSERIRFVFKNKREKGEVTSGTPKYGYKIKDKKFVIDSEEAENIRNLYKYFISVNGDHKKTYSYFVKHFPGKGKDALFNYLRETAYIGKYKLYRKNVYLDNYIPPIMDKELFNEVQNLLPRVEKVLKKENIPSIFAGMLYCYYCKSRLVRKVDYRSKNKIINYFCDKQYKYKVGINEKQCQNSKVISDKSVEEYLINNLKYLCKQYISKSIIKTKPKPQKNNIKINSLKNKLSKLKDLYLDDLISKEDYKQDYIKINKEILKLEEEQKEKPQKDFTYLNELINKDIPDIYNTFNIDEKRKFWLKIIDKIYIKEGKIKEVTFL

SEQ ID NO: 8417 - protein, 455 aa, Unknown
  Description of Unknown: Integrase B8418 sequence
  PTHR30461:SF3,cd00338,SM00857,G3DSA:1.10.10.2600,IPR036162, PS51737,G3DSA:3.40.50.1390,IPR006119,IPR038109,IPR011109, SSF53041,PTHR30461,PS51736,Coil,PF00239
MKKIRCAIYDRVSTEIQATSGLSLDTQKELLTEYAKSHGYEIVGYYADEGLTARKKLQNRKDFQRLLGDIQNDKIDLVLVTKLDRWFRNVRDYHNTQAILEEHHCNWKTILEDYDTSTADGQLKINIMLAVAQNESDRTSERIKVVFEHKKRNGEHLTGAAPYGYITVNKKLVKDPATEHIVNDLFRYYFLTFSKRQTILYITEKYGDAAPTVYQANRILKNETYAGKYQDNLDYCEPYISLKQFETINDISATKIHPTTYQVYLFSQLLICPACGAHLTGYVKKQKLKDGSISLYKRYKCPIKFSKIDHKGKYVCITESVIENYMLEHVYPELQNQLYKIQTTKGKHAKKKDATASIREEMDRLNLMFRKGRISEDAYDTEYDVLEKKLKTEQERNKIVSVDDYAHIREEFSGNWKDIYQKLDDTHKRAFWRRTIKEIRFDENTHKISGFKFLI

SEQ ID NO: 8418 - protein, 455 aa, Unknown
  Description of Unknown: Integrase B8419 sequence
  PTHR30461:SF3,SM00857,G3DSA:1.10.10.2600,IPR036162,PF13408, IPR025827,G3DSA:3.40.50.1390,IPR006119,IPR038109,SSF53041, PTHR30461,PS51736,cd00338,PF00239
MTKTSKRIRCAIYDRVSTDMQVKDGLSLDAQREALTAYAVSHGYEIVGVYSDEGLTARKKLQNRKNLIRLLNDVKADKIDLILVARLDRWFRNVKDYHNTQAILEAHGCNWKTIYEEYDTTTSNGRFAINIMLSVNENECDRDSERIRSVFEYKKLQKQNLCGKPAYGYKMDAQKHLVKDPATKHIVEDIFDHYFTTFSKKETISYILSKYSDHAPTMYQVNRILSSDVYTGKKYGIPDYCEAYITPDQFRKIAETSDSKIIPHQTEPFLFSSMIRCPICEKFMSGFVKRQYLKNGEKSEYKRYRCSAKFVEYHNGACISESVIEQYLLDHIVEQLSYDMMEAKKKEQSAPLNRSRGIRQEIDRLNHMYQKGRISDAYYDEQYNALNERLQNALASENIVSIEAYRPICDLLSDSWQDVYRELDAAHKKAFWRSIIKEIHVDPETRKISGFRLNA

SEQ ID NO: 8419 - protein, 455 aa, Unknown
  Description of Unknown: Integrase B8420 sequence
  SM00857,IPR006118,G3DSA:1.10.10.2600,IPR036162,PF13408, PS51737,IPR025827,G3DSA:3.40.50.1390,Coil,IPR006119, IPR038109,SSF53041,IPR011109,PTHR30461,PS00397, PS51736,cd00338,PF00239
MECVAYIRVSTERQAEEGYGLESQKRDIDEYCRKHQLIIKEYYVDAGLSGMEMSKRVELQRLISDMAKIEVIVVYKLDRLARDTVDALYMIGKIFTPKGICVESVHDFARYETPQDKFQTQVMAAVAEYDRNTMMLRMRGGMLERVKRGFWMGGGNLPFCYSYDKELGILVPIPERAETARNALELYINGYSDGHIARICHYSGEPVAKKILTSVVNIGMIPYKGKVYQGKHKPIFDIERYELAQEIRKSRHDAKSWIAHPTNLLTGLCYCGVCGCAMRYQKWGQKEDSPRKIYCCSKNIDLDYLPNYNHDCDSKPQWASDIEEQVEKQMLEISVNLSKYKPKEKETKLQIMQSQLSREKNKLKRLYILYAEGNDTVIELIKQTEEEVKRITAAIEEESKATKKTQKKEFVYDNIKKLADVWNKIDKQAKNKIFKTIISKIVIANDNIEIQLKNF

SEQ ID NO: 8420 - protein, 455 aa, Unknown
  Description of Unknown: Integrase B8421 sequence
  PTHR30461:SF3,IPR036162,PS51737,IPR011109,PTHR30461, PS00397,PF00239,G3DSA:1.10.10.2600,IPR006119,SSF53041, cd00338,SM00857,IPR025827,IPR038109,PS51736, IPR006118,PF13408,G3DSA:3.40.50.1390,PF07508,Coil
MKQKDRIKTVALYIRVSTDRQAKEGDSLEAQEKALTDYAKKNKYKIYDTYIDGGESGQKLKRTNLQRMLKDLETGHIDLILMTKLDRWFRNIADFYKVIEILKKNNVAWKTIWEDYDTTTASGEFWLNMSLSLGQMEAKRTGERIISVFDHKFRVQKTVCSGKVPYGYKISDDKKIIIDPETAPHIQGLFDQYLLTNNLSKTVRWFQQNCSQKSYDSIKIYLKNTAYIGRYVRKSTGEVLEDFCPQIVEDDVFYRVQELFKNNIKEIKHKNTDPYIFSRLIKCGQCGRKMAGRYASKNNTHYYRCKRANENNYCSNKYNVPEKRIEEFVIKNIFTQFEQKKLKIDEVNQKEKKINIDSIKRKMNKLSELYLNDMIDIDFYTDQYSSLKKILEENEKNKDIDKTKSNLKKIQKYLSSDIFKTYDKLNNQEKRELWGSIIETIEIKSKNEFEINFLI

SEQ ID NO: 8421 - protein, 455 aa, Unknown
  Description of Unknown: Integrase B8422 sequence
  SM00857,IPR006118,G3DSA:1.10.10.2600,IPR036162,PF13408, PS51737,G3DSA:3.40.50.1390,IPR025827,IPR006119,IPR038109, IPR011109,SSF53041,PF00239,PTHR30461,PS00397, PS51736,Coil,cd00338
MECVAYIRVSTERQAEEGYGLESQKRDIDEYCRKHQLIIKEYYVDAGLSGMEMSKRVELQRLISDMAKIDVIVVYKLDRLARDTVDALYMIEKIFTPKGICVESVHDFARYETPQDKFQTQVMAAVAEYDRNTMMLRMRGGMLERVKRGFWMGGGNLPFCYSYDKELGILVPIPERAETARNALELYINGYSDGRIARICHYSGEPVTRKILTSVVNIGMIPYKGKVYQGKHEPIFDIERYELAQEIRKSRHDAKSWIAHPTNLLTGLCYCGVCGCAMRYQKWGQKEDSPRKIYCCSKNIDLDYLPNYNHDCDSKPQWASDIEKQAEKQMLEISVNLSKYKPKEKETKLQIMQSQLSREKNKLKRLYILYSEGNDTVIELIKQAEEEVKRITAAIEEESKAAKNTQKKEFVYDNIKKLADVWDKIDKQTKNKILKTIISKIVIANDNIEIQLKNF

SEQ ID NO: 8422 - protein, 455 aa, Unknown
  Description of Unknown: Integrase B8423 sequence
  PTHR30461:SF3,IPR036162,PS51737,IPR011109,PTHR30461, PS00397,PF00239,G3DSA:1.10.10.2600,IPR006119,SSF53041, SM00857,IPR025827,IPR038109,PS51736,cd03768, IPR006118,PF13408,G3DSA:3.40.50.1390,PF07508,Coil
MTKDNRKTALYIRVSTDFQAEEGYSIDAQKEKLEQFCKLKDIKNYEFYIDGGWSGSNIDRPQMKQMMSDIKEGMIDSVIVYKLDRLSRSQKDTVFLLEDIFIPNNCNFISLNENFDTTTPYGKAMIGILSVFAQLERENIRERTRMGMYERVKAGLWMGGGKVPYGYSYDANKNILVTNADADNVRKIFDLYIQGYSACYIAKLFNLCNDSQVRNILKRKTYLGKIEYNGEVFDGKHTPLISQETYDKAQEELSKRTSKDQQKNVYLLTGLIKCGVCGASMRYQKWGKHVKIYCYSQQSSKPKLIRNPNCDNYKNDSDEIEKAVIDDLLRRTENIVGVKDVKDTSISAISILNNKKKTIEEKIKKLYNLCLTMDDDLLKETISECKTELDEINKQIEREKVIGDTINKINEKHNTINNLKSNWDNMTYMERRMAIKICIKEIIINKDAIDIVYNF

SEQ ID NO: 8423 - protein, 455 aa, Unknown
  Description of Unknown: Integrase B8424 sequence
  PTHR30461:SF3,IPR036162,PS51737,IPR011109,PTHR30461, PS00397,PF00239,G3DSA:1.10.10.2600,IPR006119,SSF53041, cd00338,SM00857,IPR025827,IPR038109,PS51736, IPR006118,PF13408,G3DSA:3.40.50.1390,Coil
MKYVACYCRVSTDEQARFGFSIQAQKDALEKYCKENGYKYEFYIDEGISASSMKKRKALNEMLSKSSTFDMVLFTKLDRLSRNVLDANNINKLLIDNNCTMKAIDEDDIDTSTADGTFIFNLKVSLAQREIGKTSERINFVFKNKREKGEITSGTKKYGYDIVDKHFVVNEKEAENIKNLYKEFINNNGNLKETYKYFIQHFEGKGYDAMSNYLKETAYIGKYKLYRKNIYIDNYIPAILDIEIWEKVQNLRKKKTVGRKITYPDLFSGLIYCRNCGNRLAKKTDYRVKNIVVRYVCDNSYRYKVGIDEKHCTNNKVIKEKDIENYLLNNLDKELSNFIAKVSVIPNTKKINNTPKIKSLEKKINKLKDLYLDDLINKETYAKDYKKYTSELLSLKNTTTQEPLKKDYSHLKQILNSDYKKIYNELNKTNKKKFWFSFINKIYVENGEIKEITFL

SEQ ID NO: 8424 - protein, 455 aa, Unknown
  Description of Unknown: Integrase B8425 sequence
  PTHR30461:SF3,G3DSA:1.10.10.2600,IPR036162,PF13408,PS51737, IPR025827,G3DSA:3.40.50.1390,IPR006119,IPR038109,PF07508, IPR011109,SSF53041,PTHR30461,Coil,cd00338, PF00239
MVVYKTDRFARNKYDSAVYKRELKRNGIQIFYAAEAIPDGPEGIILESLMEGLAEYYSAELAQKIKRGMRENALKCQSTGSGRPLGYRVDEQKRFQIDPESAQTVQTIFEQYIKGESNAAICELLNSRGLRTAQGKPFNKNSINRIIKNRKYIGEYRYHDIVVEGGMPAIISKDTFNLAQAEMERRRTRKAPKSPKAEYLLAGRLFCGHCKGPMQGVSGTGKSGNKWYYYYCGNTRGKNKTCDKKQVSRDRLERAVVDFTVRYILQEEVLEELARKVHAAQERQNDTASEIAFYEKKLADNKKSIANVLRAIESGAATQTLPARLQELENEQAVILGELSFIKGKRLAFTEDQILFALMKHLEPYPGESEQDYRRRIISDFVSEVYLYDDRLLIYFNISSEDGKLKSADLSNIEGGEFDEGLTSSTNLIAGRTPEVTIVVLPYGFVLATQIKDRL

SEQ ID NO: 8425 - protein, 455 aa, Unknown
  Description of Unknown: Integrase B8426 sequence
  PTHR30461:SF3,SM00857,IPR006118,G3DSA:1.10.10.2600,IPR036162, PF13408,IPR025827,G3DSA:3.40.50.1390,PS00397,IPR006119, IPR038109,SSF53041,PTHR30461,Coil,PS51736, cd00338,PF00239
MKECVAYIRVSTEKQAEEGHGLDSQRRDIENYCRKNGLLISDWYEDDGYTGSNMNRPALQSLVTDCTKKRVKCVVAFKLDRLSRSMVDGIYLIERVFQPNDVEFLCVHDSVSYDSPMEQAYTQMMAVFAQLDKNTMMLRMRGGMLERVKKGYWKGGGNPPYCYEYSKEKDILIPIPERAEQANKALDLFIDGYSDKRIMSILGYKTERVVRNILTGVVNVGMISYKGNVYQGLHEPIFDKKKFELAQKLRASRRNAKMYLHNEPKLLTGLCYCGICGCKMRYQKWTHGNYKIYCYSRIKGVEHIPNYNPNCNNTIEWAEDIEKQVEDKILKISVNLSNHKPKEKKNKLDIMGKQLDKEKTKLKRLYGLYADGNDMVIEMIKDLEGNISALEEQIKEERKRSSDNQKSFVYENIKNLADIWEKIDKTRKNKILKSIIEKIVIVNGNVEIQLKNFFH

SEQ ID NO: 8426 - protein, 454 aa, Unknown
  Description of Unknown: Integrase B8427 sequence
  PTHR30461:SF3,IPR036162,PS51737,IPR011109,PTHR30461, PS00397,PF00239,G3DSA:1.10.10.2600,IPR006119,SSF53041, cd00338,SM00857,IPR025827,IPR038109,PS51736, IPR006118,PF13408,G3DSA:3.40.50.1390,Coil
MECVAYLRVSTEKQAEEGNGLDSQKRDIENYCRKNQLIISDWYEDDGFTGSNMNRPALQRLINDCSKKKLKCVVAFKLDRLSRSMVDGIYLIERVFIPNGVDFRCVHDSVSYDSPMEQAYTQMMAVFAQLDKNTMLLRMRGGMLERVKQGYWMGGGNTPYCYRYSKEDGILVPIPERKEMALRAMNLYISGYSDVRIQKLIGFKSEFVTRQVLTSPVNIGMIPYKGKLYKGRHEPIFDIKVFELAQELRKTRKQSKSFCVNHENQLLTGLCYCGVCGCKMRYQKWTHGKHKIYCYSRDNGMSYLPNYNPNCNNSLEWAEDIEKQVEDEILKISLNLSSHKPKERESCLDILSKQLQKEKTKLKRLYTLYAEGNDTVLEMIKETESGIDELKLKIQNEMKNPDNSQKKEFVYDNIKKLADVWEHIDKQNKNRILKTIISKIIIVNGNIEIQLKKF

SEQ ID NO: 8427 - protein, 454 aa, Unknown
  Description of Unknown: Integrase B8428 sequence
  PTHR30461:SF3,cd00338,SM00857,G3DSA:1.10.10.2600,IPR036162, PF13408,IPR025827,G3DSA:3.40.50.1390,PS51737,IPR006119, IPR038109,SSF53041,IPR011109,PTHR30461,PS51736, Coil,PF00239
MECVAYMRVSTEKQAEEGNGLESQKRDIELYCRKNELIISDWYIDDGYTGANMNRPELQRLINDCGRKRVKCVVAFKLDRLSRSMVDGIYMIERVFQPNNVQFKCVHDSISYDSPMEQAYTQMMAVFAQLDKNTMMLRMRGGMLERVKQGYWMGGGNTPYCYTYSKEKGILIPIPERAEQANKAIDLFIAGNSDVAIQRILGYTSELVVRSILTGVVNIGMIPYKGNIYQGLHEPIFDKDKFEMAQQIRKSRRSKKSYCQNLTPNMLTGLCYCGVCGCKMRYQKWTNGVRKIYCCSRNKDLYYLPNFNNDCDNSIEWADNIENIVESEMLKISVNLSKYKPKEKENKIDIMQSQLDKEKSKLKRLYELYADGNDTVLDMIKDQESKVKNLDDSIKEEQKSGDNNPKKQFVYENIKKLADVWDDIDKPAKNKILKTIIDKIIIVNGNVEIQLKNF

SEQ ID NO: 8428 - protein, 454 aa, Unknown
  Description of Unknown: Integrase B8429 sequence
  PTHR30461:SF3,SM00857,G3DSA:1.10.10.2600,IPR036162,PF13408, IPR025827,G3DSA:3.40.50.1390,PS51737,IPR006119,IPR038109, IPR011109,SSF53041,PF00239,PTHR30461,PS51736, Coil,cd00338
METIIKKAACYCRVSHEEQKLHGLSIEAQKEDLKQYCKRNNYKIYKFYIDEGLTAKNTKRQGLQNLLSDLDKFDIVLFTKLDRLSRNIIDANLLDQQFKSNNVCMKAIFEDDIDTSTADGKFTFNLKLSLAERELDKTSERIKDVFRYKIERNEVISGSVPKGYKIVDKKLAIDENTAWVVKKSFDLVEELMSARAAFIQINNVYNQPTSFRSFNKLLKNIIYTGTYKSKNYYKENYCEPIISLEQFSNVQRILKNNKQYVSNNRKETYIFSGLLKCAHCGYKIVGHYSNRSGKNVIKTYRCNRYSIYKDCDQKKSINEKKLEKVLLNCIVEEYKNYLYSFDVSSKKSSSTDISQNKAKIQKKIDKLRELYLNDLISLEDYKKDYAIFNQALEEIKNKEVAKVAPKDADKLLSILDNIEDIYYNLDATERKRFWTSFIDVISIDGNYNIDIKFL

SEQ ID NO: 8429 - protein, 454 aa, Unknown
  Description of Unknown: Integrase B8430 sequence
  PTHR30461:SF3,IPR036162,PS51737,IPR011109,PTHR30461, PS00397,PF00239,G3DSA:1.10.10.2600,IPR006119,SSF53041, cd00338,SM00857,IPR025827,IPR038109,PS51736, IPR006118,PF13408,G3DSA:3.40.50.1390,Coil
MECVAYLRVSTEKQAEEGNGLDSQKRDIENYCRKNQLIISDWYEDDGFTGSNMNRPALQRLINDCSKKKLKCVVAFKLDRLSRSMVDGIYLIERVFIPNGVDFRCVHDSVSYDSPMEQAYTQMMAVFAQLDKNTMLLRMRGGMLERVKQGYWMGGGNTPYCYRYSKEDGILVPIPERKEMALRAMNLYISGYSDVRIQKLIGFKSEFVTRQVLTSPVNIGMIPYKGKLYKGRHEPIFDIKVFELAQELRKTRKQSKSFCVNHENQLLTGLCYCGVCGCKMRYQKWTHGKHKIYCYSRDNGMSYLPNYNPNCSNSLEWAEDIEKQVEDEILKISLNLSSHKPKERESCLDILSKQLQKEKTKLKRLYTLYAEGNDTVLEMIKETESGIDELKLKIQNEMKNPDNSQKKEFVYDNIKKLADVWEHIDKQNKNRILKTIISKIIIVNGNIEIQLKKF

SEQ ID NO: 8430 - protein, 454 aa, Unknown
  Description of Unknown: Integrase B8431 sequence
  PTHR30461:SF3,IPR036162,PS51737,IPR011109,PTHR30461, PS00397,PF00239,G3DSA:1.10.10.2600,IPR006119,SSF53041, cd00338,SM00857,IPR025827,IPR038109,PS51736, IPR006118,PF13408,G3DSA:3.40.50.1390,Coil
MECVAYLRVSTEKQAEEGNGLDSQKRDIENYCRKNQLIISDWYEDDGFTGSNMNRPALQRLINDCSKKKLKCVVAFKLDRLSRSMVDGIYLIERVFIPNGVDFRCVHDSVSYDSPMEQAYTQMMAVFAQLDKNTMLLRMRGGMLERVKQGYWMGGGNTPYCYRYSKEDGILVPIPERKEMALRAMNLYISGYSDVRIQKLIGFKSEFVTRQVLTSPVNIGMIPYKGKLYKGRHEPIFDIKVFELAQELRKTRKQSKSFCVNHENQLLTGLCYCGVCGCKMRYQKWTHGKHKIYCYSRDNGMSYLPNYNPNCNNSLEWAEDIEKQVEDEILKISLNLSSHKPKERESCLDILSKQLQKEKTKLKRLYTLYAEGNDTVLEMIKETESGIDELKLKIQNEMKSPDNSQKKEFVYDNIKKLADVWEHIDKQNKNRILKTIISKIIIVNGNIEIQLKKF

SEQ ID NO: 8431 - protein, 454 aa, Unknown
  Description of Unknown: Integrase B8432 sequence
  PTHR30461:SF3,IPR036162,PS51737,IPR011109,PTHR30461, PS00397,PF00239,G3DSA:1.10.10.2600,IPR006119,SSF53041, cd00338,SM00857,IPR025827,IPR038109,PS51736, IPR006118,PF13408,G3DSA:3.40.50.1390,Coil
MECVAYLRVSTEKQAEEGYGLELQRISITDYCRKNELIISDWYIDDGYTGSNMDRPQLQRLIRDCSKKRIKCLVAFKLDRISRSMVDGIYMIERVFQPNGVDFRCVYDSVSYDSPMEQAYTQMMAVFAQLDKNTMMMRMRGGRLERVKKGYWYGGGNRPYCYDYSREKGILVPIPERAEQANRALDLFLQGYSDERIMKICGYSSELLVRHILTGVVNIGMIPYKGEVYKGLHEPIFDERKFELAQEYRKTRRKTKTACFSMETNLLTGLCYCGICGCKMRYQKWTNGNHKIYCYSHDRSLKKLPNHNPGCDNTLEWAKDIEKQVEEEILKISLNISSYQKTQKESELEITKKALEKNKAKLKRLYNFYAEGNDTIVDSIRETEDEINKQKEVIFELQKSEGNKQSKEIVYDKIKSLADVWPHIDKTSKNVILKTIISKIVIVKGNVEIQLKEF

SEQ ID NO: 8432 - protein, 454 aa, Unknown
  Description of Unknown: Integrase B8433 sequence
  PTHR30461:SF3,SM00857,G3DSA:1.10.10.2600,IPR036162,PF13408, IPR025827,G3DSA:3.40.50.1390,IPR006119,IPR038109,SSF53041, PTHR30461,Coil,PS51736,cd00338,PF00239
MECVAYMRVSTEKQAEEGNGLESQKRDIELYCRKNELIISDWYIDDGYTGANMNRPELQRLINDCGRKRVKCVVAFKLDRLSRSMVDGIYMIERVFQPNNVQFKCVHDSISYDSPMEQAYTQMMAVFAQLDKNTMMLRMRGGMLERVKQGYWMGGGNTPYCYTYSKEKGILIPITERAEQANKAMDLFIAGNSDVAIQKILGYKSEFVVRNILTGVVNIGMIPYKGNVYQGLHEPIFDKEKFEMAQQLRKTRRKTKSYCQNLTPNMLTGLCYCGVCGCKMRYQKWTNGVRKIYCCSRNKDLYYLPNFNHDCDNSIEWADKIEHIVESKMLKISVNLSKYKPKAKENKIDIMQSQLDKEKLKLKRLYELYADGNDTVLDMIKEHESKIKDLNDSIKEEQKSGNDSPKKQFVYESIKKLADVWDDIDKPAKNKILKTIIDKIVIVNGNVEIQLKNF

SEQ ID NO: 8433 - protein, 454 aa, Unknown
  Description of Unknown: Integrase B8434 sequence
  PTHR30461:SF3,IPR036162,PS51737,IPR011109,PTHR30461, PS00397,PF00239,G3DSA:1.10.10.2600,IPR006119,SSF53041, cd00338,SM00857,IPR025827,IPR038109, PS51736,IPR006118,PF13408,G3DSA:3.40.50.1390,Coil
MECVAYLRVSTEKQAEEGNGLDSQKRDIENYCRKNQLIISDWYEDDGFTGSNMNRPALQRLINDCSKKKLKCVVAFKLDRLSRSMVDGIYLIERVFIPNGVDFRCVHDSVSYDSPMEQAYTQMMAVFAQLDKNTMLLRMRGGMLERVKQGYWMGGGNTPYCYRYSKEDGILVPIPERKEMALRAMNLYISGYSDVRIQKLIGFKSEFVTRQVLTSPVNIGMIPYKGKLYKGRHEPIFDIKVFELAQELRKTRKQSKRFCVNHENQLLTGLCYCGVCGCKMRYQKWTHGKHKIYCYSRDNGMSYLPNYNPNCNNSLEWAEDIEKQVEDEILKISLNLSSHKPKERESCLDILSKQLQKEKTKLKRLYTLYAEGNDTVLEMIKETESGIDELKLKIQNEMKNPDNSQKKEFVYDNIKKLADVWEHIDKQNKNRILKTIISKIIIVNGNIEIQLKKF

SEQ ID NO: 8434 - protein, 454 aa, Unknown
  Description of Unknown: Integrase B8435 sequence
  PTHR30461:SF3,IPR036162,PS51737,IPR011109,PTHR30461, PS00397,PF00239,G3DSA:1.10.10.2600,IPR006119,SSF53041, cd00338,SM00857,IPR025827,IPR038109,PS51736, IPR006118,PF13408,G3DSA:3.40.50.1390,Coil
MECVAYLRVSTEKQAEEGNGLDSQKRDIENYCRKNQLIISDWYEDDGFTGSNMNRPALQRLINDCSKKKLKCVVAFKLDRLSRSMVDGIYLIERVFIPNGVDFRCVHDSVSYDSPMEQAYTQMMAVFAQLDKNTMLLRMRGGMLERVKQGYWMGGGNTPYCYRYSKEDGILVPIPERKEMALRAMNLYISGYSDVRIQKLIGFKSEFVTRQVLTSPVNIGMIPYKGKLYKGRHEPIFDIKVFELAQELRKTRKQSKSFCVNHENQLLTGLCYCGVCGCKMRYQKWTHGKHKIYCYSRDNGMSYLPNYNPNCSNSLEWAEDIEKQVEDEILKISLNLSSHKPKERESCLDILSKQLQKEKTKLKRLYTLYAEGNDTVLEMIKETESGIDELKLKIQNEMKSPDNSQKKEFVYDNIKKLADVWEHIDKQNKNRILKTIISKIIIVNGNIEIQLKKF

SEQ ID NO: 8435 - protein, 454 aa, Unknown
  Description of Unknown: Integrase B8436 sequence
  PTHR30461:SF3,IPR036162,PS51737,IPR011109,PTHR30461, PS00397,PF00239,G3DSA:1.10.10.2600,IPR006119,SSF53041, cd00338,SM00857,IPR025827,IPR038109,PS51736, IPR006118,PF13408,G3DSA:3.40.50.1390,Coil
MECVAYLRVSTEKQAEEGNGLDSQKRDIENYCRKNQLIISDWYEDDGFTGSNMNRPALQRLINDCSKKKLKCVVAFKLDRLSRSMVDGIYLIERVFIPNGVDFRCVHDSVSYDSPMEQAYTQMMAVFAQLDKNTMLLRMRGGMLERVKQGYWMGGGNTPYCYRYSKEDGILVPIPERKEMALRAMNLYISGYSDVRIQKLIGFKSEFVTRQVLTSPVNIGMIPYKGKLYRGRHEPIFDIKVFELAQELRKTRKQSKSFCVNHENQLLTGLCYCGVCGCKMRYQKWTHGKHKIYCYSRDNGMSYLPNYNPNCSNSLEWAEDIEKQVEDEILKISLNLSSHKPKERESCLDILSKQLQKEKTKLKRLYTLYAEGNDTVLEMIKETESGIDELKLKIQNEMKSPDNSQKKEFVYDNIKKLADVWEHIDKQNKNRILKTIISKIIIVNGNIEIQLKKF

SEQ ID NO: 8436 - protein, 454 aa, Unknown
  Description of Unknown: Integrase B8437 sequence
  PTHR30461:SF3,IPR036162,PS51737,IPR011109,PTHR30461, PS00397,PF00239,G3DSA:1.10.10.2600,IPR006119,SSF53041, cd00338,SM00857,IPR025827,IPR038109,PS51736, IPR006118,PF13408,G3DSA:3.40.50.1390,Coil
MECVAYLRVSTEKQAEEGNGLDSQRRDIENYCRKNELIIKNWYEDDGFTGSNMNRPGLQRLINDCTRKRIKCVVAFKLDRLSRSMVDGIYLIERIFIPNGVEFKCVHDSVSYDSPMEQAYTQMMAVFAQLDKNTMLLRMRGGMLERVKHGFWMGGGNLPYCYDYDKEQGILVPIPERTEQARQALDLYLSGYSDAKIRDILGYTSERVVRNILTSPVNIGMIPYKGSVYRGKHEPIFEMERFEVAQEMRKSRRQHKLQNINQPAHLLTGLCYCGVCGCKMRYQKWTHGKHKIYCCSRNAGCSHLPNYNPNCDNSLEWADDIEKQVEEQILKISLNLSSYKPKERETRLEILQKQYDKEKIKLKRLYSLYADGNDTVLEMIQESESKLSEIKEQIDRETENTEYTQKKEYVYEKIKRLADVWDHIDKPDKNKILKSIISKIVIVNGNVEIQLKRF

SEQ ID NO: 8437 - protein, 454 aa, Unknown
  Description of Unknown: Integrase B8438 sequence
  PTHR30461:SF3,IPR036162,PS51737,IPR011109,PTHR30461, PS00397,PF00239,G3DSA:1.10.10.2600,IPR006119,SSF53041, cd00338,SM00857,IPR025827,IPR038109,PS51736, IPR006118,PF13408,G3DSA:3.40.50.1390,Coil
MECVAYLRVSTEKQAEEGNGLGSQRRDIENYCRKNELIIKNWYEDDGFTGSNMNRPGLQRLINDCTRKRIKCVVAFKLDRLSRSMVDGIYLIERIFIPNGVEFKCVHDSVSYDSPMEQAYTQMMAVFAQLDKNTMLLRMRGGMLERVKQGFWMGGGNLPYCYDYDKEQGILVPVPERAEQARQALDLYLSGYSDAKIRDILGYTSERVVRNILTSPVNIGMIPYKGSVYRGKHEPIFEMERFEVAQEMRKSRRQHKLQNINQPAHLLTGLCYCGVCGCKMRYQKWTHGKHKIYCCSRNAGCSHLPNYNPNCDNSLEWADDIENQVEEQILKISLNLSSYKPKEKETRLEILQKQYDKEKIKLKRLYSLYADGNDTVLEMIQESESKLSEIKEQIDRETENTEYTQKKEYVYEKIKRLADVWDHIDKPDKNKILKSIISKIVIVNGNVEIQLKRF

SEQ ID NO: 8438 - protein, 454 aa, Unknown
  Description of Unknown: Integrase B8439 sequence
  PTHR30461:SF3,IPR036162,PS51737,IPR011109,PTHR30461, PS00397,PF00239,G3DSA:1.10.10.2600,IPR006119,SSF53041, cd00338,SM00857,IPR025827,IPR038109,PS51736, IPR006118,PF13408,G3DSA:3.40.50.1390,Coil
MECVAYLRVSTEKQAEEGNGLDSQKRDIENYCRKNQLIISDWYEDDGFTGSNMNRPALQRLINDCSKKKLKCVVAFKLDRLSRSMVDGIYLIERVFIPNGVDFRCVHDSVSYDSPMEQAYTQMMAVFAQLDKNTMLLRMRGGMLERVKQGYWMGGGNTPYCYRYSKEDGILVPIPERKEMALRAMNLYISGYSDVRIQKLIGFKSEFVTRQVLTSPVNIGMIPYKGKLYKGRHEPIFDIKVFELAQELRKTRKQSKSFCVNHENQLLTGLCYCGVCGCKMRYQKWTHGKHKIYCYSRDNGMSYLPNYNPNCNNSLEWAEDIEKQVEDKILKISLNLSSHKPKERESCLDILSKQLQKEKTKLKRLYTLYAEGNDTVLEMIKETESGIDELKLKIQNEMKNPDNSQKKEFVYDNIKKLADVWEHIDKQNKNRILKTIISKIIIVNGNIEIQLKKF

SEQ ID NO: 8439 - protein, 454 aa, Unknown
  Description of Unknown: Integrase B8440 sequence
  PTHR30461:SF3,IPR036162,PS51737,IPR011109,PTHR30461, PS00397,PF00239,G3DSA:1.10.10.2600,IPR006119,SSF53041, cd00338,SM00857,IPR025827,IPR038109,PS51736, IPR006118,PF13408,G3DSA:3.40.50.1390,Coil
MECVAYLRVSTEKQAEEGYGLDLQRISITDYCRKNELIISDWYIDDGYTGSNMDRPQLQRLIRDCSKKRIKCLVAFKLDRISRSMVDGIYLIERVFQPNGVDFRCVHDSVSYDSPMEQAYTQMMAVFAQLDKNTMMMRMCGGRLERVKKGYWYGGGNRPYCYDYSREKGILVPIPERAEQANRALDLFLQGYSDERIMKICGYSSELLVRHILTGVVNIGMIPYKGEVYKGLHEPIFDERKFELAQEYRKTRRKTKTACFSMETNLLTGLCYCGICGCKMRYQKWTNGNHKIYCYSHDRSLKKLPNHNPECDNTLEWAKDIEKQVEEEILKISLNISSYQKTQKESELEITKKALEKNKAKLKRLYNFYAEGNDTIVDSIRETENEINKQKEVIFELQKSEGNKQSKEIVYDKIKSLADVWPHIDKTSKNVILKTIISKIVIVKGNVEIQLKEF

SEQ ID NO: 8440 - protein, 454 aa, Unknown
  Description of Unknown: Integrase B8441 sequence
  SM00857,G3DSA:1.10.10.2600,IPR036162,PF13408,IPR025827, G3DSA:3.40.50.1390,IPR006119,IPR038109,SSF53041,PF00239, PTHR30461,PS51736,Coil,cd00338
MECVAYMRVSTEKQAEEGNGLESQKRDIELYCRKNELIISDWYIDDGYTGANMNRPELQRLINDCGRKRVKCVVAFKLDRLSRSMVDGIYMIERVFQPNNVQFKCVHDSISYDSPMEQAYTQMMAVFAQLDKNTMMLRMRGGMLERVKQGYWMGGGNTPYCYTYSKEKGILIPIQERAEQANKAMDLFIAGNSDVAIQRILGYTSELVVRSILTGVVNIGMIPYKGNIYQGLHEPIFDKDKFEMAQQIRKSRRSKKSYCQNLTPNMLTGLCYCGICGCKMRYQKWTNGVRKIYCCSRNKDLYYLPNFNNDCDNSIEWADNIENIVESEMLKISVNLSKYKPKEKENKIDIMQSQLDKEKSKLKRLYELYADGNDTVLDMIKDQESKVKNLDDSIKEEQKSGDNNPKKQFVYENIKKIADVWDDIDKPAKNKILKTIIDKIIIVNGNVEIQLKNF

SEQ ID NO: 8441 - protein, 454 aa, Unknown
  Description of Unknown: Integrase B8442 sequence
  PTHR30461:SF3,IPR036162,PS51737,IPR011109, PTHR30461,PS00397,PF00239,G3DSA:1.10.10.2600, IPR006119,SSF53041,cd00338,SM00857,IPR025827,IPR038109 ,PS51736,IPR006118,PF13408,G3DSA:3.40.50.1390,Coil
MECVAYLRVSTEKQAEEGNGLDSQRRDIENYCRKNELIIKNWYEDDGFTGSNMNRPGLQRLINDCTRKRIKCVVAFKLDRLSRSMVDGIYLIERIFIPNGVEFKCVHDSVSYDSPMEQAYTQMMAVFAQLDKNTMLLRMRGGMLERVKQGFWMGGGNLPYCYDYDRERGILIPIPERAEQARQALDLYLSGYSDAKIRDILGYTSEMVVRSILTSPVNIGMIPYKGSIYQGKHEPIFETERFKAAQEMRKSRRQHKLQSINHPAHLLTGLCYCGVCGCKMRYQKWTHGKHKIYCCSRNTGCSHLPNYNPNCDNSLEWADDIENQVEEQILKISLNLSSYKPKERETRLEILQKQYDKEKTKLKRLYSLYADGNDAVLEMIQESESKLSEIKEQIDRETENTEYTQKKEYVYEKIKKLADVWDHIDKPDKNKILKSIISKIVIVNGNVEIQLKRF

SEQ ID NO: 8442 - protein, 454 aa, Unknown
  Description of Unknown: Integrase B8443 sequence
  PTHR30461:SF3,IPR036162,PS51737,IPR011109,PTHR30461, PS00397,PF00239,G3DSA:1.10.10.2600,IPR006119,SSF53041, cd00338,SM00857,IPR025827,IPR038109,PS51736, IPR006118,PF13408,G3DSA:3.40.50.1390,Coil
MECVAYLRVSTEKQAEEGNGLDSQKRDIENYCRKNQLIISDWYEDDGFTGSNMNRPALQRLINDCSKKKLKCVVAFKLDRLSRSMVDGIYLIERVFIPNGVDFRCVHDSVSYDSPMEQAYTQMMAVFAQLDKNTMLLRMRGGMLERVKQGYWMGGGNTPYCYRYSKEDGILVPIPERKEMALRAMNLYISGYSDVRIQKLIGFKSEFVTRQVLTSPVNIGMIPYKGKLYKGRHEPIFDIKVFELAQELRKTRKQSKSFCVNHENQLLTGLCYCGVCGCKMRYQKWTHGKHKIYCYSRDNGMSYLPNYNPNCSNSLEWAEDIEKQVEDEILKISLNLSSHKPKERESCLDILSKQLQKEKTKLKRLYVLYAEGNDTVLEMIKETESGIDELKLKIQNEMKSPDNSQKKEFVYDNIKKLADVWEHIDKQNKNRILKTIISKIIIVNGNIEIQLKKF

SEQ ID NO: 8443 - protein, 454 aa, Unknown
  Description of Unknown: Integrase B8444 sequence
  PTHR30461:SF3,IPR036162,PS51737,IPR011109,PTHR30461, PS00397,PF00239,G3DSA:1.10.10.2600,IPR006119,SSF53041, cd00338,SM00857,IPR025827,IPR038109,PS51736, IPR006118,PF13408,G3DSA:3.40.50.1390,Coil
MECVAYLRVSTEKQAEEGNGLDSQKRDIENYCRKNQLIISDWYEDDGFTGSSMNRPALQRLINDCSKKKLKCVVAFKLDRLSRSMVDGIYLIERVFIPNGVDFRCVHDSVSYDSPMEQAYTQMMAVFAQLDKNTMLLRMRGGMLERVKQGYWMGGGNTPYCYRYSKEDGILVPIPERKEMALRAMNLYISGYSDVRIQKLIGFKSEFVTRQVLTSPVNIGMIPYKGKLYKGRHEPIFDIKVFELAQELRKTRKQSKSFCVNHENQLLTGLCYCGVCGCKMRYQKWTHGKHKIYCYSRDNGMSYLPNYNPNCNNSLEWAEDIEKQVEDKILKISLNLSSHKPKERESCLDILSKQLQKEKTKLKRLYTLYAEGNDTVLEMIKETESGIDELKLKIQNEMKNPDNSQKKEFVYDNIKKLADVWEHIDKQNKNRILKTIISKIIIVNGNIEIQLKKF

SEQ ID NO: 8444 - protein, 454 aa, Unknown
  Description of Unknown: Integrase B8445 sequence
  PTHR30461:SF3,cd00338,SM00857,G3DSA:1.10.10.2600,IPR036162, PF13408,IPR025827,PS51737,G3DSA:3.40.50.1390,IPR006119, IPR038109,IPR011109,SSF53041,PTHR30461,PS51736, Coil,PF00239
MECVAYMRVSTEKQAEEGNGLESQKRDIENYCKKNEYIITDYYIDDGYTGANMDRPELQRLISDCVAKRIKCVVAFKLDRLSRSMVDGIYLIERVFQPNSILFKCVHDSISYDSPMEQAYTQMMAVFAQLDKNTMLLRMRGGMLERVKQGYWMGGANTPYCYFYSKETGTLVPIPERKKQANEAIDLFLQGYSDAKICNMLGFKSEFVVRRLLTSKVNIGYIPYKGKIYKGRHEPIFDLDKFNLAQEVRKNRRTKKTTCINKEPNLLTGLCYCGVCGCAMRYQKWTHGKHKIYCMSRNKSMSYLPNYNSNCNNSLEWAVDIEKQVEEEIMKISLNLSSEKPVAKQSKIEILQSQIKKEENRRKRFFDLYADGNDDVLLSIKETNNTIKDLKEQLENEISNVNINKKKSIAYKNIKKIADVWDSIDKRDKNTILKSIIDKIVIVNGNIEIQLKNF

SEQ ID NO: 8445 - protein, 454 aa, Unknown
  Description of Unknown: Integrase B8446 sequence
  PTHR30461:SF3,SM00857,G3DSA:1.10.10.2600,IPR036162,PF13408, IPR025827,G3DSA:3.40.50.1390,PS51737,IPR006119,IPR038109, SSF53041,IPR011109,PF00239,PTHR30461,PS51736, Coil,cd00338
MNCVAYMRVSTEKQAEEGNGLDSQKRDIEIYCRKNELIISDWYIDDGYTGANTDRPALQRLITDCSKHRIKCIVAFKLDRLSRSMVDGIYLIERVFMPNQVEFKCVHDSVNYDSPMEQAYTQMMAVFAQLDKNTMLLRMRGGMLERVKKGYWMGGGNTPYCYRYDTESGILIPIPERAEQARQALEMFISGYSDEQIMKMFGYKSEFVVRRILTGVVNIGMIPYKGEVFQGLHDPIFDKNRFELAQEIRKSRRLTRTKCFDRETNLLTGLCYCGVCGCKMRYQKWTHGKHRIYCCSRNKDLNYIPNWSENCDNSLVWAIDIEKQVEKEILKISVNLSKSKPKEKKSKLEIMESQLDKEKVKLKRLYSLYADGNDTVLDMIKDLELKIDGMKLKIAEEAKSPLNTQKKEFVYENIKNLADMWGHIDKAKKNSVLKSIISKIVIVNNDIEIQLKNF

SEQ ID NO: 8446 - protein, 454 aa, Unknown
  Description of Unknown: Integrase B8447 sequence
  PTHR30461:SF3,IPR036162,PS51737,IPR011109,PTHR30461, PS00397,PF00239,G3DSA:1.10.10.2600,IPR006119,SSF53041, cd00338,SM00857,IPR025827,IPR038109,PS51736, IPR006118,PF13408,G3DSA:3.40.50.1390,Coil
MECVAYLRVSTEKQAEEGNGLDSQKRDIENYCRKNQLIISDWYEDDGFTGSNMNRPALQRLINDCSKKKLKCVVAFKLDRLSRSMVDGIYLIERVFIPNGVDFRCVHDSVSYDSPMEQAYTQMMAVFAQLDKNTMLLRMRGGMLERVKQGYWMGGGNTPYCYRYSKEDGILVPIPERKEMALRAMNLYISGYSDVRIQKLIGFKSEFVTRQVLTSPVNIGMIPYKGKLYRGRHEPIFDIKVFELAQELRKTRKQSKSFCVNHENQLLTGLCYCGVCGCKMRYQKWTHGKHKIYCYSRDNGMSYLPNYNPNCSNSLEWAEDIEKQVEDEILKISLNLSSHKPKERESCLDILSKQLQKEKTKLKRLYTLYAEGNDTVLEMIKETESGIDELKLKIQNEMKNPDNSQKKEFVYDNIKKLADVWEHIDKQNKNRILKTIISKIIIVNGNIEIQLKNF

SEQ ID NO: 8447 - protein, 454 aa, Unknown
  Description of Unknown: Integrase B8448 sequence
  PTHR30461:SF3,IPR036162,PS51737,IPR011109,PTHR30461, PS00397,PF00239,G3DSA:1.10.10.2600,IPR006119,SSF53041, cd00338,SM00857,IPR025827,IPR038109,PS51736, IPR006118,PF13408,G3DSA:3.40.50.1390,Coil
MECVAYLRVSTEKQAEEGNGLDSQKRDIENYCRKNQLIISDWYEDDGFTGSNMNRPALQRLINDCSKKKLKCVVAFKLDRLSRSMVDGIYLIERVFIPNGVDFRCVHDSVSYDSPMEQAYTQMMAVFAQLDKNTMLLRMRGGMLERVKQGYWMGGGNTPYCYRYSKEDGILVPIPERKEMALRAMNLYISGYSDVRIQKLIGFKSEFVTRQVLTSPVNIGMIPYKGKLYKGRHEPIFDIKVFELAQELRKTRKQSKSFCVNHENQLLTGLCYCGVCGCKMRYQKWTHGKHKIYCYSRDNGMSYLPNYNPNCCNSLEWAEDIEKQVEDEILKISLNLSSHKPKERESCLDILSKQLQKEKTKLKRLYTLYAEGNDTVLEMIKETESGIDELKLKIQNEMKNPDNSQKKEFVYDNIKKLADVWEHIDKQNKNRILKTIISKIIIVNGNIEIQLKKF

SEQ ID NO: 8448 - protein, 454 aa, Unknown
  Description of Unknown: Integrase B8449 sequence
  PTHR30461:SF3,IPR036162,PS51737,IPR011109,PTHR30461, PS00397,PF00239,G3DSA:1.10.10.2600,IPR006119,SSF53041, cd00338,SM00857,IPR025827,IPR038109,PS51736, IPR006118,PF13408,G3DSA:3.40.50.1390,Coil
MECVAYLRVSTEKQAEEGNGLDSQKRDIENYCRKNQLIISDWYEDDGFTGSNMNRPALQRLINDCSKKKLKCVVAFKLDRLSRSMVDGIYLIERVFIPNGVDFRCVHDSVSYDSPMEQAYTQMMAVFAQLDKNTMLLRMRGGMLERVKHGYWMGGGNTPYCYRYSKEDGILVPIPERKEMALRAMNLYISGYSDVRIQKLIGFKSEFVTRQVLTSPVNIGMIPYKGKLYKGRHEPIFDIKVFELAQELRKTRKQSKSFCVNHENQLLTGLCYCGVCGCKMRYQKWTHGKHKIYCYSRDNGMSYLPNYNPNCSNSLEWAEDIEKQVEDEILKISLNLSSHKPKERESCLDILSKQLQKEKTKLKRLYTLYAEGNDTVLEMIKETESGIDELKLKIQNEMKSPDNSQKKEFVYDNIKKLADVWEHIDKQNKNRILKTIISKIIIVNGNIEIQLKKF

SEQ ID NO: 8449 - protein, 454 aa, Unknown
  Description of Unknown: Integrase B8450 sequence
  PTHR30461:SF3,IPR036162,PS51737,IPR011109,PTHR30461, PS00397,PF00239,G3DSA:1.10.10.2600,IPR006119,SSF53041, cd00338,SM00857,IPR025827,IPR038109,PS51736, IPR006118,PF13408,G3DSA:3.40.50.1390,Coil
MECVAYLRVSTEKQAEEGNGLDSQKRDIENYCRKNQLIISDWYEDDGFTGSNMNRPALQRLINDCSKKKLKCVVAFKLDRLSRSMVDGIYLIERVFIPNGVDFRCVHDSVSYDSPMEQAYTQMMAVFAQLDKNTMLLRMRGGMLERVKQGYWMGGGNTPYCYRYSKEDGILVPIPERKEMALRAMNLYISGYSDVRIQKLIGFKSEFVTRQVLTSPVNIGMIPYKGKLYKGRHEPIFDIKVFELAQELRKTRKQSKSFCVNHENQLLTGLCYCGVCGCKMRYQKWTHGKHKIYCYSRDNGMSYLPNYNPNCSNSLEWAEDIEKQVEDEILKISLNLSSHKPKERESCLDILSKQFQKEKTKLKRLYTLYAEGNDTVLEMIKETESGIDELKLKIQNEMKNPDNSQKKEFVYDNIKKLADVWEHIDKQNKNRILKTIISKIIIVNGNIEIQLKKF

SEQ ID NO: 8450 - protein, 454 aa, Unknown
  Description of Unknown: Integrase B8451 sequence
  PTHR30461:SF3,IPR036162,PS51737,IPR011109,PTHR30461, PS00397,PF00239,G3DSA:1.10.10.2600,IPR006119,SSF53041, cd00338,SM00857,IPR025827,IPR038109,PS51736, IPR006118,PF13408,G3DSA:3.40.50.1390,Coil
MECVAYLRVSTEKQAEEGNGLDSQKRDIENYCRKNQLIISDWYEDDGFTGSNMNRPALQRLINDCSKKKLKCVVAFKLDRLSRSMVDGIYLIERVFIPNGVDFRCVHDSVSYDSPMEQAYTQMMAVFAQLDKNTMLLRMRGGMLERVKQGYWMGGGNTPYCYRYSKEDGILVPIPERKEMALRAMNLYISGYSDVRIQKLIGFKSEFVTRQVLTSPVNIGMIPYKGKLYRGRHEPIFDIKVFELAQELRKTRKQSKSFCVNHENQLLTGLCYCGVCGCKMRYQKWTHGKHKIYCYSRDNGMSYLPNYNPNCSNSLEWAEDIEKQVEDEILKISLNLSSHKPKERESCLDILSKQLQKEKTKLKRLYTLYAEGNDTVLEMIKETESGIDELKLKIQNEMKNPDNSQKKEFVYDNIKKLADVWEHIDKQNKNRILKTIISKIIIVNGNIEIQLKKF

SEQ ID NO: 8451 - protein, 454 aa, Unknown
  Description of Unknown: Integrase B8452 sequence
  PTHR30461:SF3,cd00338,SM00857,G3DSA:1.10.10.2600,IPR036162, PF13408,PS51737,IPR025827,G3DSA:3.40.50.1390,IPR006119, IPR038109,IPR011109,SSF53041,PTHR30461,PS51736, Coil,PF00239
MNCVAYMRVSTEKQAEEGNGLDSQKRDIEIYCRKNELIISDWYIDDGYTGANTDRPALQRLITDCSKHRIKCIVAFKLDRLSRSMVDGIYLIERVFMPNQVEFKCVHDSVSYDSPMEQAYTQMMAVFAQLDKNTMLLRMRGGMLERVKKGYWMGGGNTPYCYRYDTESGTLIPIPERAEQARQALEMFISGYSDEQIMKMFGYKSEFVVRRILTGVVNIGMIPYKGDVFQGLHDPIFDKNRFELAQEIRKSRRLTRTKCFDRETNLLTGLCYCGVCGCKMRYQKWTHGKHRIYCCSRNKDLNYIPNWSENCDNSLVWAIDIEKQVEKEILKISVNLSKSKPKEKKSKLEIMESQLDKEKVKLKRLYSLYADGNDTVLDMIKDLELKIDGMKMKIAEEAKSPLNTQKKEFVYENIKNLADMWGHIDKAKKNSVLKSIISKIVIVNNDIEIQLKNF

SEQ ID NO: 8452 - protein, 454 aa, Unknown
  Description of Unknown: Integrase B8453 sequence
  PTHR30461:SF3,SM00857,IPR006118,IPR036162,PF13408, IPR025827,G3DSA:3.40.50.1390,PS00397,IPR006119,SSF53041, PTHR30461,Coil,PS51736,cd00338,PF00239
MRDENLEGKRAALYIRVSTEEQALRGYSLEAQLADLEAFAKENFMVITDHYIDAGTTARKKLKNRKEFQRMLSDVRADRIDIILFIKLDRWFRNVADYYEVQKILDAHNVTWKCTQEFYDTTTANGRLNLNIKLSIAQDESDRTSERIKFVFENKVKNNEVISGSLHYGFCIKKENGKKVVGIDEQKMKIVGEAFDFFLSCNSMRRTCFYIYEKYGINWLPETFKRMIYDDMYAGIYKENEHYCPAAFSLDYLKKIRDRIPLQNFSRKNTYCYLFSGLVRCAMCGHAMTGNRHTRKKSVYAYYRCRQGHRLRGCTCTRGIREELIEQYLLDNLREEIKTQITEYAISKKNVQNPDGEKRKLKDKLKKLKDLYLNDLIDLSEYRKDYESYQAELKKLDSVKRPEMNTRRLQRLLNEDFVSAYEALDREHKRAFWRSIIKEIYINDKREIVRIVFL

SEQ ID NO: 8453 - protein, 454 aa, Unknown
  Description of Unknown: Integrase B8454 sequence
  PTHR30461:SF3,IPR036162,PS51737,IPR011109,PTHR30461, PS00397,PF00239,G3DSA:1.10.10.2600,IPR006119,SSF53041, cd00338,SM00857,IPR025827,IPR038109, PS51736,IPR006118,PF13408,G3DSA:3.40.50.1390,Coil
MECVAYLRVSTEKQAEEGNGLDSQKRDIENYCRKNQLIISDWYEDDGFTGSNMNRPALQRLINDCSKKKLKCVVAFKLDRLSRSMVDGIYLIERVFIPNGVDFRCVHDSVSYDSPMEQAYTQMMAVFAQLDKNTMLLRMRGGMLERVKQGYWMGGGNTPYCYRYSKEDGILVPIPERKEMALRAMNLYISGYSDVRIQKLIGFKSEFVTRQVLTSPVNIGMIPYKGKLYKGRHEPIFDIKVFELAQELRKTRKQSKSFCVNHENQLLTGLCYCGVCGCKMRYQKWTHGKHKIYCYSRDNGMSYLPNYNPNCSNSLEWAEDIEKQVEDEILKISLNLSSHKPKERESCLDILSKQLQKEKTKLKRLYALYAEGNDTVLEMIKETESGIDELKLKIQNEMKSPDNSQKKEFVYDNIKKLADVWEHIDKQNKNRILKTIISKIIIVNGNIEIQLKKF

SEQ ID NO: 8454 - protein, 454 aa, Unknown
  Description of Unknown: Integrase B8455 sequence
  PTHR30461:SF3,IPR036162,PS51737,IPR011109,PTHR30461, PS00397,PF00239,G3DSA:1.10.10.2600,IPR006119,SSF53041, cd00338,SM00857,IPR025827,IPR038109,PS51736, IPR006118,PF13408,G3DSA:3.40.50.1390,Coil
MECVAYLRVSTEKQAEEGYGLDLQRISITDYCRKNELIISDWYIDDGYTGSNMDRPQLQRLIRDCSKKRIKCLVAFKLDRISRSMVDGIYLIERVFQPNGVDFRCVHDSVSYDSPMEQAYTQMMAVFAQLDKNTMMMRMCGGRLERVKKGYWYGGGNRPYCYDYSREKGILVPIPERAEQANRALDLFLQGYSDERIMKICGYSSELLVRHILTGVVNIGMIPYKGEVYKGLHEPIFDERKFELAQEYRKTRRKTKTACFSMETNLLTGLCYCGICGCKMRYQKWTNGNHKIYCYSRDKGLDKLPNYNPECDNTLEWAKDIEKQVEEEILNISLNISSYQKTQKESELEITKKALEKNKAKLKRLYNFYAEGNDTIVDSIRETENEINKQKEVIFELQKSEVNKQSKEIVYDKIKSLADVWPHIDKTSKNVILKTIISKIVIVKGNVEIQLKEF

SEQ ID NO: 8455 - protein, 454 aa, Unknown
  Description of Unknown: Integrase B8456 sequence
  PTHR30461:SF3,IPR036162,PS51737,IPR011109,PTHR30461, PS00397,PF00239,G3DSA:1.10.10.2600,IPR006119,SSF53041, cd00338,SM00857,IPR025827,IPR038109,PS51736, IPR006118,PF13408,G3DSA:3.40.50.1390,Coil
MECVAYLRVSTEKQAEEGNGLDSQRRDIENYCRKNELIIKNWYEDDGFTGSNMNRPGLQRLINDCTKKRVKCVVAFKLDRLSRSMVDGIYLIERIFIPNGVEFKCVHDSVSYDSPMEQAYTQMMAVFAQLDKNTMLLRMRGGMLERVKQGFWMGGGNLPYCYNYDREQGILVPIPERAEQARQALDLYLSGYSDDKIRDILGYTSERVVRSILTSPVNIGMIPYKGNVYQGKHELIFEKEKFEAAQEMRKSRRQHKLQNINQPAHLLTGLCYCGVCGCKMRYQKWTHGKHKIYCCSRNAGCSHLPNYNPNCDNSLEWADDIENQVEEQILKISLNLSSYKPKEKETRLEILQKQYDKEKTKLKRLYSLYADGNDTVLEMIQESESKLSEIKEQIDRETENTEYTQKKEYVYEKIKRLADVWDHIDKPDKNKILKSIISKIVIVNGNVEIQLKRF

SEQ ID NO: 8456 - protein, 454 aa, Unknown
  Description of Unknown: Integrase B8457 sequence
  PTHR30461:SF3,SM00857,G3DSA:1.10.10.2600,IPR036162,PF13408, IPR025827,G3DSA:3.40.50.1390,IPR006119,IPR038109,SSF53041, PF00239,PTHR30461,PS51736,Coil,cd00338
MECVAYMRVSTEKQAVEGNGLDSQKRDIENYCRKNELVITDWYIDDGYTGTNMDRPELQRLVNDCGRKRIGCVVAFKLDRLSRNMIDGIYLIEKVFQKYNVVFKCVHDSVSYDSPMEQAYTQMIAVFAQLDKNTMMLRMRGGMLERVKQGYWMGGGNLPYCYSYSKEQGILMPIPERKEQANKALDLFISGYSDEKIYKTLGYTSEMVVRSILTGIVNVGMIPYKGNVYQGKHEPIFDKARFELAQELRKSRRKTKATCLTKKPNLLTGLCYCGVCGCAMRYQKWGSDKHKIYCMSRNKSMSYLPNHNPDCNNSLEWADDIEKQVEEEMLKISLDLSSYKPKEKATKLEIMQSQLEKEQIKLKRLYSLYADGNDTVLEMIKELEKQIKDMKDNITAESKNAVNVQKKEFVYENIKKLADIWDNIDKKQKNMILKTIIDKIVIVNGNIEIQLKNF

SEQ ID NO: 8457 - protein, 454 aa, Unknown
  Description of Unknown: Integrase B8458 sequence
  PTHR30461:SF3,cd00338,SM00857,G3DSA:1.10.10.2600,IPR036162, PF13408,IPR025827,G3DSA:3.40.50.1390,PS51737,IPR006119, IPR038109,SSF53041,IPR011109,PTHR30461, PS51736,Coil,PF00239
MECVAYMRVSTEKQAEEGNGLESQKRDIELYCRKNELIILDWYIDDGYTGANMNRPELQRLINDCSRKRVKCVVAFKLDRLSRSMVDGIYMIERVFQPNNIIFKCVHDSVSYDSPMEQAYTQMMAVFAQLDKNTMLLRMRGGMLERVKQGYWMGGGNTPYCYSYSKEKGILIPIPERADQANRAMDLFIAGNSDLAIQRILGYSTERVVRSILTGVVNIGKIPYKGNVYQGMHEPIFDEERFELAQQIRKTRRKTKSYCQNLTPNMLTGLCYCGVCGCKMRYQKWTNGVKKIYCCSRSKDLYYLPNYNHDCNNSIEWADNIESIVESEMLKISVNLSKYKPREKENKIDIMLSQLEKEKLKLKRLYELYADGNDTVLEMIKSQETKIIELKKSIKEEKKSDVSTPKKQFVYENIKKLADGGEDIDKPSKNKILKTIIDKIIIVNGNVEIQLKNF

SEQ ID NO: 8458 - protein, 454 aa, Unknown
  Description of Unknown: Integrase B8459 sequence
  PTHR30461:SF3,IPR036162,PS51737,IPR011109,PTHR30461, PS00397,PF00239,G3DSA:1.10.10.2600,IPR006119,SSF53041, cd00338,SM00857,IPR025827,IPR038109,PS51736, IPR006118,PF13408,G3DSA:3.40.50.1390,Coil
MECVAYLRVSTEKQAEEGNGLDSQKRDIENYCRKNQLIISDWYEDDGFTGSNMNRPALQRLINDCSKKKLKCVVAFKLDRLSRSMVDGIYLIERVFIPNGVDFRCVHDSVSYDSPMEQAYTQMMAVFAQLDKNTMLLRMRGGMLERVKQGYWMGGGNTPYCYRYSKEDGILVPIPERKEMALRAMNLYISGYSDVRIQKLIGFKSEFVTRQVLTSPVNIGMIPYKGKLYRGRHEPIFDIKVFELAQELRKTRKQSKSFCVNHENQLLTGLCYCGVCGCKMRYQKWTHGKHKIYCYSRDNGMSYLPNYNPNCSNSLEWAEDIEKQVEDEILKISLNLSSHKPKERESCLDILSKQLQKEKTKLKRLYTLYAEGNDTVLEMIKETESGIDELKLKIQNEMKNPDNSQKKEFVYDNIKKLADVWEHIDKQSKNRILKTIISKIIIVNGNIEIQLKKF

SEQ ID NO: 8459 - protein, 454 aa, Unknown
  Description of Unknown: Integrase B8460 sequence
  PTHR30461:SF3,SM00857,G3DSA:1.10.10.2600,IPR036162,PF13408, IPR025827,PS51737,G3DSA:3.40.50.1390,IPR006119,IPR038109, SSF53041,IPR011109,PF00239,PTHR30461,PS51736, Coil,cd00338
MECVAYMRVSTEKQAEEGNGLESQKRDIELYCRKNELIISDWYIDDGYTGANMNRPELQRLINDCGRKRVKCVVAFKLDRLSRSMVDGIYMIERVFQPNNVQFKCVHDSISYDSPMEQAYTQMMAVFAQLDKNTMMLRMRGGMLERVKQGYWMGGGNKPYCYTYSKEKGILIPIPERAEQANKAMDLFIAGNSDAAIQRILGYTSELVVRSILTGVVNIGMIPYKGNIYQGLHEPIFDKEKFEMAQQIRKSRRSKKSYCQNLTPNMLTGLCYCGVCGCKMRYQKWTNGVRKIYCCSRNKDLYYLPNFNNDCNNSIEWADNIENIVESEMLKISVNLSKYKPKEKENKIDIMQSQLDKEKSKLKRLYELYADGNDTVLDMIKDQESKIKNLDDSIKEEQKSGDNNPKKQFVYENIKKLADVWDDIDKPAKNKILKTIIDKIIIVNGNVEIQLKNF

SEQ ID NO: 8460 - protein, 454 aa, Unknown
  Description of Unknown: Integrase B8461 sequence
  PTHR30461:SF3,cd00338,SM00857,G3DSA:1.10.10.2600,IPR036162, PF13408,IPR025827,G3DSA:3.40.50.1390,IPR006119,IPR038109, SSF53041,PTHR30461,PS51736,Coil,PF00239
MECVAYMRVSTEKQAVEGNGLDSQKRDIENYCRKNELVITDWYIDDGYTGTNMDRPELQRLVNDCGRKRIGCVVAFKLDRLSRNMIDGIYLIEKVFQKYNVVFKCVHDSVSYDSPMEQAYTQMMAVFAQLDKNTMMLRMRGGMLERVKQGYWMGGGNLPYCYSYSKEQGILMPIPERKEQANKALDLFISGYSDEKIYKTLGYTSEMVVRSILTGIVNVGMIPYKGNVYQGKHEPIFDKARFELAQELRKSRRKTKATCLTKEPNLLTGLCYCGVCGCAMRYQKWGSDKHKIYCMSRNKSMSYLPNHNPDCNNSLEWADDIEKQVEEEMLKISLDLSSYKPKEKATKLEIMQSQLEKEQIKLKRLYSLYADGNDTVLEMIKELEKQIKDMKDNITAESKNAVNVQKKEFVYENIKKLADIWDNIDKKQKNMILKTIIDKIVIVNGNIEIQLKNF

SEQ ID NO: 8461 - protein, 454 aa, Unknown
  Description of Unknown: Integrase B8462 sequence
  PTHR30461:SF3,IPR036162,PS51737,IPR011109,PTHR30461, PS00397,PF00239,G3DSA:1.10.10.2600,IPR006119,SSF53041, cd00338,SM00857,IPR025827,IPR038109, PS51736,IPR006118,PF13408,G3DSA:3.40.50.1390,Coil
MECVAYLRVSTEKQAEEGNGLDSQKRDIENYCRKNQLIISDWYEDDGFTGSNMNRPALQRLINDCSKKKLKCVVAFKLDRLSRSMVDGIYLIERVFIPNGVDFRCVHDSVSYDSPMEQAYTQMMAVFAQLDKNTMLLRMRGGMLERVKQGYWMGGGNTPYCYRYSKEDGILVPIPERKEMALRAMNLYISGYSDVRIQKLIGFKSEFVTRQVLTSPVNIGMIPYKGKLYKGRHEPIFDIKVFELAQELRKTRKQSKSFCVNHENQLLTGLCYCGVCGCKMRYQKWTHGKHKIYCYSRDNGMSYLPNYNPNCNNSLEWAEDIEKQVEDEILKISLNLSSHKPKERESCLDILSKQLQKEKTKLKRLYTLYAEGNDTVLEMIKETESGIDELKLKIQNEMKNPDNSQKKEFVYDNIKKLADVWEHIDKQSKNRILKTIISKIIIVNGNIEIQLKKF

SEQ ID NO: 8462 - protein, 454 aa, Unknown
  Description of Unknown: Integrase B8463 sequence
  PTHR30461:SF3,IPR036162,PS51737,IPR011109,PTHR30461, PS00397,PF00239,G3DSA:1.10.10.2600,IPR006119,SSF53041, cd00338,SM00857,IPR025827,IPR038109,PS51736, IPR006118,PF13408,G3DSA:3.40.50.1390,Coil
MECVAYLRVSTEKQAEEGNGLDSQKRDIENYCRKNQLIISEWYEDDGFTGSNMNRPALQRLINDCSKKKLKCVVAFKLDRLSRSMVDGIYLIERVFIPNGVDFRCVHDSVSYDSPMEQAYTQMMAVFAQLDKNTMLLRMRGGMLERVKQGYWMGGGNTPYCYRYSKEDGILVPIPERKEMALRAMNLYISGYSDVRIQKLIGFKSEFVTRQVLTSPVNIGMIPYKGKLYKGRHEPIFDIKVFELAQELRKTRKQSKSFCVNHENQLLTGLCYCGVCGCKMRYQKWTHGKHKIYCYSRDNGMSYLPNYNPNCSNSLEWAEDIEKQVEDEILKISLNLSSHKPKERESCLDILSKQLQKEKTKLKRLYVLYAEGNDTVLEMIKETESGIDELKLKIQNEMKSPDNSQKKEFVYDNIKKLADVWEHIDKQNKNRILKTIISKIIIVNGNIEIQLKKF

SEQ ID NO: 8463 - protein, 454 aa, Unknown
  Description of Unknown: Integrase B8464 sequence
  PTHR30461:SF3,IPR036162,PS51737,IPR011109,PTHR30461, PS00397,PF00239,G3DSA:1.10.10.2600,IPR006119,SSF53041, cd00338,SM00857,IPR025827,IPR038109,PS51736, IPR006118,PF13408,G3DSA:3.40.50.1390,Coil
MECVAYLRVSTEKQAEEGNGLDSQKRDIENYCRKNQLIISDWYEDDGFTGSNMNRPALQRLINDCSKKKLKCVVAFKLDRLSRSMVDGIYLIERVFIPNGVDFRCVHDSVSYDSPMEQAYTQMMAVFAQLDKNTMLLRMRGGMLERVKQGYWMGGGNTPYCYRYSKEDGILVPIPERKEMALRAMNLYISGYSDVRIQKLIGFKSEFVTRQVLTSPVNIGMIPYKGKLYKGRHEPIFDIKVFELAQELRKTRKQGKSFCVNHENQLLTGLCYCGVCGCKMRYQKWTHGKHKIYCYSRDNGMSYLPNYNPNCNNSLEWAEDIEKQVEDEILKISLNLSSHKPKERESCLDILSKQLQKEKTKLKRLYTLYAEGNDTVLEMIKETESGIDELKLKIQNEMKNPDNSQKKEFVYDNIKKLADVWEHIDKQNKNRILKTIISKIIIVNGNIEIQLKKF

SEQ ID NO: 8464 - protein, 454 aa, Unknown
  Description of Unknown: Integrase B8465 sequence
  PTHR30461:SF3,SM00857,IPR006118,IPR036162,PF13408, IPR025827,G3DSA:3.40.50.1390,IPR006119,SSF53041,PTHR30461, PS00397,PS51736,cd00338,PF00239
MKDENLEGKIAALYIRVSTEEQALRGYSLEAQLADLEAFAKEHFMIVVDRYIDAGTTARKKLKNRKEFQRMLSDVRADRIDIILFIKLDRWFRNVADYYEVQKILDAHNVTWKCTQEFYDTTTANGRLNLNIKLSIAQDESDRTSERIKFVFENKVKNNEVISGSLHYGFCIKKENGKKVVGIDEQKMKIVGEAFDFFLSCNSMRRTCFYIYEKYGVNWLPETFKRMIYDDMYAGIYRENEHYCPAAFSLDYLKKIRDRIPLQNFSRKNTYCYLFSGLIRCAMCGHAMTGNRHTRKKSVYAYYRCRQGHRLRGCTCTRGIREELIEQYLLDNLRKEIKTQITEYTISKKNVQNPGGEKRKLKDKLKKLKDLYLNDLIDLCEYRKDYESYQAELKKLDSVKRPEMNTRRLQRLLNEDFVSAYETLDREHKRAFWRSIIKEIYINDKREIVRIVFL

SEQ ID NO: 8465 - protein, 454 aa, Unknown
  Description of Unknown: Integrase B8466 sequence
  PTHR30461:SF3,SM00857,G3DSA:1.10.10.2600,IPR036162, PF13408,IPR025827,PS51737,G3DSA:3.40.50.1390, IPR006119,IPR038109,SSF53041,IPR011109, PF00239,PTHR30461,PS51736,Coil,cd00338
MSVVLRAALYPRVSTSVVLRAALYPRVSTEEQKKFGLSIHDQQNDLEEYAKAHNMKVVGVFQDAGFSARKKIEKRPAMLQLLEAVKRDEVDIILVTKLDRWFRNIGEYYKVQEILEAHNVSWKTIYEDYDTSTAAGRLKINIMLSVAQDEADRASERIKKVLDAKKDRNEVCTGHLPKGYKIEGKFAVIDKEAEPVIRRYFSTFLETGSITKAMDAVPELKLKYQTASQMLDNTGYMGDWHGIKLPPYLTPQEFQRVQDLRTRVTRKSPYNRTYIFSGLIVCGECGRRMTGHPSPRPSGACSYSYYCQGSAQRKGCNNGNFTVEWKIEDYLLSTIDEQIQIKLQAKPRQEPKVNQDVQLKALQKKLSKLSELYIDDMISKSDYSKKYAELTAQMDEITQVKSQSRAPEEIATLFSAGWQEIYKQLNKENKQAFWKLKIKEIRLYKDRRIEFDFL

SEQ ID NO: 8466 - protein, 454 aa, Unknown
  Description of Unknown: Integrase B8467 sequence
  PTHR30461:SF3,IPR036162,PS51737,IPR011109,PTHR30461, PS00397,PF00239,G3DSA:1.10.10.2600,IPR006119,SSF53041, cd00338,SM00857,IPR025827,IPR038109,PS51736, IPR006118,PF13408,G3DSA:3.40.50.1390,Coil
MECVAYLRVSTEKQAEEGNGLDSQKRDIENYCRKNQLIISDWYEDDGFTGSNMNRPALQRLINDCSKKKLKCVVAFKLDRLSRSMVDGIYLIERVFIPNGVDFRCVHDSVSYDSPMEQAYTQMMAVFAQLDKNTMLLRMRGGMLERVKQGYWMGGGNTPYCYRYSKEDGILVPIPERKEMALRAMNLYISGYSDVRIQKLIGFKSEFVTRQVLTSPVNIGMIPYKGKLYKGRHEPIFDIKVFELAQELRKTRKQSKSFCVNHENQLLTGLCYCGVCGCKMRYQKWTHGKHKIYCYSRDNGMSYLPNYNPNCSNSLEWAEDIEKQVEDEILKISLNLSSHKPKERESCLDILSKQLQKEKTKLKRLYTLYAEGNDTVLEMIKETESGIDELKLKIQNEMKSPDNSQKKEFVYDNIKKLADVWELIDKQNKNRILKTIISKIIIVNGNIEIQLKKF

SEQ ID NO: 8467 - protein, 454 aa, Unknown
  Description of Unknown: Integrase B8468 sequence
  PTHR30461:SF3,cd00338,SM00857,G3DSA:1.10.10.2600,IPR036162, PF13408,PS51737,G3DSA:3.40.50.1390,IPR025827,IPR006119, IPR038109,IPR011109,SSF53041,PTHR30461,PS51736, Coil,PF00239
MNCVAYMRVSTEKQAEEGNGLDSQKRDIEIYCRKNELIISDWYIDDGYTGANTNRPALQRLITDCSKHRIKCIVAFKLDRLSRSMVDGIYLIERVFMPNQVEFKCVHDSVSYDSPMEQAYTQMMAVFAQLDKNTMLLRMRGGMLERVKKGYWMGGGNTPYCYRYDTESGILIPIPERAEQARQALEMFISGYSDEQIMKIFGYKSEFVVRRILTGVVNIGMIPYKGEVFQGLHDPIFDKNRFELAQEIRKSRRLTRTKCFDRETNLLTGLCYCGVCGCKMRYQKWTHGKHRIYCCSRNKDLNYIPNWSENCDNSLVWAIDIENQVEKEILKISVNLSKSKPKEKKSKLEIMESQLDKEKVKLKRLYSLYADGNDTVLDMIKDLELKIDGMKLKIAEEAKSPLNTQKKEFVYENIKNLADMWGHIDKAKKNSVLKSIISKIVIVNNDIEIQLKNF

SEQ ID NO: 8468 - protein, 454 aa, Unknown
  Description of Unknown: Integrase B8469 sequence
  PTHR30461:SF3,IPR036162,PS51737,IPR011109,PTHR30461, PS00397,PF00239,G3DSA:1.10.10.2600,IPR006119,SSF53041, cd00338,SM00857,IPR025827,IPR038109,PS51736, IPR006118,PF13408,G3DSA:3.40.50.1390,Coil
MECVAYLRVSTEKQAEEGNGLDSQRRDIENYCRKNELIIKNWYEDDGFTGSNMNRPGLQRLINDCTRKRIKCVVAFKLDRLSRSMVDGIYLIERIFIPNGVEFKCVHDSVSYDSPMEQAYTQMMAVFAQLDKNTMLLRMRGGMLERVKQGFWMGGGNLPYCYDYDREQGILVPIPERAEQARQALNLYLSGYSDAKIRDILGYTSERVVRNILTSPVNIGMIPYKGSVYRGKHEPIFEMERFEVAQEMRKSRRQHKLQNINQPAHLLTGLCYCGVCGCKMRYQKWTHGKYKIYCCSRNAGCSHLPNYNPNCDNSLEWADDIEKQVEEQILKISLNLSSYKPKEKETRLEILQKQYDKEKIKLKRLYSLYADGNDTVLEMIQESESKLSEIKEQIDREAENTEYTQKKEYVYEKIKRLADVWDHIDKPDKNKILKSIISKIVIVNGNVEIQLKRF

SEQ ID NO: 8469 - protein, 454 aa, Unknown
  Description of Unknown: Integrase B8470 sequence
  PTHR30461:SF3,IPR036162,PS51737,IPR011109,PTHR30461, PS00397,PF00239,G3DSA:1.10.10.2600,IPR006119,SSF53041, cd00338,SM00857,IPR025827,IPR038109,PS51736, IPR006118,PF13408,G3DSA:3.40.50.1390,Coil
MAKTKRCAIYIRVSTEEQFINGLSLQAQQKALTEYATTNNYTIVDVYADEGISARKSMKHRKELLRLLDDVKHNKIDMILVTKLDRWFRNIKDYNVTEEILQAHNCNWKTIFENYDSSTANGQMVINIMLSVNQAECDRTSERIKAVFDYKRSQGKVVSGMAAPYGYKVVDGYIQKDLEVAPIIEDAYDYYFKCFSQRKVLEYIQDKYGDKAPTVYKLDKLFKNEKYAGKFQDNLNFCEPYISPSQFERIQMISQSKTYTRQHNHTFIFSSLLKCPVCKSSLSGFIKKQTLKDGTVAEYYRYRCSNKLSYHSGGPCITESIVEKYMIENVFQNLKKEYIDFNVKRKAVKKKKDNSKKITEELERLNSMYQKGRISEAFYDSEYERLQAELNKTNDIATITVIERYSELLGKFSGNWLSLYNKLDNQHKNTFWKSIIQEIYFDENNKLSGFKFLI

SEQ ID NO: 8470 - protein, 454 aa, Unknown
  Description of Unknown: Integrase B8471 sequence
  PTHR30461:SF3,IPR036162,PS51737,IPR011109,PTHR30461, PS00397,PF00239,G3DSA:1.10.10.2600,IPR006119,SSF53041, cd00338,SM00857,IPR025827,IPR038109,PS51736, IPR006118,PF13408,G3DSA:3.40.50.1390,Coil
MECVAYLRVSTEKQAEEGNGLDSQKRDIENYCRKNQLIISDWYEDDGFTGSNMNRPALQRLINDCSKKKLKCVVAFKLDRLSRSMVDGIYLIERVFIPNGVDFRCVHDSVSYDSPMEQAYTQMMAVFAQLDKNTMLLRMRGGMLERVKQGYWMGGGNTPYCYRYSKEDGILVPIPERKEMALRAMNLYISGYSDVRIHKLIGFKSEFVTRQVLTSPVNIGMIPYKGKLYKGRHEPIFDIKVFELAQELRKTRKQSKSFCVNHENQLLTGLCYCGVCGCKMRYQKWTHGKHKIYCYSRDNGMSYLPNYNPNCNNSLEWAEDIEKQVEDEILKISLNLSSHKPKERESCLDILSKQLQKEKTKLKRLYTLYAEGNDTVLEMIKETESGIDELKLKIQNEMKSPDNSQKKEFVYDNIKKLADVWEHIDKQNKNRILKTIISKIIIVNGNIEIQLKKF

SEQ ID NO: 8471 - protein, 454 aa, Unknown
  Description of Unknown: Integrase B8472 sequence
  PTHR30461:SF3,SM00857,G3DSA:1.10.10.2600,IPR036162,PF13408, IPR025827,G3DSA:3.40.50.1390,IPR006119,IPR038109,SSF53041, PF00239,PTHR30461,PS51736,Coil,cd00338
MECVAYMRVSTEKQAEEGNGLESQKRDIELYCRKNELIISDWYIDDGYTGANMNRPELQRLINDCGRKRVKCVVAFKLDRLSRSMVDGIYMIERVFQPNNVQFKCVHDSISYDSPMEQAYTQMMAVFAQLDKNTMMLRMRGGMLERVKQGYWMGGGNTPYCYTYSKEKGILIPIPERAEQANKAMDLFIAGNSDVSIQIILGYTSELVVRSILTSVVNIGMIPYKGNIYQGLHEPIFDKQKFEMAQQIRKSRRSKKSYCQNLTPNMLTGLCYCGVCGCKMRYQKWTNGVRKIYCCSRNKDLYYLPNFNKDCDNSIEWADNIENIVESEMLKISVNLSKYKPKEKENKIDIMQSQLDKEKSKLKRLYELYADGNDTVLDMIKDQESKIKNLDDSIKEEQKSGDNNPKKQFVYENIKKLADVWDGIDKPAKNKILKTIIDKIVIVNGNVEIQLKNF

SEQ ID NO: 8472 - protein, 454 aa, Unknown
  Description of Unknown: Integrase B8473 sequence
  PTHR30461:SF3,IPR036162,PS51737,IPR011109,PTHR30461, PS00397,PF00239,G3DSA:1.10.10.2600,IPR006119,SSF53041, cd00338,SM00857,IPR025827,IPR038109, PS51736,IPR006118,PF13408,G3DSA:3.40.50.1390,Coil
MECVAYLRVSTEKQAEEGNGLDSQRRDIENYCRKNELIIKNWYEDDGFTGSNMNRPGLQRLINDCTRKRIKCVVAFKLDRLSRSMVDGIYLIERIFIPNGVEFKCVHDSVSYDSPMEQAYTQMMAVFAQLDKNTMLLRMRGGMLERVKQGFWMGGGNLPYCYDYDREKGILVPIPERAEQARQALNLYLSGYSDAKIRDILGYTSERVVRNILTSPVNIGMIPYKGSVYRGKHEPIFEMERFEVAQEMRKSRRQHKLQNINQPAHLLTGLCYCGVCGCKMRYQKWTHGKHKIYCCSRNAGCSHLPNYNPNCDNSLEWADDIEKQVEEQILKISLNLSSYKPKERETRLEILQKQYDKEKTKLKRLYSLYADGNDTVLEMIQESESKLSEIKEQIDRETENTEYTQKKEYVYEKIKRLADVWDHIDKPDKNKILKSIISKIVIVNGNVEIQLKRF

SEQ ID NO: 8473 - protein, 454 aa, Unknown
  Description of Unknown: Integrase B8474 sequence
  PTHR30461:SF3,IPR036162,PS51737,IPR011109,PTHR30461, PS00397,PF00239,G3DSA:1.10.10.2600,IPR006119,SSF53041, cd00338,SM00857,IPR025827,IPR038109,PS51736, IPR006118,PF13408,G3DSA:3.40.50.1390,Coil
MECVAYLRVSTEKQAEEGNGLDSQRRDIENYCRKNELIIKNWYEDDGFTGSNMNRPGLQRLINDCTRKRVKCVVAFKLDRLSRSMVDGIYLIERIFIPNGVEFKCVHDSVSYDSPMEQAYTQMMAVFAQLDKNTMLLRMRGGMLERVKQGFWMGGGNLPYCYNYDREQGILVPIPERAEQARQALDLYLSGYSDAKIRDVLGYTSERVVRNILTSPVNIGMIPYKGSVYRGKHEPIFEMERFEVAQEMRKSRRQHKLQNINQPAHLLTGLCYCGVCGCKMRYQKWTHGKHKIYCCSRNAGCSHLPNYNPNCDNSLEWADDIEKQVEEQILKISLNLSSYKPKEKETRLEILQKQYDKEKTKLKRLYSLYADGNDTVLEMIQESESKLSETKEQLDRETENTEYTQKKKYVYEKIKRLADVWDRIDKPDKNKILKSIISKIVIVNGNVEIQLKRF

SEQ ID NO: 8474 - protein, 454 aa, Unknown
  Description of Unknown: Integrase B8475 sequence
  PTHR30461:SF3,SM00857,G3DSA:1.10.10.2600,IPR036162,PF13408, PS51737,G3DSA:3.40.50.1390,IPR025827,IPR006119,IPR038109, SSF53041,IPR011109,PF00239,PTHR30461,PS51736, Coil,cd00338
MECVAYMRVSTEKQAEEGNGLESQKRDIELYCRKNELIISDWYIDDGYTGANMNRPELQRLINDCDRKRVKCVVAFKLDRLSRSMVDGIYMIERVFQPNNVQFKCVHDSISYDSPMEQAYTQMMAVFAQLDKNTMMLRMRGGMLERVKQGYWMGGGNTPYCYTYSKEKGILIPIPERAEQANKAIDLFIAGNSDVAIQRILGYTSELVVRSILTGVVNIGMIPYKGNIYQGLHEPIFDKDKFEMAQQIRKSRRSKKSYCQNLTPNMLTGLCYCGVCGCKMRYQKWTNGVRKIYCCSRNKDLYYLPNFNNDCDNSIEWADNIENIVESEMLKISVNLSKYKPKEKENKIDIMQSQLDKEKSKLKRLYELYADGNDTVLDMIKDQESKVKNLDDSIKEEQKSGDNNPKKQFVYENIKKLADVWDDIDKPAKNKILKTIIDKIIIVNGNVEIQLKNF

SEQ ID NO: 8475 - protein, 454 aa, Unknown
  Description of Unknown: Integrase B8476 sequence
  PTHR30461:SF3,IPR036162,PS51737,IPR011109,PTHR30461, PS00397,PF00239,G3DSA:1.10.10.2600,IPR006119,SSF53041, cd00338,SM00857,IPR025827,IPR038109,PS51736, IPR006118,PF13408,G3DSA:3.40.50.1390,Coil
MECVAYLRVSTEKQAEEGNGLDSQKRDIENYCRKNQLIISDWYEDDGFTGSNMNRPALQRLINDCSKKKLKCVVAFKLDRLSRSMVDGIYLIERVFIPNGVDFRCVHDSVSYDSPMEQAYTQMMAVFAQLDKNTMLLRMRGGMLERVKQGYWMGGGNTPYCYRYSKEDGILVPIPERKEMALRAMNLYISGYSDVRIQKLIGFKSEFVTRQVLTSPVNIGMIPYKGKLYKGRHEPIFDIKVFELAQELRKTRKQSKSFCVNHENQLLTGLCYCGVCGCKMRYQKWTHGKHKIYCYSRDNGMSYLPNYNPNCSNSLEWAEDIEKQVEDEILKISLNLSSHKPKERESCLDILSKQLQKEKTKLKRLYTLYAEGNDTVLEMIKETESGIDELKIKIQNEMKNPDNSQKKEFVYDNIKKLADVWEHIDKQNKNRILKTIISKIIIVNGNIEIQLKKF

SEQ ID NO: 8476 - protein, 454 aa, Unknown
  Description of Unknown: Integrase B8477 sequence
  PTHR30461:SF3,cd00338,SM00857,G3DSA:1.10.10.2600,IPR036162, PF13408,IPR025827,G3DSA:3.40.50.1390,PS51737,IPR006119, IPR038109,SSF53041,IPR011109,PTHR30461,PS51736, Coil,PF00239
MNCVAYMRVSTEKQAEEGNGLDSQKRDIEIYCRKNELIISDWYIDDGYTGANTDRPALQRLITDCSKHRIKCIVAFKLDRLSRSMVDGIYLIERVFMPNQVEFKCVHDSVNYDSPMEQAYTQMMAVFAQLDKNTMLLRMRGGMLERVKKGYWMGGGNTPYCYRYDTESGILIPIPERAEQARQALEMFISGYSDEQIMKMFGYKSEFVVRRILTGVVNIGMIPYKGEVFKGLHDPIFDKNRFELAQEIRKSRRLTRTKCFDRETNLLTGLCYCGVCGCKMRYQKWTHGKHRIYCCSRNKDLNYIPNWSENCDNSLVWAIDIEKQVEKEILKISVNLSKSKPKEKKSKLEIMESQLDKEKVKLKRLYSLYADGNDTVLDMIKDLELKIDGMKLKIAEEAKNPLNTQKKEFVYENIKNLADMWGHIDKAKKNSVLKSIISKIVIVNNDIEIQLKNF

SEQ ID NO: 8477 - protein, 454 aa, Unknown
  Description of Unknown: Integrase B8478 sequence
  PTHR30461:SF3,IPR036162,PS51737,IPR011109,PTHR30461, PS00397,PF00239,G3DSA:1.10.10.2600,IPR006119,SSF53041, cd00338,SM00857,IPR025827,IPR038109,PS51736, IPR006118,PF13408,G3DSA:3.40.50.1390,Coil
MECVAYLRVSTEKQAEEGNGLDSQRRDIENYCRKNELIIKNWYEDDGFTGSNMNRPGLQRLINDCTRKRIKCVVAFKLDRLSRSMVDGIYLIERIFIPNGVEFKCVHDSVSYDSPMEQAYTQMMAVFAQLDKNTMLLRMRGGMLERVKQGFWMGGGNLPYCYDYDREQGILVPIPERAEQARQALNLYLSGYSDAKIRDILGYTSERVVRNILTSPVNIGMIPYKGSVYRGKHEPIFEMERFEVAQEMRKSRRQHKLQNINQPAHLLTGLCYCGVCGCKMRYQKWTHGKHKIYCCSRNAGCSHLPNYNPNCDNSLEWADDIENQVEEQILKISLNLSSYKPKEKETRLEILQKQYDKEKIKLKRLYSLYADGNDTVLEMIQESESKLSEIKEQIDRETENTEYTQKKEYVYEKIKRLADVWDHIDKPDKNKILKSIISKIVIVNGNVEIQLKRF

SEQ ID NO: 8478 - protein, 454 aa, Unknown
  Description of Unknown: Integrase B8479 sequence
  PTHR30461:SF3,cd00338,SM00857,G3DSA:1.10.10.2600,IPR036162, PF13408,PS51737,G3DSA:3.40.50.1390,IPR025827,IPR006119, IPR038109,SSF53041,IPR011109,PTHR30461,PS51736, Coil,PF00239
MECVAYMRVSTEKQAEEGNGLESQKRDIELYCRKNELIISDWYIDDGYTGANMNRPELQRLINDCGRKRVKCVVAFKLDRLSRSMVDGIYMIERVFQPNNVQFKCVHDSISYDSPMEQAYTQMMAVFAQLDKNTMMLRMRGGMLERVKQGYWMGGGNTPYCYTYSKEKGILIPIPERAEQANKAIDLFIAGNSDVAIQRILGYTSELVVRSILTGVVNIGMIPYKGNIYQGLHEPIFDKDKFEMAQQIRKSRRSKKSYCQNLTPNMLTGLCYCGVCGCKMRYQKWTNGVRKIYCCSRNKDLYYLPNFNNDCDNSIEWADNIENIVESEMLKISVNLSKYNPKEKENKIDIMQSQLDKEKSKLKRLYELYADGNDTVLDMIKDQESKVKNLDDSIKEEQKSGDNNTKKQFVYENIKKLADVWDDIDKPAKNKILKTIIDKIIIVNGNVEIQLKNF

SEQ ID NO: 8479 - protein, 454 aa, Unknown
  Description of Unknown: Integrase B8480 sequence
  PTHR30461:SF3,IPR036162,PS51737,IPR011109,PTHR30461, PS00397,PF00239,G3DSA:1.10.10.2600,IPR006119,SSF53041, cd00338,SM00857,IPR025827,IPR038109,PS51736, IPR006118,PF13408,G3DSA:3.40.50.1390,Coil
MECVAYLRVSTEKQAEEGYGLDLQRISITDYCRKNELIISDWYIDDGYTGSNMDRPQLQRLIRDCSKKRIKCLVAFKLDRISRSMVDGIYMIERVFQPNGVDFRCVHDSVSYDSPMEQAYTQMMAVFAQLDKNTMMMRMRGGRLERVKKGYWYGGGNRPYCYDYSKEKGILIPIPERAEQANRALDLFLQGYSDERIMKICGYSSELLVRHILTGTVNIGMIPYKGEIYKGLHEPIFDKRKFELAQEYRKSRRKAKTACFSIETNLLTGLCYCGVCGCKMRYQKWTNGNHKIYCYSRDKGLDKLPNYNPECDNTLEWAKDIEKQVEEEILKISLNISSYQKTQKESELEITKKALEKNKAKLKRLYNFYAEGNDTIVDSIRETENEINKQKEVIFELQKSEANKQSKEIVYDKIKSLADVWPHIDKTSKNVILKTIISKIVIVKGNVEIQLKEF

SEQ ID NO: 8480 - protein, 454 aa, Unknown
  Description of Unknown: Integrase B8481 sequence
  PTHR30461:SF3,IPR036162,PS51737,IPR011109,PTHR30461, PS00397,PF00239,G3DSA:1.10.10.2600,IPR006119,SSF53041, cd00338,SM00857,IPR025827,IPR038109,PS51736, IPR006118,PF13408,G3DSA:3.40.50.1390,Coil
MECVAYLRVSTEKQAEEGNGLDSQRRDIENYCRKNELIIKNWYEDDGFTGSNMNRPGLQRLINDCTRKRIKCVVAFKLDRLSRSMVDGIYLIERIFIPNGVEFKCVHDSVSYDSPMEQAYTQMMAVFAQLDKNTMLLRMRGGMLERVKQGFWMGGGNLPYCYDYDKEQGILVPIPERTEQARQALDLYLSGYSDAKIRDILGYTSERVVRNILTSPVNIGMIPYKGSVYRGKHEPIFEMERFEVAQEMRKSRRQHKLQNINQPAHLLTGLCYCGVCGCKMRYQKWTHGKHKIYCCSRNAGCSHLPNYNPNCDNSLEWADDIEKQVEEQILKISLNLSSYKPKERETRLEILQKQYDKEKTKLKRLYSLYADGNDTVLEMIQESESKLSEIKEQVDRETENTEYTQKKEYVYEKIKRLADVWDHIDKPDKNKILKSIISKIVIVNGNVEIQLKRF

SEQ ID NO: 8481 - protein, 454 aa, Unknown
  Description of Unknown: Integrase B8482 sequence
  PTHR30461:SF3,SM00857,G3DSA:1.10.10.2600,IPR036162,PF13408, IPR025827,G3DSA:3.40.50.1390,IPR006119,IPR038109,SSF53041, PF00239,PTHR30461,PS51736,Coil,cd00338
MECVAYMRVSTEKQAEEGNGLESQKRDIELYCRKNELIISDWYIDDGYTGANMNRPELQRLINDCGRKRVKCVVAFKLDRLSRSMVDGIYMIERVFQPNNVQFKCVHDSISYDSPMEQAYTQMMAVFAQLDKNTMMLRMRGGMLERVKQGYWMGGGNTPYCYTYSKEKGILIPIPERAEQANKAMDLFIAGNSDVSIQRILGYTSELVVRSILTSVVNIGMIPYKGNIYQGLHEPIFDKQKFEMAQQIRKSRRSKKSYCQNLTPNMLTGLCYCGVCGCKMRYQKWTNGVRKIYCCSRNKDLYYLPNFNKDCDNSIEWADNIENIVESEMLKISVNLSKYKPKEKENKIDIMQSQLDKEKSKLKRLYELYADGNDTVLDMIKDQESKIKNLDDSIKEEQKSGDNNPKKQFVYENIKKLADVWDGIDKPAKNKILKTIIDKIVIVNGNVEIQLKNF

SEQ ID NO: 8482 - protein, 454 aa, Unknown
  Description of Unknown: Integrase B8483 sequence
  PTHR30461:SF3,IPR036162,PS51737,IPR011109,PTHR30461, PS00397,PF00239,G3DSA:1.10.10.2600,IPR006119,SSF53041, cd00338,SM00857,IPR025827,IPR038109, PS51736,IPR006118,PF13408,G3DSA:3.40.50.1390,Coil
MECVAYLRVSTEKQAEEGNGLDSQKRDIENYCRKNQLIISDWYEDDGFTGSNMNRPALQRLINDCSKKKLKCVVAFKLDRLSRSMVDGIYLIERVFIPNGVDFRCVHDSVSYDSPMEQAYTQMMAVFAQLDKNTMLLRMRGGMLERVKQGYWMGGGNTPYCYRYSKEDGILVPIPERKEMALRAMNLYISGYSDVRIQKLIGFKSEFVTRQVLTSPVNIGMIPYKGNLYKGRHEPIFDIKVFELAQELRKTRKQSKRFCVNHENQLLTGLCYCGVCGCKMRYQKWTHGKHKIYCYSRDNGMSYLPNYNPNCNNSLEWAEDIEKQVEDEILKISLNLSSHKPKERESCLDILSKQLQKEKTKLKRLYTLYADGNDTVLEMIKETESGIDELKLKIQNEMKNPDNSQKKEFVYDNIKKLADVWEHIDKQSKNRILKTIISKIIIVNGNIEIQLKKF

SEQ ID NO: 8483 - protein, 454 aa, Unknown
  Description of Unknown: Integrase B8484 sequence
  PTHR30461:SF3,cd00338,SM00857,G3DSA:1.10.10.2600,IPR036162, PF13408,PS51737,IPR025827,G3DSA:3.40.50.1390,IPR006119, IPR038109,PF07508,IPR011109,SSF53041,PTHR30461, PS51736,Coil,PF00239
MDEYIDRAISGKTDNRPSFQRLIKDSEKGHFDAVIMYTLDRFARNRYDSAIYKAKLKRNGVKIFYAKQPMPDTPEGIILESVLEGYAEYYSENLARSIKRGMKENALHGIAMGSPVLGYKIGNDRQYEIDPVGAKAVRTIFTMYAEGKSKTQIVNWLNEHGFKTSRGNAFNKNSLSRILRNDKYIGVYRYDDVVLEDAVPPIIDKTLFDKVQATFRHNYTARAKAKAIEDYLLTTKVFCGHCGEPMVGESGTSKTGKVHRYYKCVNRKRKHNCEKKVEKKEWLERTVVEFTVQQVLTDENIEKISTRAMELIEKELQDTSVLIGLQERLKETNKRIKNLMSAIEQGIITPTTKERLEELEEERRDLEGQIAREEMKKPLLTKERIMYWLESFKRGDIEDVEYQRRIIDTLVNSVYVYDDGDKGRKLVLTFNISGNNTLTISSSDIERTAPFWNI

SEQ ID NO: 8484 - protein, 454 aa, Unknown
  Description of Unknown: Integrase B8485 sequence
  PTHR30461:SF3,IPR036162,PS51737,IPR011109,PTHR30461, PS00397,PF00239,G3DSA:1.10.10.2600,IPR006119,SSF53041, cd00338,SM00857,IPR025827,IPR038109,PS51736, IPR006118,PF13408,G3DSA:3.40.50.1390,Coil
MECVAYLRVSTEKQAEEGNGLESQKRDIENYCRKNQLIISDWYEDDGFTGSNMNRPALQRLINDCSKKKIKCVVAFKLDRLSRSMVDGIYLIERVFIPNGVDFRCVHDSVSYDSPMEQAYTQMMAVFAQLDKNTMLLRMRGGMLERVKQGYWMGGGNTPYCYRYSKEDGILVPIPERKEMALRAMNLYISGYSDIRIQKLIGFKSEFVTRQVLTSPVNIGMIPYKGKLYKGRHEPIFDIKVFELAQELRKTRKQSKSFCVNHENQLLTGLCYCGVCGCKMRYQKWTHGKHKIYCYSRDNGMSYLPNYNPNCSNSLEWAEDIEKQVEDEILKISLNLSSHKPKERESCLDILSKQLQKEKTKLKRLYTLYAEGNDTVLEMIKETESGIDELKLKIQNEMKSPDNSQKKEFVYDNIKKLADVWEHIDKQNKNRILKTIISKIIIVNGNIEIQLKKF

SEQ ID NO: 8485 - protein, 454 aa, Unknown
  Description of Unknown: Integrase B8486 sequence
  PTHR30461:SF3,IPR036162,PS51737,IPR011109,PTHR30461, PS00397,PF00239,G3DSA:1.10.10.2600,IPR006119,SSF53041, cd00338,SM00857,IPR025827,IPR038109,PS51736, IPR006118,PF13408,G3DSA:3.40.50.1390,PF07508,Coil
MECVAYLRVSTEKQAEEGNGLDSQRRDIENYCRKNELIIKNWYEDDGFTGSNMNRPGLQRLINDCTRKRVKCVVAFKLDRLSRSMVDGIYLIERIFIPNGVEFKCVHDSVSYDSPMEQAYTQMMAVFAQLDKNTMLLRMRGGMLERVKQGFWMGGGNLPYCYDYDREQGILIPIPERAEQARQALDLYLSGYSDAKIRDILGYTSEMVVRSILTSPVNIGMIPYKGSIYQGKHEPIFETERFEAAQEMRKSRRQHKIQSINHPAHLLTGLCYCGVCGCKMRYQKWTHGKHKIYCCSRNTGCSHLPNYNPNCDNSLEWADDIENQVEEQILKISINLSSYKPKERETRLEILQKQYDKEKTKLKRLYSLYADGNDAVLEMIQESESKLSEIKEQIDRETENAEYTQKKEYVYEKIKRLADVWDHIDKPDKNKILKSIISKIVIVNGNVEIQLKRF

SEQ ID NO: 8486 - protein, 454 aa, Unknown
  Description of Unknown: Integrase B8487 sequence
  PTHR30461:SF3,IPR036162,PS51737,IPR011109,PTHR30461, PS00397,PF00239,G3DSA:1.10.10.2600,IPR006119,SSF53041, cd00338,SM00857,IPR025827,IPR038109,PS51736, IPR006118,PF13408,G3DSA:3.40.50.1390,Coil
MECVAYLRVSTEKQAEEGYGLDLQRISITDYCRKNELIISDWYIDDGYTGSNMDRPQLQRLIRDCSKKRIKCLVAFKLDRISRSMVDGIYMIERVFQPNGVDFRCVHDSVSYDSPMEQAYTQMMAVFAQLDKNTMMMRMRGGRLERVKKGYWYGGGNRPYCYDYSKEKGILIPIPERAEQANRALDLFLQGYSDERIMKICGYSSELLVRHILTGTVNIGMIPYKGEIYKGLHEPIFDKRKFELAQEYRKSRRKAKTACFSIETNLLTGLCYCGVCGCKMRYQKWTNGNHKIYCYSRDKGLDKLPNYNPECDNTLEWAKDIEKQVEEEILKISLNISSYQKTQKESELEITKKALEKNKAKLKRLYNFYAEGNDTIVDSIRETENEINKQKEVIFELQKSEANKKSKEIVYDKIKSLADVWPHIDKTSKNVILKTIISKIVIVKGNVEIQLKEF

SEQ ID NO: 8487 - protein, 454 aa, Unknown
  Description of Unknown: Integrase B8488 sequence
  PTHR30461:SF3,IPR036162,PS51737,IPR011109,PTHR30461, PS00397,PF00239,G3DSA:1.10.10.2600,IPR006119,SSF53041, cd00338,SM00857,IPR025827,IPR038109,PS51736, IPR006118,PF13408,G3DSA:3.40.50.1390,Coil
MECVAYLRVSTEKQAEEGYGLDLQRISITDYCRKNELIISDWYIDDGYTGSNMDRPQLQRLIRDCSKKRIKCLVAFKLDRISRSMVDGIYMIERVFQPNGVDFRCVHDSVSYDSPMEQAYTQMMAVFAQLDKNTMMMRMRGGRLERVKKGYWYGGGNRPYCYDYSKEKGILIPIPERAEQANRALDLFLQGYSDERIMKICGYSSELLVRHILTGTVNIGMIPYKGEIYKGLHEPIFDKRKFELAQEYRKSRRKAKTACFSIETNLLTGLCYCGVCGCKMRYQKWTNGNHKIYCYSRDKGLDKLPNYNPECDNTLEWAKDIEKQVEKEILKISLNISSYQKTQKESELEITKKAMEKNKAKLKRLYNFYAEGNDTIVDSIRETENEINKQKEVIFELQKSEGNKQSKEIVYDKIKSLADVWPHIDKTSKNVILKTIISKIVIVKGNVEIQLKEF

SEQ ID NO: 8488 - protein, 454 aa, Unknown
  Description of Unknown: Integrase B8489 sequence
  PTHR30461:SF3,IPR036162,PS51737,IPR011109,PTHR30461, PS00397,PF00239,G3DSA:1.10.10.2600,IPR006119,SSF53041, SM00857,IPR025827,IPR038109,PS51736,cd03768, IPR006118,PF13408,G3DSA:3.40.50.1390,PF07508
MIKTGCYVRVSTENQLENYSIDEQTERLKAYCKAKDMPIIKFYTDGGYSGGNLNRPALRQLISDINDGLINTVVVYKLDRLSRSQKDTLTLIEDEFLSHNVDFISVCENFDTSTAFGRAAIGILSVFAQLEKDQITERFTMGRIGRAKEGYYHGGAIAPTGYDYVDGNLIVNEYEAMQVRELYERFAKGYSMYNCWLYMQSHYTTKYGSWKSETLVQKILSNDIYIGKVKFKGVSYEGKHTPIIPDELFYKVQRMLKERRSSSNSRSPFRSNTLLSGLIYCGNCGARYHGEHGNYACYSRTKGTKKYVIDPTCKNKKWKIEELDQIVINYVCSLQFDSKDLVSARPQKKIEFGGRIREIDRQINRLLDLYQVGSIPIEIISQKVDALTQEKDGLIAAETSSHTALQIDDMIKARDKFAYLIQNGTLEEKRSCLSVIIKKIVITNENVNILLNEL

SEQ ID NO: 8489 - protein, 454 aa, Unknown
  Description of Unknown: Integrase B8490 sequence
  PTHR30461:SF3,cd00338,SM00857,G3DSA:1.10.10.2600,IPR036162, PF13408,PS51737,G3DSA:3.40.50.1390,IPR025827,IPR006119, IPR038109,IPR011109,SSF53041,PTHR30461,PS51736, Coil,PF00239
MECVVYMRVSTEKQAEEGNGLESQKRDIENYCKKNEYAITDYYIDDGYTGANMDRPELQRLISDCVAKRIKCVVAFKLDRLSRSMVDGIYMIERVFQPNSILFKCVHDSISYDSPMEQAYTQMMAVFAQLDKNTMLLRMRGGMLERVKQGYWMGGGNTPYCYSYSKETGTLVPIPERKKQANEAIDLFLQGYSDVKIRDMLGFKSEMVVRSLLASPVNIGYIPYKGKIYKGKHEPIFELDKFNLAQEVRKNRRKKKTTCINKEPNLLTGLCYCGVCGCSMRYQKWTHGKHKIYCCSRDKSMSYLPNYDANCNNSLEWAVDIEKQVEEEIMKISLNLSSEKPVAKQSKIEILQSQIKKEENRRKRFFNLYADGNDDALLSIKEINNTIKSLKEQLETERSNTNLNRKKSVTYKNIKKIADVWDSIDKRDKNTILKSIIDKIVIVNGNIEIQLKNF

SEQ ID NO: 8490 - protein, 454 aa, Unknown
  Description of Unknown: Integrase B8491 sequence
  PTHR30461:SF3,IPR036162,PS51737,IPR011109,PTHR30461, PS00397,PF00239,G3DSA:1.10.10.2600,IPR006119,SSF53041, cd00338,SM00857,IPR025827,IPR038109,PS51736, IPR006118,PF13408,G3DSA:3.40.50.1390,Coil
MECVAYLRVSTEKQAEEGYGLDLQRISITDYCRKNELIISDWYIDDGYTGSNMDRPQLQRLIRDCSKKRIKCLVAFKLDRISRSMVDGIYMIERVFQPNGVDFRCVYDSVSYDSPMEQAYTQMMAVFAQLDKNTMMMRMRGGRLERVKKGYWYGGGNRPYCYDYSREKGILVPIPERAEQANRALDLFLQGYSDERIMKICGYSSELLVRHILTGVVNIGMIPYKGEIYKGLHEPIFDERKFELAQEYRKTRRKTKTACFSMETNLLTGLCYCGICGCKMRYQKWTNGKHKIYCYSHDRSLKKLPNHNPECDNTLEWAKDIEKQVEEEILKISLNISSYQKTQKESELEITKKALEKNKAKLKRLYNFYAEGNDTIVDSIRETEDEINKQKEVIFELQKSEGNKQSKEIVYDKIKSLADVWPHIDKTSKNVILKTIISKIVIVKGNVEIQLKEF

SEQ ID NO: 8491 - protein, 454 aa, Unknown
  Description of Unknown: Integrase B8492 sequence
  PTHR30461:SF3,IPR036162,PS51737,IPR011109,PTHR30461, PS00397,PF00239,G3DSA:1.10.10.2600,IPR006119,SSF53041, cd00338,SM00857,IPR025827,IPR038109,PS51736, IPR006118,PF13408,G3DSA:3.40.50.1390,Coil
MECVAYLRVSTEKQAEEGNGLDSQKRDIENYCRKNQLIISDWYEDDGFTGSNMNRPALQRLINDCSKKKLKCVVAFKLDRLSRSMVDGIYLIERVFIPNGVDFRCVHDSVSYDSPMEQAYTQMMAVFAQLDKNTMLLRMRGGMLERVKQGYWMGGGNTPYCYRYSKEDGILVPIPERKEMALRAMNLYISGYSDVRIQKLIGFKSEFVTRQVLTSPVNIGMIPYKGKLYKGRHEPIFDIKIFELAQELRKTRKQSKSFCVNHENQLLTGLCYCGVCGCKMRYQKWTHGKHKIYCYSRDNGMSYLPNYNPNCNNSLEWAEDIEKQVEDEILKISLNLSSHKPKERESCLDILSKQLQKEKTKLKRLYTLYAEGNDTVLEMIKETESGIDELKLKIQNEMKNPDNSQKKEFVYDNIKKLADVWEHIDKQSKNRILKTIISKIIIVNGNIEIQLKKF

SEQ ID NO: 8492 - protein, 453 aa, Unknown
  Description of Unknown: Integrase B8493 sequence
  PTHR30461:SF3,SM00857,G3DSA:1.10.10.2600,IPR036162,PF13408, IPR025827,G3DSA:3.40.50.1390,IPR006119,IPR038109,SSF53041, PTHR30461,Coil,PS51736,cd00338,PF00239
MECVAYMRVSTEKQAVEGNGLDSQKRDIENYCRKNELIISDWYIDDGYTGTNMDRPELQRLVNDCSRKRVSCVVAFKLDRLSRNMIDGIYLIEKVFQKYNVMFKCVHDSVSYNSPMEQAYTQMMAVFAQLDKNTMMLRMRGGMLERVKQGYWFGGGNLPYCYSYSKEQGILIPIPERAEQARKALELFISGYSDAKIKEICGFKSEIVTRSILTSVVNVGMIPYKGKVYRGRHEAVFDKDRFELALELRRSRRSAKVSCITEPNLLTGLCYCGVCGCKMRYQKWGSEKHKIYCCSRDKKLSYLPNYNANCDNSLEWADEIEKQIEEEILKISLDLSSYKPKEKATKLEIMQSQLEKEQIKLKRLYNLYADGNNTVLEMIKELETQIKEMKSNIATESKNAINTQKKEFVYENIKKLADIWDNIDKKQKNMILKTIIDKIIIVNGNIEIQLKNF

SEQ ID NO: 8493 - protein, 453 aa, Unknown
  Description of Unknown: Integrase B8494 sequence
  SM00857,IPR006118,G3DSA:1.10.10.2600,IPR036162, PS51737,G3DSA:3.40.50.1390,Coil,IPR006119, IPR038109,SSF53041,IPR011109,PTHR30461, PS00397,PS51736,cd00338,PF00239
MECVAYIRVSTERQVEEGYGLESQKRDIEEYCKKNEMLITDWYIDAGLSGMDMSKRVELQRLISDVSKINNIVVYKLDRLARDSVDALYMIEKLFTPKGVRVNSVHDFARYETPQDKFQTHIMAAVAEYDRNTMLLRMRGGMLERVKNGYWMGGGNTPYCYQYDKNLGYLVPIPERAEQANRAMDLFIEGMSDVKIQRLLGYKSEFVVRNILTGVVNIGYIPYKGGTYKGLHESIFEHDKFYLAQELRKSRHKQHIYSFTEPHLLTGLCYCKTCGCKMRYQKITGMGVHKIYCCSHDKYLDYLPNYNADCDNPGAWASDIEKAFEHEILDISINLSQYKPKAKETKLQILTNQLEKQKSKLKRLYTLYAEGNDMVLDMIKTLETEIRETTEKISTERNNGQHEQKKEFVYENIKKLADIWDGISKSQKNSILKTIIDKVIVGKDDIEIQLKNF

SEQ ID NO: 8494 - protein, 453 aa, Unknown
  Description of Unknown: Integrase B8495 sequence
  SM00857,G3DSA:1.10.10.2600,IPR036162,PF13408,IPR025827, G3DSA:3.40.50.1390,PS51737,IPR006119,IPR038109,IPR011109, SSF53041,PTHR30461,Coil,PS51736,cd00338, PF00239
MECVAYMRVSTEKQAEEGNGLDSQKRDIELFCRKNELVVADWYVDDGYTGANMDRPELQRLINDCIKKRVKCVVAFKLDRLSRSMIDGLYIIERVFQPNHVLFKCVHDSVSYDSPMEQAYTQMMAVFAQLDKNTMMLRMRGGMLERIKQGYWIGGANTPYCYNYSKEKGILIPIPERKEQANRALDMFISGYSDLYIKESLGFHSEVLVRNVLTGVVNIGMIPYKGNIYQGLHEPIFDKERFELAQEIRKSRRKNKTACHTDANLLTGLCYCGVCGCKMRYQKWTHGKHKIYCCSRDKAMKYLPNFNPDCNNSLEWASDIEKQVESEILKISLNLSECKPIEKQSKLEIMQSQFEKEQVKLKRLYVLYSDGNDTVLEMIKNTEKSISEMKVKITEEEKNERNSQKKEVVYENIKKLADVWAHIDKKEKNNILKSIISRIVIVNGDVEIQLKNF

SEQ ID NO: 8495 - protein, 453 aa, Unknown
  Description of Unknown: Integrase B8496 sequence
  PTHR30461:SF3,SM00857,G3DSA:1.10.10.2600,IPR036162,PF13408, IPR025827,G3DSA:3.40.50.1390,PS51737,IPR006119,IPR038109, SSF53041,IPR011109,PTHR30461,Coil,PS51736, cd00338,PF00239
MECVAYMRVSTEKQAEEGNGLDSQKRDIELFCRKNELVVSDWYVDDGYTGANMDRPELQRLINDCIKKRVKCVVAFKLDRLSRSMIDGLYIIERVFQPNQVLFKCVHDSVSYDSPMEQAYTQMMAVFAQLDKNTMMLRMRGGMLERIKQGYWIGGANTPYCYNYSKEKGILVPIPERKEQANRALDMFIGGYSDLYIKESLGFHSEVLVRNVLTGVVNIGMIPYKGNVYQGLHEPIFDKERFELAQEIRKSRRKNKTACHTDANLLTGLCYCGVCGCKMRYQKWTHGKHKIYCCSRDKAMKYLPNFNPDCNNSLEWAADIEKQVESEILKISLNLSECKPIEKQSKLEIMQSQFEKEQVKLKRLYVLYSDGNDTVLEMIKNTEKSISEMKVKITEEEKNERNSQKKEVVYENIKKLADVWAHIDKKEKNNILKSIISRIVIVNGDVEIQLKNF

SEQ ID NO: 8496 - protein, 453 aa, Unknown
  Description of Unknown: Integrase B8497 sequence
  PTHR30461:SF3,SM00857,G3DSA:1.10.10.2600,IPR036162,PF13408, IPR025827,G3DSA:3.40.50.1390,IPR006119,IPR038109,SSF53041, PF00239,PTHR30461,PS51736,Coil,cd00338
MKCVAYMRVSTEKQAEEGNGLESQKRDIENYCRKNELIIADWYVDEGYTGSNMNRPELQRLITDCSRKKVNCVVAFKLDRISRSMVDGIYIIEKVFQSNNVAFKCVHDSISYDSPMEQAYTQMMAVFAQLDKNTMMLRMRGGMLERIKQGYWWGGGNTPYCYRYDKEQGILIPIQERAEQARKALELFISGYSDAKIKEICGFKSELVTRKVLTGVVNIGMIPYKGNIYQGKHKPIFDKDRFELAQELRKSRCSAKISCFTEPNLLTGLCYCGVCGCKMRYQKWSNGNHKIYCCSRNKGLKYLPNYNPNCNNSLEWADDIEKQVTDEILKISLNLSSYKPKAKETKLEIMQSQLEREQTKLKRLYSLYADGNDTVLEMIKDLESQISKTKEDISVESKNAINTQKKEFTYQNIKKLADVWDNIDKKQKNFILKTIIDKVIIVNGNVEIQLKNF

SEQ ID NO: 8497 - protein, 453 aa, Unknown
  Description of Unknown: Integrase B8498 sequence
  PTHR30461:SF3,SM00857,G3DSA:1.10.10.2600,IPR036162,PF13408, IPR025827,G3DSA:3.40.50.1390,IPR006119,IPR038109,SSF53041, PTHR30461,Coil,PS51736,cd00338, PF00239
MECVAYMRVSTEKQAVEGNGLDSQKRDIENYCRKNELVITDWYIDDGYTGTNMDRPELQRLVNDCSRKRVSCVVAFKLDRLSRNMIDGIYLIEKVFQKYNVVFKCVHDSVNYDSPMEQAYTQMMAVFAQLDKNTMMLRMRGGMLERIKQGYWMGGGNLPYCYSYSKEQGILIPIPERAEQARKGLELFISGYSDAKIKEICGFKSELVTRSILTGAVNIGMIPYKGKIYQGKHEPIFDKDRFNLGLELRKSRCSAKTYCITEPNLLTGLCYCGICGCKMRYQKWGSKKHKIYCCSRNKSLSYLPNYNASCNNSLEWADEIEKQVEEEILKISLDLSSYKPKEKATKLEIMQSQLEKEQIKLKRLYNLYADGNDTVLEMIKELESQIKEMKSNIAAESKNAINTQKKEFVYENIKKLADIWDKVDKKQKNLILKTIIDKIVIVNGNIEIQLKNF

SEQ ID NO: 8498 - protein, 453 aa, Unknown
  Description of Unknown: Integrase B8499 sequence
  PTHR30461:SF3,IPR036162,PS51737,IPR011109,PTHR30461, PS00397,PF00239,G3DSA:1.10.10.2600,IPR006119,SSF53041, SM00857,IPR025827,IPR038109,PS51736,cd03768, IPR006118,PF13408,G3DSA:3.40.50.1390,PF07508,Coil
MIKGACYVRVSTDNQLENYSIEEQTDRLKAYCKAKDIQIVKIYTDGGYSGGNINRPALQQMLQDIGKGLIDSVIVYKLDRLSRSQKDTLMLIEDCFLAKNVDFVSVNENFDTSTPFGRAMIGILSVFAQLEKDQITERFTMGRIGRAKNGYFHGGGNAPTGYDYIDGELIINDYEALQVKDLYNRFLKGYSIHNCWQYMHQKYGGWSNEVSVRNVLKNELYIGKVKFKGVAYQGNHQPIISEEIFRQVQDLFNSSRRTSDTFKRSPFKANTLLSSLVYCGKCGARFHGEHGNYSCYSRTKGDKKYIVDPNCKNKKWKIEELNKLVLDYITRLDFSKLQNSHPAPVPVTDYSLRLTEIDKQIEKLIDLYQVSGIPLESIQKKMDALTKEKEALLNVSKPKNVPITTLAEMITARDTLMSLADTGSLDEKRACLTMIIDRITIDDDNVNIKLKHL

SEQ ID NO: 8499 - protein, 453 aa, Unknown
  Description of Unknown: Integrase B8500 sequence
  PTHR30461:SF3,SM00857,G3DSA:1.10.10.2600,IPR036162,PF13408, IPR025827,G3DSA:3.40.50.1390,IPR006119,IPR038109,SSF53041, PF00239,PTHR30461,PS51736,Coil,cd00338
MECVAYMRVSTEKQAVEGNGLDSQKRDIENYCRKNELVITDWYIDDGYTGTNMDRPELQRLVNDCSRKRVGCVVAFKLDRLSRNMIDGIYLIEKVFQKYNVMFKCVHDSVNYDSPMEQAYTQMMAVFAQLDKNTMMLRMRGGMLERVKQGYWFGGGNLPYCYSYSKEQGILIPIPEHAEQARKGLELFISGYSDVKIKEICGFRSELVTRSILTSVVNIGMIPYKGKTYQGKHEAIFDKDRFELGLELRKSRCSAKTYCITEPNLLTGLCYCGICGCKMRYQKWGSKKHKIYCCSRNKSLSYLPNYNASCNNSLEWADEIEKQVEEEILKISLDLSSYKPKEKATKLEIMQSQLEKEQTKLKRLYNLYADGNDTVLEMIKELESQIKETKSNIAAESKNAINTQKKEFVYENIKKLADVWDNIDKKQKNMILKTIIDKIVIVNGNIEIQLKNF

SEQ ID NO: 8500 - protein, 453 aa, Unknown
  Description of Unknown: Integrase B8501 sequence
  PTHR30461:SF3,SM00857,G3DSA:1.10.10.2600,IPR036162,PF13408, IPR025827,G3DSA:3.40.50.1390,IPR006119,IPR038109,SSF53041, PTHR30461,Coil,PS51736,cd00338, PF00239
MECVAYMRVSTEKQAVEGNGLDSQKRDIENYCRKNELVITDWYIDDGYTGANMDRPGLQRLVNDCSRKRVSCVVAFKLDRLSRNMIDGIYLIEKVFQKCNVVFKCVHDSVSYDSPMEQAYTQMMAVFAQLDKNTMMLRMRGGMLERIKQGYWMGGGNLPYCYSYSKEQGILIPIPERAEQARKALELFISGYSDVKIKEICGFKSELVTRNILTGIVNIGMIPYKGKIYQGKHEPIFDKGRFNLAQELRKARAKSRATCQTEPNLLTGLCYCGVCGCAMRYQKWTHEKQKIYCMSRNKSMSYLPNYNANCNNSLEWADDIEKQVEKEILKISLNLSSYKPKEKATKLEIMQSQLDKEQTKLKRLYNLYADGNDTVLEMIKESESLVKTMKANVLSESKSTANTQKKEFVYENIKKLADVWDNIDKKKKNMILKTIIDKIVIVNGNIEIQLKNF

SEQ ID NO: 8501 - protein, 453 aa, Unknown
  Description of Unknown: Integrase B8502 sequence
  PTHR30461:SF3,SM00857,G3DSA:1.10.10.2600,IPR036162,PF13408, IPR025827,G3DSA:3.40.50.1390,PS51737,IPR006119,IPR038109, PF07508,SSF53041,IPR011109,PTHR30461,PS51736, cd00338,PF00239
MSAGKKPLRVAAYCRVSTDGDDQANSFESQQRYFRAYIAQQPHWELAGIFADEGLSGTSTKKRLAFQRMIACARAGTLDLIVTKEISRFARNTLDSIYYTRELKRLGVGVLFLSDNLCTLDGDAELRLAILSSIAQEESRRTSERVKWGQRRRMEQGVVFGRDLLGYDVRGGMLYVNEAGAQTVREIFRKCVDEGKGAHTIARELNEAGIPAARGGAWRSSVILRILRNEKYCGDLVQKKTYTPDYLTHEKKYNHGQEDYIIVREHHAPIIPRATFESAGRILDQRAAAPTGQRKYSRRYPLSGKLRCGICGTVCAARKKTRRDGTDAISWRCGNAVKYGRPHTDTDGRCRGCTGESLRNEDALRILEQVWASLPLDRDSIAADVLAAVRAVTPHEQGDALESEITAMLRGDAALTAQLLAQMTVYDRTHVTLTLRGFPGKWCFARTQKAASP

SEQ ID NO: 8502 - protein, 453 aa, Unknown
  Description of Unknown: Integrase B8503 sequence
  PTHR30461:SF3,SM00857,G3DSA:1.10.10.2600,IPR036162,PF13408, IPR025827,G3DSA:3.40.50.1390,IPR006119,IPR038109,SSF53041, PTHR30461,Coil,PS51736,cd00338,PF00239
MECVAYMRVSTEKQAVEGNGLDSQKRDIENYCRKNELVITDWYIDDGYTGTNMDRPELQRLVNDCGRKRIGCVVAFKLDRLSRNMIDGIYLIEKVFQKYDVVFKCVHDSVNYDSPMEQAYTQMMAVFAQLDKNTMMLRMRGGMLERVKQGYWFGGGNLPYCYSYSKDQGILIPIPEHAEQARKGLELFISGYSDAKIKEICGFRSELVTRSILTSVVNIGMIPYKGKTYQGKHEAVFDKDRFELGLELRKTRCSAKTYCITEPNLLTGLCYCGICGCKMRYQKWGSKKHKIYCCSRNKSLSYLPNYNASCNNSLEWADEIEKQVEEEILKISLDLSSYKPKEKATKLEIMQSQLEKEQIKLKRLYNLYADGNDTVLEMIKELESQIKEMKSNIAAESKNEINTQKKEFVYENIKKLADIWDKVDKKQKNMILKTIIDRIVIVNGNIEIQLKNF

SEQ ID NO: 8503 - protein, 453 aa, Unknown
  Description of Unknown: Integrase B8504 sequence
  PTHR30461:SF3,SM00857,G3DSA:1.10.10.2600,IPR036162,PF13408, IPR025827,G3DSA:3.40.50.1390,PS51737,IPR006119,IPR038109, SSF53041,IPR011109,PTHR30461,Coil, PS51736,cd00338,PF00239
MECVAYMRVSTEKQAEEGNGLDSQKRDIELFCRKNELVVADWYVDDGYTGANMDRPELQRLINDCIKKRVKCVVAFKLDRLSRSMIDGLYIIERVFQPNQVLFKCVHDSVSYDSPMEQAYTQMMAVFAQLDKNTMMLRMRGGMLERIKQGYWIGGANTPYCYNYSKEKGILIPIPERKEQANRALDMFIGGYSDLYIKESLGFHSEVLVRNVLTGVVNIGMIPYKGNVYQGLHEPIFDKERFELAQEIRKSRRKNKTACHTDANLLTGLCYCGVCGCKMRYQKWTHGKHKIYCCSRDKAMKYLPNFNPDCNNSLEWAADIEKQVESEILKISLNLSECKPIEKQSKLEIMQSQFEKEQVKLKRLYVLYSDGNDTVLEMIKNTEKSISEMKVKITEEEKNERNSQKKEVVYENIKKLADVWAHIDKKEKNNILKSIISRIVIVNGDVEIQLKNF

SEQ ID NO: 8504 - protein, 453 aa, Unknown
  Description of Unknown: Integrase B8505 sequence
  PTHR30461:SF3,cd00338,SM00857,G3DSA:1.10.10.2600,IPR036162, PF13408,IPR025827,G3DSA:3.40.50.1390,IPR006119,IPR038109, SSF53041,PTHR30461,PS51736,Coil,PF00239
MECVAYMRVSTEKQAEEGNGLDSQRRDIENYCRKNELVITDWYIDDGYTGANMDRPELQRLVSDCDRKRVGYVVAFKLDRISRSMVDGIYLIERVFLKNNVEFKCVHDSISYDNPMEQAYTQMMAVFAQLDKNTMLLRMRGGMLERVKQGYWMGGGNLPYCYTYSKDTGTLIPIPERKEQANKAMDLFLQGYSDVKIRDMLGFKSEFVVKQVLTSPVNIGMIPYKGNIYQGLHKPIFNNEVFEKAQQFRAIRKNKRASCHNIQTNLLTGLCYCGICGCAMRYQKWTHGKHKIYCCSRNKDLHYLPNHNPNCNNTLEWASDIEKAVEDEILLISANISEYKPRVKESKLEILQGQLEKEQTKRKRLYNLYAEGNDDVISMIKEIEKVIEDIRKQIKEESAIETNKTRQNVFKNIKNLADIWEDIDKKQKNTLLKSIIEKIVISNGNIEIKLKDF

SEQ ID NO: 8505 - protein, 453 aa, Unknown
  Description of Unknown: Integrase B8506 sequence
  PTHR30461:SF3,SM00857,G3DSA:1.10.10.2600,IPR036162,PF13408, IPR025827,G3DSA:3.40.50.1390,IPR006119,IPR038109,SSF53041, PTHR30461,Coil,PS51736,cd00338, PF00239
MECVAYMRVSTEKQAVEGNGLDSQKRDIENYCRKNELVITDWYIDDGYTGANMDRPGLQRLVNDCSRKRVSCVVAFKLDRLSRNMIDGIYLIEKVFQKCNVVFKCVHDSVNYDSPMEQAYTQMMAVFAQLDKNTMMLRMRGGMLERIKQGYWMGGGNLPYCYSYSKEQGILIPIPERAEQARKALELFISGYSDVKIKEICGFKSELVTRNILTGIVNIGMIPYKGKIYQGKHEPVFDKGRFNLAQELRKTRAKSRATCQTEPNLLTGLCYCGVCGCAMRYQKWTNGEHKIYCMSRNKSMSYLPNYNADCNNSLEWADDIERQVEEEILKISLNLSSYKPKEKATKLEIMQSQLDKEQTKLKRLYSLYADGNDTVLEMIKESEVLIKTMKANVLSESKNAADTQKKEFVYENIKKLADVWDNIDKKKKNMILKTIIDKIVIVNGNIEIQLKNF

SEQ ID NO: 8506 - protein, 453 aa, Unknown
  Description of Unknown: Integrase B8507 sequence
  PTHR30461:SF3,SM00857,G3DSA:1.10.10.2600,IPR036162,PF13408, IPR025827,G3DSA:3.40.50.1390,IPR006119,IPR038109,SSF53041, PTHR30461,Coil,PS51736,cd00338,PF00239
MECVAYMRVSTEKQAVEGNGLDSQKRDIENYCRKNELVITDWYIDDGYTGANMDRPGLQRLVNDCSRKRVSCVVAFKLDRLSRNMIDGIYLIEKVFQKCNVTFKCVHDSVNYDSPMEQAYTQMMAVFAQLDKNTMMLRMRGGMLERIKQGYWMGGGNLPYCYSYSKEQGILIPIPERAEQARKALELFISGYSDVKIKEICGFKSELVTRNILTGIVNIGMIPYKGKIYQGRHEPIFDKGRFNLAQELRKTRAKSRATCQTEPNLLTGLCYCGVCGCAMRYQKWTHEKQKIYCMSRNKSMSYLPNYNANCNNSLEWADDIEKQVEKEILKISLNLSSYKPKEKATKLEIMQSQLDKEQTKLKRLYNLYADGNDTVLEMIKESESLIKTMKANVLSESKSTANTQKKEFVYENIKKLADVWNNIDKKKKNMILKTIIDKIVIVNGNIEIQLKNF

SEQ ID NO: 8507 - protein, 453 aa, Unknown
  Description of Unknown: Integrase B8508 sequence
  PTHR30461:SF3,SM00857,G3DSA:1.10.10.2600,IPR036162,PF13408, IPR025827,G3DSA:3.40.50.1390,IPR006119,IPR038109,SSF53041, PTHR30461,Coil,PS51736,cd00338, PF00239
MKCVAYMRVSTEKQAEEGNGLESQKRDIENYCRKNELIIADWYVDEGYTGSNMNRPELQRLITDCSRKKVNCVVAFKLDRISRSMVDGIYIIEKVFQSNNVAFKCVHDSISYDSPMEQAYTQMMAVFAQLDKNTMMLRMRGGMLERIKQGYWWGGGNTPYCYRYDKEQGILIPIQERAEQARKALELFISGYSDAKIKEICGFKSELVTRKVLTGVVNIGMIPYKGNIYQGKHKPIFDKDRFELAQELRKSRCSAKISCFTEPNLLTGLCYCGVCGCKMRYQKWSNGNHKIYCCSRNKGLKYLPNYNPNCNNSLEWADDIEKQVTDEILKISLNLSSYKPKAKETKLEIMQSQLEREQTKLKRLYSLYADGNDTVLEMIKDLESQISKAKEDISVESKNAINTQKKEFTYQNIKKLADVWDNIDKKQKNFILKTIIDKVIIVNGNVEIQLKNF

SEQ ID NO: 8508 - protein, 453 aa, Unknown
  Description of Unknown: Integrase B8509 sequence
  PTHR30461:SF3,IPR036162,PS51737,IPR011109,PTHR30461, PS00397,PF00239,G3DSA:1.10.10.2600,IPR006119,SSF53041, SM00857,IPR025827,IPR038109,PS51736,cd03768, IPR006118,PF13408,G3DSA:3.40.50.1390,PF07508,Coil
MIKGACYVRVSTDNQLENYSIEEQTDRLKAYCKAKDIQIVKIYTDGGYSGGNINRPALQQMLQDIGKGLIDSVIVYKLDRLSRSQKDTLMLIEDCFLAKNVDFVSVNENFDTSTPFGRAMIGILSVFAQLEKDQITERFTMGRIGRAKNGYFHGGGNTPTGYDYIDGELIINDYEALQVKDLYNRFLKGYSIHNCWQYMHQKYGGWSNEVSVRNVLKNELYIGKVKFKGVAYQGNHQPIISEEIFRQVQDLFNSSRRTSDTFKRSPFKANTLLSSLVYCGKCGARFHGEHGNYSCYSRTKGDKKYIVDPNCKNKKWKIEELNKLVLDYITRLDFSKLQNSHPAPVPVTDYSLRLTEIDKQIEKLIDLYQVSGIPLESIQKKMDALTKEKEALLNVSKPKNVPITTLAEMITARDTLMSLADTGSLDEKRACLTMIIDRITIDDDNVNIKLKHL

SEQ ID NO: 8509 - protein, 453 aa, Unknown
  Description of Unknown: Integrase B8510 sequence
  PTHR30461:SF3,SM00857,G3DSA:1.10.10.2600,IPR036162,PF13408, IPR025827,G3DSA:3.40.50.1390,PS51737,IPR006119,IPR038109, SSF53041,IPR011109,PF00239,PTHR30461,PS51736, Coil,cd00338
MECVAYMRVSTEKQAEEGNGLDSQKRDIELFCRKNELVVSDWYVDDGYTGANMDRPELQRLINDCIKKRVKCVVAFKLDRLSRSMIDGLYIIERVFQPNQVLFKCVHDSVSYDSPMEQAYTQMMAVFAQLDKNTMMLRMRGGMLERIKQGYWIGGANTPYCYNYSKEKGILIPIPERKEQANRAIDMFIGGYSDLYIKESLGFHSEVLVRNVLTGVVNIGMIPYKGNVYQGLHEPIFDKERFELAQEIRKSRRKNKTACHTDANLLTGLCYCGVCGCKMRYQKWTHGKHKIYCCSRDKAMKYLPNFNPNCNNSLEWAADIEKQVESEILKISLNLSECKPIEKQSKLEIMQSQFEKEQVKLKRLYVLYSDGNDTVLEMIKNTEKSISDMKEKITEEEKNERNSQKKEVVYENIKKLADVWAHIDKKEKNNILKSIISRIVIVNGDVEIQLKNF

SEQ ID NO: 8510 - protein, 453 aa, Unknown
  Description of Unknown: Integrase B8511 sequence
  PTHR30461:SF3,SM00857,IPR006118,G3DSA:1.10.10.2600,IPR036162, PS51737,PS00397,G3DSA:3.40.50.1390,IPR006119,IPR038109, IPR011109,SSF53041,PTHR30461,Coil,PS51736, cd00338,PF00239
MECVAYIRVSTERQVEEGYGLESQKRDIEDYCKKNEMLITDWYIDAGLSGMDMSKRVELQRLISDISKINDIVVYKLDRLARDSVDALYMIEKLFTPKGVRVNSVHDFARYETPQDKFQTHIMAAVAEYDRNTMLLRMRGGMLERVKNGYWMGGGNTPYCYRYDKNLGYLVPIPERAEQANRAMDLFIDGMSDVKIQRLLGYKSEFVVRNILTGVVNIGYIPYKGGTYKGLHESIFESDKFYLAQELRKSRRKQHTYSLTEPHLLTGLCYCKTCGCKMRYQKITGMGIHKIYCCSHSKYLDYLPNYNADCDNPGAWASDIEKAFEHEILDISINLSQYKPKAKETKLQILTKQLEKQKAKLKRLYTLYAEGNDMVLDMIKTLEAEIKETTEKISAERKNGQHEQKKEFVYENIKKLADIWDGISKSQKNSILKTIIDKVIVGKDDIEIQLKNF

SEQ ID NO: 8511 - protein, 453 aa, Unknown
  Description of Unknown: Integrase B8512 sequence
  PTHR30461:SF3,cd00338,SM00857,G3DSA:1.10.10.2600,IPR036162, PF13408,PS51737,IPR025827,G3DSA:3.40.50.1390,IPR006119, IPR038109,IPR011109,SSF53041,PTHR30461,PS51736, Coil,PF00239
MECVAYMRVSTEKQAEEGNGLDSQRRDIENYCRKNELVITDWYIDDGYTGANMDRPELQRLVSDCERKRVSYVVAFKLDRISRSMVDGIYLIERVFLKNNVEFKCVHDSISYDNPMEQAYTQMMAVFAQLDKNTMLLRMRGGMLERVKQGYWMGGGNLPYCYTYSKDTGTLIPIPERKEQANKAMDLFLQGYSDVKIRDMLGFKSEFVVKQVLTSPVNIGMIPYKGNIYHGLHEPIFNKEVFEKAQQFRAIRKNKRASCHNIQTNLLTGLCYCGICGCAMRYQKWTHGKHKIYCCSRNKDLHYLPNHNPNCNNTLEWASDIEKAVEDEILLISANISDYKPRVKESKLEILQGQLEKEQTKRKRLYNLYAEGNDDVISMIKEIEKVIEDIRKQIKEESAIETNKTRQNVFKNIKNLADIWEDIDKKQKNMLLKSIIEKIVISNGNIEIKLKDF

SEQ ID NO: 8512 - protein, 453 aa, Unknown
  Description of Unknown: Integrase B8513 sequence
  PTHR30461:SF3,SM00857,G3DSA:1.10.10.2600,IPR036162,PF13408, IPR025827,G3DSA:3.40.50.1390,IPR006119,IPR038109,SSF53041, PTHR30461,Coil,PS51736,cd00338,PF00239
MECVAYMRVSTEKQAVEGNGLDSQKRDIENYCRKNELVITDWYIDDGYTGTNMDRPELQRLVNDCSRKRISCVVAFKLDRLSRNMIDGIYIIEKVFQKYNVVFKCVHDSVNYDSPMEQAYTQMMAVFAQLDKNTMMLRMRGGMLERVKQGYWFGGGNLPYCYSYSKDQGILIPIPEHAEQARKGLELFISGYSDAKIKEICGFRSELVTRSILTSVVNIGMIPYKGKIYQGKHEAVFDKDRFELGLELRKSRCSAKTYCITEPNLLTGLCYCGICGCKMRYQKWGSEKHKIYCCSRNKSLSYLPNYNASCNNSLEWADEIEKQVEEEILKISLDLSSYKPKEKATKLEIMQSQLEKEQIKLKRLYNLYADGNDTVLEMIKELESQIKEMKSNIAAESKNAINTQKKEFVYENIKKLADIWDKVDKKQKNMILKTIIDRIVIVNGNIEIQLKNF

SEQ ID NO: 8513 - protein, 453 aa, Unknown
  Description of Unknown: Integrase B8514 sequence
  PTHR30461:SF3,cd00338,SM00857,G3DSA:1.10.10.2600,IPR036162, PF13408,IPR025827,G3DSA:3.40.50.1390,IPR006119,IPR038109, SSF53041,PTHR30461,PS51736,Coil, PF00239
MECVAYMRVSTEKQAEEGNGLESQKRDILDYCSKNKLIVTDWYVDDGYTGANMNRPELQRLVADCKHKRIYCVVAFKLDRLSRNMIDGLYMIEKIFQPNGVQFKCVHDSVSYDSPMEQAYTQMMAVFAQLDKNTMMLRMRGGMLERVKQGYWMGGGNLPYCYSYDKDSGILIPIPERKVQANKALELYIKGYSDIKICKICGYKGEKVVRQILTTPVNIGMIPYKGKIYQGLHEPIFNKEQFELAQQLRKSRSCNKASCITEPNLLTGLCYCGVCGCAMRYQKWTHGKHKIYCMSRNKAMSYLPNHNPDCNNSLEWADDIEEQVEKEMLKISLDLSSYKPKEKETKLDIMQSQLDKEQAKLKRLYGLYADGNDTVLSMIKELEANISAIKENISEEWKNFSVKQKNTIVYDEIKKLADVWDSIDKKQKNMILKTIIDKIIIVNGNIEIQLKNF

SEQ ID NO: 8514 - protein, 453 aa, Unknown
  Description of Unknown: Integrase B8515 sequence
  PTHR30461:SF3,SM00857,IPR006118,G3DSA:1.10.10.2600,IPR036162, PS51737,G3DSA:3.40.50.1390,Coil,IPR006119,IPR038109, SSF53041,IPR011109,PTHR30461,PS00397,PS51736, cd00338,PF00239
MECVAYIRVSTERQVEEGYGLESQKRDIEEYCKKNEMLITDWYIDAGLSGMDMSKRVELQRLISDISKINNIVVYKLDRLARDSVDALYMIEKLFTPKGVRVNSVHDFARYETPQDKFQTHIMAAVAEYDRNTMLLRMRGGMLERVKNGYWMGGGNTPYCYRYDKNLGYLVPIPERAEQANRAMDLFIGGMSDVKIQRLLGYKSEFVVRNILTGVVNIGYIPYKGGTYKGLHEPIFEHDKFYLAQELRKSRRKQHVYSFTEPHLLTGLCYCKTCGCKMRYQKITGMGIHKIYCCSHDKYLDYLPNYNTDCDNPGAWASDIEIAFEHEILGISINLSQYKPKAKETKLQILTNQLEKQKSKLKRLYILYAEGNDMVLDMIKTLETEIRETTEKISAERKNGQHEQKKEFVYENIKKLADIWDGISKSQKNSILKTIIDKVIVGKDDIEIQLKNF

SEQ ID NO: 8515 - protein, 453 aa, Unknown
  Description of Unknown: Integrase B8516 sequence
  PTHR30461:SF3,IPR036162,PS51737,IPR011109,PTHR30461, PS00397,PF00239,G3DSA:1.10.10.2600,IPR006119,SSF53041, SM00857,IPR025827,IPR038109,PS51736,cd03768, IPR006118,PF13408,G3DSA:3.40.50.1390,PF07508,Coil
MIKGACYVRVSTDNQLENYSIEEQTDRLKAYCKAKDIQIVKIYTDGGYSGGNVNRPALQQMLQDIDKGLIDSVIVYKLDRLSRSQKDTLMLIEDCFLAKNVDFVSVNENFDTSTPFGRAMIGILSVFAQLEKDQITERFTMGRIGRAKNGYFHGGGNAPTGYDYIDGELVINDYEAIQVKDLYNRFLKGYPIHNCWQYMQQKYGGWSNEVSVRNVLKNELYIGKVKFKGVAYQGNHQPIISEETFQQVQDLFSSSRRASDTFKRSPFKASTLLSSLVYCGKCGARFHGEHGNYSCYSRTKGDKKYIVDPNCKNKKWKIEELDRLVLDYIMRLDFSKLKSGHPVPVPVTDYSIRLNEIDKQIGKLIDLYQVSGIPIETIQEKMDVLNKEKEALLNISKPKNVPVTTLAEMITARDTLMSLSDTGSLDEKRACLTMIIDRIIIDDDNVNIKLKQL

SEQ ID NO: 8516 - protein, 453 aa, Unknown
  Description of Unknown: Integrase B8517 sequence
  PTHR30461:SF3,cd00338,SM00857,G3DSA:1.10.10.2600,IPR036162, PF13408,PS51737,G3DSA:3.40.50.1390,IPR025827,IPR006119, IPR038109,IPR011109,SSF53041,PTHR30461,PS51736, Coil,PF00239
MECVAYMRVSTEKQAEEGNGLDSQRRDIENYCRKNELVITDWYIDDGYTGANMDRPELQRLVSDCDRKRVGYVVAFKLDRISRSMVDGIYLIERVFLKNNVEFKCVHDSISYDNPMEQAYTQMMAVFAQLDKNTMLLRMRGGMLERVKQGYWMGGGNLPYCYTYSKDTGTLIPIPERKEQANKAMDLFLQGYSDVKIRDMLGFKSEFVVKQVLTSPVNIGMIPYKGNIYHGLHEPIFNKEVFEKAQQFRAIRKNKRASCHNIQTNLLTGLCYCGICGCAMRYQKWTHGKHKIYCCSRNKDLHYLPNHNPNCNNTLEWASDIEKAVEDEILLISANISDYKPRVKESKLEILQGQLEKEQTKRKRLYNLYAEGNDDVISMIKEIEKVIEDIRKQIKEESAIETNKTRQNVFKNIKNLADIWEDIDKKQKNMLLKSIIEKIVISNGNIEIKLKDF

SEQ ID NO: 8517 - protein, 453 aa, Unknown
  Description of Unknown: Integrase B8518 sequence
  PTHR30461:SF3,SM00857,G3DSA:1.10.10.2600,IPR036162,PF13408, IPR025827,G3DSA:3.40.50.1390,IPR006119,IPR038109,SSF53041, PTHR30461,Coil,PS51736,cd00338,PF00239
MECVAYMRVSTEKQAVEGNGLDSQKRDIENYCRKNELVITDWYIDDGYTGTNMDRPELQRLVNDCSRKRVSCVVAFKLDRLSRNMIDGIYLIEKVFQKYNVVFKCVHDSVNYDSPMEQAYTQMMAVFAQLDKNTMMLRMRGGMLERIKQGYWMGGGNLPYCYSYSKEQGILIPIPERAEQARKGLELFISGYSDAKIKEICGFKSELVTRSILTGVVNIGMIPYKGKIYQGKHEPIFDKDRFNLGLELRKSRCSAKTYCITEPNLLTGLCYCGICGCKMRYQKWGSEKHKIYCCSRNKSLSYLPNYNASCNNSLEWADEIEKQVEEEILKISLDLSSYKPKEKATKLEIMQSQLEKEQIKLKRLYNLYADENDTVLEMIKELEAQIKEMKLNIAAESKNAINTQKKEFVYENIKKLADIWDKVDKKQKNLILKTIIDKIVIVNGNIEIQLKNF

SEQ ID NO: 8518 - protein, 453 aa, Unknown
  Description of Unknown: Integrase B8519 sequence
  PTHR30461:SF3,SM00857,G3DSA:1.10.10.2600,IPR036162,PF13408, PS51737,IPR025827,G3DSA:3.40.50.1390,IPR006119,IPR038109, IPR011109,SSF53041,PTHR30461,Coil, PS51736,cd00338,PF00239
MECVAYMRVSTEKQAEEGNGLDSQKRDIELFCRKNELVVADWYVDDGYTGANMDRPELQRLINDCIKKRIKCVVAFKLDRLSRSMIDGLYIIERVFQPNQVLFKCVHDSVSYDSPMEQAYTQMMAVFAQLDKNTMMLRMRGGMLERIKQGYWIGGANTPYCYNYSKEKGILIPIPERKEQANRALDMFIGGYSDLYIKESLGFHSEVLVRNVLTGVVNIGMIPYKGNVYQGLHEPIFDKERFELAQEIRKSRRKNKTACHTDANLLTGLCYCGVCGCKMRYQKWTHGKHKIYCCSRDKAMKYLPNFNPNCNNSLEWAADIEKQVESEILKISLNLSECKPIEKQSKLEIMQSQFEKEQVKLKRLYVLYSDGNDTVLEMIKSTEKSISEMKVKITEEEKNERNSQKKEVVYENIKKLADVWAHIDKKEKNNILKSIISRIVIVNGDVEIQLKNF

SEQ ID NO: 8519 - protein, 453 aa, Unknown
  Description of Unknown: Integrase B8520 sequence
  SM00857,G3DSA:1.10.10.2600,IPR036162,PF13408,IPR025827, G3DSA:3.40.50.1390,PS51737,IPR006119,IPR038109,IPR011109, SSF53041,PTHR30461,Coil,PS51736,cd00338, PF00239
MECVAYMRVSTEKQAEEGNGLDSQKRDIELFCRKNELVVADWYVDDGYTGANMDRPELQRLINDCIKKRVKCVVSFKLDRLSRSMIDGLYIIERVFQPNQVLFKCVHDSVSYDSPMEQAYTQMMAVFAQLDKNTMMLRMRGGMLERIKQGYWIGGANTPYCYNYSKEKGILIPIPERKEQANRALDMFIGGYSDLYIKESLGFHSEVLVRNVLTGVVNIGMIPYKGNVYQGLHEPIFDKERFELAQEIRKSRRKNKTACHTDANLLTGLCYCGVCGCKMRYQKWTHGKHKIYCCSRDKAMKYLPNFNPDCNNSLEWAADIEKQVESEILKISLNLSECKPIEKQSKLEIMQSQFEKEQVKLKRLYVLYSDGNDTVLEMIKNTEKIISEMKVKITEEEKNERNSQKKEVVYENIKKLADVWAHIDKKEKNNILKSIISRIVIVNGDVEIQLKNF

SEQ ID NO: 8520 - protein, 453 aa, Unknown
  Description of Unknown: Integrase B8521 sequence
  PTHR30461:SF3,IPR036162,PS51737,IPR011109,PTHR30461, PS00397,PF00239,G3DSA:1.10.10.2600,IPR006119,SSF53041, SM00857,IPR025827,IPR038109,PS51736,cd03768, IPR006118,PF13408,G3DSA:3.40.50.1390,PF07508,Coil
MIKGACYVRVSTDNQLENYSIEEQTDRLKAYCKAKDIQIVKIYTDGGYSGGNVNRPALQQMLQDIGKGLIDSVIVYKLDRLSRSQKDTLMLIEDCFLAKNVDFVSVNENFDTSTPFGRAMIGILSVFAQLEKDQITERFTMGRIGRAKNGYFHGGGNAPTGYDYIDGELIINDYEALQVKDLYNRFLKGYSIHNCWQYMHQKYGGWSNEVSVRNVLKNELYVGKVKFKGVAYQGNHQPIISEEIFRQVQDLFNSSRRTSDTFKRSPFKANTLLSSLVYCGKCGARFHGEHGNYSCYSRTKGDKKYIVDPNCKNKKWKIEELNKLVLDYITRLDFSKLQNSHPAPVPVTDYSLRLTEIDKQIEKLIDLYQVSGIPLESIQKKMDALTKEKEALLNVSKPKNVPITTLTEMITARDTLMSLADTGSLDEKRACLTMIIDRITIDDDNVNIKLKHL

SEQ ID NO: 8521 - protein, 453 aa, Unknown
  Description of Unknown: Integrase B8522 sequence
  PTHR30461:SF3,SM00857,G3DSA:1.10.10.2600,IPR036162,PF13408, IPR025827,G3DSA:3.40.50.1390,IPR006119,IPR038109,SSF53041, PTHR30461,Coil,PS51736,cd00338,PF00239
MECVAYMRVSTEKQAVEGNGLDSQKRDIENYCRKNELVITDWYIDDGYTGANMDRPGLQRLVNDCSRKRVSCVVAFKLDRLSRNMIDGIYLIEKVFQKCNVTFKCVHDSVNYDSPMEQAYTQMMAVFAQLDKNTMMLRMRGGMLERIKQGYWMGGGNLPYCYSYNKEQGILIPIPERAEQARKALELFISGYSDVKIKEICGFKSELVTRNILTGIVNIGMIPYKGKIYQGKHEPIFDKGRFNLAQELRKTRAKSRATCQTEPNLLTGLCYCGVCGCAMRYQKWTNGEHKIYCMSRNKSMSHLPNYNANCDNSLEWADDIEKQVEEEILKISLNLSSYKPKEKATKLEIMQSQLDKEQTKLKRLYNLYADGNDTVLEMIKESESLIKTMKANVLSESKNAADTQKKEFVYENIKKLADVWDNIDKKKKNMILKTIIDKIVIVNGNIEIQLKNF

SEQ ID NO: 8522 - protein, 453 aa, Unknown
  Description of Unknown: Integrase B8523 sequence
  PTHR30461:SF3,SM00857,G3DSA:1.10.10.2600,IPR036162,PF13408, IPR025827,G3DSA:3.40.50.1390,IPR006119,IPR038109,SSF53041, PTHR30461,Coil,PS51736,cd00338, PF00239
MECVAYMRVSTEKQAVEGNGLDSQKRDIENYCRKNELVITDWYIDDGYTGTNMDRPELQRLVNDCSRKRVSCVVAFKLDRLSRNMIDGIYLIEKVFQKYNVVFKCVHDSVNYDSPMEQAYTQMMAVFAQLDKNTMMLRMRGGMLERIKQGYWMGGGNLPYCYSYSKEQGILIPIPERAEQARKGLELFISGYSDAKIKEICGFKSELVTRSILTGVVNIGMIPYKGKIYQGKHEPIFDKDRFNLGLELRKSRCSAKTYCITEPNLLTGLCYCGICGCKMRYQKWGSEKHKIYCCSRNKSLSYLPNYNASCNNSLEWADEIEKQVEEEILKISLDLSSYKPKEKATKLEIMQSQLEKEQIKLKRLYNLYADGNDTVLEMIKELEAQIKEMKLNIAAESKNAINTQKKEFVYENIKKLADIWDKVDKKQKNLILKTIIDKIVIVNGNIEIQLKNF

SEQ ID NO: 8523 - protein, 453 aa, Unknown
  Description of Unknown: Integrase B8524 sequence
  PTHR30461:SF3,IPR036162,PS51737,IPR011109,PTHR30461, PS00397,PF00239,G3DSA:1.10.10.2600,IPR006119,SSF53041, SM00857,IPR025827,IPR038109,PS51736,cd03768, IPR006118,PF13408,G3DSA:3.40.50.1390,PF07508,Coil
MIKGACYVRVSTDNQLENYSIEEQTDRLKAYCKAKDIQIVKIYTDGGYSGGNVNRPALQQMLQDIGKGLIDSVIVYKLDRLSRSQKDTLMLIEDCFLAKNVDFVSVNENFDTSTPFGRAMIGILSVFAQLEKDQITERFTMGRIGRAKNGYFHGGGNAPTGYDYIDGELIINDYEALQVKDLYNRFLKGYSIHNCWQYMQQKYGGWSSEVLVRNVLRNELYIGKVKFKGVAYQGNHQPIISEDLFRQVQDLFNSSKRSSNTFKRSPFKASTLLSSIVYCGKCGARFHGEHGNYSCYSRTKGDKKYIVDPNCKNKKWKIEELDRLVLDYITRLDFSKLHNSHPVQIPSTDYSFRLAEIDKQIGKLIDLYQVSGISLETIQEKMNALNKEKEALLIISKPKNVPVTTLAEMITARDTLMSLSDSGSLDEKRACLTMIIDRIIIDDDNVNIKLKQL

SEQ ID NO: 8524 - protein, 453 aa, Unknown
  Description of Unknown: Integrase B8525 sequence
  PTHR30461:SF3,SM00857,G3DSA:1.10.10.2600,IPR036162,PF13408, IPR025827,G3DSA:3.40.50.1390,IPR006119,IPR038109,SSF53041, PTHR30461,Coil,PS51736,cd00338,PF00239
MECVAYMRVSTEKQAVEGNGLDSQKRDIENYCRKNELVITDWYIDDGYTGANMDRPGLQRLVNDCSRKRISCVVAFKLDRLSRNMIDGIYLIEKVFQKCNVTFKCVHDSVNYDSPMEQAYTQMMAVFAQLDKNTMMLRMRGGMLERIKQGYWMGGGNLPYCYSYSKEQGILIPIPERAEQARKALELFISGYSDVKIKEICGFKSELVTRNILTGIVNIGMIPYKGKIYQGKHEPIFDKGRFNLAQELRKTRAKSRATCQTEPNLLTGLCYCGVCGCAMRYQKWTNGEHKIYCMSRNKSMSYLPNYNANCDNSLEWADDIEKQVEKEILKISLNLSSYKPKEKATKLEIMQSQLDKEQTKLKRLYNLYADGNDTVLEMIKESESLIKTMKANVLSESKSTANTQKKEFVYENIKKLADVWDNIDKKKKNMILKTIIDKIVIVNGNIEIQLKNF

SEQ ID NO: 8525 - protein, 453 aa, Unknown
  Description of Unknown: Integrase B8526 sequence
  PTHR30461:SF3,cd00338,SM00857,G3DSA:1.10.10.2600,IPR036162, PF13408,PS51737,G3DSA:3.40.50.1390,IPR025827,IPR006119, IPR038109,SSF53041,IPR011109,PTHR30461, PS51736,Coil,PF00239
MECVAYMRVSTEKQAEEGNGLDSQRRDIENYCRKNELVITDWYIDDGYTGANMDRPELQRLVSDCDRKRVGYVVAFKLDRISRSMVDGIYLIERVFLKNNVEFKCVHDSICYDNPMEQAYTQMMAVFAQLDKNTMLLRMRGGMLERVKQGYWMGGGNLPYCYTYSKDTGTLIPIPERKEQANKAMDLFLQGYSDVKIRDMLGFKSEFVVKQVLTSPVNIGMIPYKGNIYQGLHEPIFNKEVFEKAQQFRAIRKNKRASCHNIQTNLLTGLCYCGICGCAMRYQKWTHGKHKIYCCSRNKDLHYLPNHNPNCNNTLEWASDIEKAVEDEILLISANISDYKPRVKESKLEILQGQLEKEQTKRKRLYNLYAEGNDDVISMIKEIEKVIEDIRKQIREESAIETNKTRQNVFKNIKNLADIWEDIDKKQKNMLLKSIIEKIVISNGNIEIKLKDF

SEQ ID NO: 8526 - protein, 453 aa, Unknown
  Description of Unknown: Integrase B8527 sequence
  PTHR30461:SF3,SM00857,IPR006118,G3DSA:1.10.10.2600,IPR036162, PS51737,G3DSA:3.40.50.1390,Coil,IPR006119,IPR038109, IPR011109,SSF53041,PTHR30461,PS00397,PS51736, cd00338,PF00239
MECVAYIRVSTERQVEEGYGLESQKRDIEEYCKKNEMLITDWYIDAGLSGMDMTKRVELQRLISDISKINDIVVYKLDRLARDSVDALYMIEKLFTPKGVRVNSVHDFARYETPQDKFQTHIMAAVAEYDRNTMLLRMRGGMLERVKNGYWMGGGNTPYCYQYDKNLGYLVPIPERAEQANRAMDLFIEGMSDVKIQRLLGYKSEFVVRNILTGVVNIGYIPYKGGTYKGLHEPIFEHDKFYLAQELRKSRRKQHVYSFTEPHLLTGLCYCKTCGCKMRYQKITGMGIHKIYCCSHDKYLDYLPNYNTDCDNPGAWASDIEIAFEHEILGISINLSQYKPKAKETKLQILTNQLEKQKSKLKRLYTLYAEGNDMVLDMIKTLETEIRETTEKISAERKNGQHEQKKEFVYENIKKLADIWDGISKSQKNSILKTIIDKVIVGKDDIEIQLKNF

SEQ ID NO: 8527 - protein, 453 aa, Unknown
  Description of Unknown: Integrase B8528 sequence
  PTHR30461:SF3,SM00857,G3DSA:1.10.10.2600,IPR036162,PF13408, IPR025827,G3DSA:3.40.50.1390,IPR006119,IPR038109,SSF53041, PTHR30461,Coil,PS51736,cd00338,PF00239
MECVAYMRVSTEKQAEEGNGLESQKRDILDYCTKNELIVTDWYVDDGYTGANMNRPELQRLVADCKHKRISCVVAFKLDRLSRNMIDGLYMIEKIFQPNGVQFKCVHDSVSYDSPMEQAYTQMMAVFAQLDKNTMMLRMRGGMLERVKQGYWMGGGNLPYCYSYDKDSGILIPIPERKVQANKALELYIKGYSDIKICKICGYKGEKVVRQILTTPVNIGMIPYKGKIYQGLHEPIFNKEQFELAQQLRKSRSCNKASCITEPNLLTGLCYCGVCGCAMRYQKWTHGKHKIYCMSRNKAMSYLPNHNPACNNSLEWADDIEEQVEKEMLKISLDLSSYKPKEKETKLDIMQSQLDKEQAKLKRLYGLYADGNDTVLSMIKELEANISAIKENISEERKNFSVKQKNTIVYDEIKKLADVWDSIDKKQKNMILKTIIDKIIIVNGNIEIQLKNF

SEQ ID NO: 8528 - protein, 453 aa, Unknown
  Description of Unknown: Integrase B8529 sequence
  PTHR30461:SF3,SM00857,G3DSA:1.10.10.2600,IPR036162,PF13408, IPR025827,G3DSA:3.40.50.1390,PS51737,IPR006119,IPR038109, SSF53041,IPR011109,PTHR30461,Coil, PS51736,cd00338,PF00239
MECVAYMRVSTEKQAEEGNGLDSQKRDIELFCRKNELVVADWYVDDGYTGANMDRPELQRLINDCIKKRVKCVVAFKLDRLSRSMIDGLYIIERVFQPNQVLFKCVHDSVSYDSPMEQAYTQMMAVFAQLDKNTMMLRMRGGMLERIKQGYWIGGANTPYCYNYSKEKGILVPIPERKEQANRALDMFIGGYSDLYIKESLGFHSEVLVRNVLTGVVNIGMIPYKGNVYQGLHEPIFDKERFELAQEIRKSRRKNKTACHTDANLLTGLCYCGVCGCKMRYQKWTHGKHKIYCCSRDKAMKYLPNFNPDCNNSLEWAADIEKQVESEILKISLNLSECKPIEKQSKLEIMQSQFEKEQVKLKRLYVLYSDGNDTVLEMIKNTEKSISEMKVKITEEEKNERNSQKKEVVYENIKKLADVWAHIDKKEKNNILKSIISRIVIVNGDVEIQLKNF

SEQ ID NO: 8529 - protein, 453 aa, Unknown
  Description of Unknown: Integrase B8530 sequence
  PTHR30461:SF3,SM00857,G3DSA:1.10.10.2600,IPR036162,PF13408, PS51737,G3DSA:3.40.50.1390,IPR025827,IPR006119,IPR038109, PF07508,SSF53041,IPR011109,PTHR30461,PS51736, cd00338,PF00239
MSAGKKPLRVAAYCRVSTDGDDQANSFESQQRYFRAYIAQQPHWELAGIFADEGLSGTSTKKRLAFQRMIACARAGTLDLIVTKEISRFARNTLDSIYYTRELKRLGVGVLFLSDNLCTLDGDAELRLAILSSIAQEESRRTSERVKWGQKRRMEQGVVFGRDLLGYDVRGGALYVNEAGAQTVREIFRKCVDEGKGAHTIARELNAAGIPAARGGAWRSSVILRILRNEKYCGDLVQKKTYTPDYLTHEKKYNHGQEDYIIVREHHAPIIPRATFESAGRILDQRAAAPTGQRKYSRRYLLSGKLRCGICGAVCAARKKTRRDGTDAISWRCGNAVKYGRPHTDPDGRSRGCTGESLRDEDALQILTQVWSALPLERDVIAADVLAAVRAVTPHEQADAIASEIHAMLRGDAALSAQLLAQMTVYDRTHVTLTLRGFLGKWCFARTQKAASP

SEQ ID NO: 8530 - protein, 453 aa, Unknown
  Description of Unknown: Integrase B8531 sequence
  PTHR30461:SF3,SM00857,G3DSA:1.10.10.2600,IPR036162,PF13408, IPR025827,PS51737,G3DSA:3.40.50.1390,IPR006119,IPR038109, IPR011109,SSF53041,PF00239,PTHR30461,PS51736, Coil,cd00338
MECVAYMRVSTEKQAEEGNGLDSQKRDIELFCRKNELVVSDWYVDDGYTGANMDRPELQRLINDCIKKRVKCVVAFKLDRLSRSMIDGLYIIERVFQPNQVLFKCVHDSVSYDSPMEQAYTQMMAVFAQLDKNTMMLRMRGGMLERIKQGYWIGGANTPYCYNYSKEKGILIPIPERKEQANRALDMFIGGYSDLYIKESLGFHSEVLVRNVLTGVVNIGMIPYKGNVYQGLHEPIFDKERFELAQEIRKSRRKNKTACHTDANLLTGLCYCGVCGCKMRYQKWTHGKHKIYCCSRDKAMKYLPNFNPDCNNSLEWAADIEKQVESEILKISLNLSECKPIEKQSKLEIMQSQFEKEQVKLKRLYVLYSDGNDTVLEMIKNTEKSISEMKVKINEEEKNERNSQKKEVVYENIKKLADVWAHIDKKEKNNILKSIISRIVIVNGDVEIQLKNF

SEQ ID NO: 8531 - protein, 453 aa, Unknown
  Description of Unknown: Integrase B8532 sequence
  PTHR30461:SF3,SM00857,G3DSA:1.10.10.2600,IPR036162,PF13408, IPR025827,PS51737,G3DSA:3.40.50.1390,IPR006119,IPR038109, SSF53041,IPR011109,PTHR30461,Coil,PS51736, cd00338,PF00239
MECVAYMRVSTEKQAEEGNGLESQKRDILDYCSKNELIVTDWYVDDGYTGANMNRPELQRLVADCKHKRIYCVVAFKLDRLSRNMIDGLYMIEKIFQPNGVQFKCVHDSVSYDSPMEQAYTQMMAVFAQLDKNTMMLRMRGGMLERVKQGYWSGGGNLPYCYSYDKEQGILIPIPERAEQANKALELYIRGYSDVKICKICGYKGEKVVRQILTTPVNVGMIPYKGKIYQGLHEPIFNKEQFELAQQLRKSRSCNKASCITEPNLLTGLCYCGVCGCAMRYQKWTHGKHKIYCMSRNKAMSYLPNHNPDCNNSLEWADDIEEQVEKEMLKISLDLSSYKPKEKETKLDIMQSQLDKEQAKLKRLYGLYADGNDTVLSMIKELEANISAIKENISEERKNFSVKQKNTIVYDEIKKLADVWDSIDKKQKNMILKTIIDKIIIVNGNIEIQLKNF

SEQ ID NO: 8532 - protein, 453 aa, Unknown
  Description of Unknown: Integrase B8533 sequence
  PTHR30461:SF3,SM00857,G3DSA:1.10.10.2600,IPR036162,PF13408, PS51737,IPR025827,G3DSA:3.40.50.1390,IPR006119,IPR038109, PF07508,IPR011109,SSF53041,PTHR30461,Coil, PS51736,cd00338,PF00239
MECVAYMRVSTEKQVEEGNGLESQKRDILDYCSKNELIVTDWYIDDGYTGANMNRPELQRLISDCGKKKVKCVVAFKLDRISRSMIDGLYMIERIFQPNNVIFKCVHDSVSYNSPMEQAYTQMMAVFAQLDKNTMMLRMRGGMLERVKQGYWPGGGNTPYCYSYSKDQGILIPIPERAEQARKGLELYIKGYSDIKICKICGYKGEKVVRQILTSPVNIGMIPYKGKIYQGLHEPIFDKELFELAQQLRKSRSLNKASCITEPNLLTGLCYCGVCGCAMRYQKWTHGKHKIYCMSRNKSMSYLPNHNPDCNNSLEWADDIEEQVEREMLKISLDLSSYKPKEKETKLDIMQSQLDKEQTKLKRLYGLYADGNDTVLSMIKELEGNISAIKENIAEEQKNFSARQKNAIVYDEIKKLADVWGNIDKKQKNMILKTIIDKIIIVNGNIEIQLKSF

SEQ ID NO: 8533 - protein, 453 aa, Unknown
  Description of Unknown: Integrase B8534 sequence
  PTHR30461:SF3,SM00857,G3DSA:1.10.10.2600,IPR036162,PF13408, IPR025827,G3DSA:3.40.50.1390,IPR006119,IPR038109,SSF53041, PTHR30461,Coil,PS51736,cd00338,PF00239
MECVAYMRVSTEKQAVEGNGLDSQKRDIENYCRKNELVITDWYIDDGYTGTNMDRPELQRLVNDCSRKRVSCVVAFKLDRLSRNMIDGIYLIEKVFQKYNVVFKCVHDSVNYDSPMEQAYTQMMAVFAQLDKNTMLLRMRGGMLERIKQGYWMGGGNLPYCYSYSKEQGILIPIPERAEQARKGLELFISGYSDAKIKEICGFKSELVTRSILTGVVNIGMIPYKGKIYQGKHEPIFDKDRFNLGLELRKSRCSAKTYCITEPNLLTGLCYCGICGCKMRYQKWGSEKHKIYCCSRNKSLSYLPNYNASCNNSLEWADEIEKQVEEEILKISLDLSSYKPKEKATKLEIMQSQLEKEQIKLKRLYNLYADGNDTVLEMIKELEAQIKEMKLNIAAESKNAINTQKKEFVYENIKKLADIWDKVDKKQKNLILKTIIDKIVIVNGNIEIQLKNF

SEQ ID NO: 8534 - protein, 453 aa, Unknown
  Description of Unknown: Integrase B8535 sequence
  cd00338,SM00857,IPR006118,G3DSA:1.10.10.2600, IPR036162,PF13408,IPR025827,G3DSA:3.40.50.1390, IPR006119,IPR038109,SSF53041,PTHR30461, PS00397,PS51736,Coil,PF00239
MECVAYLRVSTEKQAEEGHGLESQKRDIENYCRKNELIIVDWYVDDGYTGSNMDRPEFQRLISDCYAKRVKCVVAYKLDRISRTMLDSIYVIERIFQPNNVRLECVHDAVNYNDPMQQAYTQMMAVFAQLDKNTMMLRMRGGILERVKKGYWPGGGIKPYCYRYDKEIGILIPIPERAERARQALDLFIQGYSDEKIMRMLGFRTEGVVRNILTGVVNIGKIKYKGNVYQGRHEPIFDVEKFNLGLEIRKTRSKARAYCRTEPNLLTGLCYCGVCGCKMRYQKWGSDRRKMYCCSRNRYLDYLPNYNHDCDNSVEWADKIEEQVESEILKISLNLSSYKPKEKATKLEIMQSQLDKSKTKLRRLYELYADGNDMVLDMISNLENEIEISKERIKEESKNIQKENKKEYVYENIKNLADVWDTIDKTKKNTILKSIISKVVVVNGNVDIQLKSF

SEQ ID NO: 8535 - protein, 453 aa, Unknown
  Description of Unknown: Integrase B8536 sequence
  PTHR30461:SF3,IPR036162,PS51737,IPR011109,PTHR30461, PS00397,PF00239,G3DSA:1.10.10.2600,IPR006119,SSF53041, SM00857,IPR025827,IPR038109,PS51736,cd03768, IPR006118,PF13408,G3DSA:3.40.50.1390,PF07508,Coil
MIKGACYVRVSTDNQLENYSIEEQTDRLKAYCKAKDIQIVKIYTDGGYSGGNINRPALQQMLQDIGKGLIDSVIVYKLDRLSRSQKDTLMLIEDCFLAKNVDFVSVNENFDTSTPFGRAMIGILSVFAQLEKDQITERFTMGRIGRAKNGYFHGGGNTPTGYDYIDGELIINDYEALQVKDLYNRFLKGYSIHNCWQYMHQKYGGWSNEVSVRNVLKNELYIGKVKFKGVAYQGNHQPIISEDLFRQVQDLFNSSKRSSNTFKRSPFKASTLLSSIVYCGKCGARFHGEHGNYSCYSRTKGDKKYIVDPNCKNKKWKIEELDKLVLDYITRLDFSKLQNSHPAPVPVTDYSLRLTEIDKQIEKLIDLYQVSGIPLESIQKKMDALTKEKEALLNVSKPKNVPITTLAEMITARDTLMSLADTGSLDEKRACLTMIIDRIIIDDDNVNIKLKQL

SEQ ID NO: 8536 - protein, 453 aa, Unknown
  Description of Unknown: Integrase B8537 sequence
  cd00338,SM00857,G3DSA:1.10.10.2600,IPR036162,PF13408, IPR025827,G3DSA:3.40.50.1390,PS51737,IPR006119,IPR038109, SSF53041,IPR011109,PTHR30461,PS51736,Coil, PF00239
MECVAYMRVSTEKQVEEGYGLESQQRDIKEYCQKNNMIISHWYIDAGLTGMEMSKRVALQELISDLKKIDKVVIYKLDRLSRDSVDALNMIEKIFVPRNVEVLSVHDFAKYKTPQDKFQTQIMAAVAEYDRNTMLLRMRGGMLERIKQGYWPGGGNTPYCYSYSKETGTLVPIPGRKKQANEAIDLFLQGYSDNKIRDMLGFKSEFVVRHILTSKVNIGYIPYKGKIYKGKHEPIFELDKFNLAQEVRKNRRKKKTTCISKEPNLLTGLCYCGVCGCAMRYQKWTHGKHKIYCMSRNKSMNYLPNYNADCNNSLEWAVDIEKQVEEEIIKISLNLSSEKPVAKQSKIEILQSQIKKEENRRKRLFNLYADGNDDVLVSIKEINNTIKDLEEQLENEISNANINKKKSITYKNIKKIADVWDSIDKRDKNTILKSIIDKIVIVNGNIEIQLKNF

SEQ ID NO: 8537 - protein, 453 aa, Unknown
  Description of Unknown: Integrase B8538 sequence
  SM00857,IPR006118,G3DSA:1.10.10.2600,IPR036162,PS51737, G3DSA:3.40.50.1390,Coil,IPR006119,IPR038109,SSF53041, IPR011109,PTHR30461,PS00397,PS51736,cd00338, PF00239
MECVAYIRVSTERQVEEGYGLESQKRDIEEYCKKNEMLITDWYIDAGLSGMDMSKRVELQRLISDISKINNIVVYKLDRLARDSVDALYMIEKLFTPKGVRVNSVHDFARYETPQDKFQTHIMAAVAEYDRNTMLLRMRGGMLERVKNGYWMGGGNTPYCYRYDKNLGYLVPIPERAEQANRAMDLFIDGMSDVKIQRLLGYKSEFVVRNILTGVVNIGYIPYKGGTYKGLHESIFEHDKFYLAQELRKSRRKQHIYSFTEPHLLTGLCYCKTCGCKMRYQKITGMGIHKIYCCSHDKYLDYLPNYNADCDNPGAWASDIEKAFEHEILDISINLSQYKPKAKETKLQILTNQLEKQKSKLKRLYTLYAEGNDMVLDMIKTLETEIRETTEKISAERKNGQHEQKKEFVYENIKKLADIWDGISKSQKNSILKTIIDKVIVGKDDIEIQLKNF

SEQ ID NO: 8538 - protein, 453 aa, Unknown
  Description of Unknown: Integrase B8539 sequence
  PTHR30461:SF3,SM00857,G3DSA:1.10.10.2600,IPR036162,PF13408, IPR025827,PS51737,G3DSA:3.40.50.1390,IPR006119,IPR038109, IPR011109,SSF53041,PTHR30461,Coil,PS51736, cd00338,PF00239
MECVAYMRVSTEKQAEEGNGLDSQKRDIELFCRKNELVVSDWYVDDGYTGANMDRPELQRLINDCIKKRVKCVVAFKLDRLSRSMIDGLYIIERVFQPNQVLFKCVHDSVSYDSPMEQAYTQMMAVFAQLDKNTMMLRMRGGMLERIKQGYWIGGANTPYCYNYSKEKGILIPIPERKEQANRALDMFIGGYSDLYIKESLGFHSEVLVRNVLTGVVNIGMIPYKGNVYQGLHEPIFDKERFELAQEIRKSRRKNKTACHTDANLLTGLCYCGVCGCKMRYQKWTHGKHKIYCCSRDKAMKYLPNFNPDCNNSLEWAADIEKQVESEILKISLNLSECKPIEKQSKLEIMQSQFEKEQVKLKRLYVLYSDGNDTVLEMIKNTEKSISEMKVKITEEEKNERNSQKKEVVYENIKKLADVWAHIDKKEKNNILKSIISRIVIVNGDVEIQLKNF

SEQ ID NO: 8539 - protein, 453 aa, Unknown
  Description of Unknown: Integrase B8540 sequence
  PTHR30461:SF3,SM00857,IPR006118,G3DSA:1.10.10.2600,IPR036162, PS51737,G3DSA:3.40.50.1390,Coil,IPR006119,IPR038109, SSF53041,IPR011109,PTHR30461,PS00397,PS51736, cd00338,PF00239
MECVAYIRVSTERQVEEGYGLESQKRDIEEYCKKNEMLITDWYIDAGLSGMDMSKRVELQRLISDISKINNIVVYKLDRLARDSVDALYMIEKLFTPKGVRVNSVHDFARYETPQDKFQTHIMAAVAEYDRNTMLLRMRGGMLERVKNGYWMGGGNTPYCYRYDKNLGYLVPIPERAEQANRAMDLFIGGMSDVKIQRLLGYKSEFVVRNILTGVVNIGYIPYKGGTYKGLHEPIFEHDKFYLAQELRKSRRKQHVYSFTEPHLLTGLCYCKTCGCKMRYQKITGMGIHKIYCCSHDKYLDYLPNYNTDCDNPGAWASDIEIAFEHEILGISINLSQYKPKAKETKLQILTNQLEKQKSKLKRLYTLYAEGNDMVLDMIKTLETEIRETTEKISAERKNGQHEQKKEFVYENIKKLADIWDGISKSQKNSILKTIIDKVIVGKDDIEIQLKNF

SEQ ID NO: 8540 - protein, 453 aa, Unknown
  Description of Unknown: Integrase B8541 sequence
  SM00857,IPR006118,G3DSA:1.10.10.2600,IPR036162,PS51737, G3DSA:3.40.50.1390,Coil,IPR006119,IPR038109,SSF53041, IPR011109,PTHR30461,PS00397,PS51736,cd00338, PF00239
MECVAYIRVSTERQVEEGYGLESQKRDIEEYCKKNEMLITDWYIDAGLSGMDMSKRVELQRLISDISKINNIVVYKLDRLARDSVDALYMIEKLFTPKGVRVNSVHDFARYETPQDKFQTHIMAAVAEYDRNTMLLRMRGGMLERVKNGYWMGGGNTPYCYRYDKNLGYLVPIPERAEQANRAMDLFIGGMSDVKIKRLLGYKSEFVVRNILTGVVNIGYIPYKGGTYKGLHEPIFEHDKFYLAQELRKSRRKQHVYSFTEPHLLTGLCYCKTCGCKMRYQKITGMGIHKIYCCSHDKYLDYLPNYNADCDNPGAWASDIEKAFEHEILDISINLSQYKPKAKETKLQILTNQLEKQKAKLKRLYTLYAEGNDMVLDMIKTLETEIRETTKKISTERKDGQHEQKKEFVYENIKKLADIWDGISKSQKNSILKTIIDKVIVGKDDIEIQLKNF

SEQ ID NO: 8541 - protein, 453 aa, Unknown
  Description of Unknown: Integrase B8542 sequence
  PTHR30461:SF3,SM00857,G3DSA:1.10.10.2600,IPR036162,PF13408, IPR025827,G3DSA:3.40.50.1390,IPR006119,IPR038109,SSF53041, PTHR30461,Coil,PS51736,cd00338,PF00239
MKCVAYMRVSTEKQAEEGNGLESQKRDIENYCRKNELIIADWYVDEGYTGSNMNRPELQRLITDCSRKKVNCVVAFKLDRISRSMVDGIYIIEKVFQSNNVAFKCVHDSISYDSPMEQAYTQMMAVFAQLDKNTMMLRMRGGMLERIKQGYWWGGGNTPYCYRYDKEQGILIPIQERAEQARKALELFISGYSDAKIKEICGFKSELVTRKVLTGVVNIGMIPYKGNIYQGKHKPIFDKDRFELAQELRKSRCSAKISCFTEPNLLTGLCYCGVCGCKMRYQKWSNGNHKIYCCSRNKGLKYLPNYNPNCNNSLEWADDIEKQVTDEILKISLNLSSYKPKAKETKLQIMQSQLEREQTKLKRLYSLYADGNDTVLEMIKDLESQISKTKEDISVESKNAINTQKKEFTYQNIKKLADVWDNIDKKQKNFILKTIIDKVIIVNGNVEIQLKNF

SEQ ID NO: 8542 - protein, 453 aa, Unknown
  Description of Unknown: Integrase B8543 sequence
  PTHR30461:SF3,cd00338,SM00857,G3DSA:1.10.10.2600,IPR036162, PF13408,IPR025827,G3DSA:3.40.50.1390,IPR006119,IPR038109, SSF53041,PTHR30461,PS51736,Coil, PF00239
MECVAYMRVSTEKQAVEGNGLDSQKRDIENYCRKNELVITDWYIDDGYTGTNMDRPELQRLVNDCSRKRVSCVVAFKLDRLSRNMIDGIYLIEKVFQKYNVVFKCVHDSVNYDSPMEQAYTQMMAVFAQLDKNTMMLRMRGGMLERIKQGYWMGGGNLPYCYSYSKEQGILIPIPERAEQARKGLELFISGYSDAKIKEICGFKSELVTRSILTGVVNIGMIPYKGKIYQGKHEPIFDKDRFNLGLELRKSRCSAKTYCITEPNLLTGLCYCGICGCKMRYQKWGSEKHKIYCCSRNKSLSYLPNYNASCNNSLEWADEIEKQVEEEILKISLDLSFYKPKEKATKLEIMQSQLDKEQTKLKRLYNLYADGNDTVLEMIKELEAQIKEMKANIAVESKNAINTQKKEFVYENIKKLADIWDKVDKKQKNLILKTIIDKIVIVNGNIEIQLKNF

SEQ ID NO: 8543 - protein, 453 aa, Unknown
  Description of Unknown: Integrase B8544 sequence
  SM00857,G3DSA:1.10.10.2600,IPR036162,PF13408,IPR025827, G3DSA:3.40.50.1390,PS51737,IPR006119,IPR038109,SSF53041, IPR011109,PTHR30461,Coil,PS51736,cd00338, PF00239
MECVAYMRVSTEKQAEEGNGLDSQKRDIQNYCRKNKLIITDWYIDDGYTGSNMDRPELQRLISDCSKKRVKCVVAFKLDRLSRSMIDGIYMIERIFQPNNIEFYCVHDSVSYDSPMEQAYTQMMAVFSQLDKNTMLLRMRGGMLERVKKGYWMGGGNTPYCYEYDKEQGILVPIPEKAEQARQALELFIDGYSDRSISDMLHFSSDIVVSRILTSPVNIGMIPYKGKMYQGLHQPVFQRDRFELAQEVRKSRRKNRTYRKTEPNLLTGLCYCGVCGCKMRYQKWGCEKQKIHCCSRDKYLQYLPNYNANCDNMAIWADEIEKQVEEEIIKISLNLSEYKPKQKESKIEIMQKNLNRERTKLKRLYNLYAEGNDTVLEMIKEIEKTIGESKKRIEEEYKNIGNTNKKEYVYENINSLADVWNTISKTGKNSILKSIVEKIVIVNGDVEIVLKNF

SEQ ID NO: 8544 - protein, 453 aa, Unknown
  Description of Unknown: Integrase B8545 sequence
  PTHR30461:SF3,SM00857,G3DSA:1.10.10.2600,IPR036162,PF13408, IPR025827,G3DSA:3.40.50.1390,IPR006119,IPR038109,SSF53041, PTHR30461,Coil,PS51736,cd00338,PF00239
MECVAYMRVSTEKQAVEGNGLDSQKRDIENYCRKNELVITDWYIDDGYTGTNMDRPELQRLVNDCSRKRVSCVVAFKLDRLSRNMIDGIYLIEKVFQKYNVVFKCVHDSVNYDSPMEQAYTQMMAVFAQLDKNTMMLRMRGGMLERIKQGYWMGGGNLPYCYSYSKEQGILIPIPERAEQARKGLELFISGYSDAKIKEICGFKSELVTRSILTGVVNIGMIPYKGKIYQGKHEPIFDKDRFNLGLELRKSRCSAKTYCITEPNLLTGLCYCGICGCKMRYQKWGSEKHKIYCCSRNKSLSYLPNYNASCNNSLEWADEIEKQVEEEILKISLDLSSYKPKEKATKLEIMQSQLDKEQTKLKRLYNLYADGNDTVLEMIKELEAQIKEMKANIAVESKNAINTQKKEFVYENIKKLADIWDKVDKKQKNLILKTIIDKIVIVNGNIEIQLKNF

SEQ ID NO: 8545 - protein, 453 aa, Unknown
  Description of Unknown: Integrase B8546 sequence
  SM00857,G3DSA:1.10.10.2600,IPR036162,PF13408, IPR025827,PS51737,G3DSA:3.40.50.1390,IPR006119, IPR038109,SSF53041,IPR011109,PTHR30461, Coil,PS51736,cd00338,PF00239
MECVAYMRVSTEKQAEEGNGLDSQKRDIQNYCRKNKLIITDWYIDDGYTGSNMDRPELQRLINDCSKKRVKCVVAFKLDRLSRSMIDGIYMIERIFQPNNIEFYCVHDSVSYDSPMEQAYTQMMAVFSQLDKNTMLLRMRGGMLERVKKGYWMGGGNTPYCYEYDKEQGILVPIPEKAEQARQALELFVDGYSDRSISDMLHFSSDIVVSRILTSPVNIGMIPYKGKMYQGRHQPVFQRDRFELAQEVRKSRRKNRTYRKTEPNLLTGLCYCGVCGCKMRYQKWGCEKQKIHCCSRDKYLQYLPNYSANCDNMAIWADEIEKQVEEEIIKISLNLSEYKPKQKESKIEIMQKNLNREKTKLKRLYNLYAEGNDTVLEMVKELEKTIGESKKRIEEEYKNIGNTNKKEYVYENIKSLADVWNTISKTGKNSILKSIVEKIVIVNGDVEIVLKNF

SEQ ID NO: 8546 - protein, 453 aa, Unknown
  Description of Unknown: Integrase B8547 sequence
  PTHR30461:SF3,SM00857,G3DSA:1.10.10.2600,IPR036162,PF13408, IPR025827,G3DSA:3.40.50.1390,IPR006119,IPR038109,SSF53041, PTHR30461,Coil,PS51736,cd00338,PF00239
MECVAYMRVSTEKQAVEGNGLDSQKRDIENYCRKNELVITDWYIDDGYTGTNMDRPELQRLVNDCSRKRVSCVVAFKLDRLSRNMIDGIYLIEKVFQKYNVVFKCVHDSVNYDSPMEQAYTQMMAVFAQLDKNTMMLRMRGGMLERIKQGYWMGGGNLPYCYSYSKEQGILIPIPERAEQARKGLELFISGYSDAKIKEICGFKSELVTRNILTGVVNIGMIPYKGKIYQGKHEPIFDKDRFNLGLELRKSRCSAKTYCITEPNLLTGLCYCGICGCKMRYQKWGSEKHKIYCCSRNKSLSYLPNYNASCNNSLEWADEIEKQVEEEILKISLDLSSYKPKEKATKLEIMQSQLEKEQIKLKRLYNLYADGNDTVLEMIKELEAQIKEMKLNITAESKNAINTQKKEFVYENIKKLADIWDKVDKKQKNLILKTIIDKIVIVNGNIEIQLKNF

SEQ ID NO: 8547 - protein, 453 aa, Unknown
  Description of Unknown: Integrase B8548 sequence
  SM00857,IPR006118,G3DSA:1.10.10.2600,IPR036162, PS51737,G3DSA:3.40.50.1390,Coil,IPR006119, IPR038109,IPR011109,SSF53041,PTHR30461, PS00397,PS51736,cd00338,PF00239
MECVAYIRVSTERQVEEGYGLESQKRDIEEYCKKNEMLITDWYIDAGLSGMDMSKRVELQRLISDISKINNIVVYKLDRLARDSVDALYMIEKLFTPKGVRVNSVHDFARYETPQDKFQTHIMAAVAEYDRNTMLLRMRGGMLERVKNGYWMGGGNTPYCYRYDKNLGYLVPIPERAEQANRAMDLFIDGMSDVKIQRLLGYKSEFVVRNILTGVVNIGYIPYKGGTYKGLHEPIFERDKFYLAQELRKSRRKQHVYSFTEPHLLTGLCYCKTCGCKMRYQKITGMGIHKIYCCSHDKYLDYLPNYNADCDNPGAWASDIEKAFEHEILDISINLSQYKPKAKETKLQILTNQLEKQKAKLKRLYTLYAEGNDMVLDMIKTLETEIRETTEKISTERKNGQHEQKKEFVYENIKKLADIWDGISKSQKNSILKTIIDKVIVGKDDIEIQLKNF

SEQ ID NO: 8548 - protein, 453 aa, Unknown
  Description of Unknown: Integrase B8549 sequence
  PTHR30461:SF3,SM00857,G3DSA:1.10.10.2600,IPR036162,PF13408, IPR025827,G3DSA:3.40.50.1390,IPR006119,IPR038109,SSF53041, PTHR30461,Coil,PS51736,cd00338,PF00239
MECVAYMRVSTEKQAVEGNGLDSQKRDIENYCRKNELVITDWYIDDGYTGANMDRPGLQRLVNDCSRKRVSCVVAFKLDRLSRNMIDGIYLIEKVFQKCNVTFKCVHDSVNYDSPMEQAYTQMMAVFAQLDKNTMMLRMRGGMLERIKQGYWMGGGNLPYCYSYSKEQGILIPIPERAEQARKALELFISGYSDVKIKEICGFKSELVTRNILTGIVNIGMIPYKGKIYQGKHEPIFGKGRFNLAQELRKTRAKSRATCQTEPNLLTGLCYCGVCGCAMRYQKWTNGEHKIYCMSRNKSMSYLPNYNANCNNSLEWADDIEKQVEKEVLKISLNLSSYKPKEKATKLEIMQSQLDKEQTKLKRLYNLYADGNDTVLEMIKESESLIKTMKANVLSESKSTANTQKKEFVYENIKKLADVWDNIDKKKKNMILKTIIDKIVIVNGNIEIQLKNF

SEQ ID NO: 8549 - protein, 453 aa, Unknown
  Description of Unknown: Integrase B8550 sequence
  PTHR30461:SF3,SM00857,G3DSA:1.10.10.2600,IPR036162,PF13408, PS51737,IPR025827,G3DSA:3.40.50.1390,IPR006119,IPR038109, PF07508,IPR011109,SSF53041,PTHR30461, Coil,PS51736,cd00338,PF00239
MECVAYMRVSTERQAEEGNGLESQKRDILDYCSKSELIVTDWYVDDGYTGANMNRPELQRLVTDCKHKRISCVVAFKLDRLSRNMIDGLYMIEKIFQPNGVQFKCVHDSVSYDSPMEQAYTQMMAVFAQLDKNTMMLRMRGGMLERVKQGYWPGGGNTPYCYSYSKDQGILIPIPERAEQARKGLELYIKGYSDIKICKICGYKGEKVVRQILTSPVNIGMIPYKGKIYQGLHEPIFDKELFELAQQLRKSRSLNKASCITEPNLLTGLCYCGVCGCAMRYQKWTHGKHKIYCMSRNKSMSYLPNHNPDCNNSLEWADDIEEQVEREMLKISLDLSSYKPKEKETKLDIMQSQLDKEQTKLKRLYGLYADGNDTVLSMIKELEGNISAIKENIAEEQKNFSARQKNAIVYDEIKKLADVWGNIDKKQKNMILKTIIDKIIIVNGNIEIQLKSF

SEQ ID NO: 8550 - protein, 453 aa, Unknown
  Description of Unknown: Integrase B8551 sequence
  PTHR30461:SF3,SM00857,G3DSA:1.10.10.2600,IPR036162,PF13408, IPR025827,G3DSA:3.40.50.1390,IPR006119,IPR038109,SSF53041, PTHR30461,Coil,PS51736,cd00338,PF00239
MECVAYMRVSTEKQAEEGNGLESQKRDIENYCRRNELIVTDWYIDDGYTGANMNRPELQRLISDCGKKKVKCVVAFKLDRISRSMIDGLYMIERIFQPNNVIFKCVHDSVSYNSPMEQAYTQMMAVFAQLDKNTMMLRMRGGMLERVKQGYWMGGGNLPYCYSYSKEQGILIPIPERAEQARKALELFISGYSDVKIKEICGFKGERIVYNVLTSVINIGMIPYKGEVYQGKHEPIFDKDKFNLGLELRKSRRSAKACCKTEPNLLTGLCYCGVCGCAMRYQKWTNGKHKIYCMSRNKSMSYLPNYNANCNNSIEWADYIEKQVEEEILKISLDLSSYKPKEKETKLEIMQSQLEKEQTKLKRLYGLYADGNDTVLSMIKELEAQIKEMKANIAAESKNTANMQKTEFVYENIKKLADVWDNIDKKQKNMILKSIIKKIVIVNGNIEIQLKNF

SEQ ID NO: 8551 - protein, 453 aa, Unknown
  Description of Unknown: Integrase B8552 sequence
  PTHR30461:SF3,cd00338,SM00857,G3DSA:1.10.10.2600,IPR036162, PF13408,IPR025827,G3DSA:3.40.50.1390,IPR006119,IPR038109, SSF53041,PTHR30461,PS51736,Coil, PF00239
MECVAYMRVSTEKQAEEGNGLESQKRDILDYCSKNELIVTDWYVDDGYTGTNMNRPELQRLVADCKHKRISCVVAFKLDRLSRNMIDGLYMIEKIFQPNGVQFKCVHDSVSYDSPMEQAYTQMMAVFAQLDKNTMMLRMRGGMLERVKQGYWMGGGNLPYCYSYDKDSGILIPIAERKEQANKALELYISGYSDAMICEICGYKGERVVNRILTSTVNIGMIPYKGKIYQGLHEPIFDKERFELARQLRKSRSLNKASCITEPNLLTGLCYCGVCGCAMRYQKWTHGKHKIYCMSRNKAMSYLPNHKPDCNNSLEWADDIEEQVEKEMLKISLDLSSYKPKEKETKLDIMQSQLDKEQAKLKRLYGLYADGNDTVLSMIKELEANISAIKENIAEERKNFSARQKNTIVYDEIKKLADVWDSIDKKQKNMILKTIIDKIIIVNGNIEIQLKNF

SEQ ID NO: 8552 - protein, 453 aa, Unknown
  Description of Unknown: Integrase B8553 sequence
  SM00857,G3DSA:1.10.10.2600,IPR036162,PF13408,IPR025827, G3DSA:3.40.50.1390,PS51737,IPR006119,IPR038109,SSF53041, IPR011109,PF00239,PTHR30461,PS51736,Coil, cd00338
MKRKIRCAIYDRVSHELQVEKGLSLDTQKEMLTSYAKEQGYEIVDYYQDEGISARKTMKNRKELLRLLEDVKADKIDIILVTKLDRWFRSVKDYHNTQAILDAHHCAWKTILEDYDTTTSDGQLKINIMLAVAQNEADRTSERIKVVFSHKIRNKEHLNGPVPWGYMVDEKKHLVKDPEIAPIVEDMFNHYFTTFSKRETIMYIRSKYPGKTPEGNSLAKIFSNATYAGIRFGIENYCDAYLTWEQHKKIVESTTAKVYPATHPQQTYIFSGMLRCPHCGKMLSGYVRKAKKAGRTYEYPAYRCNKRYNKHSAPVKTEKIVEQYVLEFFEEELNRSIYDLELKEGLSKGEKTANVSVLQDELNRINIMFEKGRISLDYYDKRYEEIETQIKEATVSHSKELRARKEIRDGLDGNWKELYLQLDASHKRAFWKNIIKEILIDPETHELNGIIFF

SEQ ID NO: 8553 - protein, 453 aa, Unknown
  Description of Unknown: Integrase B8554 sequence
  PTHR30461:SF3,SM00857,G3DSA:1.10.10.2600,IPR036162,PF13408, IPR025827,G3DSA:3.40.50.1390,IPR006119,IPR038109,SSF53041, PTHR30461,Coil,PS51736,cd00338,PF00239
MKCVAYMRVSTEKQAEEGNGLESQKRDIENYCRKNELIIADWYVDEGYTGSNMNRPELQRLITDCSRKKVNCVVAFKLDRISRSMVDGIYIIEKVFQSNNVAFKCVHDSISYDSPMEQAYTQMMAVFAQLDKNTMMLRMRGGMLERIKQGYWWGGGNTPYCYRYDKEQGILIPIQERAEQARKALELFISGYSDEKIKEICGFKSELVTRKVLTGVVNIGMIPYKGNIYQGKHKPIFDKDRFELAQELRKSRCSAKISCFTEPNLLTGLCYCGVCGCKMRYQKWSNGNHKIYCCSRNKGLKYLPNYNPNCNNSLEWADDIEKQVTDEILKISLNLSSYKPKAKETKLEIMQSQLEREQTKLKRLYSLYADGNDTVLEMIKDLESQISKTKEDISVESKNAINTQKKEFTYQNIKKLADVWDNIDKKQKNFILKTIIDKVIIVNGNVEIQLKNF

SEQ ID NO: 8554 - protein, 453 aa, Unknown
  Description of Unknown: Integrase B8555 sequence
  PTHR30461:SF3,IPR036162,PS51737,IPR011109,PTHR30461, PS00397,PF00239,G3DSA:1.10.10.2600,IPR006119,SSF53041, SM00857,IPR025827,IPR038109,PS51736, cd03768,IPR006118,PF13408,G3DSA:3.40.50.1390,PF07508,Coil
MIKGACYVRVSTDNQLENYSIEEQTDRLKAYCKAKDIQIVKIYTDGGYSGGNVNRPALQQMLQDIGKGLIDSVIVYKLDRLSRSQKDTLMLIEDCFLAKNVDFVSVNENFDTSTPFGRAMIGILSVFAQLEKDQITERFTMGRIGRAKNGYFHGGGNAPTGYDYIDGELIINDYEALQVKDLYNRFLKGYSIHNCWQYMQQKYGGWSSEVLVRNVLRNELYIGKVKFKGVAYQGNHQPIISEDLFRQVQDLFNSSKRSSNTFKRSPFKASTLLSSIVYCGKCGARFHGEHGNYSCYSRTKGDKKYIVDPNCKNKKWKIEELDRLVLDYITRLDFSKLHNSHPVPVPSTDYSFRLAEIDKQIGKLIDLYQVSGIPLETIQEKMDALNKEKEALLIISKPKNVPVTTLAEMITARDTLMSLSDSGSLDEKRACLTMIIDRIIIDDDNVNIKLKQL

SEQ ID NO: 8555 - protein, 453 aa, Unknown
  Description of Unknown: Integrase B8556 sequence
  PTHR30461:SF3,SM00857,G3DSA:1.10.10.2600,IPR036162,PF13408, IPR025827,G3DSA:3.40.50.1390,IPR006119,IPR038109,SSF53041, PTHR30461,Coil,PS51736,cd00338,PF00239
MECVAYMRVSTEKQAVEGNGLDSQKRDIENYCRKNELVITDWYIDDGYTGTNMDRPELQRLVNDCSRKRLSCVVAFKLDRLSRNMIDGIYLIEKVFQKYNVVFKCVHDSVNYDSPMEQAYTQMMAVFAQLDKNTMMLRMRGGMLERIKQGYWMGGGNLPYCYSYSKEQGILIPIPERAEQARKGLELFISGYSDAKIKEICGFKSELVTRSILTGVVNIGMIPYKGKIYQGKHEPVFDKDRFNLGLELRKSRCSAKTYCITEPNLLTGLCYCGICGCKMRYQKWGSEKHKIYCCSRNKSLSYLPNYNASCNNSLEWADEIEKQVEEEILKISLDLSSYKPKEKATKLEIMQSQLEKEQIKLKRLYNLYADGNDTVLEMIKELEAQIKEMKLNITAESKNAINTQKKEFVYENIKKLADIWDKVDKKQKNLILKTIIDKIVIVNGNIEIQLKNF

SEQ ID NO: 8556 - protein, 453 aa, Unknown
  Description of Unknown: Integrase B8557 sequence
  PTHR30461:SF3,SM00857,G3DSA:1.10.10.2600,IPR036162,PF13408, IPR025827,G3DSA:3.40.50.1390,IPR006119,IPR038109,SSF53041, PTHR30461,Coil,PS51736,cd00338, PF00239
MECVAYMRVSTEKQAVEGNGLDSQKRDIENYCRKNELVITDWYIDDGYTGTNMDRPELQRLVNDCSRKRLSCVVAFKLDRLSRNMIDGIYLIEKVFQKYNVVFKCVHDSVNYDSPMEQAYTQMMAVFAQLDKNTMMLRMRGGMLERIKQGYWMGGGNLPYCYSYSKEQGILIPIPERAEQARKGLELFISGYSDAKIKEICGFKSELVTRSILTGVVNIGMIPYKGKIYQGKHEPVFDKDRFNLGLELRKSRCSAKTYCITEPNLLTGLCYCGICGCKMRYQKWGSEKHKIYCCSRNKSLSYLPNYNASCNNSLEWADEIEKQVEEEILKISLDLSSYKPKEKATKLEIMQSQLEKEQIKLKRLYNLYADGNDTVLEMIKELEAQIKEMKLNIAAESKNAINTQKKEFVYENIKKLADIWDKVDKKQKNLILKTIIDKIVIVNGNIEIQLKNF

SEQ ID NO: 8557 - protein, 453 aa, Unknown
  Description of Unknown: Integrase B8558 sequence
  cd00338,SM00857,G3DSA:1.10.10.2600,IPR036162,PF13408, IPR025827,G3DSA:3.40.50.1390,PS51737,IPR006119,IPR038109, SSF53041,IPR011109,PTHR30461,PS51736,Coil, PF00239
MECVAYMRVSTEKQAEEGNGLDSQKRDIQNYCRKNKLIITDWYIDDGYTGSNMDRPELQRLINDCSKKRVKCVVAFKLDRLSRSMIDGIYMIERIFQPNNIEFYCVHDSVSYDSPMEQAYTQMMAVFSQLDKNTMLLRMRGGMLERVKKGYWMGGGNTPYCYEYDKEQGILVPIPEKAEQARQALELFIDGYSDRSISDMLHFSSDIVVSRILTSPVNIGMIPYKGKMYQGRHQPVFQRDRFELAQEVRKSRRKNRTYRKKEPNLLTGLCYCGVCGCKMRYQKWGCEKQKIHCCSRDKYLQYLPNYSTNCDNMAIWADEIEKQVEEEIIKISLNLSEYKPKQKESKIEIMQKNLNREKTKLKRLYNLYAEGNDTVLEMIKEVEKTIGESKKRIEEEYKNIGNTNKKEYVYENIKSLADVWNTISKTGKNSILKSIVEKIVIVNGDVEIVLKNF

SEQ ID NO: 8558 - protein, 453 aa, Unknown
  Description of Unknown: Integrase B8559 sequence
  PTHR30461:SF3,SM00857,G3DSA:1.10.10.2600,IPR036162,PF13408, IPR025827,G3DSA:3.40.50.1390,IPR006119,IPR038109,SSF53041, PTHR30461,Coil,PS51736,cd00338,PF00239
MECVAYMRVSTEKQAVEGNGLDSQKRDIENYCRKNELVITDWYIDDGYTGTNMDRPELQRLVNDCSRKRVSCVVAFKLDRLSRNMIDGIYLIEKVFQKYNVVFKCVHDSVSYNSPMEQAYTQMMAVFAQLDKNTMMLRMRGGMLERIKQGYWMGGGNLPYCYSYSKEQGILIPIPERAEQARRGLELFISGYSDAKIKEICGFKSELVTRSILTGVVNIGMIPYKGKIYQGKHEPIFDKDRFNLGLELRKSRCSAKTYCITEPNLLTGLCYCGICGCKMRYQKWGSEKHKIYCCSRNKSLSYLPNYNASCNNSLEWADEIEKQVEEEILKISLDLSSYKPKEKATKLEIMQSQLEKEQIKLKRLYNLYADGNDTVLEMIKELEAQIKEMKANIAVESKNAINTQKKEFVYENIKKLADIWDKVDKKQKNLILKTIIDKIVIVNGNIEIQLKNF

SEQ ID NO: 8559 - protein, 453 aa, Unknown
  Description of Unknown: Integrase B8560 sequence
  PTHR30461:SF3,SM00857,G3DSA:1.10.10.2600,IPR036162,PF13408, IPR025827,G3DSA:3.40.50.1390,IPR006119,IPR038109,SSF53041, PTHR30461,Coil,PS51736,cd00338, PF00239
MECVAYMRVSTEKQAVEGNGLDSQKRDIENYCRKNELVITDWYVDDGYTGTNMDRPELQRLVNDCSRKRISCVVAFKLDRLSRNMIDGIYLIEKVFQKYGVMFKCVHDSVNYDSPMEQAYTQMMAVFAQLDKNTMMLRMRGGMLERVKQGYWFGGGNLPYCYSYSKDQGILIPIQEHAEQARKGLELFISGYSDAKIKEICGFRSELVTRSILTSVVNIGMIPYKGKIYQGKHEAVFDKDRFELGLELRKSRCLAKTYCITEPNLLTGLCYCGVCGCKMRYQKWGSKKHKIYCCSRNKSLSYLPNYNASCNNSLEWADEIEKQVEEEILKISLDLSSYKPKEKATKLEIMQSQLEKEQIKLKRLYNLYADGNDTVLEMIKELESQIKEMKSNIAAESKNAINTQKKEFVYENIKKLADIWDKVDKKQKNMILKTIIDRIIIVNGNIEIQLKNF

SEQ ID NO: 8560 - protein, 453 aa, Unknown
  Description of Unknown: Integrase B8561 sequence
  PTHR30461:SF3,SM00857,G3DSA:1.10.10.2600,IPR036162,PF13408, IPR025827,G3DSA:3.40.50.1390,IPR006119,IPR038109,SSF53041, PTHR30461,Coil,PS51736,cd00338,PF00239
MECVAYMRVSTEKQAVEGNGLDSQKRDIENYCRKNELVITDWYVDDGYTGTNMDRPELQRLVNDCSRKRVSYVVAFKLDRLSRNMIDGIYLIEKVFQKYNVVFKCVHDSVNYDSPMEQAYTQMMAVFAQLDKNTMMLRMRGGMLERVKQGYWFGGGNLPYCYSYSKDQGILIPIPEHAEQARKGLELFISGYSDAKIKEICGFRSELVTRSILTSVVNIGMIPYKGKIYQGKHEAVFDKDRFELGLELRKSRCSAKTYCITEPNLLTGLCYCGICGCKMRYQKWGSKKHKIYCCSRNKSLSYLPNYNASCNNSLEWADEIEKQVEEEILKISLDLSSYKPKEKATKLEIMQSQLEKEQIKLKRLYNLYADGNDTVLEMIKDLESQIKEMKSNIAAESKNAINTQKKEFVYENIKKLADIWDKVDKKQKNMILKTIIDRIVIVNGNIEIQLKNF

SEQ ID NO: 8561 - protein, 453 aa, Unknown
  Description of Unknown: Integrase B8562 sequence
  SM00857,IPR006118,G3DSA:1.10.10.2600,IPR036162, PS51737,G3DSA:3.40.50.1390,Coil,IPR006119, IPR038109,SSF53041,IPR011109,PTHR30461, PS00397,PS51736,cd00338,PF00239
MECVAYIRVSTERQVEEGYGLESQKRDIEEYCKKNEMLITDWYIDAGLSGMDMTKRVELQRLISDISKINDIVVYKLDRLARDSVDALYMIEKLFTPKGVRVNSVHDFARYETPQDKFQTHIMAAVAEYDRNTMLLRMRGGMLERVKNGYWMGGGNTPYCYRYDKNLGYLVPIPERAEQANRAMDLFIGGMSDVKIKRLLGYKSEFVVRNILTGVVNIGYIPYKGGTYKGLHEPIFEHDKFYLAQELRKSRRKQHVYSFTEPHLLTGLCYCKTCGCKMRYQKITGMGIHKIYCCSHDKYLDYLPNYNADCDNPGAWASDIEKAFEHEILDISINLSQYKPKAKETKLQILTNQLEKQKAKLKRLYTLYAEGNDMVLDMIKTLETEIRETTEKISTERNNGQHEQKKEFVYENIKKLADIWDGISKSQKNSILKTIIDKVIVGKDDIEIQLKNF

SEQ ID NO: 8562 - protein, 453 aa, Unknown
  Description of Unknown: Integrase B8563 sequence
  PTHR30461:SF3,cd00338,SM00857,G3DSA:1.10.10.2600,IPR036162, PF13408,IPR025827,G3DSA:3.40.50.1390,IPR006119,IPR038109, SSF53041,PTHR30461,PS51736,Coil,PF00239
MECVAYMRVSTEKQAVEGNGLDSQKRDIENYCRKNELVITDWYIDDGYTGANMDRPGLQRLVNDCSRKRVSCVVAFKLDRLSRNMIDGIYLIEKVFQKCNVVFKCVHDSVNYDSPMEQAYTQMMAVFAQLDKNTMMLRMRGGMLERIKQGYWMGGGNLPYCYSYSKEQGILMPIPERAEQARKALELFISGYSDVKIKEICGFKSELVTRNILTGIVNIGMIPYKGKIYQGKHEPIFDKGRFNLAQELRKTRAKSRATCQTEPNLLTGLCYCGVCGCAMRYQKWTNGEHKIYCMSRNKSMSYLPNYNANCNNSLEWADDIEKQVEKEILKISLNLSSYKPKEKATKLEIMQSQLDKEQTKLKRLYNLYADGNDTVLEMIKESESLVKTMKANVLSESKSTANTQKKEFVYENIKKLADVWNNIDKKKKNMILKTIIDKIVIVNGNIEIQLKNF

SEQ ID NO: 8563 - protein, 453 aa, Unknown
  Description of Unknown: Integrase B8564 sequence
  PTHR30461:SF3,IPR036162,PS51737,IPR011109,PTHR30461, PS00397,PF00239,G3DSA:1.10.10.2600,IPR006119,SSF53041, cd00338,SM00857,IPR025827,IPR038109, PS51736,IPR006118,PF13408,G3DSA:3.40.50.1390,Coil
MTDIGSGSSDIYLDLYLHDGATERTVMRIALYARVSTEEQAIHGLSIEAQSEALEEWAKQEHANVVGTYIDAGISARKPASKRPSMQRLLADIERGKIDMVVFTKLDRWFRNIAEYYKVQEILERHGVNWRTIHEDYDTSTASGRFKVNIMLAVAQDEADRTSERIKAVFDSKRKRGEVVSGSVPPGIKICNKKFIVDEDKAPIMRDVFNFFIANHSVYATQRYAANTHGFLRDTSTLKRLLANPLYRGRVVDEATFDLAKELLSVRSQRNSGSPRGRIYLFKGMLHCDVCGGMMSGIVCKDFYYYRCNKHTFTGNCPNSKYIRESHVEQWLLERVVSECDAYNSRITQERTERPRIDDAGIRRKMSKLKDLYLSDLIDRDEYERDYTELRQTLEKVQEAEPPARPIDVEYVRSAVAMYDDLERPEKKEFWMRIVKEIIAYPDGTFSFVLRNI

SEQ ID NO: 8564 - protein, 453 aa, Unknown
  Description of Unknown: Integrase B8565 sequence
  PTHR30461:SF3,SM00857,IPR006118,G3DSA:1.10.10.2600,IPR036162, PF13408,IPR025827,G3DSA:3.40.50.1390,Coil,IPR006119, IPR038109,SSF53041,PTHR30461,PS00397,PS51736, cd00338,PF00239
MECVAYIRVSTEKQAEEGYGIDSQKRDIIAYCRKNELIITDWYIDDGYTGANMDRPELNRLINDCSKKRVHFIVAFKLDRLSRSMVDGIYIIERIFQPNGIVFKCVHDSINYDSPMEQAYTQMMAVFAQLDKNTMLLRMRGGMIERVKKGYWMGGGNTPYCYNYDKESGILVPIPDRKRKANIAMDLFIEGHSDIYIKDTLGFSSELVVRSILTGVVNIGMIPYKGVIYQGLHEPIFEKDKFEEAQELRKLRRNHKQSCQADANILTGLCVCGICGCKMRYQKWTHGKHKIYCCSRNKHLSYLPNYNHSCNNSIEWADEIEEQVESKILKISLSLSEYKPKSKESKLEIMQLQLEREKTKLKRLYVLYSEGNDTVLEMIKSSENVVSETERKIEDEKRSIQESPKKETVFNNIKMLADVWPHINKQKKNNILKNIIEKVVIVNGDIEIQLKTF

SEQ ID NO: 8565 - protein, 453 aa, Unknown
  Description of Unknown: Integrase B8566 sequence
  PTHR30461:SF3,SM00857,G3DSA:1.10.10.2600,IPR036162,PF13408, IPR025827,G3DSA:3.40.50.1390,IPR006119,IPR038109,SSF53041, PTHR30461,Coil,PS51736,cd00338,PF00239
MECVAYMRVSTEKQAVEGNGLDSQKRDIENYCRKNELVITDWYIDDGYTGTNMDRPELQRLVNDCSRKRISCVVAFKLDRLSRNMIDGIYLIEKVFQKYNVMFKCVHDSVNYDSPMEQAYTQMMAVFAQLDKNTMMLRMRGGMLERVKQGYWFGGGNLPYCYSYSKEQGILIPIPEHAEQARKGLELFISGYSDAKIKEICGFRSELVTRSILTSVVNIGMIPYKGKTYQGKHEAIFDKDRFELGLELRKSRCSAKTYCITEPNLLTGLCYCGICGCKMRYQKWGSKKHKIYCCSRNKSLSYLPNYNESCNNSLEWADEIEKQVEEEILKISLDLSSYKPKEKATKLEIMQSQLDKEQAKLKRLYNLYADGNDTVLEMIKELESQIKEMKSSIAAESKNAINTQKKEFVYENIKKLADIWNNIDKKQKNMILKTIIDKIVIVNGNIEIQLKNF

SEQ ID NO: 8566 - protein, 453 aa, Unknown
  Description of Unknown: Integrase B8567 sequence
  PTHR30461:SF3,SM00857,G3DSA:1.10.10.2600,IPR036162,PF13408, PS51737,G3DSA:3.40.50.1390,IPR025827,IPR006119,IPR038109, SSF53041,IPR011109,PTHR30461,Coil, PS51736,cd00338,PF00239
MECVAYMRVSTEKQAEEGNGLDSQKRDIELFCRKNELVVADWYVDDGYTGANMDRPELQRLINDCIKKRVKCVVAFKLDRLSRSMIDGLYIIERVFQPNQVLFKCVHDSVSYDSPMEQAYTQMMAVFAQLDKNTMMLRMRGGMLERIKQGYWIGGANTPYCYNYSKEKGILIPIPERKEQANRALDMFIGGYSDLYIKESLGFHSEVLVRNVLTGVVNIGMIPYKGNVYQGLHEPIFDKERFELAQEIRKSRRKNKTACHTDANLLTGLCYCGVCGCKMRYQKWTHGKHKIYCCSRDKAMKYLPNFNPNCNNSLEWAADIEKQVESEILKISLNLSECKPIEKQSKLEIMQSQFEKEQVKLKRLYVLYSDGNDTVLEMIKNTEKSISEMKVKITEEEKNERNSQKKEVVYENIKKLADVWAHIDKKEKNNILKSIISRIVIVNGDVEIQLKNF

SEQ ID NO: 8567 - protein, 453 aa, Unknown
  Description of Unknown: Integrase B8568 sequence
  PTHR30461:SF3,IPR036162,PS51737,IPR011109,PTHR30461, PS00397,PF00239,G3DSA:1.10.10.2600,IPR006119,SSF53041, cd00338,SM00857,IPR025827,IPR038109,PS51736, IPR006118,PF13408,G3DSA:3.40.50.1390,Coil
MECVAYIRVSTERQVEEGYGLESQKRDIEEYCKKNEMLITDWYIDAGLSGMDMSKRVELQRLISDISKINNIVVYKLDRLARDSVDALYMIEKLFTPKGVRVNSVHDFARYETPQDKFQTHIMAAVAEYDRNTMLLRMRGGMLERVKNGYWMGGGNTPYCYRYDKNLGYLVPIPERAEQANRAMDLFIDGMSDVKIQRLLGYKSEFVVRSIMTGIVNIGYIPYKGGVYKGLHEPIFDREKFYLAQELRKSRRKQHIYCYTEPHLLTGLCYCRECGCKMRYQKITGMGIHKIYCCSHNSYLDYLPNHNPDCNNPGAWASDVEKAFEQEILEISINLSKYKPKAKETKLQILTNQLEKQKAKLKRLYTLYAEGNDMVLDMIKTLETEIRETTEKISAERKNGQHEQKKEFVYENIKKLADIWDGISKSQKNSILKTIIDKVIVGKDDIEIQLKNF

SEQ ID NO: 8568 - protein, 453 aa, Unknown
  Description of Unknown: Integrase B8569 sequence
  PTHR30461:SF3,cd00338,SM00857,G3DSA:1.10.10.2600,IPR036162, PF13408,IPR025827,G3DSA:3.40.50.1390,IPR006119,IPR038109, SSF53041,PTHR30461,PS51736,Coil,PF00239
MECVAYMRVSTEKQAVEGNGLDSQKRDIENYCRKNELVITDWYIDDGYTGTNMDRPELQRLVNDCSRKRVSCVVAFKLDRLSRNMIDGIYLIEKVFQKYNVVFKCVHDSVNYDSPMEQAYTQMMAVFAQLDKNTMMLRMRGGMLERIKQGYWMGGGNLPYCYSYSKEQGILIPIPERAEQARKGLELFISGYSDAKIKEICGFKSELVTRSILTGVVNIGMIPYKGKIYQGKHEPVFDKDRFNLGLELRKSRCSAKTYCITEPNLLTGLCYCGICGCKMRYQKWGSEKHKIYCCSRNKSLSYLPNYNASCNNSLEWADEIEKQVEEEILKISLDLSSYKPKEKATKLEIMQSQLEKEQIKLKRLYNLYADGNDTVLEMIKELEAQIKEMKLNITAESKNAINTQKKEFVYENIKKLADIWDKVDKKQKNLILKTIIDKIVIVNGNIEIQLKNF

SEQ ID NO: 8569 - protein, 453 aa, Unknown
  Description of Unknown: Integrase B8570 sequence
  SM00857,IPR006118,G3DSA:1.10.10.2600,IPR036162, PS51737,G3DSA:3.40.50.1390,Coil,IPR006119, IPR038109,IPR011109,SSF53041,PTHR30461, PS00397,PS51736,cd00338,PF00239
MECVAYIRVSTERQVEEGYGLESQKRDIEEYCKKNEMLITDWYIDAGLSGMDMTKRVELQRLISDISKINDIVVYKLDRLARDSVDALYMIEKLFTPKGVRVNSVHDFARYETPQDKFQTHIMAAVAEYDRNTMLLRMRGGMLERVKNGYWMGGGNTPYCYRYDKNLGYLVPIPERAEQANRAMDLFIDGMSDVKIQRLLGYKSEFVVRNILTGVVNIGYIPYKGGTYKGLHEPIYEHDKFYLAQELRKSRRKQHVYSFTEPHLLTGLCYCKTCGCKMRYQKITGMGIHKIYCCSHDKYLDYLPNYNVDCDNPGAWASDIEKAFEHEILDISINLSQYKPKAKETKLQILTNQLEKQKSKLKRLYTLYAEGNDMVLDMIKTLETEIRETTEKISTERNNGQHEQKKEFVYENIKKLADIWDGISKSQKNSILKTIIDKVIVGKDDIEIQLKNF

SEQ ID NO: 8570 - protein, 453 aa, Unknown
  Description of Unknown: Integrase B8571 sequence
  PTHR30461:SF3,SM00857,G3DSA:1.10.10.2600,IPR036162,PF13408, IPR025827,PS51737,G3DSA:3.40.50.1390,IPR006119,IPR038109, IPR011109,SSF53041,PTHR30461,Coil,PS51736, cd00338,PF00239
MECVAYMRVSTEKQAEEGNGLDSQKRDIELFCRKNELVVSDWYVDDGYTGANMDRPELQRLINDCIKKRVKCVVAFKLDRLSRSMIDGLYIIERVFQPNQVLFKCVHDSVSYDSPMEQAYTQMMAVFAQLDKNTMMLRMRGGMLERIKQGYWIGGANTPYCYNYSKEKGILIPIPERKEQANRALDMFIGGYSDLYIKESLGFHSEVLVRNVLTGVVNIGMIPYKGNVYQGLHEPIFDKERFELAQEIRKSRRKNKTACHTDANLLTGLCYCGVCGCKMRYQKWTHGKHKIYCCSRDKAMKYLPNFNPNCNNSLEWAADIEKQVESEILKISLNLSECKPIEKQSKLEIMQSQFEKEQVKLKRLYVLYSDGNDTVLEMIKNTEKSISEMKVKITEEEKNERNSQKKEVVYENIKKLADVWAHIDKKEKNNILKSIISRIVIVNGDVEIQLKNF

SEQ ID NO: 8571 - protein, 453 aa, Unknown
  Description of Unknown: Integrase B8572 sequence
  SM00857,IPR006118,G3DSA:1.10.10.2600,IPR036162,PF13408, IPR025827,G3DSA:3.40.50.1390,PS51737,IPR006119,IPR038109, SSF53041,IPR011109,PF00239,PTHR30461,PS00397, PS51736,Coil,cd00338
MKCVAYIRVSTEKQAEEGNGLDSQIRDIKNHCRKNGMIIDDWYVDDGYTGSNMDRPELQRLVNDCTRKRVECVVAFKLDRLSRSMIDGLYLIERVFQPNNVRFECVHDSVSYDSPMEQAYTQMMAVFAQLDKNTMMLRMRGGMLERVKQGYWMGGGNLPYCYSYDKNSGILVPIPEKADKAQKALDLFLDGYSDVKIKNMLGFKSEPVVKSILTSVVNIGKIPYKGNIYQGRHTPIFDQEKFELAQEMRKTRSKSKICCQTEPNLLTGLCYCGVCGCKMRYQKWTHGKHKIYCCSRSKDLSYIPNYDENCDNSIEWSDEIEEQVEKEIIRISLDLSSYKPKEKETKLDIMRFQLKKDKKRLKRLYALYADGNDTVIEMIKNLESQIEKTKKNISDEEKNNANSQKKEFVYENIKKIADVWKYTDKKHKNMILKTIIDKIVIVNGNIEIQLKKF

SEQ ID NO: 8572 - protein, 453 aa, Unknown
  Description of Unknown: Integrase B8573 sequence
  SM00857,G3DSA:1.10.10.2600,IPR036162,PF13408,IPR025827, PS51737,G3DSA:3.40.50.1390,IPR006119,IPR038109,IPR011109, SSF53041,PTHR30461,Coil,PS51736,cd00338, PF00239
MECVAYMRVSTEKQAEEGNGLDSQKRDIELFCRKNELVVSDWYVDDGYTGANMDRPELQRLINDCIKKRVKCVVAFKLDRLSRSMIDGLYIIERVFQPNQVLFKCVHDSVSYDSPMEQAYTQMMAVFAQLDKNTMMLRMRGGMLERIKQGYWIGGANTPYCYNYSKEKGILIPIPERKEQANRALDMFIGGYSDLYIKESLGFHSEVLVRNVLTGVVNIGMIPYKGNVYQGLHEPIFDKERFELAQEIRKSRRKNKTACHTDANLLTGLCYCGVCGCKMRYQKWTHGKHKIYCCSRDKAMKYLPNFNPDCNNSLEWAADIEKQVESEILKISLNLSECKPIEKQSKLEIMQSQFEKEQVKLKRLYVLYSDGNDTVLEMIKNTEKIISEMKVKITEEEKNERNSQKKEVVYENIKKLADVWAHIDKKEKNNILKSIISRIVIVNGDVEIQLKNF

SEQ ID NO: 8573 - protein, 453 aa, Unknown
  Description of Unknown: Integrase B8574 sequence
  PTHR30461:SF3,cd00338,SM00857,G3DSA:1.10.10.2600,IPR036162, PF13408,PS51737,G3DSA:3.40.50.1390,IPR025827,IPR006119, IPR038109,SSF53041,IPR011109,PTHR30461,PS51736, Coil,PF00239
MECVAYMRVSTEKQAEEGNGLDSQRRDIENYCRKNELVITDWYIDDGYTGANMDRPELQRLVSDCDRKRVGYVVAFKLDRISRSMVDGIYLIERVFLKNNVEFKCVHDSICYDNPMEQAYTQMMAVFAQLDKNTMLLRMRGGMLERVKQGYWMGGGNLPYCYTYSKDTGTLIPIPERKEQANKAMDLFLQGYSDVKIRDMLGFKSEFVVKQVLTSPVNIGMIPYKGNIYQGLHEPIFNKEVFEKAQQFRAIRKNKRASCHNIQTNLLTGLCYCGICGCAMRYQKWTHGKHKIYCCSRNKDLHYLPNHNPNCNNTLEWASDIEKAVEDEILLISANISEYKPRMKESKLEILQGQLEKEQTKRKRLYNLYAEGNDDVISMIKEIEKVIEDIRKQIREESAIETNKTRQNVFKNIKNLADIWEDIDKKQKNMLLKSIIEKIVISNGNIEIKLKDF

SEQ ID NO: 8574 - protein, 453 aa, Unknown
  Description of Unknown: Integrase B8575 sequence
  cd00338,SM00857,IPR006118,G3DSA:1.10.10.2600,IPR036162, PF13408,IPR025827,G3DSA:3.40.50.1390,PS51737,IPR006119, IPR038109,SSF53041,IPR011109,PTHR30461,PS00397, PS51736,Coil,PF00239
MKCVAYIRVSTEKQAEEGNGLDSQIRDIKNHCRKNGMIIDDWYVDDGYTGSNMDRPELQRLVNDCTRKRVECVVAFKLDRLSRSMIDGLYLIERVFQPNNVRFECVHDSVSYDSPMEQAYTQMMAVFAQLDKNTMMLRMRGGMLERVKQGYWMGGGNLPYCYSYDKNSGILVPIPEKADKAQKALDLFLDGYSDVKIKNMLGFKSEPVVKSILTSVVNIGKIPYKGNIYQGRHTPIFDQEKFELAQEMRKTRSKSKICCQTEPNLLTGLCYCGVCGCKMRYQKWTHGKHKIYCCSRSKDLSYIPNYDENCDNSIEWSDEIEEQVEKEIIRISLDLSSYKPKEKETKLDIMRFQLKKDKKRLKRLYALYADGNDTVIEMIKDLESQIEKTKKNISDEEKNNANSQKKEFVYENIKKIADVWKYTDKKHKNMILKTIIDKIVIVNGNIEIQLKKF

SEQ ID NO: 8575 - protein, 453 aa, Unknown
  Description of Unknown: Integrase B8576 sequence
  PTHR30461:SF3,IPR036162,PS51737,IPR011109,PTHR30461, PS00397,PF00239,G3DSA:1.10.10.2600,IPR006119,SSF53041, SM00857,IPR025827,IPR038109,PS51736,cd03768, IPR006118,PF13408,G3DSA:3.40.50.1390,PF07508,Coil
MIKGACYVRVSTDNQLENYSIEEQTDRLKAYCKAKDIQIVKIYTDGGYSGGNVNRPALQQMLQDIGKGLIDSVIVYKLDRLSRSQKDTLMLIEDCFLAKNVDFVSVNENFDTSTPFGRAMIGILSVFAQLEKDQITERFTMGRIGRAKNGYFHGGGNAPTGYDYIDGELVINDYEAIQVKELYNRFLKGYSIHNCWQYMQQKYGGWSSEVLVRNVLRNELYIGKVKFKGVAYQGNHQPIISEDLFRQVQDLFNSSKRSSNTFKRSPFKASTLLSSIVYCGKCGARFHGEHGNYSCYSRTKGDKKYIVDPNCKNKKWKIEELDRLVLDYITRLDFSKLHNSHPVPVPSTDYSFRLTEIDKQIGKLIDLYQVSGIPLETIQEKMDALNKEKEALLIISKPKNVPVTTLAEMITARDTLMSLSDSGSLDEKRACLTMIIDRIIIDDDNVNIKLKQL

SEQ ID NO: 8576 - protein, 453 aa, Unknown
  Description of Unknown: Integrase B8577 sequence
  SM00857,G3DSA:1.10.10.2600,IPR036162,PF13408,PS51737, IPR025827,G3DSA:3.40.50.1390,IPR006119,IPR038109,IPR011109, SSF53041,PTHR30461,Coil,PS51736,cd00338, PF00239
MECVAYMRVSTEKQAEEGNGLDSQKRDIELFCRKNELVVSNWYVDDGYTGANMDRPELQRLINDCIKKRVKCVVAFKLDRLSRSMIDGLYIIERVFQPNQVLFKCVHDSVSYDSPMEQAYTQMMAVFAQLDKNTMMLRMRGGMLERIKQGYWIGGANTPYCYNYSKEKGILIPIPERKEQANRALDMFISGYSDLYIKESLGFHSEVLVRNVLTGVVNIGMIPYKGNVYQGLHEPIFDKERFELAQEIRKSRRKNKTACHTDANLLTGLCYCGVCGCKMRYQKWTHGKHKIYCCSRDKAMKYLPNFNPDCNNSLEWASDIEKQVESEILKISLNLSECKPIEKQSKLEIMQSQFEKEQVKLKRLYVLYSDGNDTVLEMIKNTEKSISEMKVKITEEEKNGRNSQKKEVVYENIKKLADVWAHIDKKEKNNILKSIISRIVIVNGDVEIQLKNF

SEQ ID NO: 8577 - protein, 453 aa, Unknown
  Description of Unknown: Integrase B8578 sequence
  PTHR30461:SF3,cd00338,SM00857,G3DSA:1.10.10.2600,IPR036162, PF13408,IPR025827,G3DSA:3.40.50.1390,PS51737,IPR006119, IPR038109,PF07508,SSF53041,IPR011109,PTHR30461, PS51736,Coil,PF00239
MQKVTRAVFYIRVSHKEQVLHGLSLSAQKKHLQDYAKAHNLKVVNTYVDEGVSGRKPIRLRPALQEMLADAQENQFDLILFIKIDRYFRSVAEYHECQKILDKHKVKWNAINEDYDITTASGRAFVNMKLTVAEMEADQTGERIRDVNDYKVKQGQMITGAYPFGFKIEKRDGRSYLIHDPDTEHIVIDMIEHYLTYNSLRGVTLYINKKYNLNLLQDSVKRLLKNPYLCGQYRDNPNFCEPYISKETFDKMQEIRKKNIKVQRNHNTFLFSSLIRCDNCNALLSGFANRFNSNRVYNYYRCRNRFNQKTCNCPNVSERKLEKYLLENISTEFQNYFKKIELEEMKNNQKNTKTEMAKIRAEMDRLNFMFQKNRITSAVYNAEYEELESRLSDLHTVKTSKKRDLEPIKELLESDFVSVYSTLSQQNKQAFWRGIIKEIRQLGEPDHYAIIFL

SEQ ID NO: 8578 - protein, 453 aa, Unknown
  Description of Unknown: Integrase B8579 sequence
  PTHR30461:SF3,SM00857,IPR006118,G3DSA:1.10.10.2600,IPR036162, PS51737,G3DSA:3.40.50.1390,Coil,IPR006119,IPR038109, SSF53041,IPR011109,PTHR30461,PS00397,PS51736, cd00338,PF00239
MECVAYIRVSTERQVEEGYGLESQKRDIEDYCKKNEMLITDWYIDAGLSGMDMSKRVELQRLISDISKINDIVVYKLDRLARDSVDALYMIEKLFTPKGVRVNSVHDFARYETPQDKFQTHIMAAVAEYDRNTMLLRMRGGMLERVKNGYWMGGGNTPYCYRYDKNLGYLVPIPERAEQANRAMDLFIDGMSDLKIQRLLGYKSEFVVRNILTGVVNIGYIPYKGGTYKGLHEPIFESDKFYLAQELRKSRRKQHTYSLTEPHLLTGLCYCRTCGCKMRYQKITGMGIHKIYCCSHSKYLDYLPNYNTDCDNPGAWASDIEKAFEHEILDISINLSQYKPKAKETKLQILTKQLEKQKAKLKRLYTLYAEGNDMVLDMIKTSEAEIKETTEKISDERKNGQHEQKKEFVYENIKKLADIWDGISKSQKNSILKTIIDKVIVAKDDIEIQLKNF

SEQ ID NO: 8579 - protein, 453 aa, Unknown
  Description of Unknown: Integrase B8580 sequence
  PTHR30461:SF3,SM00857,G3DSA:1.10.10.2600,IPR036162,PF13408, IPR025827,G3DSA:3.40.50.1390,IPR006119,IPR038109,SSF53041, PTHR30461,Coil,PS51736,cd00338,PF00239
MECVAYMRVSTEKQAEEGNGLESQKRDILDYCSKNELIVTDWYVDDGYTGTNMNRPELQRLVADCKHKRISCVVAFKLDRLSRNMIDGLYMIEKIFQPNGVQFKCVHDSVSYDSPMEQAYTQMMAVFAQLDKNTMMLRMRGGMLERVKQGYWMGGGNLPYCYSYDKDSGILIPIAERKEQANKALELYISGYSDAMICEICGYKGERVVNRILTSTVNIGMIPYKGKIYQGLHEPIFDKERFELAQQLRKSRSLNKASCITEPNLLTGLCYCGVCGCAMRYQKWTHGKHKIYCMSRNKAMSYLPNHKPDCNNSLEWADDIEEQVEKEMLKISLDLSSYKPKEKETKLDIMQSQLDKEQAKLKRLYGLYADGNDTVLSMIKELEANISAIKENIAEERKNFSARQKNTIVYDEIKKLADVWDSIDKKQKNMILKTIIDKIIIVNGNIEIQLKNF

SEQ ID NO: 8580 - protein, 453 aa, Unknown
  Description of Unknown: Integrase B8581 sequence
  SM00857,G3DSA:1.10.10.2600,IPR036162,PF13408, IPR025827,G3DSA:3.40.50.1390,PS51737,IPR006119, IPR038109,SSF53041,IPR011109,PF00239, PTHR30461,PS51736,Coil,cd00338
MKRKIRCAIYDRVSHELQVEKGLSLDTQKEMLTSYAKEQGYEIVDYYQDEGISARKTMKNRKELLRLLEDVKADKIDIILVTKLDRWFRSVKDYHNTQAILDAHHCAWKTILEDYDTTTSDGQLKINIMLAVAQNEADRTSERIKVVFSHKIRNKEHLNGPVPWGYMVDEKKHLVKDPEIAPIVEDMFNHYFTTFSKRETIMYIRSKYPGKTPEGNSLAKIFSNATYAGIRFGIENYCDAYLTWEQHKKIVESTTAKVYPATHPQQTYIFSGMLRCPHCGKMLSGYVRKAKKAGRTYEYPAYRCNKRYNKHSAPVKTEKIVEQYVLEFFEEELNRSIYDLELKEGLSKSEKTANVSVLQDELNRINIMFEKGRISLDYYDKRYEEIETQIKEATVSHSKELRARKEIRDGLDGNWKELYLQLDASHKRAFWKNIIKEILIDPETHELNGIIFF

SEQ ID NO: 8581 - protein, 453 aa, Unknown
  Description of Unknown: Integrase B8582 sequence
  PTHR30461:SF3,G3DSA:1.10.10.2600,IPR036162,PF13408,IPR025827, G3DSA:3.40.50.1390,PS51737,IPR006119,IPR038109,PF07508, IPR011109,SSF53041,PTHR30461,Coil,cd00338, PF00239
MVYQLDRFARNRYDSAIYKSKLKKNGVRVLSARENITDDASGILVEGVLESMAEYFSAELSQKIHRGMEINAQKCLSNGSNPGLGFKVDKDRHFYVDEEEAEIVREIFERYASGETKAEIVKDLKRRKIKTSLGNDFTYNSLSRMLSNKRYIGVYMYKGQETPGGMPRILDDDIFYKVQDILDKNKKASARTHGEGEYLLTTKLFCGHCKNMMVGYGGTSKTGKRYHYYICKEARKKRCDKTIVGKKKIEDRVIAECLKLLTDDNIKFIAQKVAEECNKSPDNLTVKQLKKAIREADTAIENLWRGIEQGQSVPMLTERLNKRQAEKDALEEQLAIEENKRICLSEAQILAFLNFVCEMPLDDVNKRRAIINILVHSVYLYDDHFTLIINASKKPMSVDNIPLEEIEEAFNSDKTCTEQCSTMTSPAPPNKNRNFDTKRILIAVHFLSLKNGL

SEQ ID NO: 8582 - protein, 453 aa, Unknown
  Description of Unknown: Integrase B8583 sequence
  PTHR30461:SF3,SM00857,G3DSA:1.10.10.2600,IPR036162,PF13408, IPR025827,G3DSA:3.40.50.1390,IPR006119,IPR038109,SSF53041, PTHR30461,Coil,PS51736,cd00338,PF00239
MECVAYMRVSTEKQAVEGNGLDSQKRDIENYCRKNELVITDWYIDDGYTGTNMDRPELQRLVNDCSRKRVSCVVAFKLDRLSRNMIDGIYLIEKVFQKYNVVFKCVHDSVNYDSPMEQAYTQMMAVFAQLDKNTMMLRMRGGMLERIKQGYWMGGGNLPYCYSYSKEQGILIPIPERAEQARKGLELFISGYSDAKIKEICGFKSELVTRSILTGVVNIGMIPYKGKIYQGKHEPIFDKDRFNLGLELRKSRCSAKTYCITEPNLLTGLCYCGICGCKMRYQKWGSEKHKIYCCSRNKSLSYLPNYNASCNNSLEWADEIEKQVEEEILKISLDLSSYKPKEKATKLEIMQSQLDKEQTKLKRLYNLYADGNDTVLEMIKELEAQIKEMKANIAVESKNAINTQKKEFVYENIKKLADIWDKVDKKQKNLILKTIIDKIVIVNGIIEIQLKNF

SEQ ID NO: 8583 - protein, 453 aa, Unknown
  Description of Unknown: Integrase B8584 sequence
  PTHR30461:SF3,SM00857,IPR006118,G3DSA:1.10.10.2600,IPR036162, PS51737,G3DSA:3.40.50.1390,Coil,IPR006119,IPR038109, SSF53041,IPR011109,PTHR30461,PS00397, PS51736,cd00338,PF00239
MECVAYIRVSTERQVEEGYGLESQKRDIEEYCKKNEMLITDWYIDAGLSGMDMSKRVELQRLISDISKINNIVVYKLDRLARDSVDALYMIEKLFTPKGVRVNSVHDFARYETPQDKFQTHIMAAVAEYDRNTMLLRMRGGMLERVKNGYWMGGGNTPYCYRYDKNLGYLVPIPERAEQANRAMDLFIDGMSDVKIQRLLGYKSEFVVRNILTGVVNIGYIPYKGGTYKGLHEPIYEHDKFYLAQELRKSRRKQHVYSFTEPHLLTGLCYCKTCGCKMRYQKITGMGIHKIYCCSHDKYLDYLPNYNTDCDNPGAWASDIEIAFEHEILGISINLSQYKPKAKETKLQILTNQLEKQKSKLKRLYTLYAEGNDMVLDMIKTLETEIRETTEKISAERKNGQHEQKKEFVYENIKKLADIWDGISKSQKNSILKTIIDKVIVGKDDIEIQLKNF

SEQ ID NO: 8584 - protein, 453 aa, Unknown
  Description of Unknown: Integrase B8585 sequence
  SM00857,IPR006118,G3DSA:1.10.10.2600,IPR036162,PS51737, G3DSA:3.40.50.1390,Coil,IPR006119,IPR038109,SSF53041, IPR011109,PTHR30461,PS00397,PS51736,cd00338, PF00239
MECVAYIRVSTERQVEEGYGLESQKRDIEEYCKKNEMLITDWYIDAGLSGMDMSKRVELQRLISDVSKINNIVVYKLDRLARDSVDALYMIEKLFTPKGVRVNSVHDFARYETPQDKFQTHIMAAVAEYDRNTMLLRMRGGMLERVKNGYWMGGGNTPYCYRYDKNLGYLVPIPERAEQANRAMDLFIDGMSDVKIQRLLGYKSEFVVRNILTGVVNIGYIPYKGGTYKGLHESIFEHDKFYLAQELRKSRRKQHIYSFTEPHLLTGLCYCKTCGCKMRYQKITGMGVHKIYCCSHDKYLDYLPNYNADCDNPGAWASDIEKAFEHEILDISINLSQYKPKAKETKLQILTNQLEKQKSKLKRLYTLYAEGNDMVLDMIKTLETEIRETTEKISTERNNGQHEQKKEFVYENIKKLADIWDGISKSQKNSILKTIIDKVIVGKDDIEIQLKNF

SEQ ID NO: 8585 - protein, 453 aa, Unknown
  Description of Unknown: Integrase B8586 sequence
  PTHR30461:SF3,SM00857,IPR006118,G3DSA:1.10.10.2600,IPR036162, PS51737,PS00397,G3DSA:3.40.50.1390,IPR006119,IPR038109, IPR011109,SSF53041,PTHR30461,Coil,PS51736, cd00338,PF00239
MECVAYIRVSTERQVEEGYGLESQKRDIEEYCKKNEMLITDWYIDAGLSGMDMTKRVELQRLISDISKINDIVVYKLDRLARDSVDALYMIEKLFTPKGIRVNSVHDFARYETPQDKFQTHIMAAVAEYDRNTMLLRMRGGMLERVKNGYWMGGGNTPYCYRYDKNLGYLVPIPERAEQANRAMDLFIDGMSDVKIQRLLGYKSEFVVRNILTGVVNIGYIPYKGGTYKGLHEPIFEHDKFYLAQELRKSRRKQHVYSFTEPHLLTGLCYCKTCGCKMRYQKITGMGIHKIYCCSHDKYLDYLPNYNTDCDNPGAWASDIEIAFEHEILDISINLSQYKPKAKETKLQILTNQLEKQKSKLKRLYTLYAEGNDMVLNMIKSLETEIRETTEKISTERKNGQHEQKKEFVYENIKKLADIWDGISKSQKNSILKTIIDKVIVGKDDIEIQLKNF

SEQ ID NO: 8586 - protein, 453 aa, Unknown
  Description of Unknown: Integrase B8587 sequence
  PTHR30461:SF3,SM00857,G3DSA:1.10.10.2600,IPR036162,PF13408, IPR025827,PS51737,G3DSA:3.40.50.1390,IPR006119,IPR038109, IPR011109,SSF53041,PTHR30461,Coil,PS51736, cd00338,PF00239
MECVAYMRVSTEKQAEEGNGLDSQKRDIELFCRKNELVVSDWYVDDGYTGANMDRPELQRLINDCIKKRVKCVVAFKLDRLSRSMIDGLYIIERVFQPNQVLFKCVHDSVSYDSPMEQAYTQMMAVFAQLDKNTMMLRMRGGMLERIKQGYWIGGANTPYCYNYSKEKGILIPIPERKEQANRALDMFIGGYSDLYIKESLGFHSEVLVRNVLTGVVNIGMIPYKGNVYQGLHEPIFDKERFELAQEIRKSRRKNKTACHTDANLLTGLCYCGVCGCKMRYQKWTHGKHKIYCCSRDKAMKYLPNFNPNCNNSLEWAADIEKQVESEILKISLNLSECKPIEKQSKLEIMQSQFEKEHVKLKRLYVLYSDGNDTVLEMIKNTEKSISEMKVKITEEEKNERNSQKKEVVYENIKKLADVWAHIDKKEKNNILKSIISRIVIVNGDVEIQLKNF

SEQ ID NO: 8587 - protein, 453 aa, Unknown
  Description of Unknown: Integrase B8588 sequence
  SM00857,G3DSA:1.10.10.2600,IPR036162,PF13408,IPR025827, PS51737,G3DSA:3.40.50.1390,IPR006119,IPR038109,IPR011109, SSF53041,PTHR30461,Coil,PS51736,cd00338, PF00239
MECVAYMRVSTEKQAEEGNGLDSQKRDIELFCRKNELVVSDWYVDDGYTGANMDRPELQRLINDCIKKRVKCVVAFKLDRLSRSMIDGLYIIERVFQPNQVLFKCVHDSVSYDSPMEQAYTQMMAVFAQLDKNTMMLRMRGGMLERIKQGYWIGGANTPYCYNYSKEKGILIPIPERKEQANRALDMFIGGYSDLYIKESLGFHSEVLVRNVLTGVVNIGMIPYKGNVYQGLHEPIFDKERFELAQEIRKSRRKNKTACHTDANLLTGLCYCGVCGCKMRYQKWTHGKHKIYCCSRDKAMKYLPNFNPDCNNSLEWAADIEKQVESEILKISLNLSECKPIEKQSKLEIMQSQFEKEQVKLKRLYVLYSDGNDTVLEMIKTTEKIISEMKVKITEEEKNERNSQKKEAVYENIKKLADVWAHIDKKEKNNILKSIISRIVIVNGDVEIQLKNF

SEQ ID NO: 8588 - protein, 453 aa, Unknown
  Description of Unknown: Integrase B8589 sequence
  PTHR30461:SF3,SM00857,G3DSA:1.10.10.2600,IPR036162,PF13408, IPR025827,G3DSA:3.40.50.1390,IPR006119,IPR038109,SSF53041, PTHR30461,Coil,PS51736,cd00338,PF00239
MKCVAYMRVSTEKQAEEGNGLESQKRDIENYCRKNELIIADWYVDEGYTGSNMNRPELQRLITDCSRKKVNCVVAFKLDRISRSMVDGIYIIEKVFQSNNVAFKCVHDSISYDSPMEQAYTQMMAVFAQLDKNTMMLRMRGGMLERIKQGYWWGGGNTPYCYRYDKEQGILIPIPERAEQARKALELFISGYSDAKIKEICGFKSELVTRKVLTGVVNIGMIPYKGNIYQGKHKPIFDKDRFELAQELRKSRCSAKISCFTEPNLLTGLCYCGVCGCKMRYQKWSNGNHKIYCCSRNKGLKYLPNYNPNCNNSLEWADDIEKQVTDEILKISLNLSSYKPKAKETKLEIMQSQLEREQTKLKRLYSLYADGNDTVLEMIKDLESQISKTKEDISVESKNAINTQKKEFTYQNIKKLADVWDNIDKKQKNFILKTIIDKVIIVNGNVEIQLKNF

SEQ ID NO: 8589 - protein, 453 aa, Unknown
  Description of Unknown: Integrase B8590 sequence
  SM00857,G3DSA:1.10.10.2600,IPR036162,PF13408, IPR025827,G3DSA:3.40.50.1390,PS51737,IPR006119, IPR038109,IPR011109,SSF53041,PTHR30461, PS51736,cd00338,PF00239
MECVAYMRVSTEKQAEEGNGLDSQKRDIELFCRKNELVVSDWYVDDGYTGANMDRPELQRLINDCIKKRVKCVVAFKLDRLSRSMIDGLYIIERVFQPNQVLFKCVHDSVSYDSPMEQAYTQMMAVFAQLDKNTMMLRMRGGMLERIKQGYWIGGANTPYCYNYSKEKGILIPIPERKEQANRALDMFIGGYSDLYIKESLGFHSEVLVRNVLTGVVNIGMIPYKGNVYQGLHEPIFDKERFELAQEIRKSRRKNKTACHTDANLLTGLCYCGVCGCKMRYQKWTHGKHKIYCCSRDKAMKYLPNFNPDCNNSLEWAADIEKQVESEILKISLNLSECKPIEKQSKLEIMQSQFEKEQVKLKRLYVLYSDGNDTVLEMIKNTEKIIFEMKVKITEEEKNERNSQKKEVVYESIKKLADVWAHIDKKEKNNILKSIISRIVIVNGDVEIQLKNF

SEQ ID NO: 8590 - protein, 453 aa, Unknown
  Description of Unknown: Integrase B8591 sequence
  PTHR30461:SF3,SM00857,G3DSA:1.10.10.2600,IPR036162,PF13408, IPR025827,G3DSA:3.40.50.1390,IPR006119,IPR038109,SSF53041, PTHR30461,Coil,PS51736,cd00338,PF00239
MECVAYMRVSTEKQAEEGNGLESQKRDILDYCSKNELIVTDWYVDDGYTGANMDRPELQRLVADCKHKRLSCVVAFKLDRLSRNMIDGLYMIEKIFQPNGVQFKCVHDSVSYDSPMEQAYTQMMAVFAQLDKNTMMLRMRGGMLERVKQGYWPGGGNTPYCYSYSKDQGILIPIPERAEQARKGLELFISGYSDARIKEICGFKLESVVRKVLTSEVNIGMIPYKGKIYQGLHEPIFDKELFELAQQLRKSRSLNKASCITEPNLLTGLCYCGVCGCAMRYQKWTHGKHKIYCMSRNKAMSYLPNHNPDCNNSLEWADDIEEQVEKEMLKISLDLSSYKPKEKETKLDIMQSQLDKEQAKLKRLYGLYADGNDTVLSMIKELEANISAIKENILEERKNFSVKQKNTIVYDEIKKLADVWGNIDKKQKNMILKTIIDKVIIVNGNIEIQLKNF

SEQ ID NO: 8591 - protein, 453 aa, Unknown
  Description of Unknown: Integrase B8592 sequence
  PTHR30461:SF3,SM00857,G3DSA:1.10.10.2600,IPR036162,PF13408, IPR025827,G3DSA:3.40.50.1390,PS51737,IPR006119,IPR038109, IPR011109,SSF53041,PF00239,PTHR30461, PS51736,Coil,cd00338
MECVAYMRVSTEKQAEEGNGLDSQKRDIELFCRKNELVVSDWYVDDGYTGANMDRPELQRLINDCIKKRVKCVVAFKLDRLSRSMIDGLYIIERVFQPNQVLFKCVHDSVSYDSPMEQAYTQMMAVFAQLDKNTMMLRMRGGMLERIKQGYWIGGANTPYCYNYSKEKGILIPIPERKEQANRALDMFIGGYSDLYIKESLGFHSEVLVRNVLTGVVNIGMIPYKGNVYQGLHEPIFDKERFELAQEIRKSRRKNKTACHTDANLLTGLCYCGVCGCKMRYQKWTHGKHKIYCCSRDKAMKYLPNFNPNCNNSLEWAADIEKQVESEILKISLNLSECKPIEKQSKLEIMQSQFEKEQVKLKRLYVLYSDGNDTVLEMIKNTEKSISDMKEKITEEEKNERNSQKKEVVYENIKKLADVWAHIDKKEKNNILKSIISRIVIVNGDVEIQLKNF

SEQ ID NO: 8592 - protein, 453 aa, Unknown
  Description of Unknown: Integrase B8593 sequence
  PTHR30461:SF3,SM00857,G3DSA:1.10.10.2600,IPR036162,PF13408, IPR025827,G3DSA:3.40.50.1390,PS51737,IPR006119,IPR038109, SSF53041,IPR011109,PTHR30461,Coil,PS51736, cd00338,PF00239
MECVAYMRVSTEKQAEEGNGLDSQKRDIELFCRKNELVVSEWYVDDGYTGANMDRPELQRLINDCIKKRVKCVVAFKLDRLSRSMIDGLYIIERVFQPNQVLFKCVHDSVSYDSPMEQAYTQMMAVFAQLDKNTMMLRMRGGMLERIKQGYWIGGANTPYCYNYSKEKGILVPIPERKEQANRALDMFIGGYSDLYIKESLGFHSEVLVRNVLTGVVNIGMIPYKGNVYQGLHEPIFDKERFELAQEIRKSRRKNKTACHTDANLLTGLCYCGVCGCKMRYQKWTHGKHKIYCCSRDKAMKYLPNFNPNCNNSLEWAADIEKQVESEILKISLNLSECKPIEKQSKLEIMHSQFEKEQVKLKRLYVLYSDGNDTVLEMIKNTEKSISEMKVKITEEEKNERNSQKKEVVYENIKKLADVWAHIDKKEKNNILKSIISRIVIVNGDVEIQLKNF

SEQ ID NO: 8593 - protein, 453 aa, Unknown
  Description of Unknown: Integrase B8594 sequence
  SM00857,IPR006118,G3DSA:1.10.10.2600,IPR036162,PS51737, G3DSA:3.40.50.1390,Coil,IPR006119,IPR038109,IPR011109, SSF53041,PTHR30461,PS00397,PS51736,cd00338, PF00239
MECVAYIRVSTERQVEEGYGLESQKRDIEEYCKKNEMLITDWYIDAGLSGMDMSKRVELQRLISDISKINDIVVYKLDRLARDSVDALYMIEKLFTPKGVRVNSVHDFARYETPQDKFQTHIMAAVAEYDRNTMLLRMRGGMLERVKNGYWMGGGNTPYCYRYDKNLGYLVPIPERAEQANRAMDLFIDGMSDVKVQRLLGFKSEQVVRSILTGVVNIGYIPYKGGIYKGLHEPIFDSEKFYLAQELRKSRRKQHIYSYTEPNLLTGMCYCRECGCKMRYQKITGMGIHKIYCCSHDKYLDYLPNYNADCDNPGAWASDVEKAFEQEILEISINLSKYKPKAKETKLQILTNQLEKQKAKLKRLYILYAEGNDMVLDMIKTLETEIRETTEKISAERKNGQHEQKKEFVYENIKKLADIWDGISKSQKNSILKTIIDKVIVGKDDIEIQLKNF

SEQ ID NO: 8594 - protein, 453 aa, Unknown
  Description of Unknown: Integrase B8595 sequence
  SM00857,G3DSA:1.10.10.2600,IPR036162,PF13408,IPR025827, PS51737,G3DSA:3.40.50.1390,IPR006119,IPR038109,IPR011109, SSF53041,PTHR30461,Coil,PS51736,cd00338, PF00239
MECVAYMRVSTEKQAEEGNGLDSQKRDIENYCRKNKLIITDWYIDDGYTGSNMDRPELQRLINDCSKKRVKCVVAFKLDRLSRSMIDGIYMIERIFQPNNIEFYCVHDSVSYDSPMEQAYTQMMAVFSQLDKNTMLLRMRGGMLERVKKGYWMGGGNTPYCYEYDKEQGILVPIPEKAEQARQALELFIDGYSDRSISDMLHFSSDIVVSRILTSPVNIGMIPYKGEMYQGRHQPVFQRDRFELAQEVRKSRRKNRTYRKTEPNLLTGLCYCGVCGCKMRYQKWGCEKQKIHCCSRDKYLQYLPNYSANCDNMAIWADEIEKQVEEEIIKISLNLSEYKPKQKESKIEIMQKNLNREKTKLKRLYNLYAEGNDTVLEMIKEIEKTIGESKKRIEEEYKNIGNTNKKEYVYENIKSLADVWNTISKTGKNSILKSIVEKIVIVNGDVEIVLKNF

SEQ ID NO: 8595 - protein, 453 aa, Unknown
  Description of Unknown: Integrase B8596 sequence
  PTHR30461:SF3,SM00857,G3DSA:1.10.10.2600,IPR036162,PF13408, IPR025827,PS51737,G3DSA:3.40.50.1390,IPR006119,IPR038109, SSF53041,IPR011109,PTHR30461,Coil,PS51736, cd00338,PF00239
MEMIKVGLYDRVSHDEQALYGDSLRTQIEALRKYAKEKNYIIVDEYIDDGYTATQLNRPGLQRLLQDIQDGKIDMILFTKIDRWSRGVRNYYKLQDILDEHNVDWKTIWEEYDTTTAAGRLQINIMLAIAENESNVTSDRIKVVFKNKLERGEVISGSVPLGYRIKDKHLEVVEELRPLVRDIFNNYERLMSLSKLVDYYKDKHQGLTYWRLKRMLENYLYIGMHVSDYGIYRDFCTKIIEPEQFERVQRLLAMNAKHYKKAKSKNEYIFKGVLRCADCGRKLGGNAGRKTYKYPSQMKNTYRCNWHYRDKTCPNNYNITEKMIERRLLEQIKPELEKYLLTIDIKTKEYKSTASIDIGKINKKLEKLRDLYMDDLIDKDHYKTEYERLTKLLQEKEKVEKPRIIDEKSIQQFLSMDIELIYKDLTKAERRRLWLSIIDHVVVNRETFEITFL

SEQ ID NO: 8596 - protein, 453 aa, Unknown
  Description of Unknown: Integrase B8597 sequence
  SM00857,IPR006118,G3DSA:1.10.10.2600,IPR036162,PS51737, G3DSA:3.40.50.1390,Coil,IPR006119,IPR038109,IPR011109, SSF53041,PTHR30461,PS00397,PS51736,cd00338, PF00239
MECVAYIRVSTERQVEEGYGLESQKRDIEEYCKKNEMLITDWYIDAGLSGMDMTKRVELQRLISDISKINDIVVYKLDRLARDSVDALYMIEKLFTPKGIRVNSVHDFARYETPQDKFQTHIMAAVAEYDRNTMLLRMRGGMLERVKNGYWMGGGNTPYCYRYDKNLGYLVPIPERAEQANRAMDLFIEGMSDVKIQRLLGYKSEFVVRNILTGVVNIGYIPYKGGTYKGLHESIFERDKFYLAQELRKSRRKQHIYSFTEPHLLTGLCYCKTCGCKMRYQKITGMGIHKIYCCSHDKYLDYLPNYNADCDNPGAWASDIEKAFEHEILDISINLSQYKPKAKETKLQILTNQLEKQKSKLKRLYTLYAEGNDMVLDMIKTLETEIRETTEKISAERKNGQHEQKKEFVYENIKKLADIWDGISKSQKNSILKTIIDKVIVGKDDIEIQLKNF

SEQ ID NO: 8597 - protein, 453 aa, Unknown
  Description of Unknown: Integrase B8598 sequence
  SM00857,IPR006118,G3DSA:1.10.10.2600,IPR036162,PS51737, G3DSA:3.40.50.1390,Coil,IPR006119,IPR038109,SSF53041, IPR011109,PTHR30461,PS00397,PS51736,cd00338, PF00239
MECVAYIRVSTERQVEEGYGLESQKRDIEEYCKKNEMLITDWYIDAGLSGMDMSKRVELQRLISDISKINNIVVYKLDRLARDSVDALYMIEKLFTPKGVRVNSVHDFARYETPQDKFQTHIMAAVAEYDRNTMLLRMRGGMLERVKNGYWMGGGNTPYCYRYDKNLGYLVPIPERAEQANRAMDLFIDGMSDVKIQRLLGYKSEFVVRNILTGVVNIGYIPYKGGTYKGLHESIFEHDKFYLAQELRKSRRKQHIYSFTEPHLLTGLCYCKTCGCKMRYQKITGMGIHKIYCCSHDKYLDYLPNYNADCDNPGAWASDIEKAFEHEILDISIKLSQYKPKAKETKLQILTNQLEKQKSKLKRLYTLYAEGNDMVLDMIKTLETEIRETTEKISAERKNGQHEQKKEFVYENIKKLADIWDGISKSQKNSILKTIIDKVIVGKDDIEIQLKNF

SEQ ID NO: 8598 - protein, 453 aa, Unknown
  Description of Unknown: Integrase B8599 sequence
  SM00857,G3DSA:1.10.10.2600,IPR036162,PF13408,IPR025827, PS51737,G3DSA:3.40.50.1390,IPR006119,IPR038109,IPR011109, SSF53041,PTHR30461,Coil,PS51736,cd00338, PF00239
MECVAYMRVSTEKQAEEGNGLDSQKRDIELFCRKNELVVSDWYVDDGYTGANMDRPELQRLINDCIKKRVKCVVAFKLDRLSRSMIDGLYIIERVFQPNQVLFKCVHDSVSYDSPMEQAYTQMMAVFAQLDKNTMMLRMRGGMLERIKQGYWIGGANTPYCYNYSKEKGILIPIPERKEQANRALDMFIGGYSDLYIKELLGFHSEVLVRNVLTGVVNIGMIPYKGNVYQGLHEPIFDKERFELAQEIRKSRRKNKTACHTDANLLTGLCYCGVCGCKMRYQKWTHGKHKIYCCSRDKAMKYLPNFNPDCNNSLEWAADIEKQVESEILKISLNLSECKPIEKQSKLEIMQSQFEKEQVKLKRLYVLYSDGNDTVLEMIKNTEKSISEMKVKITEEEKNERNSQKKEVVYENIKKLADVWAHIDKKEKNNILKSIISRIVIVNGDVEIQLKNF

SEQ ID NO: 8599 - protein, 453 aa, Unknown
  Description of Unknown: Integrase B8600 sequence
  SM00857,IPR006118,G3DSA:1.10.10.2600,IPR036162,PS51737, G3DSA:3.40.50.1390,Coil,IPR006119,IPR038109,SSF53041, IPR011109,PTHR30461,PS00397,PS51736,cd00338, PF00239
MECVAYIRVSTERQVEEGYGLESQKRDIEEYCKKNEMLITDWYIDAGLSGMDMAKRVELQRLISDISKINNIVVYKLDRLARDSVDALYMIEKLFTPKGVRVNSVHDFARYETPQDKFQTHIMAAVAEYDRNTMLLRMRGGMLERVKNGYWMGGGNTPYCYRYDKNLGYLVPIPERAEQANRAMDLFIDGMSDVKVQRLLGFKSEQVVRSILTGVVNIGYIPYKGGIYKGLHEPIFDSEKFYLAQELRKSRHKRHIYSYTEPNLLTGMCYCRECGCKMRYQKITGMGIHKIYCCSHDKYLDYLPNYNADCDNPGAWASDVEKAFEQEILEISINLSKYKPKAKETKLQILTNQLEKQKAKLKRLYILYAEGNDMVLDMIKTLETEIRETTEKISAERKNGQHEQKKEFVYENIKKLADIWDGISKSQKNSILKTIIDKVIVGKDDIEIQLKNF

SEQ ID NO: 8600 - protein, 453 aa, Unknown
  Description of Unknown: Integrase B8601 sequence
  cd00338,SM00857,IPR006118,G3DSA:1.10.10.2600,IPR036162, PF13408,IPR025827,G3DSA:3.40.50.1390,IPR006119,IPR038109, SSF53041,PTHR30461,PS00397,PS51736,Coil, PF00239
MECVAYLRVSTEKQAEEGHGLESQKRDIENYCRKNELIIVDWYVDDGYTGSNMDRPEFQRLISDCYSKRVKCVVAYKLDRISRTMLDSIYVIERIFQPNNVRLECVHDAVNYNDPMQQAYTQMMAVFAQLDKNTMMLRMRGGILERVKKGYWPGGGIKPYCYRYDKEIGILIPIPERAERARQALDLFIQGYSDEKIMRMLGFRTEGVVRNILTGVVNIGKIKYKGNVYQGRHEPIFDVEKFNLGLEIRKTRSKARAYCRTEPNLLTGLCYCGVCGCKMRYQKWGSDRRKMYCCSRNRYLDYLPNYNHDCDNSVEWADKIEEQVESEILKISLNLSSYKPKEKATKLEIMQSQLDKNKTKLKRLYELYADGNDMVLDMISNLEREIEASKERIKEESKNVQKENKKEYVYENIKNLADVWDTIDKTKKNTILKSIISKVVVVNGNVDIQLKSF

SEQ ID NO: 8601 - protein, 453 aa, Unknown
  Description of Unknown: Integrase B8602 sequence
  PTHR30461:SF3,IPR036162,PS51737,IPR011109,PTHR30461, PS00397,PF00239,G3DSA:1.10.10.2600,IPR006119,SSF53041, cd00338,SM00857,IPR025827,IPR038109,PS51736, IPR006118,PF13408,G3DSA:3.40.50.1390,Coil
MECVAYLRVSTEKQAEEGHGLDSQKRDIENYCRKNDLIVSEWYVDDGYTGANMDRPALQRLILACSKKRVKCVVAFKLDRLSRSMVDGLYLIERVFIPNGVDFRCVHDSVNYGTPMEQAYTQIMAAFAQLDKNTMMLRMRGGMLERVKRGYWYGGGNLPYCYAYDREKGILVPIPEKARRANMALELYIDGWSDNRISSELGFRSEQVVRSIITGVVNIGLIKYKGNIYQGRHEPVFDRDRFYLAQNLRKNRKKARSYIQPDVNVLTGLCYCGECGCKMRYQKWTKSQTRMIWCCSHDKALNYLPNFNPDCKNKAQRADEIERQVEEQMIRISLDLSTYTPKEKESRLDILISQLEKEKKKLRRLYDLYAEGNDMVLDMIRNEEEEVQRMEDNVRECEKSQNPTRETIAYKNVKRLADVWDQIDKPEKNKILKSIIDKVVIVNGDVEIQLQRF

SEQ ID NO: 8602 - protein, 453 aa, Unknown
  Description of Unknown: Integrase B8603 sequence
  SM00857,IPR006118,G3DSA:1.10.10.2600,IPR036162,PF13408, IPR025827,G3DSA:3.40.50.1390,PS51737,IPR006119,IPR038109, SSF53041,IPR011109,PF00239,PTHR30461,PS00397, PS51736,Coil,cd00338
MKCVAYIRVSTEKQAEEGNGLDSQIRDIKNHCRKNGMIIEDWYVDDGYTGSNMDRPELQRLVNDCTRKRVKCVVSFKLDRLSRSMIDGLYLIERVFQPNNVRFECVHDSVSYDSPMEQAYTQMMAVFAQLDKNTMMLRMRGGMLERVKQGYWMGGGNLPYCYSYDKNSGILVPIPEKADKAQKALDLFLDGYSDVKIKNMLGFKSEPVVKSILTSVVNIGKIPYKGNIYQGRHTPIFDQEKFELAQEMRKTRSKSKICCQTEPNLLTGLCYCGVCGCKMRYQKWTHGKHKIYCCSRSKDLSYIPNYDENCDNSIEWSDEIEEQVEKEIIRISLDLSSYKPKEKETKLDIMRFQLKKDKKRLKRLYALYADGNDTVIEMIKDLESQIEKTKKNISDEEKNNANSQKKEFVYENIKKIADVWKYTDKKHKNMILKTIIDKIVIVNGNIEIQLKKF

SEQ ID NO: 8603 - protein, 453 aa, Unknown
  Description of Unknown: Integrase B8604 sequence
  PTHR30461:SF3,cd00338,SM00857,G3DSA:1.10.10.2600,IPR036162, PF13408,PS51737,IPR025827,G3DSA:3.40.50.1390,IPR006119, IPR038109,PF07508,IPR011109,SSF53041,PTHR30461, PS51736,Coil,PF00239
MECVAYMRVSTEKQVEEGNGLESQKRDILDYCSKNELIVTDWYVDDGYTGANMNRPELQRLISDCGKKKVKCVVAFKLDRISRSMIDGLYMIERIFQPNNVIFKCVHDSVSYNSPMEQAYTQMMAVFAQLDKNTMMLRMRGGMLERVKQGYWPGGGNTPYCYSYSKDQGILIPIPERAEQARKGLELYIKGYSDIKICKICGYKGEKVVRQILTSPVNIGMIPYKGKIYQGLHEPIFDKELFELAQQLRKSRSLNKASCITEPNLLTGLCYCGVCGCAMRYQKWTHGKHKIYCMSRNKSMSYLPNHNPDCNNSLEWADDIEEQVEREMLKISLDLSSYKPKEKETKLDIMQSQLDKEQTKLKRLYGLYADGNDAVLSMIKELEGNISAIKENIAEERKNFSARQKNAIVYDEIKKLADVWDSIDKKQKNLILKTIIDKIVIVNGNIEIQLKNF

SEQ ID NO: 8604 - protein, 453 aa, Unknown
  Description of Unknown: Integrase B8605 sequence
  SM00857,IPR006118,G3DSA:1.10.10.2600,IPR036162,PS51737, G3DSA:3.40.50.1390,Coil,IPR006119,IPR038109,SSF53041, IPR011109,PTHR30461,PS00397,PS51736,cd00338, PF00239
MECVAYIRVSTERQVEEGYGLESQKRDIEEYCKKNEMLITDWYIDAGLSGMDMSKRVELQRLISDISKINNIVVYKLDRLARDSVDALYMIEKLFTPKGVRVNSVHDFARYETPQDKFQTHIMAAVAEYDRNTMLLRMRGGMLERVKNGYWMGGGNTPYCYRYDKNLGYLVPISERAEQANRAMDLFIEGMSDLKIQRLLGYKSEFVVRNILTGVVNIGYIPYKGGTYKGLHESIFERDKFYLAQELRKSRRKQRAYSLTEPHLLTGLCYCKTCGCKMRYQKITGIGIHKIYCCSHDKYLNYLPNYNADCDNPGAWASDIEKAFEHEILDISINLSQYKPKAKETKLQILTNQLEKQKAKLKRLYTLYAEGNDMVLDMIKTLETEIRETTEKISAERKNGQHEQKKEFVYENIKKLADIWDGISKSQKNSILKTIIDKVIVGKDDIEIQLKNF

SEQ ID NO: 8605 - protein, 453 aa, Unknown
  Description of Unknown: Integrase B8606 sequence
  PTHR30461:SF3,IPR036162,PS51737,IPR011109,PTHR30461, PS00397,PF00239,G3DSA:1.10.10.2600,IPR006119,SSF53041, cd00338,SM00857,IPR025827,IPR038109,PS51736, IPR006118,PF13408,G3DSA:3.40.50.1390,Coil
MECVAYIRVSTERQVEEGYGLESQKRDIEEYCKKNEMLITDWYIDAGLSGMDMSKRVELQRLISDISKISNIVVYKLDRLARDSVDALYMIEKLFTPKGVRVNSVHDFARYETPQDKFQTHIMAAVAEYDRNTMLLRMRGGMLERVKNGYWMGGGNTPYCYRYDKNLGYLVPIPERAEQANRAMDLFIDGMSDVKIQRLLGYKSEFVVRSIMTGIVNIGYIPYKGGVYKGLHEPIFDREKFYLAQELRKSRRKQHTYCYTEPHLLTGLCYCRECGCKMRYQKITGMGIHKIYCCSHNSYLDYLPNHNPDCNNPGAWANDIEKAFEHEILDISINLSQYKPKAKETKLQILTKQLEKQKAKLKRLYTLYAEGNDMVLDMIKTLETEIRETTEKLSAERKNGQHEQKKEFVYENIKKLADIWDGISKSQKNSILKTIIDKVIVGKDDIEIQLKNF

SEQ ID NO: 8606 - protein, 453 aa, Unknown
  Description of Unknown: Integrase B8607 sequence
  PTHR30461:SF3,cd00338,SM00857,G3DSA:1.10.10.2600,IPR036162, PF13408,IPR025827,PS51737,G3DSA:3.40.50.1390,IPR006119, IPR038109,SSF53041,IPR011109,PTHR30461,PS51736, Coil,PF00239
MECVAYMRVSTEKQAEEGNGLDSQRRDIENYCRKNELVITDWYIDDGYTGANMDRPELQRLVSDCERKRVSYVVAFKLDRISRSMVDGIYLIERVFLKNNVEFKCVHDSISYDNPMEQAYTQMMAVFAQLDKNTMLLRMRGGMLERVKQGYWMGGGNLPYCYTYSKDTGTLIPIPERKERANKAMDLFLQGYSDVKIRDMLGFKSEFVVKQVLTSPVNIGMIPYKGNIYQGLHEPIFNKEVFEKAQQFRAIRKNKRASCHNIQTNLLTGLCYCGICGCAMRYQKWTHGKHKIYCCSRNKDLHYLPNHNPNCNNTLEWASDIEKAVEDEILLISANISDYKPRVKESKLEILQGQLEKEQTKRKRLYNLYAEGNDDVISMIKEIEKVIEDIRKQIREESAIETNKTRQNVFKNIKNLADIWEDIDKKQKNMLLKSIIEKIVISNGNIEIKLKDF

SEQ ID NO: 8607 - protein, 453 aa, Unknown
  Description of Unknown: Integrase B8608 sequence
  PTHR30461:SF3,IPR036162,PS51737,IPR011109,PTHR30461, PS00397,PF00239,G3DSA:1.10.10.2600,IPR006119,SSF53041, SM00857,IPR025827,IPR038109,PS51736,cd03768, IPR006118,PF13408,G3DSA:3.40.50.1390,PF07508,Coil
MIKGACYVRVSTDNQLENYSIEEQTDRLKAYCKAKDIQIVKIYTDGGYSGGNINRPALQQMLQDIGKGLIDSVIVYKLDRLSRSQKDTLMLIEDCFLAKNVDFVSVNENFDTSTPFGRAMIGILSVFAQLEKDQITERFTMGRIGRAKNGYFHGGGNTPTGYDYIDGELIINDYEALQVKDLYNRFLKGYSIHNCWQYMHQKYGGWSNEVSVRNVLKNELYIGKVKFKGVAYQGNHQPIISEEIFRQVQDLFNSSRRTSDTFKRSPFKANTLLSSLVYCGKCGARFHGEHGNYSCYSRTKGDKKYIVDPNCKNKKWKIEELDKLVLDYITRLDFSKLQNSHPTPVPVTDYSLRLTEIDKQIEKLIDLYQVSGIPLESIQKKMDALTKEKEALLNVSKPKNVPVTTLAEMITARDTLMSLSDSGSLDEKRACLTMIIDRIIIDDDNVNIKLKQL

SEQ ID NO: 8608 - protein, 453 aa, Unknown
  Description of Unknown: Integrase B8609 sequence
  SM00857,IPR006118,G3DSA:1.10.10.2600,IPR036162,PF13408, IPR025827,G3DSA:3.40.50.1390,Coil,PS51737,IPR006119, IPR038109,SSF53041,IPR011109,PTHR30461,PS00397, PS51736,cd00338,PF00239
MECVAYIRVSTEKQVEEGYGLESQQRDIKEYCQKNNMIISHWYIDAGLTGMEMSKRVALQELISDLKKIDKVVIYKLDRLARDSVDALNMIEKIFVPRNVEVLSVHDFAKYKTPQDKFQTQIMAAVAEYDRNTMLLRMRGGMLERIKEGYWPGGGNTPYCYSYSKETGTLVPIPERKKQANEAIDLFLQGYSDNKIRDMLGFKSEMVVRSLLISPVNIGYILYKGKIYKGKHEPIFEIDKFNLAQEVRKNRRKKKTTCINKEPNLLTGLCYCGVCGCSMRYQKWTHGKHKIYCCSRDKSMSYLPNYDANCDNTLEWAVDIEKQVEEEIIKISLNLSSEKPVAKQSKIEILQSQIKKEENRRKRFFNLYADGNDDVLLSIKEINNTIKSLKEQLETERSNTNLNRKKSVTYKNIKKIADVWDSIDKKDKNIILKSIIDKIVIVNGDIEIQLKNF

SEQ ID NO: 8609 - protein, 453 aa, Unknown
  Description of Unknown: Integrase B8610 sequence
  PTHR30461:SF3,SM00857,G3DSA:1.10.10.2600,IPR036162,PF13408, IPR025827,G3DSA:3.40.50.1390,PS51737,IPR006119,IPR038109, IPR011109,SSF53041,PTHR30461,Coil,PS51736, cd00338,PF00239
MECVAYMRVSTEKQAEEGNGLDSQKRDIELFCRKNELVVADWYVDDGYTGANMDRPELQRLINDCIKKRVKCVVAFKLDRLSRSMIDGLYIIERVFQPNHVLFKCVHDSVSYDSPMEQAYTQMMAVFAQLDKNTMMLRMRGGMLERIKQGYWIGGANTPYCYNYSKEKGILIPIPERKEQANRALDMFIGGYSDLYIKESLGFHSEVLVRNVLTGVVNIGMIPYKGNVYQGLHEPIFDKERFELAQEIRKSRRKNKTACHTDANLLTGLCYCGVCGCKMRYQKWTHGKHKIYCCSRDKAMKYLPNFNPNCNNSLEWAADIEKQVESEILKISLNLSECKPIEKQSKLEIMQSQFEKEQVKLKRLYVLYSDGNDTVLEMIKNTEKSISEMKVKITEEEKNERNSQKKEVVYENIKKLADVWAHIDKKEKNNILKSIISRIVIVNGDVEIQLKNF

SEQ ID NO: 8610 - protein, 453 aa, Unknown
  Description of Unknown: Integrase B8611 sequence
  PTHR30461:SF3,SM00857,G3DSA:1.10.10.2600,IPR036162,PF13408, IPR025827,G3DSA:3.40.50.1390,IPR006119,IPR038109,SSF53041, PTHR30461,Coil,PS51736,cd00338,PF00239
MECVAYMRVSTEKQAVEGNGLDSQKRDIENYCRKNELVITDWYIDDGYTGANMDRPGLQRLVNDCSRKRVSCVVAFKLDRLSRNMIDGIYLIEKVFQKCNVVFKCVHDSVNYDSPMEQAYTQMMAVFAQLDKNTMMLRMRGGMLERIKQGYWMGGGNLPYCYSYSKEQGILMPIPERAEQARKALELFISGYSDVKIKEICGFKSELVTRNILTGIVNIGMIPYKGKIYQGKHEPIFDKGRFNLAQELRKTRAKSRATCQTEPNLLTGLCYCGVCGCAMRYQKWTNGEHKIYCMSRNKSMSYLPNYNANCNNSLEWADDIEKQAEKEILKISLNLSSYKPKEKATKLEIMQSQLDKEQTKLKRLYNLYADGNDTVLEMIKESESLVKTMKANVLSESKSTANTQKKEFVYENIKKLADVWNNIDKKKKNMILKTIIDKIVIVNGNIEIQLKNF

SEQ ID NO: 8611 - protein, 453 aa, Unknown
  Description of Unknown: Integrase B8612 sequence
  PTHR30461:SF3,SM00857,G3DSA:1.10.10.2600,IPR036162,PF13408, IPR025827,G3DSA:3.40.50.1390,PS51737,IPR006119,IPR038109, IPR011109,SSF53041,PTHR30461,Coil, PS51736,cd00338,PF00239
MECVAYMRVSTEKQAEEGNGLDSQKRDIELFCRKNELVVADWYVDDGYTGANMDRPELQRLINDCIKKRVKCVVAFKLDRLSRSMIDGLYIIERVFQPNHVLFKCVHDSVSYDSPMEQAYTQMMAVFAQLDKNTMMLRMRGGMLERIKQGYWIGGANTPYCYNYSKEKGILIPIPERKEQANRALDMFIGGYSDLYIKESLGFHSEVLVRNVLTGVVNIGMIPYKGNVYQGLHEPIFDKERFELAQEIRKSRRKNKTACHTDANLLTGLCYCGVCGCKMRYQKWTHGKHKIYCCSRDKAMKYLPNFNPDCNNSLEWAADIEKQVESEILKISLNLSECKPIEKQSKLEIMQSQFEKEQVKLKRLYVLYSDGNDTVLEMIKNTEKSISEMKVKITEEEKNERNSQKKEVVYENIKKLADVWAHIDKKEKNNILKSIISRIVIVNGDVEIQLKNF

SEQ ID NO: 8612 - protein, 453 aa, Unknown
  Description of Unknown: Integrase B8613 sequence
  PTHR30461:SF3,SM00857,G3DSA:1.10.10.2600,IPR036162,PF13408, IPR025827,G3DSA:3.40.50.1390,IPR006119,IPR038109,SSF53041, PTHR30461,Coil,PS51736,cd00338,PF00239
MECVAYMRVSTEKQAVEGNGLDSQKRDIENYCRKNELVITDWYIDDGYTGTNMDRPELQRLVNDCSRKRVSCVVAFKLDRLSRNMIDGIYLIEKVFQKYNVMFKCVHDSVNYDSPMEQAYTQMMAVFAQLDKNTMMLRMRGGMLERVKQGYWFGGGNLPYCYSYSKEQGILIPIPEHAEQARKGLELFISGYSDVKIKEICGFRSELVTRSILTSVVNIGMIPYKGKIYQGKHEAVFDKDRFELGLELRKSRCSAKTYCITEPNLLTGLCYCGICGCKMRYQKWGSKKHKIYCCSRNKSLSYLPNYNASCNNSLEWADEIEKQVEEEILKISLDLSSYKPKEKATKLEIMQSQLEKEQIKLKRLYNLYADGNDTVLEMIKELESQIKEMKSNIAAESKSAINTQKKEFVYENIKKLADIWDKVDKKQKNMILKTIIDRIVIVNGNIEIQLKNF

SEQ ID NO: 8613 - protein, 453 aa, Unknown
  Description of Unknown: Integrase B8614 sequence
  PTHR30461:SF3,SM00857,G3DSA:1.10.10.2600,IPR036162,PF13408, IPR025827,G3DSA:3.40.50.1390,IPR006119,IPR038109,SSF53041, PTHR30461,Coil,PS51736,cd00338, PF00239
MECVAYMRVSTEKQAVEGNGLDSQKRDIENYCRKNELVITDWYIDDGYTGANMDRPGLQRLVNDCSRKRVSCVVAFKLDRLSRNMIDGIYLIEKVFQKCNVVFKCVHDSVNYDSPMEQAYTQMMAVFAQLDKNTMMLRMRGGMLERIKQGYWMGGGNLPYCYSYSKEQGILIPIPERAEQARKALELFISGYSDVKIKEICGFKSELVTRNILTGIVNIGMIPYKGKIYQGRHEPIFDKGRFNLAQELRKTRAKSRTTCQTEPNLLTGLCYCGVCGCAMRYQKWTNGEHKIYCMSRNKSMSYLPNYNANCDNSLEWADDIEKQVEKEILKISLNLSSYKPKEKATKLEIMQSQLDKEQTKLKRLYSLYADGNDTVLEMIKESESTVKTMKANVLSESKNAADTQKKEFVYENIKKLADVWNNIDKKKKNMILKTIIDKIVIVNGNIEIQLKNF

SEQ ID NO: 8614 - protein, 453 aa, Unknown
  Description of Unknown: Integrase B8615 sequence
  SM00857,G3DSA:1.10.10.2600,IPR036162,PF13408,IPR025827, G3DSA:3.40.50.1390,PS51737,IPR006119,IPR038109,SSF53041, IPR011109,PTHR30461,Coil,PS51736,cd00338, PF00239
MECVAYMRVSTEKQAEEGNGLDSQKRDIQNYCRKNKLIITDWYIDDGYTGSNMDRPELQRLINDCSKKRVKCVVAFKLDRLSRSMIDGIYMIERIFQPNNIEFYCVHDSVSYDSPMEQAYTQMMAVFSQLDKNTMLLRMRGGMLERVKKGYWMGGGNTPYCYEYDKEQGILVPIPEKAEQARQALELFIDGYSDRSISDMLHFSSDIVVSRILTSPVNIGMIPYKGKMYQGRHQPVFQRDRFELAQEVRKSRRKNRTYRKTEPNLLTGLCYCGVCGCKMRYQKWGCEKQKIHCCSRDKYLQYLPNYSANCDNMAIWADEIEKQVEEEIIKISLNLSEYKPKQKESKIEIMQKNLNREKSKLKRLYNLYAEGNDTVLEMVKELEKTIGESKKRIEEEYKNIGNTNKKEYVYENIKSLADVWNTISKTGKNSILKSIVEKIVIVNGDVEIVLKNF

SEQ ID NO: 8615 - protein, 453 aa, Unknown
  Description of Unknown: Integrase B8616 sequence
  SM00857,G3DSA:1.10.10.2600,IPR036162,PF13408,IPR025827, G3DSA:3.40.50.1390,IPR006119,IPR038109,SSF53041,PF00239, PTHR30461,PS51736,Coil,cd00338
MKRKIRCAIYDRVSHELQVEKGLSLDTQKEMLTSYAKEQGYEIVDYYQDEGISARKTMKNRKELLRLLEDVKADKIDIILVTKLDRWFRSVKDYHNTQAILDAHHCAWKTILEDYDTTTSDGQLKINIMLAVAQNEADRTSERIKVVFSHKIRNKEHLNGPVPWGYMVDEKKHLVKDPEIAPIVEDMFNHYFTTFSKRETIMYIRSKYPGKTPEGNSLAKIFSNATYAGIRFGIEDYCDAYLTWGQHKKIVESTTAKVYPATHPQQTYIFSGMLRCPHCGKMLSGYVRKAKKAGRTYEYPAYRCNKRYNKHSAPVKTEKIVEQYVLEFFEEELNRSIYDLELKEGLSKGEKTANVSVLQDELNRINIMFEKGRISLDYYDKRYEEIETQIKEATVSHSKELRARKEIRDGLDGNWKELYLQLDASHKRAFWKNIIKEILIDPETHELNGIIFF

SEQ ID NO: 8616 - protein, 453 aa, Unknown
  Description of Unknown: Integrase B8617 sequence
  PTHR30461:SF3,SM00857,G3DSA:1.10.10.2600,IPR036162, PF13408,IPR025827,G3DSA:3.40.50.1390,IPR006119, IPR038109,SSF53041,PTHR30461,Coil, PS51736,cd00338,PF00239
MECVAYMRVSTEKQAVEGNGLDSQKRDIENYCRKNELVITDWYIDDGYTGTNMDRPELQRLVNDCSRKRVSCVVAFKLDRLSRNMIDGIYLIEKVFQKYNVVFKCVHDSVNYDSPMEQAYTQMMAVFAQLDKNTMMLRMRGGMLERIKQGYWMGGGNLPYCYSYSKEQGILIPIPERAEQARRGLELFISGYSDAKIKEICGFKSELVTRSILTGVVNIGMIPYKGKIYQGKHEPIFDKDRFNLGLELRKSRCSAKTYCITEPNLLTGLCYCGICGCKMRYQKWGSEKHKIYCCSRNKSLSYLPNYNASCNNSLEWADEIEKQVEEEILKISLDLSSYKPKEKATKLEIMQSQLEKEQIKLKRLYNLYADGNDTVLEMIKELEAQIKEMKANIAVESKNAINTQKKEFVYENIKKLADIWDKVDKKQKNLILKTIIDKIVIVNGNIEIQLKNF

SEQ ID NO: 8617 - protein, 453 aa, Unknown
  Description of Unknown: Integrase B8618 sequence
  PTHR30461:SF3,SM00857,G3DSA:1.10.10.2600,IPR036162,PF13408, IPR025827,G3DSA:3.40.50.1390,IPR006119,IPR038109,SSF53041, PTHR30461,Coil,PS51736,cd00338,PF00239
MECVAYMRVSTEKQAVEGNGLDSQKRDIENYCRKNELVITDWYIDDGYTGANMDRPGLQRLVNDCSRKRVSCVVAFKLDRLSRNMIDGIYLIEKVFQKCNVVFKCVHDSVNYDSPMEQAYTQMMAVFAQLDKNTMMLRMRGGMLERIKQGYWMGGGNLPYCYSYSKEQGILIPIPERAEQARKALELFISGYSDVKIKEICGFKSELVTRNILTGIVNIGMIPYKGKIYQGKHEPIFGKGRFNLAQELRKTRAKSRATCQTEPNLLTGLCYCGVCGCAMRYQKWTNGEHKIYCMSRNKSMSYLPNYNANCNNSLEWADDIEKQVEKEVLKISLNLSSYKPKEKATKLEIMQSQLDKEQTKLKRLYNLYADGNDTVLEMIKESESLVKTMKANVLSESKSTANTQKKEFVYENIKKLADVWNNIDKKKKNMILKTIIDKIVIVNGNIEIQLKNF

SEQ ID NO: 8618 - protein, 453 aa, Unknown
  Description of Unknown: Integrase B8619 sequence
  PTHR30461:SF3,cd00338,SM00857,G3DSA:1.10.10.2600,IPR036162, PF13408,PS51737,G3DSA:3.40.50.1390,IPR025827,IPR006119, IPR038109,IPR011109,SSF53041,PTHR30461, PS51736,Coil,PF00239
MECVAYMRVSTEKQAEEGNGLDSQRRDIENYCRKNELVITDWYIDDGYTGANMDRPELQRLVSDCDRKRVGYVVAFKLDRISRSMVDGIYLIERVFLKNNVEFKCVHDSISYDNPMEQAYTQMMAVFAQLDKNTMLLRMRGGMLERVKKGYWMGGGNTPYCYNYSKETGTLIPIPERKEQANRAMDLFLQGYSDVKIKDMLGFKSEFVTKQVLTSPVNIGMIPYKGKLYQGLHEPIFDKETFEKAQQFRRTRSKKRVNCNNLQTNLLTGLCYCGVCGCAMRYQKWTHGKHKILCCSRDSSLTYLPNHNPNCNNTLEWASDIENAVEKEILQISANISEYKPRQKESKLEILQSQLEKEQSKRKRLYGLYAEGNDDVIGMIKEIEQTIEELKQDIVKESAIETDNVRKKVFENIKNLADIWADIDKKQKNTLLKSIIEKIIVSNGNIEIRLKDF

SEQ ID NO: 8619 - protein, 453 aa, Unknown
  Description of Unknown: Integrase B8620 sequence
  PTHR30461:SF3,SM00857,G3DSA:1.10.10.2600,IPR036162,PF13408, IPR025827,G3DSA:3.40.50.1390,IPR006119,IPR038109,SSF53041, PTHR30461,Coil,PS51736,cd00338,PF00239
MECVAYMRVSTEKQAVEGNGLDSQKRDIENYCRKNELVITDWYVDDGYTGTNMDRPELQRLVNDCSRKRISCVVAFKLDRLSRNMIDGIYLIEKVFQKYDVVFKCVHDSVNYDSPMEQAYTQMMAVFAQLDKNTMMLRMRGGMLERVKQGYWFGGGNLPYCYSYSKDQGILIPIPEHAQQARKGLELFISGYSDAKIKEICGFRSELVTRSILTSVVNIGMIPYKGKIYQGKHEAVFDKDRFELGLELRKTRCSAKTYCITEPNLLTGLCYCGICGCKMRYQKWGSKKHKIYCCSRNKSLSYLPNYNASCNNSLEWADEIEKQVEEEILKISLDLSSYKPKEKATKLEIMQSQLEKEQIKLKRLYNLYADGNDTVLEMIKELESQIKEMKSNIAAESKNAINTQKKEFVYENIKKLADIWDKVDKKQKNMILKTIIDRIVIVNGNIEIQLKNF

SEQ ID NO: 8620 - protein, 453 aa, Unknown
  Description of Unknown: Integrase B8621 sequence
  PTHR30461:SF3,SM00857,G3DSA:1.10.10.2600,IPR036162,PF13408, PS51737,G3DSA:3.40.50.1390,IPR025827,IPR006119,IPR038109, SSF53041,IPR011109,PF00239,PTHR30461, PS51736,Coil,cd00338
MECVAYMRVSTEKQAEEGNGLDSQRRDIENYCRKNELIITDWYIDDGYTGANMDRPELQRLVSDCDRKRVGYVVAFKLDRISRSMVDGIYLIERVFLKNNVEFKCVHDSISYDNPMEQAYTQMMAVFAQLDKNTMLLRMRGGMLERVKKGYWMGGGNTPYCYNYSKETGTLIPIPERKEQANRAMDLFLQGYSDVKIKDMLGFKSEFVTKQVLTSPVNIGMIPYKGKLYQGLHEPIFDKETFEKAQQFRRTRSKKRVNCNNLQTNLLTGLCYCGVCGCAMRYQKWTHGKHKILCCSRDSSLTYLPNHNPNCNNTLEWASDIENAVEKEILQISANISEYKPRQKESKLEILQSQLEKEQSKRKRLYGLYAEGNDDVIGMIKEIEQTIEELKQDIVKESAIETDNVRKKVFENIKNLADIWADIDKKQKNMLLKSIIEKIVISNGNIEIRLKDF

SEQ ID NO: 8621 - protein, 453 aa, Unknown
  Description of Unknown: Integrase B8622 sequence
  PTHR30461:SF3,cd00338,SM00857,G3DSA:1.10.10.2600,IPR036162, PF13408,PS51737,IPR025827,G3DSA:3.40.50.1390,IPR006119, IPR038109,PF07508,IPR011109,SSF53041,PTHR30461, PS51736,Coil,PF00239
MTAVIYARYSTDSQREESIEGQIRECTAYAEKNGFTVVKHYIDRAISAKTDNRPQFQQMIKDSERGIFDVIIVWKLDRFARNRYDSARYKTQLKRNGVKLVSATEVISAGPEGIILESVLEGYAEYYSADLSEKVVRGMTENALKGIYNGGTIPFGYMIDETRHYQPDPLLAPYVEQTFQKYADGATMTDLRDWLKAHNIKNSMGGEMSYNTIQRMLSNRRYIGELRLRDVVQPNAIPALVSEDLFNKVQEKLAKNKKAPARHKAEESYLLTTKLYCGKCGALMFGESGVSHTGKMYTYYKCAAAKKKKTCDKKAVRKQWLEDLVVNETMKLVEDDASMNAIIAKVMELQNQESTDLPIYEKQLKETEVGITNMLNAIQMGILTSSTKERLEALEEQRKELQARIAEERLAKPKMKEEFVRFWLLRFRKLDMTQPEQPQARQSVALFLVLVLR

SEQ ID NO: 8622 - protein, 453 aa, Unknown
  Description of Unknown: Integrase B8623 sequence
  PTHR30461:SF3,SM00857,G3DSA:1.10.10.2600,IPR036162,PF13408, IPR025827,G3DSA:3.40.50.1390,IPR006119,IPR038109,SSF53041, PTHR30461,Coil,PS51736,cd00338,PF00239
MECVAYMRVSTERQAEEGNGLESQKRDILDYCSKNELIVTDWYVDDGYTGANMNRPELQRLVADCKHKRIYCVVAFKLDRLSRNMIDGLYMIEKIFQPNGVQFKCVHDSVNYDSPMEQAYTQMMAVFAQLDKNTMMLRMRGGMLERVKQGYWMGGGNLPYCYSYDKDSGILIPIAERKEQANKALELYISGYSDAMICEICGYKGERVVNRILTSTVNIGMIPYKGKIYQGLHEPIFNKEQFELAQQLRKSRSCNKASCITEPNLLTGLCYCGVCGCAMRYQKWTHGKHKIYCMSRNKAMSYLPNHKPDCNNSLEWADDIEEQVEKEMLKISLDLSSYKPKEKETKLDIMQSQLDKEQAKLKRLYGLYADGNDTVLSMIKELEANISAIKENIAEERKNFSARQKNTIVYDEIKKLADVWDSIDKKQKNMILKTIIDKIIIVNGNIEIQLKNF

SEQ ID NO: 8623 - protein, 453 aa, Unknown
  Description of Unknown: Integrase B8624 sequence
  PTHR30461:SF3,SM00857,G3DSA:1.10.10.2600,IPR036162,PF13408, IPR025827,G3DSA:3.40.50.1390,IPR006119,IPR038109,SSF53041, PTHR30461,Coil,PS51736,cd00338, PF00239
MECVAYMRVSTEKQAVEGNGLDSQKRDIENYCRKNELVITDWYIDDGYTGANMDRPGLQRLVNDCSRKRVSCVVAFKLDRLSRNMIDGIYLIEKVFQKCNVTFKCVHDSVNYDSPMEQAYTQMMAVFAQLDKNTMMLRMRGGMLERIKQGYWMGGGNLPYCYSYSKEQGILIPIPERAEQARKALELFISGYSDVKIKEICGFKSELVTRNILTGIVNIGMIPYKGKIYQGRHEPIFDKGRFNLAQELRKTRAKSRVTCQTEPNLLTGLCYCGVCGCAMRYQKWTNGEHKIYCMSRNKSMSYLPNYNANCNNSLEWADDIEKQVEKEILKISLNLSSYKPKEKATKLEIMQSQLDKEQTKLKRLYNLYADGNDTVLEMIKESESLIKTMKANVLSESKSTANTQKKEFVYENIKKLADVWDNIDKKKKNMILKTIIDKIVIVNGNIEIQLKNF

SEQ ID NO: 8624 - protein, 453 aa, Unknown
  Description of Unknown: Integrase B8625 sequence
  SM00857,G3DSA:1.10.10.2600,IPR036162,PF13408,IPR025827, G3DSA:3.40.50.1390,PS51737,IPR006119,IPR038109,SSF53041, IPR011109,PF00239,PTHR30461,PS51736,Coil, cd00338
MKRKIRCAIYDRVSHELQVEKGLSLDTQKEMLTSYAKEQGYEIVDYYQDEGISARKTMKNRKELLRLLEDVKADKIDIILVTKLDRWFRSVKDYHNTQAILDAHHCAWKTILEDYDTTTSDGQLKINIMLAVAQNEADRTSERIKVVFSHKIRNKEHLNGPVPWGYMVDEKKHLVKDPEIAPIVEDMFNHYFTTFSKRETIMYIRSKYPGKTPEGNSLAKIFSNATYAGIRFGIENYCDAYLTWEQHKKIVESTTAKFYPATHPQQTYIFSGMLRCPHCGKMLSGYVRKAKKAGRTYEYPAYRCNKRYNKHSAPVKTEKIVEQYVLEFFEEELNRSIYDLELKEGLSKGEKTANVSVLQDELNRINIMFEKGRISLDYYDKRYEEIETQIKEATVSHSKELRARKEIRDGLDGNWKELYLQLDASHKRAFWKNIIKEILIDPETHELNGIIFF

SEQ ID NO: 8625 - protein, 453 aa, Unknown
  Description of Unknown: Integrase B8626 sequence
  SM00857,IPR006118,G3DSA:1.10.10.2600,IPR036162,PS51737, G3DSA:3.40.50.1390,Coil,IPR006119,IPR038109,SSF53041, IPR011109,PTHR30461,PS00397,PS51736,cd00338, PF00239
MECVAYIRVSTERQVEEGYGLESQKRDIEEYCKKNEMLITDWYIDAGLSGMDMSKRVELQRLISDISKINNIVVYKLDRLARDSVDALYMIEKLFTPKGVRVNSVHDFARYETPQDKFQTHIMAAVAEYDRNTMLLRMRGGMLERVKNGYWMGGGNTPYCYRYDKNLGYLVPIPERAEQANRAMDLFIDGMSDVKIQRLLGYKSEFVVRNILTGVVNIGYIPYKGGTYKGLHESIFEHDKFYLAQELRKSRRKQHIYSFTEPHLLTGLCYCKTCGCKMRYQKITGMGIHKIYCCSHDKYLDYLPNYNADCDNPGAWASDIEKAFEHEILDISINLSQYKPKAKETKLQILTNQLEKQKSKLKRLYTLYAEGNDMVLDMIKTLETEIRETTEKISTERKNGQHEQKKEFVYENIKKLADIWDGISKSQKNSILKTIIDKVIVGKDDIEIQLKNF

SEQ ID NO: 8626 - protein, 453 aa, Unknown
  Description of Unknown: Integrase B8627 sequence
  PTHR30461:SF3,SM00857,G3DSA:1.10.10.2600,IPR036162,PF13408, IPR025827,G3DSA:3.40.50.1390,PS51737,IPR006119,IPR038109, SSF53041,IPR011109,PTHR30461,Coil,PS51736, cd00338,PF00239
MECVAYMRVSTEKQAEEGNGLDSQKRDIELFCRKNELVVSDWYVDDGYTGANMDRPELQRLINDCIKKRVKCVVAFKLDRLSRSMIDGLYIIERVFQPNQVLFKCVHDSVSYDSPMEQAYTQMMAVFAQLDKNTMMLRMRGGMLERIKQGYWIGGANTPYCYNYSKEKGILVPIPERKEQANRALDMFIGGYSDLYIKESLGFHSEVLVRNVLTGVVNIGMIPYKGNVYQGLHEPIFDKERFELAQEIRKSRRKNKTACHTDANLLTGLCYCGVCGCKMRYQKWTHGKHKIYCCSRDKAMKYLPNFNPNCNNSLEWAADIEKQVESEILKISLNLSECKPIEKQSKLEIMHSQFEKEQVKLKRLYVLYSDGNDTVLEMIKNTEKSISEMKVKITEEEKNERNSQKKEVVYENIKKLADVWAHIDKKEKNNILKSIISRIVIVNGDVEIQLKNF

SEQ ID NO: 8627 - protein, 453 aa, Unknown
  Description of Unknown: Integrase B8628 sequence
  PTHR30461:SF3,SM00857,G3DSA:1.10.10.2600,IPR036162,PF13408, IPR025827,G3DSA:3.40.50.1390,IPR006119,IPR038109,SSF53041, PTHR30461,Coil,PS51736,cd00338,PF00239
MECVAYMRVSTEKQAVEGNGLDSQKRDIENYCRKNELVITDWYIDDGYTGTNMDRPELQRLVNDCSRKRVSCVVAFKLDRLSRNMIDGIYLIEKVFQKYNVVFKCVHDSVNYDSPMEQAYTQMMAVFAQLDKNTMLLRMRGGMLERIKQGYWMGGGNLPYCYSYSKEQGILIPIPERAEQARKGLELFISGYSDAKIKEICGFKSELVTRSILTGVVNIGMIPYKGKIYQGKHEPIFDKDRFNLGLELRKSRCSAKTYCITEPNLLTGLCYCGICGCKMRYQKWGSEKHKIYCCSRNKSLSYLPNYNASCNNSLEWADEIEKQVEEEILKISLDLSSYKPKEKATKLEIMQSQLDKEQTKLKRLYNLYADGNDTVLEMIKELEAQIKEMKANIAVESKNAINTQKKEFVYENIKKLADIWDKVDKKQKNLILKTIIDKIVIVNGNIEIQLKNF

SEQ ID NO: 8628 - protein, 453 aa, Unknown
  Description of Unknown: Integrase B8629 sequence
  SM00857,IPR006118,G3DSA:1.10.10.2600,IPR036162, PS51737,G3DSA:3.40.50.1390,IPR006119,IPR038109, PF07508,IPR011109,SSF53041,PF00239, PTHR30461,PS00397,PS51736,Coil,cd00338
MKNAIIYVRVSTEEQAKNDLKSSLEMQKSKCLDYCKQNNLNPVKIIQDIQSGGNDKRKGFLELQKELETGIYDIVVVYEISRISRVASTGLEFADMLSRLSVQFASIMQPQANKFILGILFSIAEEERTQGSQRTKSNKLERAKKGFYQGKAPYGYKNIPNSLEIVEEEAKIVRELFEEYLNSFSFSKLSRDYNISISTVKNILTNRAYTGWFKYGDKKRDNLFQEYKKSKDVQYYKGNYPHIIDEVIFYKVQEAISKKIKINAAFPVILFSGLVECSCGSKMYQEKKTKMIKGVKNISYYYKCNSCNKSFNANKEKIIIEAIKSYEVESGEVEKVDNSKIINKLKKELEQLPIKKQRLMELYTNGLISMEAIKEKCNNFDIEKEKIENQLKIYTQESKEISVQEILDTKAKLIYILENYDLDDVQSVRKILRMLIKKIKINDIKKFDFLIEL

SEQ ID NO: 8629 - protein, 453 aa, Unknown
  Description of Unknown: Integrase B8630 sequence
  PTHR30461:SF3,cd00338,SM00857,G3DSA:1.10.10.2600,IPR036162, PF13408,IPR025827,G3DSA:3.40.50.1390,IPR006119,IPR038109, SSF53041,PTHR30461,PS51736,Coil,PF00239
MECVAYMRVSTEKQAVEGNGLDSQKRDIENYCRKNELVITDWYIDDGYTGTNMDRPELQRLVNDCSRKRVSCVVAFKLDRLSRNMIDGIYLIEKVFQKYNVVFKCVHDSVNYDSPMEQAYTQMMAVFAQLDKNTMMLRMRGGMLERIKQGYWMGGGNLPYCYSYSKEQGILIPIPERAEQARKGLELFISGYSDAKIKEICGFKSELVTRSILTGVVNIGMIPYKGKIYQGKHEPIFDKDRFNLGLELRKSRCSAKTYCITEPNLLTGLCYCGICGCKMRYQKWGSEKHKIYCCSRNKSLSYLPNYNASCNNSLEWADEIEKQVEEEILKISLDLSSYKPKEKATKLEIMQSQLEKEQIKLKRLYNLYADGNDTVLEMIKELEAQIKEMKLNIAAESKNAINMQKKEFVYENIKKLADIWDKVDKKQKNLILKTIIDKIVIVNGNIEIQLKNF

SEQ ID NO: 8630 - protein, 453 aa, Unknown
  Description of Unknown: Integrase B8631 sequence
  PTHR30461:SF3,SM00857,G3DSA:1.10.10.2600,IPR036162,PF13408, IPR025827,G3DSA:3.40.50.1390,IPR006119,IPR038109,SSF53041, PTHR30461,Coil,PS51736,cd00338, PF00239
MECVAYMRVSTEKQAVEGNGLDSQKRDIENYCRKNELVITDWYIDDGYTGTNMDRPELQRLVNDCSRKRISCVIAFKLDRLSRNMIDGIYLIEKVFQKYDVVFKCVHDSVNYDSPMEQAYTQMMAVFAQLDKNTMMLRMRGGMLERVKQGYWFGGGNLPYCYSYSKDQGILIPIPEHAEQARKGLELFISGYSDAKIKEICGFRSELVTRSILTSVVNIGMIPYKGKTYQGKHEAVFNKDRFELGLELRKTRCSAKTYCITEPNLLTGLCYCGICGCKMRYQKWGSKKHKIYCCSRNKSLSYLPNYNASCNNSLEWADEIEKQVEEEILKISLDLSSYKPKEKATKLEIMQSQLEKEQIKLKRLYNLYADGNDTVLEMIKELESQIKEMKSSIAAESKNAINTQKKEFVYENIKKLADIWDKVDKKQKNMILKTIIDRIVIVNGNIEIQLKNF

SEQ ID NO: 8631 - protein, 453 aa, Unknown
  Description of Unknown: Integrase B8632 sequence
  PTHR30461:SF3,cd00338,SM00857,G3DSA:1.10.10.2600,IPR036162, PF13408,IPR025827,G3DSA:3.40.50.1390,IPR006119,IPR038109, SSF53041,PTHR30461,PS51736,Coil,PF00239
MKCVAYMRVSTEKQAEEGNGLESQKRDIENYCKKNELIIADWYVDEGYTGSNMNRPELQRLITDCSRKKVNCVVAFKLDRISRSMVDGIYIIEKVFQSNNVAFKCVHDSISYDSPMEQAYTQMMAVFAQLDKNTMMLRMRGGMLERIKQGYWWGGGNTPYCYRYDKEQGILIPIQERAEQARKALELFISGYSDAKIKEICGFKSELVTRKVLTGVVNIGMIPYKGNIYQGKHKPIFDKDRFELAQELRKSRCSAKISCFTEPNLLTGLCYCGVCGCKMRYQKWSNGNHKIYCCSRNKGLKYLPNYNPNCNNSLEWADDIEKQVTDEILKISLNLSSYKPKAKETKLEIMQSQLEREQTKLKRLYSLYADGNDTVLEMIKDLESQISKTKEDISVESKNAINTQKKEFTYQNIKKLADVWDNIDKKQKNFILKTIIDKVIIVNGNVEIQLKNF

SEQ ID NO: 8632 - protein, 453 aa, Unknown
  Description of Unknown: Integrase B8633 sequence
  PTHR30461:SF3,SM00857,G3DSA:1.10.10.2600,IPR036162,PF13408, IPR025827,G3DSA:3.40.50.1390,PS51737,IPR006119,IPR038109, IPR011109,SSF53041,PTHR30461,Coil, PS51736,cd00338,PF00239
MECVAYMRVSTEKQAEEGNGLDSQKRDIELFCRKNELVVSDWYVDDGYTGANMDRPELQRLINDCIKKRVKCVVAFKLDRISRSMIDGLYIIERVFQPNQVLFKCVHDSVSYDSPMEQAYTQMMAVFAQLDKNTMMLRMRGGMLERIKQGYWIGGANTPYCYNYSKEKGILIPIPERKEQANRALDMFIGGYSDLYIKESLGFHSEVLVRNVLTGVVNIGMIPYKGNVYQGLHEPIFDKERFELAQEIRKSRRKNKTACHTDANLLTGLCYCGVCGCKMRYQKWTHGKHKIYCCSRDKAMKYLPNFNPDCNNSLEWAADIEKQVESEILKISLNLSECKPIEKQSKLEIMQSQFEKEQVKLKRLYVLYSDGNDTVLEMIKSTEKSISEMKVKITEEEKNERNSQKKEVVYENIKKLADVWAHIDKKEKNNILKSIISRIVIVNGDVEIQLKNF

SEQ ID NO: 8633 - protein, 453 aa, Unknown
  Description of Unknown: Integrase B8634 sequence
  PTHR30461:SF3,IPR036162,PS51737,IPR011109,PTHR30461, PS00397,PF00239,G3DSA:1.10.10.2600,IPR006119,SSF53041, cd00338,SM00857,IPR025827,IPR038109,PS51736, IPR006118,PF13408,G3DSA:3.40.50.1390,Coil
MECVAYLRVSTEKQAEEGHGLDSQKRDIEDYCRKNDLIVSEWYVDDGYTGANMDRPALQRLILACSKKRVKCVVAFKLDRLSRSMVDGLYLIERVFIPNGVDFRCVHDSVKYETPMEQAYTQIMAAFAQLDKNTMMLRMRGGMLERVKRGYWYGGGNLPYCYDYDRGKGILIPIPEKARRANMALDLYIDGWSDNRISNELGFRSEQVVRSIITGVVNIGLIKYKGNIYQGRHEPVFDRDRFYLAQNLRKNRKKARSYIHPDVNILTGLCYCGECGCKMRYQKWTKSQTRMIWCCSHDKALNYLPNFNQNCKNKAQRADEIERQVEEQMIRISLDLSTYMPKEKESRLDILISQLEKEKKKLRRLYDLYAEGNDMVLDLIRNEEEEVQRMEDHVRECEQSQNPTRETIAYKNVKRLADVWDQIDKPEKNKILKSIIDKVVIVNGDVEIQLQRF

SEQ ID NO: 8634 - protein, 453 aa, Unknown
  Description of Unknown: Integrase B8635 sequence
  SM00857,IPR006118,G3DSA:1.10.10.2600,IPR036162,PS51737, G3DSA:3.40.50.1390,IPR006119,IPR038109,PF07508,IPR011109, SSF53041,PF00239,PTHR30461,PS00397,PS51736, Coil,cd00338
MKNAIIYVRVSTEEQAKNDLKSSLEMQKSKCLDYCKQNNLNPVKIIQDIQSGGNDKRKGFLELQKELETGIYDIVVVYEISRISRVASTGLEFADMLSRLSVQFASIMQPQANKFILGILFSIAEEERTQGSQRTKSNKLERAKKGFYQGKAPYGYKNIPNSLGIVEEEAKIVRELFEEYLNSFSFSKLSRDYNISISTVKNILTNRAYTGWFKYGEKKRDNLFQEYKKSKDVQYYKGNYPHIIDEAIFYKVQEAISKKIKINAAFPVILFSGLVECSCGSKMYQEKKTKMIKGVKNISYYYKCNSCNKSFNANKEKIIIEAIKSYEVESGEVEKVDNSKIINKLKKELEQLPIKKQRLMELYTNGLISMEAIKEKCNNFDHEKEKIEIQLKKYTQESKEISTQEILDTKAKLIYILENYDLDDVQSIRKILRMLIKRIKINDIKKFDFLIEL

SEQ ID NO: 8635 - protein, 453 aa, Unknown
  Description of Unknown: Integrase B8636 sequence
  PTHR30461:SF3,SM00857,G3DSA:1.10.10.2600,IPR036162,PF13408, PS51737,IPR025827,G3DSA:3.40.50.1390,PS51736,IPR006119, IPR038109,PF07508,IPR011109,SSF53041,PTHR30461, mobidb-lite,cd00338,PF00239
MRKITKLETKNIELPKLKRVAAYARVSVERGRTLHSYSAQVSYYNELIQKNPEWEFAGVYSDLGISGTGIEKRNDFKRLLQDCEEGKIDIILTKSISRFARNTVDLLNVVRHLKELGIEVRFEKEGISSLTGDGELMLSILASFAQEEVISTSNNIKWAIKKKFESGKPQCRYKIYGYRWDGDNLVIEPEEAKIVKLIFQMYLNKVSAERMEIELKEMGVIATNGGYFNIGTIRDMLLNITYTGNLLLQKSYTPNPLVRRKVKNNGELPKYYVENNHEAIIPMEMFIQVQEERKRRKAEGQRANFGKNITCFSCRVKCPICGKNYMRNSRSKNSDGIKAHIWACGTRLTGGSKACPGKTINEIALKRVSAKVLGLDEFDSNAFDEQIKKVIVIGDDLLEFHFNDGKIISEKWEYNARKEYWTEEKRRERGEKLKKSWRMKNDKKSNNDTSITK

SEQ ID NO: 8636 - protein, 453 aa, Unknown
  Description of Unknown: Integrase B8637 sequence
  PTHR30461:SF3,SM00857,G3DSA:1.10.10.2600,IPR036162,PF13408, IPR025827,G3DSA:3.40.50.1390,IPR006119,IPR038109,SSF53041, PTHR30461,Coil,PS51736,cd00338,PF00239
MECVAYMRVSTEKQAEEGNGLESQKRDILDYCSKNELIVTDWYVDDGYTGANMNRPELQRLVADCKHKRISCVVAFKLDRLSRNMIDGLYMIEKIFQPNGVQFKCVHDSVSYDSPMEQAYTQMMAVFAQLDKNTMMLRMRGGMLERVKQGYWMGGGNLPYCYSYDKDSGILIPIPERKVQANKALELYIKGYSDLKICKICGYKGEKVVRQILTTPVNIGMIPYKGKIYQGLHEPIFDKERFELAQQLRKSRSLNKASCITEPNLLTGLCYCGVCGCAMRYQKWTHGKHKIYCMSRNKAMSYLPNHNPDCNNSLEWADDIEEQVEKEMLKISLDLSSYKPKEKETKLDIMQSQLDKEQAKLKRLYGLYADGNDTVLSMIKELEANISAIKENISEERKNFSVKQKNTIVYDEIKKLADVWDSIDKKQKNMILKTIIDKVIIVNGNIEIQLKNF

SEQ ID NO: 8637 - protein, 453 aa, Unknown
  Description of Unknown: Integrase B8638 sequence
  PTHR30461:SF3,SM00857,G3DSA:1.10.10.2600,IPR036162,PF13408, IPR025827,G3DSA:3.40.50.1390,PS51737,IPR006119,IPR038109, SSF53041,IPR011109,PTHR30461,Coil, PS51736,cd00338,PF00239
MECVAYMRVSTEKQAEEGNGLESQKRDILDYCSKNELIVTDWYVDDGYTGANMNRPELQRLVADCKHKRVSCVVTFKLDRLSRNMIDGLYMIEKIFQPNGVQFKCVHDSVSYDSPMEQAYTQMMAVFAQLDKNTMMLRMRGGMLERVKQGYWPGGGNLPYCYSYNKEQGILIPIPERAEQANKALELYIRGYSDVKICKICGYKGEKVVRQILTTPVNVGMIPYKGKIYQGLHEPIFNKEQFELAQQLRKSRSCNKASCITEPNLLTGLCYCGVCGCAMRYQKWTHEKHKIYCMSRNKAMSYLPNHNPDCNNSLEWADDIEEQVEKEMLKISLDLSSYKPKEKETKLDIMQSQLDKEQAKLKRLYGLYADGNDTVLSMIKELEANISAIKENISEERKNFSVKQKNTIVYDEIKKLADVWDSIDKKQKNMILKTIIDKVIIVNGNIEIQLKNF

SEQ ID NO: 8638 - protein, 453 aa, Unknown
  Description of Unknown: Integrase B8639 sequence
  PTHR30461:SF3,cd00338,SM00857,G3DSA:1.10.10.2600,IPR036162, PF13408,PS51737,G3DSA:3.40.50.1390,IPR025827,IPR006119, IPR038109,IPR011109,SSF53041,PTHR30461,PS51736, Coil,PF00239
MMGKIIRCAIYDRVSTDIQVQQGLSLDTQKELLTEYAKSHGYEIVDYYIDEGLTARKKLQNRKDFMRLLDDIKANKIDIVLVTKLDRWFRNVKDYHNTQAILEEHNCNWKTILEDYDTSTADGQLKINIMLAVAQNESDRTSERIKVVFEHKKRNQEHLNGPIPFGYKNVDKHLAKDEATKSITDDIFRYYFTCYSKRATIFYSLEKYGDRSPSKYQVDRMLTSEVYAGMRYGRPGYCEPYITPEQHEKILRICQSKTYPGTKVPYLFSQLVKCPHCGATMTGYTKRHTCKDGSRTEHKRYRCEKKLTKHTGPCISESVVEEYMLAHVYPELQHCIYEVKSLQQKAAKKKDSTYRIKAELDRLNILFQKGRITMEYYDEQYEKLEKTLEKERQDSKIITVESYRPIETKLNGNWRDVYERLDYSHKKTFWKSIIEEIYIDKDTHKICGFKFLL

SEQ ID NO: 8639 - protein, 453 aa, Unknown
  Description of Unknown: Integrase B8640 sequence
  PTHR30461:SF3,SM00857,G3DSA:1.10.10.2600,IPR036162,PF13408, IPR025827,G3DSA:3.40.50.1390,IPR006119,IPR038109,SSF53041, PTHR30461,Coil,PS51736,cd00338,PF00239
MECVAYMRVSTEKQAVEGNGLDSQKRDIENYCRKNELVITDWYIDDGYTGTNMDRPELQRLVNDCSRKRVNCVVAFKLDRLSRNMIDGIYLIEKVFQKYNVVFKCVHDSVNYDSPMEQAYTQMMAVFAQLDKNTMLLRMRGGMLERVKQGYWMGGGNLPYCYSYSKEQGILIPIPERAEQARKALELFISGYSDVKIKEICGFKSELVTRSILTGVVNIGMIPYKGNIYQGRHEPIFDKDRFEFGLELRKSRCSAKTYCITEPNLLTGLCYCGICGCKMRYQKWGSKKHKIYCCSRNKSLSYLPNYNANCNNSLEWADEIEKQVEEEILKISLDLSSYKPKEKATKLEIMQSQLEKEQIKLKRLYNLYADGNDTVLKMIKELESQIKEMKSSITAESKNAINAQRKEFVYENIKKLADIWDKVDKKQKNLILKTIIDKIVIVNGNIEIQLKNF

SEQ ID NO: 8640 - protein, 453 aa, Unknown
  Description of Unknown: Integrase B8641 sequence
  PTHR30461:SF3,SM00857,G3DSA:1.10.10.2600,IPR036162,PF13408, IPR025827,G3DSA:3.40.50.1390,IPR006119,IPR038109,SSF53041, PTHR30461,Coil,PS51736,cd00338, PF00239
MECVAYMRVSTEKQAVEGNGLDSQKRDIENYCRKNELVITDWYIDDGYTGTNMDRPELQRLVNDCSRKRVSCVVAFKLDRLSRNMIDGIYLIEKVFQKYNVVFKCVHDSVNYDSPMEQAYTQMMAVFAQLDKNTMMLRMRGGMLERIKQGYWMGGGNLPYCYSYSKEQGILIPIPERAEQARKGLELFISGYSDAKIKEICGFKSELVTRSILTGVVNIGMIPYKGKIYQGKHEPIFDKDRFNLGLELRKSRCSAKTYCITEPNLLTGLCYCGICGCKMRYQKWGSEKHKIYCCSRNKSLSYLPNYNASCNNSLEWADEIEKQVEEEILKISLDLSSYKPKEKATKLEIMQSQLEKEQIKLKRLYNLYADGNDTVLEMIKELETQIKEMKANIAVESKNAINTQKKEFVYENIKKLADIWDKVDKKQKNMILKTIIDKIVIVNGNIEIQLKNF

SEQ ID NO: 8641 - protein, 453 aa, Unknown
  Description of Unknown: Integrase B8642 sequence
  PTHR30461:SF3,SM00857,G3DSA:1.10.10.2600,IPR036162,PF13408, IPR025827,G3DSA:3.40.50.1390,IPR006119,IPR038109,SSF53041, PTHR30461,Coil,PS51736,cd00338,PF00239
MECVAYMRVSTEKQAEEGNGLESQKRDILDYCSKNELIVTDWYVDDGYTGTNMNRPELQRLVADCKHKRISCVVAFKLDRLSRNMIDGLYMIEKIFQPNGVQFKCVHDSVSYDSPMEQAYTQMMAVFAQLDKNTMMLRMRGGMLERVKQGYWMGGGNLPYCYSYDKDSGILIPIAERKEQANKALELYISGYSDAMICEICGYKGERVVNRILTSTVNIGMIPYKGKIYQGLHEPIFDKERFELAQQLRKSRSLNKASCITEPNLLTGLCYCGVCGCAMRYQKWTHGKHKIYCMSRNKAMSYLPNHKPDCNNSLEWADDIEEQVEKEMLKISLDLSSYKPKEKETKLDIMQSQLDKEQVKLKRLYGLYADGNDTVLSMIKELEANISAIKENIAEERKNFSARQKNTIVYDEIKKLADVWDSIDKKQKNMILKTIIDKIIIVNGNIEIQLKNF

SEQ ID NO: 8642 - protein, 453 aa, Unknown
  Description of Unknown: Integrase B8643 sequence
  PTHR30461:SF3,cd00338,SM00857,G3DSA:1.10.10.2600,IPR036162, PF13408,IPR025827,G3DSA:3.40.50.1390,IPR006119,IPR038109, SSF53041,PTHR30461,PS51736,Coil, PF00239
MECVAYMRVSTEKQAVEGNGLDSQKRDIENYCRKNELVITDWYIDDGYTGTNMDRPELQRLVNDCSRKRVSCVVAFKLDRLSRNMIDGIYLIEKVFQKYNVVFKCVHDSVNYDSPMEQAYTQMMAVFAQLDKNTMMLRMRGGMLERIKQGYWMGGGNLPYCYSYSKEQGILIPIPERAEQARKGLELFISGYSDAKIKGICGFKSELVTRSILTGVVNIGMIPYKGKIYQGKHEPVFDKDRFNLGLELRKSRCSAKTYCITEPNLLTGLCYCGICGCKMRYQKWGSEKHKIYCCSRNKSLSYLPNYNASCNNSLEWADEIEKQVEEEILKISLDLSSYKPKEKATKLEIMQSQLEKEQIKLKRLYNLYADGNDTVLEMIKELEAQIKEMKLNITAESKNAINTQKKEFVYENIKKLADIWDKVDKKQKNLILKTIIDKIVIVNGNIEIQLKNF

SEQ ID NO: 8643 - protein, 453 aa, Unknown
  Description of Unknown: Integrase B8644 sequence
  PTHR30461:SF3,IPR036162,PS51737,IPR011109,PTHR30461, PS00397,PF00239,G3DSA:1.10.10.2600,IPR006119,SSF53041, cd00338,SM00857,IPR025827,IPR038109,PS51736, IPR006118,PF13408,G3DSA:3.40.50.1390,Coil
MECVAYLRVSTEKQAEEGHGLDSQKRDVECYCRKNDLIVSEWYVDDGYTGANMDRPALQRLIFACSKRRVKCVVAFKLDRLSRSMVDGLYLIERVFIPNGVDFRCVHDSVNYGTPMEQAYTQIMAAFAQLDKNTMMLRMRGGMLERVKRGYWYGGGNLPYCYDYDRKKGILVPIPEKARRANMALDLYIDGWSDNRICNELGFRSEQVVRSVITGVVNIGLIKYKGNIYQGRHEPVFDRDRFYLAQNLRKNRKKARSYVQPDVNILTGLCYCGECGCKMRYQKWTKSQTRMIWCCSHDKALNYLPNFNPDCKNKAQRADEIERQVEEQMIRISLDLSNYMPKEKESRLDILISQLEKEKKKLRRLYDLYAEGNDMVLDMIRNEEEEVQRMEDNVRECEQSQNPTRETIAYKNVKRLADVWDQIDKPEKNKILKSIIDKVVIVNGDVEIQLQRF

SEQ ID NO: 8644 - protein, 453 aa, Unknown
  Description of Unknown: Integrase B8645 sequence
  PTHR30461:SF3,SM00857,G3DSA:1.10.10.2600,IPR036162,PF13408, IPR025827,G3DSA:3.40.50.1390,IPR006119,IPR038109,SSF53041, PTHR30461,Coil,PS51736,cd00338,PF00239
MECVAYMRVSTEKQAEEGNGLESQKRDILDYCSKNELIVTDWYVDDGYTGTNMNRPELQRLVADCKHKRISCVVAFKLDRLSRNMIDGLYMIEKIFQPNGVQFKCVHDSVSYDSPMEQAYTQMMAVFAQLDKNTMMLRMRGGMLERVKQGYWMGGGNLPYCYSYDKDSGILIPIAERKEQANKALELYISGYSDAMICEICGYKGERVVNRILTSTVNIGMIPYKGKIYQGLHEPIFDKERFELAQQLRKSRSLNKASCITEPNLLTGLCYCGVCGCAMRYQKWTHGKHKIYCMSRNKAMSYLPNHNPDCNNSLEWADDIEEQVEKEMLKISLDLSSYKPKEKETKLDIMQSQLDKEQAKLKRLYGLYADGNDTVLSMIKELEANISAIKENISEERKNFSVKQKNTIVYDEIKKLADVWDSIDKKQKNMILKTIIDKVIIVNGNIEIQLKNF

SEQ ID NO: 8645 - protein, 453 aa, Unknown
  Description of Unknown: Integrase B8646 sequence
  SM00857,G3DSA:1.10.10.2600,IPR036162,PF13408, IPR025827,PS51737,G3DSA:3.40.50.1390,IPR006119, IPR038109,IPR011109,SSF53041,PTHR30461, Coil,PS51736,cd00338,PF00239
MECVAYMRVSTEKQAEEGNGLDSQKRDIQNYCRKNKLIIADWYIDDGYTGSNMDRPELQRLINDCSKKRVKCVVAFKLDRLSRSMIDGIYMIERIFQPNNIEFYCVHDSVSYDSPMEQAYTQMMAVFSQLDKNTMLLRMRGGMLERVKKGYWMGGGNTPYCYEYDKEQGILVPIPEKAEQARQALELFIDGYSDRSISDMLHFSSDIVVSRILTSPVNIGMIPYKGKMYQGRHQPVFQRDRFELAQEVRKSRRKNRTYRKTEPNLLTGLCYCGVCGCKMRYQKWGCEKQKIHCCSRDKYLQYLPNYSANCDNMAIWADEIEKQVEEEIIKISLNLSEYKPKQKESKIEIMQKNLNRERTKLKRLYNLYAEGNDTVLEMIKEIEKTIGESKKRIEEEYKNIGNTNKKEYVYENIKSLADVWNTISKTGKNSILKSIVEKIVIVNGDVEIVLKNF

SEQ ID NO: 8646 - protein, 453 aa, Unknown
  Description of Unknown: Integrase B8647 sequence
  PTHR30461:SF3,SM00857,G3DSA:1.10.10.2600,IPR036162,PF13408, IPR025827,G3DSA:3.40.50.1390,IPR006119,IPR038109,SSF53041, PTHR30461,Coil,PS51736,cd00338,PF00239
MECVAYMRVSTEKQAVEGNGLDSQKRDIENYCRKNELVITDWYIDDGYTGANMDRPGLQRLVNDCSRKRVSCVVAFKLDRLSRNMIDGIYLIEKVFQKCNVTFKCVHDSVNYDSPMEQAYTQMMAVFAQLDKNTMMLRMRGGMLERIKQGYWMGGGNLPYCYSYSKEQGILIPIPERAEQARKALELFISGYSDVKIKEICGFKSELVTRNILTGIVNIGMIPYKGKIYQGRHEPIFDKGRFNLAQELRKTRAKSRTTCQTEPNLLTGLCYCGVCGCAMRYQKWTNGEHKIYCMSRNKSMSYLPNYNANCNNSLEWADDIEKQVEKEILKISLNLSSYKPKEKATKLEIMQSQLDKEQTKLKRLYNLYADGNDTVLEMIKESESAVKTMKTNVLSESKSTANTQKKEFVYENIKKLADVWDNIDKKKKNMILKTIIDKIVIVNGNIEIQLKNF

SEQ ID NO: 8647 - protein, 453 aa, Unknown
  Description of Unknown: Integrase B8648 sequence
  PTHR30461:SF3,SM00857,G3DSA:1.10.10.2600,IPR036162,PF13408, IPR025827,G3DSA:3.40.50.1390,IPR006119,IPR038109,SSF53041, PTHR30461,Coil,PS51736,cd00338, PF00239
MECVAYMRVSTEKQAVEGNGLDSQKRDIENYCRKNELVITDWYVDDGYTGTNMDRPELQRLVNDCSRKRISCVVAFKLDRLSRNMIDGIYLIEKVFQKYDVVFKCVHDSVNYDSPMEQAYTQMMAVFAQLDKNTMMLRMRGGMLERVKQGYWFGGGNLPYCYSYSKDQGILIPIPEHAEQARKGLELFISGYSDAKIKEICGFRSELVTRSILTSVVNIGMIPYKGKIYQGKHEAVFDKDRFELGLELRKTRCSAKTYCITEPNLLTGLCYCGICGCKMRYQKWGSKKHKIYCCSRNKSLSYLPNYNASCNNSLEWADDIEKQVEEEILKISLDLSSYKPKEKATKLEIMQSQLEKEQIKLKRLYNLYADGNDTVLEMIKELESQIKEMKSNIAAESKNAINTQKKEFVYENIKKLADIWDKVDKKQKNMILKTIIDRIVIVNGNIEIQLKNF

SEQ ID NO: 8648 - protein, 453 aa, Unknown
  Description of Unknown: Integrase B8649 sequence
  PTHR30461:SF3,SM00857,G3DSA:1.10.10.2600,IPR036162,PF13408, IPR025827,G3DSA:3.40.50.1390,IPR006119,IPR038109,SSF53041, PTHR30461,Coil,PS51736,cd00338,PF00239
MECVAYMRVSTEKQAIEGNGLDSQKRDIENYCRKNELVITDWYIDDGYTGANMDRPGLQRLVNDCSRKRVSCVVAFKLDRLSRNMIDGIYLIEKVFQKCNVTFKCVHDSVNYDSPMEQAYTQMMAVFAQLDKNTMMLRMRGGMLERIKQGYWMGGGNLPYCYSYSKEQGILIPIPERVEQARKALELFISGYSDVKIKEICGFKSELVTRNILTGIVNIGMIPYKGKIYQGKHEPIFDKGRFNLAQELRKTRAKSRTTCQTEPNLLTGLCYCGVCGCAMRYQKWTNGEHKIYCMSRNKSMSYLPNYNANCDNSLEWADDIEKQVEKEILKISLNLSSYKPKEKATKLEIMQSQLDKEQTKLKRLYNLYADGNDTVLEMIKESETLIKTMKANVLSESKNAADTQKKEFVYENIKKLADVWDNIDKKKKNMILKTIIDKIVIVNGNIEIQLKNF

SEQ ID NO: 8649 - protein, 453 aa, Unknown
  Description of Unknown: Integrase B8650 sequence
  PTHR30461:SF3,SM00857,G3DSA:1.10.10.2600,IPR036162,PF13408, IPR025827,G3DSA:3.40.50.1390,IPR006119,IPR038109,SSF53041, PTHR30461,Coil,PS51736,cd00338, PF00239
MECVAYMRVSTEKQAVEGNGLDSQKRDIENYCRKNELVITDWYIDDGYTGTNMDRPELQRLVNDCSRKRVSCVVAFKLDRLSRNMIDGIYLIEKVFQKYNVVFKCVHDSVNYDSPMEQAYTQMMAVFAQLDKNTMMLRMRGGMLERIKQGYWMGGGNLPYCYSYSKEQGILIPIPERAEQARRGLELFISGYSDAKIKEICGFKSELVTRSILTGVVNIGMIPYKGKIYQGKHEPIFDKDRFNLGLELRKSRCSAKTYCITEPNLLTGLCYCGICGCKMRYQKWGSEKHKIYCCSRNKSLSYLPNYNASCNNSLEWADEIEKQVEEEILKISLDLSSYKPKEKATKLEIMQSQLEKEQIKLKRLYNLYADGNDTVLEMIKELESQIKEMKSNIAAESKNTINTQKKEFVYENIKKLADIWDKVDKKQKNLILKTIIDKIVIVNGNIEIQLKNF

SEQ ID NO: 8650 - protein, 453 aa, Unknown
  Description of Unknown: Integrase B8651 sequence
  PTHR30461:SF3,cd00338,SM00857,G3DSA:1.10.10.2600,IPR036162, PF13408,IPR025827,G3DSA:3.40.50.1390,IPR006119,IPR038109, SSF53041,PTHR30461,PS51736,Coil,PF00239
MECVAYMRVSTEKQAVEGNGLDSQKRDIENYCRKNELVITDWYVDDGYTGTNMDRPELQRLVNDCGRKRIGCVVAFKLDRLSRNMIDGIYLIEKVFQKCGVVFKCVHDSVSYDSPMEQAYTQMMAVFAQLDKNTMMLRMRGGMLERIKQGYWMGGGNLPYCYSYSKEQGILIPIPERAEQARKGLELFISGYSDAKIKEICGFKSELVTRSILTGIVNIGMIPYKGKIYQGKHEPIFDKDRFNLGLELRKSRCSAKTYCITEPNLLTGLCYCGICGCKMRYQKWGSEKHKIYCCSRNKSLSYLPNYNASCNNSLEWADEIEKQVEEEILKISLDLSSYKPKEKTTKLEIMQSQLEKEQIKLKRLYNLYADGNDTVLEMIKELEAQIKEMKANIAAESKNAINTQKKEFVYENIKKLADIWDNIDKKQKNMILKTIIDKIVIVNGNIEIQLKNF

SEQ ID NO: 8651 - protein, 453 aa, Unknown
  Description of Unknown: Integrase B8652 sequence
  PTHR30461:SF3,IPR036162,PS51737,IPR011109,PTHR30461, PS00397,PF00239,G3DSA:1.10.10.2600,IPR006119,SSF53041, cd00338,SM00857,IPR025827,IPR038109, PS51736,IPR006118,PF13408,G3DSA:3.40.50.1390,Coil
MECVAYLRVSTEKQAEEGHGLDSQKRDIENYCRKNDLIVSEWYVDDGYTGANMDRPALQRLILACSKKRVKCVVAFKLDRLSRSMVDGLYLIERVFIPNGVDFRCVHDSVNYGTPMEQAYTQIMAAFAQLDKNTMMLRMRGGMLERVKRGYWYGGGNLPYCYAYDREKGILVPIPEKARRANMALELYIDGWSDNRISSELGFRSEQVVRSIITGVVNIGLIKYKGNIYQGRHEPVFDRDRFYLAQNLRKNRKKARSYIQPDVNVLTGLCYCGECGCKMRYQKWTKSQTRMIWCCSHDKALNYLPNFNPDCKNKAQRADEIERQVEEQMIRISLDLSNYMPKEKESRLDILISQLEKEKKKLRRLYDLYAEGNDMVLDMIRNEEEEVQRMEDNVRECEQSQNPTRETIAYKNVKRLADVWDQIDKPEKNKILKSIIDKVVIVNGDVEIQLQRF

SEQ ID NO: 8652 - protein, 453 aa, Unknown
  Description of Unknown: Integrase B8653 sequence
  PTHR30461:SF3,cd00338,SM00857,G3DSA:1.10.10.2600,IPR036162, PF13408,IPR025827,G3DSA:3.40.50.1390,IPR006119,IPR038109, SSF53041,PTHR30461,PS51736,Coil,PF00239
MECVAYMRVSTERQAEEGNGLESQKRDILDYCSKSELIVTDWYVDDGYTGANMNRPELQRLVTDCKHKRISCVVAFKLDRLSRNMIDGLYMIEKIFQPNGVQFKCVHDSVSYDSPMEQAYTQMMAVFAQLDKNTMMLRMRGGMLERIKQGYWMGGGNLPYCYSYDKDSGILIPIAERKEQANKALELYISGYSDAMICEICGYKGERVVNRILTSTVNIGMIPYKGKIYQGLHEPIFDKERFELAQQLRKSRSLNKASCITEPNLLTGLCYCGVCGCAMRYQKWTHGKHKIYCMSRNKAMSYLPNHNPDCNNSLEWADDIEEQVEREMLKISLDLSSYKPKEKETKLDIMQSQLDKEQTKLKRLYGLYADGNDTVLSMIKELEGNISAIKENIAEERKNFSIKQKNTIIYDEIKKLADVWGNIDKKQKNMILKTIIDKIVIVNGNIEIQLKNF

SEQ ID NO: 8653 - protein, 453 aa, Unknown
  Description of Unknown: Integrase B8654 sequence
  SM00857,IPR006118,G3DSA:1.10.10.2600,IPR036162, PF13408,IPR025827,G3DSA:3.40.50.1390,IPR006119, IPR038109,SSF53041,PF00239,PTHR30461, PS00397,PS51736,Coil,cd00338
MECVAYLRVSTEKQAEEGHGLESQKRDIENYCRKNELIIVDWYVDDGYTGSNMDRPEFQRLISDCYAKRVKCVVAYKLDRISRTMLDSIYVIERIFQPNNVRLECVHDAVNYNDPMQQAYTQMMAVFAQLDKNTMMLRMRGGILERVKKGYWPGGGIKPYCYRYDKEFGILIPIPERAERARQALDLFIQGYSDEKIMRMLGFRTEGVVRNILTGVVNIGKIKYKGNVYQGRHEPIFDVEKFNLGLEIRKTRSKARAYCRTEPNLLTGLCYCGVCGCKMRYQKWGSDRRKMYCCSRNRYLDYLPNYNHDCDNSVEWADKIEEQVESEILKISLNLSSYKPKEKATKFEIMQSQLDKSKTKLRRLYELYADGNDMVLDMISNLENEIEISKERIKEESKNIQKENKKEYVYENIKNLADVWDTIDKTKKNTILKSIISKVVVVNGNVDIQLKSF

SEQ ID NO: 8654 - protein, 453 aa, Unknown
  Description of Unknown: Integrase B8655 sequence
  PTHR30461:SF3,SM00857,G3DSA:1.10.10.2600,IPR036162,PF13408, IPR025827,G3DSA:3.40.50.1390,IPR006119,IPR038109,SSF53041, PTHR30461,Coil,PS51736,cd00338,PF00239
MECVAYMRVSTEKQAVEGNGLDSQKRDIENYCRKNELVITDWYIDDGYTGTNMDRPELQRLVNDCSRKRVRCVVAFKLDRLSRNMIDGIYLIEKVFQKYNVVFKCVHDSVNYDSPMEQAYTQMMAVFAQLDKNTMLLRMRGGMLERIKQGYWMGGGNLPYCYSYSKEQGILIPIPERAEQARKGLELFISGYSDAKIKEICGFKSELVTRSILTGVVNIGMIPYKGKIYQGKHEPVFDKDRFNLGLELRKSRCSAKTYCITEPNLLTGLCYCGICGCKMRYQKWGSEKHKIYCCSRNKSLSYLPNYNASCNNSLEWADEIEKQVEEEILKISLDLSSYKPKEKATKLEIMQSQLEKEQIKLKRLYNLYADGNDTVLEMIKELEAQIKEMKLNIAAESKNAINTQKKEFVYENIKKLADIWDKVDKKQKNLILKTIIDKIVIVNGNIEIQLKNF

SEQ ID NO: 8655 - protein, 453 aa, Unknown
  Description of Unknown: Integrase B8656 sequence
  PTHR30461:SF3,SM00857,G3DSA:1.10.10.2600,IPR036162,PF13408, IPR025827,G3DSA:3.40.50.1390,IPR006119,IPR038109,SSF53041, PTHR30461,Coil,PS51736,cd00338, PF00239
MECVAYMRVSTEKQAVEGNGLDSQKRDIENYCRKNELVITDWYIDDGYTGTNMDRPELQRLVNDCSRKRVSCVVAFKLDRLSRNMIDGIYLIEKVFQKYNVVFKCVHDSVNYDSPMEQAYTQMMAVFAQLDKNTMMLRMRGGMLERIKQGYWMGGGNLPYCYSYSKEQGILIPIPERAEQARKGLELFISGYSDAKIKEICGFKSELVTRSILTGVVNIGMIPYKGKIYQGKHKPIFDKDRFNLGLELRKSRCSAKTYCITEPNLLTGLCYCGICGCKMRYQKWGSEKHKIYCCSRNKSLSYLPNYNASCNNSLEWADEIEKQVEEEILKISLDLSSYKPKEKATKLEIMQSQLEKEQIKLKRLYNLYADGNDTVLEMIKELEAQIKEMKLNIAAESKNAINTQKKEFVYENIKKLADIWDKVDKKQKNLILKTIIDKIVIVNGNIEIQLKNF

SEQ ID NO: 8656 - protein, 453 aa, Unknown
  Description of Unknown: Integrase B8657 sequence
  PTHR30461:SF3,SM00857,G3DSA:1.10.10.2600,IPR036162,PF13408, IPR025827,G3DSA:3.40.50.1390,PS51737,IPR006119,IPR038109, IPR011109,SSF53041,PTHR30461,Coil,PS51736, cd00338,PF00239
MECVAYMRVSTEKQVEEGNGLESQKRDILDYCSKNELIVTDWYVDDGYTGANMNRPELQRLVADCKHKRVSCVVAFKLDRLSRNMIDGLYMIEKIFQPNGVQFKCVHDSVSYDSPMEQAYTQMMAVFAQLDKNTMMLRMRGGMLERVKQGYWPGGGNTPYCYSYNKDQGILIPIPERAEQARKGLELFISGYSDVRIKEICGFKLESVVRKVLTSEVNIGMIPYKGKIYQGLHEPIFNKEQFELAQQLRKSRSCNKASCITEPNLLTGLCYCGVCGCAMRYQKWTHEKHKIYCMSRNKAMSYLPNHNPDCNNSLEWADDIEEQVEKEMLKISLDLSSYKPKEKETKLDIMQSQLDKEQAKLKRLYGLYADGNDTVLSMIKDLEANISAIKENILEERKNFSVKQKNTIVYDEIKKLADVWGNIDKKQKNMILKTIIDKVIIVNGNIEIQLKNF

SEQ ID NO: 8657 - protein, 453 aa, Unknown
  Description of Unknown: Integrase B8658 sequence
  PTHR30461:SF3,SM00857,G3DSA:1.10.10.2600,IPR036162,PF13408, IPR025827,G3DSA:3.40.50.1390,IPR006119,IPR038109,SSF53041, PTHR30461,Coil,PS51736,cd00338,PF00239
MECVAYMRVSTEKQAVEGNGLDSQKRDIENYCRKNELVITDWYIDDGYTGTNMDRPELQRLVNDCSRKRVRCVVAFKLDRLSRNMIDGIYLIEKVFQKYNVAFKCVHDSVNYDSPMEQAYTQMMAVFAQLDKNTMLLRMRGGMLERIKQGYWMGGGNLPYCYSYSKEQGILIPIPERAEQARKGLELFISGYSDAKIKEICGFKSELVTRSILTGVVNIGMIPYKGKIYQGKHEPIFDKDRFNLGLELRKSRCSAKTYCITEPNLLTGLCYCGICGCKMRYQKWGSEKHKIYCCSRNKSLSYLPNYNASCNNSLEWADEIEKQVEEEILKISLDLSSYKPKEKATKLEIMQSQLEKEQIKLKRLYNLYADGNDTVLEMIKELEAQIKEMKLNIAAESKNAINTQKKEFVYENIKKLADIWDKVDKKQKNLILKTIIDKIVIVNGNIEIQLKNF

SEQ ID NO: 8658 - protein, 453 aa, Unknown
  Description of Unknown: Integrase B8659 sequence
  PTHR30461:SF3,IPR036162,PS51737,IPR011109,PTHR30461, PS00397,PF00239,G3DSA:1.10.10.2600,IPR006119,SSF53041, SM00857,IPR025827,IPR038109,PS51736, cd03768,IPR006118,PF13408,G3DSA:3.40.50.1390,PF07508,Coil
MIKGACYVRVSTDNQLENYSIEEQTDRLKAYCKAKDIQIVKIYTDGGYSGGNINRPALQQMLQDIGKGLIDSVIVYKLDRLSRSQKDTLMLIEDCFLAKNVDFVSVNENFDTSTPFGRAMIGILSVFAQLEKDQITERFTMGRIGRAKNGYFHGGGNAPTGYDYIDGELIINDYEALQVKDLYNRFLKGYSIHNCWQYMHQKYGGWSNEVSVRNVLKNELYIGKVKFKGVAYQGNHQPIISEEIFRQVQDLFNSSRRTSDTFKRSPFKANTLLSSLVYCGKCGARFHGEHGNYSCYSRTKGDKKYIVDPNCKNKKWKIEELNKLVLDYITRLDFSKLQNSHPAPVPVTDYSLRLTEIDKQIEKLIDLYQVSGIPLESIQKKMDALTKEKEALLNVSKPKNVPITTLAEMITARDTLMSLSDTGSLDEKRACLTMIIDRIIIDDDNVNIKLKHL

SEQ ID NO: 8659 - protein, 453 aa, Unknown
  Description of Unknown: Integrase B8660 sequence
  PTHR30461:SF3,SM00857,G3DSA:1.10.10.2600,IPR036162,PF13408, IPR025827,G3DSA:3.40.50.1390,IPR006119,IPR038109,SSF53041, PTHR30461,Coil,PS51736,cd00338,PF00239
MECVAYMRVSTEKQAVEGNGLDSQKRDIENYCRKNELVITDWYIDDGYTGTNMDRPELQRLVNDCSRKRVSCVVAFKLDRLSRNMIDGIYLIEKVFQKYNVVFKCVHDSVNYDSPMEQAYTQMMAVFAQLDKNTMMLRMRGGMLERIKQGYWMGGGNLPYCYSYSKEQGILIPIPERAEQARKGLELFISGYSDAKIKEICGFKSELVTRSILTGVVNIGMIPYKGKIYQGKHEPIFDKDRFNLGLELRKSRCSAKTYCITEPNLLTGLCYCGICGCKMRYQKWGSEKHKIYCCSRNKSLSYLPNYNASCNNSLEWADEIEKQVEEEILKISLDLSSYKPKEKATKLEIMQSQLEKEQIKLKRLYNLYADGNDTVLEMIKELEAQIKEMKLNIAAESKNAINTQKREFVYENIKKLADIWDKVDKKQKNLILKTIIDKIVIVNGNIEIQLKNF

SEQ ID NO: 8660 - protein, 453 aa, Unknown
  Description of Unknown: Integrase B8661 sequence
  PTHR30461:SF3,cd00338,SM00857,G3DSA:1.10.10.2600,IPR036162, PF13408,IPR025827,G3DSA:3.40.50.1390,IPR006119,IPR038109, SSF53041,PTHR30461,PS51736,Coil, PF00239
MECVAYMRVSTEKQAEEGNGLDSQRRDIENYCRKNELVITDWYIDDGYTGANMDRPELQRLVSDCDRKRVGYVVAFKLDRISRSMVDGIYLIERVFLKNNVEFKCVHDSISYDNPMEQAYTQMMAVFAQLDKNTMLLRMRGGMLERVKQGYWMGGGNLPYCYTYSKDTGTLIPIPERKEQANKAMDLFLQGYSDVKIRDMLGFKSEFIVKQILTSHVNIGMIPYKGNIYQGLHEPIFNKEVFEKAQQFRAIRKNKRASCHNIQTNLLTGLCYCGICGCAMRYQKWTHGKHKIYCCSRNKDLHYLPNHNPNCNNTLEWASDIEKAVEDEILLISANISDYKPRVKESKLEILQGQLEKEQTKRKRLYNLYAEGNDDVISMIKEIEKAIEDIRKQIKEESAIETNKTRQNVFKNIKNLADIWEDIDKKQKNTLLKSIIEKIVISNGNIEIKLKDF

SEQ ID NO: 8661 - protein, 453 aa, Unknown
  Description of Unknown: Integrase B8662 sequence
  PTHR30461:SF3,IPR036162,PS51737,IPR011109,PTHR30461, PS00397,PF00239,G3DSA:1.10.10.2600,IPR006119,SSF53041, cd00338,SM00857,IPR025827,IPR038109,PS51736, IPR006118,PF13408,G3DSA:3.40.50.1390,Coil
MKECVAYIRVSTEKQAEEGHGLDSQRRDIENYCRKNGLLISDWYEDDGYTGSNMNRPALQSLVTDCTKKRVKCVVAFKLDRLSRSMVDGIYLIERVFQPNDVEFLCVHDSVSYDSPMEQAYTQMMAVFAQLDKNTMMLRMRGGMLERVKKGYWKGGGNPPYCYEYDKEKGILIPIPERAEQANKALDLFIDGYSDERIMRTLGYRSEFIVRSILTGVVNVGMIPYKGNVYQGLHEPIFDKKKFEFAQKLRESRRKSKMYLKSEPKLLTGLCYCGICGCKMRYQKWTNGNCKIYCYSRNHGMEYLPNYNKNCNNTVEWAENIEKQVESEILKISVNLSEHKPKAKKNKLEIMGNQADKEKKKLKRLYGLYADGNDMVIEMIKDLEGNISALEEQIKEERKRSSDNQKSFVYENIKNLADIWEKIDKTRKNKILKSIIEKIVIVNGNVEIQLKNF

SEQ ID NO: 8662 - protein, 453 aa, Unknown
  Description of Unknown: Integrase B8663 sequence
  PTHR30461:SF3,SM00857,G3DSA:1.10.10.2600,IPR036162,PF13408, IPR025827,G3DSA:3.40.50.1390,PS51737,IPR006119,IPR038109, SSF53041,IPR011109,PTHR30461,Coil,PS51736, cd00338,PF00239
MECVAYMRVSTEKQAEEGNGLDSQKRDIEIFCRKNELVVSDWYVDDGYTGANMDRPELQRLINDCIKKRVKCVVAFKLDRLSRSMIDGLYIIERVFQPNQVLFKCVHDSVSYDSPMEQAYTQMMAVFAQLDKNTMMLRMRGGMLERIKQGYWIGGANTPYCYNYSKEKGILIPIPERKEQANRALDMFIGGYSDLYIKESLGFHSEVLVRNVLTGVVNIGMIPYKGNVYQGLHEPIFDKERFELAQEIRKSRRKNKTACHTDANLLTGLCYCGVCGCKMRYQKWTHGKHKIYCCSRDKAMKYLPNFNPNCNNSLEWAADIEKQVESEILKISLNLSECKPIEKQSKLEIMQSQFEKEQVKLKRLYVLYSDGNDTVLEMIKNTEKSISEMKVKITEEEKNERNSQKKEVVYENIKKLADVWAHIDKKEKNNILKSIISRIVIVNGDVEIQLKNF

SEQ ID NO: 8663 - protein, 453 aa, Unknown
  Description of Unknown: Integrase B8664 sequence
  SM00857,IPR006118,G3DSA:1.10.10.2600,IPR036162,PS51737, G3DSA:3.40.50.1390,Coil,IPR006119,IPR038109,SSF53041, IPR011109,PTHR30461,PS00397,PS51736,cd00338, PF00239
MECVAYIRVSTERQVEEGYGLESQKRDIEEYCKKNEMLITDWYIDAGLSGMDMTKRVELQRLISDISKINDIVVYKLDRLARDSVDALYMIEKLFTPKGVRVNSVHDFARYETPQDKFQTHIMAAVAEYDRNTMLLRMRGGMLERVKNGYWMGGGNTPYCYRYDKNLGYLVPIPERAEQANRAMDLFIGGMSDVKIQRLLGYKSEFVVRNILTGVVNIGYIPYKGGTYKGLHEPIFERDKFYLAQELRKSRRKQHVYSFTEPHLLTGLCYCKTCGCKMRYQKITGMGIHKIYCCSHDKYLDYLPNYNTDCDNPGAWASDIEIAFEHEILGISINLSQYKPKAKETKLQILTNQLEKQKSKLKRLYTLYAEGNDMVLDMIKTLETEIRETTEKISTERKNGQHEQKKEFVYENIKKLADIWDGISKSQKNSILKTIIDKVIVGKDDIEIQLKNF

SEQ ID NO: 8664 - protein, 453 aa, Unknown
  Description of Unknown: Integrase B8665 sequence
  PTHR30461:SF3,SM00857,G3DSA:1.10.10.2600,IPR036162,PF13408, IPR025827,G3DSA:3.40.50.1390,IPR006119,IPR038109,SSF53041, PTHR30461,Coil,PS51736,cd00338,PF00239
MECVAYMRVSTEKQAEEGNGLESQKRDILDYCSKNELIVTDWYVDDGYTGANMNRPELQRLVADCKHKRLSCVVAFKLDRLSRNMIDGLYMIEKIFQPNGVQFKCVHDSVSYDSPMEQAYTQMMAVFAQLDKNTMMLRMRGGMLERIKQGYWPGGGNTPYCYSYSKDQGILIPIPERAEQARKGLELFISGYSDARIKEICGFKLESVVRKVLTSEVNIGMIPYKGKIYQGLHEPIFDKELFELAQQLRKSRSLNKASCITEPNLLTGLCYCGVCGCAMRYQKWTHGKHKIYCMSRNKAMSYLPNHNPDCNNSLEWADDIEEQVEKEMLKISLDLSLYKPKEKETKLNIMQSQLDKEQAKLKRLYGLYADGNDTVLSMIKELEANISAIKENILEEQKNFSVKQKNTIVYDEIKKLADVWDSIDKKQKNMILKTIIDKIIIVNGNIEIQLKNF

SEQ ID NO: 8665 - protein, 453 aa, Unknown
  Description of Unknown: Integrase B8666 sequence
  PTHR30461:SF3,IPR036162,PS51737,IPR011109,PTHR30461, PS00397,PF00239,G3DSA:1.10.10.2600,IPR006119,SSF53041, SM00857,IPR025827,IPR038109,PS51736, cd03768,IPR006118,PF13408,G3DSA:3.40.50.1390,PF07508,Coil
MIKGACYVRVSTDNQLENYSIEEQTDRLKAYCKAKDIQIVKIYTDGGYSGGNVNRPALQQMLQDIDKGLIDSVIVYKLDRLSRSQKDTLMLIEDCFLAKNVDFVSVNENFDTSTPFGRAMIGILSVFAQLEKDQITERFTMGRIGRAKNGYFHGGGNAPTGYDYIDGELIINDYEAIQVKDLYNRFLKGYSIHNCWQYMQQKYGGWSSEVLVRNVLKNELYIGKVKFKGVAYQGNHQPIISEETFRQVQDLFNSSRRASDTFKRSPFKASTLLSSLVYCGKCGARFHGEHGNYSCYSRTKGDKKYIVDPNCKNKKWKIEELDRLVLDYIMRLDFSKLKSGHPVPVPVTDYSIRLNEIDKQIGKLIDLYQVSGIPIETIQEKMDALNKEKEALLNISKPKNVPVTTLAEMITARDTLMSLSDTGSLDEKRACLTMIVDRIIIDDDNVNIKLKQL

SEQ ID NO: 8666 - protein, 453 aa, Unknown
  Description of Unknown: Integrase B8667 sequence
  SM00857,IPR006118,G3DSA:1.10.10.2600,IPR036162,PS51737, G3DSA:3.40.50.1390,Coil,IPR006119,IPR038109,IPR011109, SSF53041,PTHR30461,PS00397,PS51736,cd00338, PF00239
MECVAYIRVSTERQVEEGYGLESQKRDIEYYCKKNEMLITDWYIDAGLSGMDMSKRVELQRLISDISKINNIVVYKLDRLARDSVDALYMIEKLFTPKGVRVNSVHDFARYETPQDKFQTHIMAAVAEYDRNTMLLRMRGGMLERVKNGYWMGGGNTPYCYRYDKNLGYLVPIPERAEQANRAMDLFIGGMSDVKIQRLLGYKSEFVVRNILTGVVNIGYIPYKGGTYKGLHEPIFEHDKFYLAQELRKSRRKQHVYSFTEPHLLTGLCYCKTCGCKMRYQKITGMGIHKIYCCSHDKYLDYLPNYNTDCDNPGAWASDIEIAFEHEILGISINLSQYKPKAKETKLQILTNQLEKQKAKLKRLYTLYAEGNDMVLDMIKTLETEIRETTEKISTERKDGQHEQKKEFVYENIKKLADIWDGISKSQKNSILKTIIDKVIVGKDDIEIQLKNF

SEQ ID NO: 8667 - protein, 453 aa, Unknown
  Description of Unknown: Integrase B8668 sequence
  PTHR30461:SF3,SM00857,G3DSA:1.10.10.2600,IPR036162,PF13408, IPR025827,G3DSA:3.40.50.1390,IPR006119,IPR038109,SSF53041, PTHR30461,Coil,PS51736,cd00338,PF00239
MKCVAYMRVSTEKQAEEGNGLESQKRDIENYCRKNELIIADWYVDEGYTGSNMNRPELQRLITDCSRKKVNCVVAFKLDRISRSMVDGIYIIEKVFQSNNVAFKCVHDSISYDSPMEQAYTQMMAVFAQLDKNTMMLRMRGGMLERIKQGYWWGGGNTPYCYRYDKEQGILIPIQERAEQARKALELFISGYSDAKIKEICGFKSELVTRKVLTGVVNIGMIPYKGNIYQGKHKPIFDKDRFELAQELRKSRCSAKTSCFTEPNLLTGLCYCGVCGCKMRYQKWSNGNHKIYCCSRNKGLKYLPNYNPNCNNSLEWADDIEKQVTDEILKISLNLSSYKPKAKETKLEIMQSQLEREQTKLKRLYSLYADGNDTVLEMIKDLESQISKTKEDISVESKNAINTQKKEFTYQNIKKLADVWDNIDKKQKNFILKTIIDKVIIVNGNVEIQLKNF

SEQ ID NO: 8668 - protein, 453 aa, Unknown
  Description of Unknown: Integrase B8669 sequence
  PTHR30461:SF3,SM00857,G3DSA:1.10.10.2600,IPR036162,PF13408, IPR025827,G3DSA:3.40.50.1390,IPR006119,IPR038109,SSF53041, PTHR30461,Coil,PS51736,cd00338, PF00239
MECVAYMRVSTEKQAVEGNGLDSQKRDIENYCRKNELVITDWYIDDGYTGTNMDRPELQRLVNDCSRKRVSCVVAFKLDRLSRNMIDGIYLIEKVFQKYNVVFKCVHDSVSYNSPMEQAYTQMMAVFAQLDKNTMMLRMRGGMLERIKQGYWMGGGNLPYCYSYSKEQGILIPIPERAEQARKGLELFISGYSDAKIKEICGFKSELVTRSILTGVVNIGMIPYKGKIYQGKHEPIFDKDRFNLGLELRKSRCSAKTYCITEPNLLTGLCYCGICGCKMRYQKWGSEKHKIYCCSRNKSLSYLPNYNASCNNSLEWADEIEKQVEEEILKISLDLSSYKPKEKATKLEIMQSQLEKEQIKLKRLYNLYADGNDTVLEMIKELEAQIKEMKLNIAAESKNAINTQKKEFVYENIKKLADIWDKVDKKQKNLILKTIIDKIVIVNGNIEIQLKNF

SEQ ID NO: 8669 - protein, 453 aa, Unknown
  Description of Unknown: Integrase B8670 sequence
  PTHR30461:SF3,IPR036162,PS51737,IPR011109,PTHR30461, PS00397,PF00239,G3DSA:1.10.10.2600,IPR006119,SSF53041, cd00338,SM00857,IPR025827,IPR038109,PS51736, IPR006118,PF13408,G3DSA:3.40.50.1390,Coil
MECVAYIRVSTERQVEEGYGLESQKRDIEEYCKKNEMLITDWYIDAGLSGMDMSKRVELQRLISDISKINDIVVYKLDRLARDSVDALYMIEKLFTPKGVRVNSVHDFARYETPQDKFQTHIMAAVAEYDRNTMLLRMRGGMLERVKNGYWMGGGNTPYCYRYDKNLGYLVPIPERAEQANRAMDLFIDGMSDVKIQRLLGYKSEFVVRSIMTGIVNIGYIPYKGGVYKGLHEPIFDREKFYLAQELRKSRRKQHIYCYTEPHLLTGLCYCRECGCKMRYQKITGMGIHKIYCCSHNSYLDYLPNHNPDCNNPGAWASDVEKAFEQEILEISINLSKYKPKAKETKLQILTNQLEKQKAKLKRLYTLYAEGNDMVLDMIKTLETEIRETTEKISAERKNGQHEQKKEFVYENIKKLADIWDGISKSQKNSILKTIIDKVIVGKDDIEIQLKNF

SEQ ID NO: 8670 - protein, 453 aa, Unknown
  Description of Unknown: Integrase B8671 sequence
  PTHR30461:SF3,SM00857,IPR006118,G3DSA:1.10.10.2600,IPR036162, PF13408,IPR025827,G3DSA:3.40.50.1390,Coil,IPR006119, IPR038109,SSF53041,PTHR30461,PS00397,PS51736, cd00338,PF00239
MECVAYIRVSTEKQAEEGYGIDSQKRDIIAYCRKNELIITDWYIDDGYTGANMDRPELNRLINDCSKKRVHFIVAFKLDRLSRSMVDGIYIIERIFQPNGIVFKCVHDSISYDSPMEQAYTQMMAVFAQLDKNTMLLRMRGGMIERVKKGYWMGGGNTPYCYNYDKESGILVPIPDRKRKANIAMDLFIEGHSDIYIKDTLGFSSELVVRSILTGVVNIGMIPYKGVIYQGLHEPIFEKDKFEEAQELRKLRRNHKQSCQADANILTGLCVCGICGCKMRYQKWTHGKHKIYCCSRNKHLSYLPNYNHSCNNSIEWADEIEEQVESKILKISLSLSEYKPKSKESKLEIMQLQLEREKTKLKRLYVLYSEGNDTVLEMIKSSENVVSETERKIEDEKRSIQESPKKETVFNNIKMLADVWPHINKQKKNNILKNIIEKVVIVNGDIEIQLKTF

SEQ ID NO: 8671 - protein, 453 aa, Unknown
  Description of Unknown: Integrase B8672 sequence
  PTHR30461:SF3,IPR036162,PS51737,IPR011109,PTHR30461, PS00397,PF00239,G3DSA:1.10.10.2600,IPR006119,SSF53041, SM00857,IPR025827,IPR038109,PS51736,cd03768, IPR006118,PF13408,G3DSA:3.40.50.1390,PF07508,Coil
MIKGACYVRVSTDNQLENYSIEEQTDRLKAYCKAKDIQIVKIYTDGGYSGGNVNRPALQQMLQDIGKGLIDSVIVYKLDRLSRSQKDTLMLIEDCFLAKNVDFVSVNENFDTSTPFGRAMIGILSVFAQLEKDQITERFTMGRIGRAKNGYFHGGGNAPTGYDYIDGELIINDYEALQVKDLYNRFLKGYSIHNCWQYMQQKYGGWSSEVLVRNVLRNELYIGKVKFKGVAYQGNHQPIISEDLFRQVQDLFNSSKRSSNTFKRSPFKASTLLSSIVYCGKCGARFHGEHGNYSCYSRTKGDKKYIVDPNCKNKKWKIEELDRLVLDYITRLDFSKLHNSHPVPVPSTDYSFRLTEIDKQIGKLIDLYQVSGIPLETIQEKMDALNKEKEALLIISKPKNVPVTTLAEMITARDTLMSLSDSGSLDEKRACLTMIIDRIIIDDDNVNIKLKQL

SEQ ID NO: 8672 - protein, 453 aa, Unknown
  Description of Unknown: Integrase B8673 sequence
  PTHR30461:SF3,SM00857,G3DSA:1.10.10.2600,IPR036162,PF13408, IPR025827,G3DSA:3.40.50.1390,PS51737,IPR006119,IPR038109, IPR011109,SSF53041,PTHR30461,Coil,PS51736, cd00338,PF00239
MECVAYMRVSTEKQAEEGNGLESQKRDILDYCSKNELIVTDWYVDDGYTGANMNRPELQRLVADCKHKRVSCVVAFKLDRLSRNMIDGLYMIEKIFQPNGVQFKCVHDSVSYDSPMEQAYTQMMAVFAQLDKNTMMLRMRGGMLERVKQGYWSGGGNLPYCYSYNKDQGILIPIPERAEQANKALELYIRGYSDVKICKICGYKGEKVVRQILTTPVNVGMIPYKGKIYQGLHEPIFNKEQFELAQQLRKSRSCNKASCITEPNLLTGLCYCGVCGCAMRYQKWTHGKHKIYCMSRNKAMSYLPNHNPDCNNSLEWADDIEEQVEKEMLKISLDLSSYKPKEKETKLDIMQSQLDKEQAKLKRLYGLYADGNDTVLSMIKELEANISAIKENISEERKNFSVKQKNTIVYDEIKKLADVWDSIDKKQKNMILKTIIDKVIIVNGNIEIQLKNF

SEQ ID NO: 8673 - protein, 453 aa, Unknown
  Description of Unknown: Integrase B8674 sequence
  PTHR30461:SF3,SM00857,G3DSA:1.10.10.2600,IPR036162,PF13408, IPR025827,G3DSA:3.40.50.1390,IPR006119,IPR038109,SSF53041, PTHR30461,Coil,PS51736,cd00338,PF00239
MECVAYMRVSTEKQVEEGNGLESQKRDILDYCSKNKLIVTDWYVDDGYTGANMNRPELQRLVTDCKHKRISCVVAFKLDRLSRNMIDGLYMIEKIFQPNGVQFKCVHDSVSYDSPMEQAYTQMMAVFAQLDKNTMMLRMRGGMLERVKQGYWMGGGNLPYCYSYDKDSGILIPIAERKEQANKALELYISGYSDAMICEICGYKGERVVNRILTSTVNIGMIPYKGKIYQGLHEPIFDKERFELAQQLRKSRSLNKASCITEPNLLTGLCYCGVCGCAMRYQKWTHGKHKIYCMSRNKAMSYLPNHNPDCNNSLEWADDIEEQVEREMLKISLDLSSYKPKEKETKLDIMQSQLDKEQTKLKRLYGLYADGNDTVLSMIKELEGNISAIKENIAEERKNFSIKQKNTIIYDEIKKLADVWGNIDKKQKNMILKTIIDKIIIVNGNIEIQLKSF

SEQ ID NO: 8674 - protein, 453 aa, Unknown
  Description of Unknown: Integrase B8675 sequence
  SM00857,IPR006118,G3DSA:1.10.10.2600,IPR036162, PS51737,G3DSA:3.40.50.1390,Coil,IPR006119, IPR038109,SSF53041,IPR011109,PTHR30461, PS00397,PS51736,cd00338,PF00239
MECVAYIRVSTERQVEEGYGLESQKRDIEEYCKKNEMLITDWYIDAGLSGMDMTKRVELQRLISDISKINDIVVYKLDRLARDSVDALYMIEKLFTPKGVRVNSVHDFARYETPQDKFQTHIMAAVAEYDRNTMLLRMRGGMLERVKNGYWMGGGNTPYCYRYDKNLGYLVPIPERAEQANRAMDLFIGGMSDVKIQRLLGYKSEFVVRNILTGVVNIGYIPYKGGTYKGLHEPIFEHDKFYLAQELRKSRRKQHVYSFTEPHLLTGLCYCKTCGCKMRYQKITGMGIHKIYCCSHDKYLDYLPNYNTDCDNPGAWASDIEIAFEHEILGISINLSQYKPKAKETKLQILTNQLEKQKSKLKRLYTLYAEGNDMVLDMIKTLETEIRETTEKISAERKNGQQEQKKEFVYENIKKLADIWDGISKSQKNSILKTIIDKVIVGKDDIEIQLKNF

SEQ ID NO: 8675 - protein, 453 aa, Unknown
  Description of Unknown: Integrase B8676 sequence
  SM00857,IPR006118,IPR036162,PF13408,IPR025827, G3DSA:3.40.50.1390,PS51737,PS00397,IPR006119,SSF53041, IPR011109,PTHR30461,Coil,PS51736,cd00338, PF00239
MEEQKRLDKEGQKRAAIYVRVSTAEQKEHGLSVDNQLDALKNYCQERGFSIAGIYNDAGISARKKYKSRPALLQLLEDCQKHKIDIILFTKLDRWFRSVADYYAVQQVLDGAKVPWRAIWEDYETETSAGVFKVNIMLSVAQAESDRTSERIKAVLEYKREHGHIIAGRMPLGYIRTSSSTIDYDPATKDAMQAFFDTYLNTYSPVAAMDAARKLGLRMSRKTAHFILDKEPYYGTYYGVDVPAYITPEQHKIIQNARVHYARTTKDNRVYIFTGLIFCASCGARMGSKLSKHIRANGETIERGYYQCRTKTRRKDICEKPAFVMEHKLEDYLIEHMSELITDYEASIAQSQEKAKDAEKEISRIKGKLQRLKDVYLDGDMSRAEYVDKTSQLKANMAELESQRVPLSPIKQLPDDWVEMYRQLSKDGKRDFWHRTIRRIEIDGKKVSKVFFI

SEQ ID NO: 8676 - protein, 453 aa, Unknown
  Description of Unknown: Integrase B8677 sequence
  SM00857,G3DSA:1.10.10.2600,IPR036162,PF13408,IPR025827, G3DSA:3.40.50.1390,IPR006119,IPR038109,SSF53041,PF00239, PTHR30461,PS51736,Coil,cd00338
MKRKIRCAIYDRVSHELQVEKGLSLDTQKEMLTSYAKEQGYEIVDYYQDEGISARKTMKNRKELLRLLEDVKADKIDIILVTKLDRWFRSVKDYHNTQAILDAHHCAWKTILEDYDTTTSDGQLKINIMLAVAQNEADRTSERIKVVFSHKIRNKEHLNGPVPWGYAVDEKKHLVKDLEIAPIVEDMFNHYFTTFSKRETIMYIRSKYPGKTPEGNSLAKIFSNPTYAGVRFGIENYCDAYLTLEQHRKIVESTTAKVYPATHPQQTYIFSGMLRCPHCGKMLSGYVRSNKKGGRCYKYPAYRCHKRYNNHRAPVKTEKVVEQYVLNFFEEELNRSIYDLELKEGAGEKEKTVNVSVLQDELNRINIMFEKGRISLDYYDKRYEEIEMQIKEATVSHSKELRARKGLRDGLDGNWKELYLQLDASHKRAFWKNIIKEILIDPETHELNGIIFF

SEQ ID NO: 8677 - protein, 453 aa, Unknown
  Description of Unknown: Integrase B8678 sequence
  PTHR30461:SF3,SM00857,G3DSA:1.10.10.2600,IPR036162, PF13408,IPR025827,G3DSA:3.40.50.1390,IPR006119, IPR038109,SSF53041,PTHR30461,Coil, PS51736,cd00338,PF00239
MECVAYMRVSTEKQAVEGNGLDSQKRDIENYCRKNELIISDWYIDDGYTGTNMDRPELQRLVNDCSRKRVSCVVAFKLDRLSRNMIDGIYLIEKVFQKYNVMFKCVHDSVSYNSPMEQAYTQMMAVFAQLDKNTMMLRMRGGMLERVKQGYWFGGGNLPYCYSYSKDQGILIPIPERAEQARKALELFISGYSDAKIKEICGFKSEIVTRSILTSVVNVGMIPYKGKVYRGRHEAVFDKDRFELALELRRSRRSAKVSCITEPNLLTGLCYCGVCGCKMRYQKWGSEKHKIYCCSRDKKLSYLPNYNANCDNSLEWADEIEKQIEEEILKISLDLSSYKPKEKATKLEIMQSQLEKEQIKLKRLYNLYADGNDTVLEMIKELESQIKEMKSNIAAESKSAINTQKKEFVYENIKKLADIWDKVDKKQKNMILKTIIDKIVIVNGNIEIQLKNF

SEQ ID NO: 8678 - protein, 453 aa, Unknown
  Description of Unknown: Integrase B8679 sequence
  SM00857,G3DSA:1.10.10.2600,IPR036162,PF13408,IPR025827, PS51737,G3DSA:3.40.50.1390,IPR006119,IPR038109,IPR011109, SSF53041,PTHR30461,Coil,PS51736,cd00338, PF00239
MECVAYMRVSTEKQAEEGNGLDSQKRDIENYCRKNKLIITDWYIDDGYTGSNMDRPELQRLINDCSKKRVKCVVAFKLDRLSRSMIDGIYMIERIFQPNNIEFYCVHDSVSYDSPMEQAYTQMMAVFSQLDKNTMLLRMRGGMLERVKKGYWMGGGNMPYCYEYDKEQGILVPIPEKAERARQALELFIDGYSDRSISDMLHFSSDIVVSRILTSPVNIGMIPYKGKMYQGRHQPVFQRDRFELAQEVRKSRRKNRTYRKTEPNLLTGLCYCGVCGCKMRYQKWGCEKQKIHCCSRDKYLQYLPNYSANCDNMAIWADEIEKQVEEEIIKISLNLSEYKPKQKESKIEIMQKNLNREKIKLKRLYNLYAEGNDTVLEMIKEVEKTIGESKKRIEEEYKNIGNTNKKEYVYENIKSLADVWNTISKTGKNSILKSIVEKIVIVNGDVEIVLKNF

SEQ ID NO: 8679 - protein, 453 aa, Unknown
  Description of Unknown: Integrase B8680 sequence
  PTHR30461:SF3,SM00857,G3DSA:1.10.10.2600,IPR036162,PF13408, IPR025827,G3DSA:3.40.50.1390,PS51737,cd03770,IPR006119, PF07508,IPR038109,IPR011109,SSF53041,PTHR30461, Coil,PF00239
MTDKITALYCRLSQDDMLQGESNSITNQKAILKKYAEDSGFSNLVYYVDDGVSGTTFERDGFKAMMADVEAGKVGTVITKDLSRLGRDYLKTGEYIEIIFPDYDVRYIAINDNVDTLKSENELMAFKNIFNDWYARDTSKKIRAVSKAKGQSGKPLSLPIYGYKASEEDKHKWIIDDEPAAVVRKIYKLCISGYGPTQIARKLTEEGIPNPTAYAISQGRNPANKNSRLDRWCTETVIDILEHPEYIGHTVNFRTRRKSYKNKRKIENPKEDWLIFENTHEPIVTQQEFDLVQEMRKNKRRNQKQETVNPFSGICFCADCGKKLYLCRSRSLSEDQEHLKCSTHSADKDRCSAHYIRTVVLKELVLNALNKLLDNVKDNEAEFVQTAMDNSASKHSSDVFKAKKALNQAEKRIAELDRLFARLYEDNISGKISNERFAVLSAGYEDEQKKLKA

SEQ ID NO: 8680 - protein, 453 aa, Unknown
  Description of Unknown: Integrase B8681 sequence
  SM00857,IPR006118,G3DSA:1.10.10.2600,IPR036162,PS51737, G3DSA:3.40.50.1390,Coil,IPR006119,IPR038109,SSF53041, IPR011109,PTHR30461,PS00397,PS51736,cd00338, PF00239
MECVAYIRVSTERQVEEGYGLESQKRDIEEYCKKNEMLITDWYIDAGLSGMDMSKRVELQRLISDISKINNIVVYKLDRLARDSVDALYMIEKLFTPKGVRVNSVHDFARYETPQDKFQTHIMAAVAEYDRNTMLLRMRGGMLERVKNGYWMGGGNTPYCYRYDKNLGYLVPIPERAEQANRAMDLFIDGMSDVKIQRLLGYKSEFVVRNILTGVVNIGYIPYKGGTYKGLHESIFEHDKFYLAQELRKSRRKQHIYSFTEPHLLTGLCYCKTCGCKMRYQKITGMGIHKIYCCSHDKYLDYLPNYNADCDNPGAWASDIEKAFEHEILDISIKLSQYKPKAKETKLQILTNQLEKQKSKLKRLYTLYAEGNDMVLDMIKTLETEIRETTEKISAERKNGQHEQKKEFVYENIKKLADIWDGISKSQKNSILKTGIDKVIVGKDDIEIQLKNF

SEQ ID NO: 8681 - protein, 453 aa, Unknown
  Description of Unknown: Integrase B8682 sequence
  PTHR30461:SF3,SM00857,G3DSA:1.10.10.2600,IPR036162,PF13408, IPR025827,G3DSA:3.40.50.1390,IPR006119,IPR038109,SSF53041, PTHR30461,Coil,PS51736,cd00338,PF00239
MECVAYMRVSTEKQAEEGNGLESQKRDILDYCTKNELIVTDWYVDDGYTGANMNRPELQRLVADCKHKRISCVVAFKLDRLSRNMIDGLYMIEKIFQPNGVQFKCAHDSVSYDSPMEQAYTQMMAVFAQLDKNTMMLRMRGGMLERVKQGYWMGGGNLPYCYSYDKDSGILIPIAERKEQANKALELYISGYSDAMICEICGYKGERVVNRILTSPVNVGMIPYKGKIYQGLHEPIFDKERFELAQQLRKSRSLNKASCITEPNLLTGLCYCGVCGCAMRYQKWTHGKHKIYCMSRNKAMSYLPNHNPDCNNSLEWADDIEEQVEKEMLKISLDLSSYKPKEKETKLDIMQSQLDKEQAKLKRLYGLYADGNDTVLSMIKELEANISAIKENISEERKNFSVKQKNTIVYDEIKKLADVWDSIDKKQKNMILKTIIDKIIIVNGNVEIQLKNF

SEQ ID NO: 8682 - protein, 453 aa, Unknown
  Description of Unknown: Integrase B8683 sequence
  PTHR30461:SF3,cd00338,SM00857,G3DSA:1.10.10.2600,IPR036162, PF13408,IPR025827,G3DSA:3.40.50.1390,IPR006119,IPR038109, SSF53041,PTHR30461,PS51736,Coil, PF00239
MECVAYMRVSTEKQAVEGNGLDSQKRDIENYCRKNELVITDWYIDDGYTGTNMDRPELQRLVNDCSRKRVRCVVAFKLDRLSRNMIDGIYLIEKVFQKYNVAFKCVHDSVNYDSPMEQAYTQMMAVFAQLDKNTMLLRMRGGMLERIKQGYWMGGGNLPYCYSYSKEQGILIPIPERAEQARKGLELFISGYSDAKIKEICGFKSELVTRSILTGVVNIGMIPYKGKIYQGKHEPVFDKDRFNLGLELRKSRCSAKTYCITEPNLLTGLCYCGICGCKMRYQKWGSEKHKIYCCSRNKSLSYLPNYNASCNNSLEWADEIEKQVEEEILKISLDLSSYKPKEKATKLEIMQSQLEKEQIKLKRLYNLYADGNDTVLEMIKELEAQIKEMKANIAAESKNAINTQKKEFVYENIKKLADIWDKVDKKQKNLILKTIIDKIVIVNGNIEIQLKNF

SEQ ID NO: 8683 - protein, 453 aa, Unknown
  Description of Unknown: Integrase B8684 sequence
  PTHR30461:SF3,SM00857,G3DSA:1.10.10.2600,IPR036162,PF13408, PS51737,G3DSA:3.40.50.1390,IPR025827,IPR006119,IPR038109, PF07508,IPR011109,SSF53041,PTHR30461,Coil, PS51736,cd00338,PF00239
MECVVYMRVSTEKQVEEGNGLESQKRDILDYCSKNELIVTDWYVDDGYTGANMNRPELQRLVADCKHKRISCVVAFKLDRLSRNMIDGLYMIEKIFQPNDVQFKCVHDSVSYDSPMEQAYTQMMAVFAQLDKNTMMLRMRGGMLERVKQGYWPGGGNTPYCYSYSKDQGILIPIPERAEQARKGLELYIKGYSDIKICKICGYKGEKVVRQILTSPVNIGMIPYKGKIYQGLHEPIFDKELFELAQQLRKSRSLNKASCITEPNLLTGLCYCGVCGCAMRYQKWTHGKHKIYCMSRNKAMSYLPNHNPDCSNSLEWADDIEEQVEREILKISLDLSSYKPKEKETKLDIMQSQLDKEQTKLKRLYGLYADGNDTVLSMIKELEGNISAIKDNIAGERKNFSAKQKNAIVYDEIKKLADVWDSIDKKQKNMILKTIIDKIIIVNGNIEIQLKSF

SEQ ID NO: 8684 - protein, 453 aa, Unknown
  Description of Unknown: Integrase B8685 sequence
  PTHR30461:SF3,SM00857,G3DSA:1.10.10.2600,IPR036162,PF13408, IPR025827,G3DSA:3.40.50.1390,IPR006119,IPR038109,SSF53041, PTHR30461,Coil,PS51736,cd00338,PF00239
MECVAYMRVSTEKQAVEGNGLDSQKRDIENYCRKNELVITDWYIDDGYTGANMDRPGLQRLVNDCSRKRVSCVVAFKLDRLSRNMIDGIYLIEKVFQKCNVTFKCVHDSVNYDSPMEQAYTQMMAVFAQLDKNTMMLRMRGGMLERIKQGYWMGGGNLPYCYSYSKEQGILIPIPERAEQARKALELFISGYSDVKIKEICGFKSELVTRNILTGIVNIGMIPYKGKIYQGRHEPIFDKGRFNLAQELRKTRAKSRVTCQTEPNLLTGLCYCGVCGCAMRYQKWTNGKHKIYCMSRNKSMSYLPNYNANCDNSLEWADDIEKQVEEEILKISLNLSSYKPKEKATKLEIMQSQLDKEQTKLKRLYNLYADGNDTVLEMIKESESLIKTMKANVLSESKNAADTQKKEFVYENIKKLADVWDNIDKKKKNMILKTIIDKIVIVNGNIEIQLKNF

SEQ ID NO: 8685 - protein, 453 aa, Unknown
  Description of Unknown: Integrase B8686 sequence
  PTHR30461:SF3,SM00857,G3DSA:1.10.10.2600,IPR036162,PF13408, IPR025827,G3DSA:3.40.50.1390,IPR006119,IPR038109,SSF53041, PTHR30461,Coil,PS51736,cd00338, PF00239
MECVAYMRVSTEKQAVEGNGLDSQKRDIENYCRKNELVITDWYIDDGYTGTNMDRPELQRLVNDCSRKRVSCVVAFKLDRLSRNMIDGIYLIEKVFQKYNVVFKCVHDSVNYDSPMEQAYTQMMAVFAQLDKNTMMLRMRGGMLERIKQGYWMGGGNLPYCYSYSKEQGILIPIPERAEQARKGLELFISGYSDAKIKEICGFKSELVTRSILTGVVNIGMIPYKGKIYQGKHEPVFDKDRFNLGLELRKSRCSAKTYCITEPNLLTGLCYCGICGCKMRYQKWGSEKHKIYCCSRNKSLSYLPNYNASCNNSLEWADEIEKQVEEEILKISLDLSSYKPKEKATKLEIMQSQLEKEQIKLKRLYNLYADGNDTVLEMIKELEAQIKEMKLNIAAESKNAINTQKKEFVYENIKKLADIWDKVDKKQKNLILKTIIDKIVIVNGNIEIQLKNF

SEQ ID NO: 8686 - protein, 453 aa, Unknown
  Description of Unknown: Integrase B8687 sequence
  PTHR30461:SF3,SM00857,G3DSA:1.10.10.2600,IPR036162,PF13408, IPR025827,G3DSA:3.40.50.1390,PS51737,IPR006119,IPR038109, SSF53041,IPR011109,PF00239,PTHR30461,PS51736, Coil,cd00338
MECVAYMRVSTEKQAEEGNGLDSQKRDIELFCRKNELVVSDWYVDDGYTGANMDRPELQRLINDCIKKRVKCVVAFKLDRLSRSMIDGLYIIERVFQPNQVLFKCVHDSVSYDSPMEQAYTQMMAVFAQLDKNTMMLRMRGGMLERIKQGYWIGGANTPYCYNYSKEKGILIPIPERKEQANRAIDMFIGGYSDLYIKESLGFHSEVLVRNVLTGVVNIGMIPYKGNVYQGLHEPIFDKERFELAQEIRKSRRKNKTACHTDANLLTGLCYCGVCGCKMRYQKWTHGKHKIYCCSRDKAMKYLPNFNPNCNNSLEWAADIEKQVESEILKISLNLSECKPIEKQSKLEIMQSQFEKEQVKLKRLYVLYSDGNDTVLEMIKNTEKSISDMKEKITEEEKNERNSQKEEVVYENIKKLADVWAHIDKKEKNNILKSIISRIVIVNGDVEIQLKNF

SEQ ID NO: 8687 - protein, 453 aa, Unknown
  Description of Unknown: Integrase B8688 sequence
  PTHR30461:SF3,SM00857,G3DSA:1.10.10.2600,IPR036162,PF13408, IPR025827,G3DSA:3.40.50.1390,IPR006119,IPR038109,SSF53041, PF00239,PTHR30461,PS51736,Coil,cd00338
MECVAYMRVSTEKQAEEGNGLDSQRRDIENYCRKNELVITDWYIDDGYTGANMDRPELQRLVSDCERKRVGYVVAFKLDRISRSMVDGIYLIERVFLKNNVEFKCVHDSISYDNPMEQAYTQMMAVFAQLDKNTMLLRMRGGMLERVKQGYWMGGGNLPYCYTYSKDTGTLIPIPERKEQANKAMDLFLQGYSDVKIRDMLGFKSEFVVKQVLTSPVNIGMIPYKGNIYQGLHEPIFNKEVFEKAKQFRAIRKSKRASCHNIQTNLLTGLCYCGICGCAMRYQKWTHGKHKIYCCSRNKDLHYLPNHNPNCNNTLEWASDIEKAVEDEILLISANISEYKPRVKESKLEILQGQLEKEQTKRKRLYNLYAEGNDDVISMIKEIEKVIEDIRKQIKEESAIETNKTRQNVFKNIKNLADIWEDIDKKQKNMLLKSIIEKIVISNGNIEIKLKDF

SEQ ID NO: 8688 - protein, 453 aa, Unknown
  Description of Unknown: Integrase B8689 sequence
  PTHR30461:SF3,SM00857,G3DSA:1.10.10.2600,IPR036162,PF13408, IPR025827,G3DSA:3.40.50.1390,PS51737,IPR006119,IPR038109, SSF53041,IPR011109,PTHR30461,Coil, PS51736,cd00338,PF00239
MECVAYMRVSTEKQAEEGNGLDSQKRDIELFCRKNELVVADWYVDDGYTGANMDRPELQRLINDCIKKRVKCVVAFKLDRLSRSMIDGLYIIERVFQPNQVLFKCVHDSVSYDSPMEQAYTQMMAVFAQLDKNTMMLRMRGGMLERIKQGYWIGGANTPYCYNYSKEKGILIPIPERKEQANRALDMFIGGYSDLYIKESLGFHSEVLVRNVLTGVVNIGMIPYKGNVYQGLHEPIFDKERFELAQEIRKSRRKNKTACHTDANLLTGLCYCGVCGCKMRYQKWTHGKHKIYCCSRDKAMKYLPNFNPNCNNSLEWAADIEKQVESEILKISLNLSECKPIEKQSKLEIMQSQFEKEHVKLKRLYVLYSDGNDTVLEMIKNTEKSISEMKVKITEEEKNERNSQKKEVVYENIKKLADVWAHIDKKEKNNILKSIISRIVIVNGDVEIQLKNF

SEQ ID NO: 8689 - protein, 452 aa, Unknown
  Description of Unknown: Integrase B8690 sequence
  SM00857,G3DSA:1.10.10.2600,IPR036162,PS51737,G3DSA:3.40.50.1390, IPR006119,IPR038109,PF07508,IPR011109,SSF53041, PTHR30461,Coil,PS51736,cd00338,PF00239
MKKRAVIYIRESTKFQDPESQKRECINYCKKNKLDIVKIYQDIASGANNNRKDFLQLLQDMEEDFFDVVVLWELSRSTRDFLMYKTTLMRMKELGKELYSLQEGTLTEDDLDKEFSTDIVALVNSHERKRVGRRVKIRREFATREGKWMGGKLPLGYKCVDGKIEIDPDTAPLVKEIFRLFLSGEKRTDIAKKFGFQDPKKINRLLVNPIYTGKLKLNETEMINDKRVYHGKYELIQGKHEAIIDDDTFKLSLILSKEKRREKYKNGDYLLKNVYCYDGDKMYPSTSKNRNKKPYYAAKFSGKVIGVKYLEETVINTLINEVDKLEILNTVESNVELEERKELYEKEIKKLKLQEERIFKKYIEGKLEEETFDKYDSDVKLKIKSFKSKIAEVEKLQLNKLKYEDNKKILREYIEKLSKTQEREELKQLLDIIIAEVRLINDFRVMVITNIF

SEQ ID NO: 8690 - protein, 452 aa, Unknown
  Description of Unknown: Integrase B8691 sequence
  PTHR30461:SF3,IPR036162,PS51737,IPR011109,PTHR30461, PS00397,PF00239,G3DSA:1.10.10.2600,IPR006119,SSF53041, SM00857,IPR025827,IPR038109,PS51736, cd03768,IPR006118,PF13408,G3DSA:3.40.50.1390,PF07508,Coil
MKAAIYIRVSTQEQIENYSIQAQTEKLTALCRSKDWDVYDIFIDGGYSGSNMNRPALNEMLSKLHEIDAVVVYRLDRLSRSQRDTITLIEEYFLKNNVEFVSLSETLDTSSPFGRAMIGILSVFAQLERETIRDRMVMGKIKRIEAGLPLTTAKGRTFGYDVIDTKLYINEEEAKQLRLIYDIFEEEQSITFLQKRLKKLGFKVRTYNRYNNWLTNDLYCGYVSYKDKVHVKGIHEPIISEEQFYRVQEIFSRMGKNPNMNKESASLLNNLVVCSKCGLGFVHRRKDTVSRGKKYHYRYYSCKTYKHTHELEKCGNKIWRADKLEELIIDRVNNYSFASRNIDKEDELDSLNEKLKIEHTKKKRLFDLYISGSYEVSELDAMMSDIDAQINYYEAQIEANEELKKNKKIQENLADLATVDFNSLEFREKQLYLKSLINKIYIDDEQVTIEWL

SEQ ID NO: 8691 - protein, 452 aa, Unknown
  Description of Unknown: Integrase B8692 sequence
  PTHR30461:SF3,IPR036162,PS51737,IPR011109,PTHR30461, PS00397,PF00239,G3DSA:1.10.10.2600,IPR006119,SSF53041, cd00338,SM00857,IPR025827,IPR038109,PS51736, IPR006118,PF13408,G3DSA:3.40.50.1390,Coil
MPKRTRIEDTGIQRAALYIRVSTEEQAMHGLSLTAQRETLLKYAEENGLRIVGTYADEGITARKKYKNRLEFMRMLRDVQSDKIDLILFIKLDRWFRNIADYYEVQKILDDHKVRWIATEEDYDTTTANGRLHLNIKLSIAQDESDRTSERIKFVFDSKVKRGEVISGKIPLGFRVEDKHLCIDQETAGIVVDIFNKYVAIRSLGALRKYIMDTYGMVYCYSGLRALLQNTRYIGLAHDMDDFCPPLIDRDVFGLVQSIIKERAQRNATKRTDWVYLFTGLVRCAECGNRLSAHTVAGKYIYYRCTRYEKLHLCTHKKRTSELVLEDWLLHNLVSQFAQYNLELEARTAQQVQKVDESKVRRKMDKLKDLYLNDLIDRDAYEKDYTTLRDELRAATAAREKLPEPVNLKEITDALSAYSELSKEHKKEFWARIIGRIVVTNEDDFFVYPISP

SEQ ID NO: 8692 - protein, 452 aa, Unknown
  Description of Unknown: Integrase B8693 sequence
  PTHR30461:SF3,SM00857,G3DSA:1.10.10.2600,IPR036162,PF13408, PS51737,G3DSA:3.40.50.1390,IPR025827,IPR006119,IPR038109, SSF53041,IPR011109,PF00239,PTHR30461,PS51736, Coil,cd00338
MKAKRIAGYVRVSHDEQKKYGYSVQAQIDRIIRYAEENKCQLVEIYVDEGFTATKMKRPDLLRMLNDLDKFDVLVFTRLDRFSRNVLQANKMVEIMEEYNVAIKSIEEEDIDTTTADGKFNFNLRVSLAQREAEKTSERIKSIFEFKIKQGQPVSGNQPYGYKIVTKDNKKTIVKDPELIPIVNDIFEYFAKHHTIRGTMTYINGKYDISKNYNCIYRMLTSTEYYGLYEGNPNYYPPYITKEEFEKNVQRRKANVKGRKGTNVYLFTSLMKCPFCGFKMVGKFTKRKNKNGTIREYWGYICSNNQRNKACASGKVINENVILDFLLKNVEKLAQKHIAEVMEVKPADKTDLPQNRINEILEEIDNLNYMFQKKRIDIKKYDKEYEALEKELANLQKETPKETDITILEEFLKSDWKDVYNSLDKENQRALWRNLIKEIKFNKDFKIDVDFL

SEQ ID NO: 8693 - protein, 452 aa, Unknown
  Description of Unknown: Integrase B8694 sequence
  SM00857,IPR006118,G3DSA:1.10.10.2600,IPR036162,PF13408, PS51737,IPR025827,G3DSA:3.40.50.1390,IPR006119,IPR038109, IPR011109,SSF53041,PF00239,PTHR30461,PS00397, PS51736,Coil,cd00338
MKIPEEKMRAALYIRVSTEEQARHGLSLGDQRAALESYAKSHNMTVVGVYEDAGISARKPYKKRPALLRLLDDVEAKKIDIILFIKLDRWFRNVGNYYAVQEILERNKVVWQATNEDYETQTAAGRLKVNIMLSVAQDEADRTSERIKFVFDGKRARGEALTGDKPFGYIIEGKKYIKDPQTETAVNELFAKYAACGSISQTQDLIAEKYGIFLSYQAISKIIRSTAYYGKYFRADGMCPPYITKERYDKNQTLRKTIVRKCQQNRIYLFTGLMICGDCGGHISGRINQDQKNVSYNCQNHYCRRRPCGNAKSISEKKIEAFLMNSVENKLKSYKSNLMGMEESEEKENYQALIASKKARLSRLKDLYLNELISLEEFKKDHAEICAAIAAMEEKQNAKKTPKLDKVEKILSGDWRNIYAELSREEKREFWRVIVKEIRWFPDRHLEFDINT

SEQ ID NO: 8694 - protein, 452 aa, Unknown
  Description of Unknown: Integrase B8695 sequence
  SM00857,G3DSA:1.10.10.2600,IPR036162,PS51737,G3DSA:3.40.50.1390, IPR006119,IPR038109,PF07508,IPR011109,SSF53041, PF00239,PTHR30461,PS51736,Coil,cd00338
MKKRAVIYIRESTKFQDPESQKRECINYCKKNKLDIVKIYQDIASGANNNRKDFLQLLQDMEEDFFDVVVLWELSRSTRDFLMYKTTLMRMKELGKELYSLQEGTLTEDDLDKEFSTDIVALVNSHERKRVGRRVKIRREFATREGKWMGGKLPLGYKCVDGKIEIDPDTAPLVKEIFRLFLSGEKRTDIAKKFGFQDPKKINRLLINPIYTGKLKLNETEMINDKRVYHGKYELIQGKHEAIIDDDTFKLSLILSKEKRREKYKNGDYLLKNVYCYDGDKMYPSTSKNRNKKPYYAAKFSGKVIGVKYLEETVINTLINEVDKLEILNTVESSVELEERKELYEKEIKKLKLQEERIFKKYIEGKLEEETFDKYDSDVKLKIKSFKSKIAEVEKLQLNKLKYEDNKKILREYIEKLSKTQEREELKQLLDIIIAEVRLINDFRVMVITNIF

SEQ ID NO: 8695 - protein, 452 aa, Unknown
  Description of Unknown: Integrase B8696 sequence
  PTHR30461:SF3,IPR036162,PS51737,IPR011109,PTHR30461, PS00397,PF00239,G3DSA:1.10.10.2600,IPR006119,SSF53041, SM00857,IPR025827,IPR038109,PS51736, cd03768,IPR006118,PF13408,G3DSA:3.40.50.1390,PF07508,Coil
MERCVIYARVSTHEQAENDSLKHQIERCRAYATARGYEIVSTLSDVESGSNNEREQYLILKDMIKESVFDVLVVWEFSRISRNAKEFITITEELQNQDIGLVCIQQNIDTSTITGKAVAHLIAVISELEKDTIRMRVKDRMIQLIKSGRYVSHQPFGYKYNNKLLELVEEEALIIKDIFSRFLKGESRFIIAKHYNVDFIKIDRWLRSPLYIGKLAYKGTGKNKLKDEYILYDGLHTPIIDEDTFYNVQAILNKNKRHRINNNPNYIFSGILYCECGDKMYGTKQRTTTYYICTKKRIESKKSCNSKTIKSEEIEKVVKEELRARLKNKDIAYQKNDKESEMKIKSNEKQIKEMENRINKAKDLYYANLLTLDDYSKDISKFNQIIEQLKKDTSILEKKINKQYDSRKIKEIVMSKIDSIESDKIKFKKICNVAIDKIVIDKEGKIQVYFNF

SEQ ID NO: 8696 - protein, 452 aa, Unknown
  Description of Unknown: Integrase B8697 sequence
  PTHR30461:SF3,IPR036162,PS51737,IPR011109,PTHR30461, PS00397,PF00239,G3DSA:1.10.10.2600,IPR006119,SSF53041, cd00338,SM00857,IPR025827,IPR038109,PS51736, IPR006118,PF13408,G3DSA:3.40.50.1390,PF07508,Coil
MLRVALYIRVSTEEQALNGDSIRTQIEALEQYSKENDFNIVGKYIDEGCSATNLKRPNLQRLLRDVEKDKVDLVLMTKIDRLSRGVKNYYKIMETLEKHKCDWKTILENYDSSTAAGRLHINIMLSVAENEAAQTSERIKFVFQDKLRRKEVISGTIPIGYKIENKHLVIDKEKIYIVKAIFDEYEKSGSVRTLIETINNLHGELYSYNKIKNILRNELYIGIYNKRGFYVEDYCEPIISKKQFKQIQRILEKNKKTTPNKNIHYHIFSGLLKCKECGYTLKGNSSNVGEKLYLSYRCSTFYLNKNCVHNVTHNEKHIENYLLTNLKPQLHKHMVKLEAQNEKIRRNKKSNKKDEKKKIMKKLDKIKDLYLEDLIDKETYRKDYEKLQSQLDNITEEQESQIIDTSHIKKFLDIDINEMYSDLSRVERRRFWLSIIDYIEIDNNKNITINFI

SEQ ID NO: 8697 - protein, 451 aa, Unknown
  Description of Unknown: Integrase B8698 sequence
  PTHR30461:SF3,SM00857,G3DSA:1.10.10.2600,IPR036162,PF13408, IPR025827,G3DSA:3.40.50.1390,PS51737,IPR006119,IPR038109, PF07508,SSF53041,IPR011109,PF00239,PTHR30461, PS51736,Coil,cd00338
MKKLNVGYMRVSTEAQTEKYGLDVQEDKIKELAKKRGVKIARWYVDGGYSGSNIQRPNIQKLLEDAEAGEIQAVYIYKLDRMSRDVVDTLTLVSKLLPKYNVEVVSATEDLRNETPMDRVMLGVNAVMGQYEREVIYMRTRAGMVERVKRGLWMGGGTIPYGYRYDRNDGILHIIPEEAEKVKAIFQMFRDGYSCDRIQKILGMHSEKLVSNIIRRIAYVGKIQYKGKTYQGLHEPIIDEKLFYEVQEEIKKRSTNAYVSNKYMLTGLCYCGKCGTKMRMQKWGKYTKIVCYSQYKGKEHISKTGNPCKNKKVRADVVEKEVEDCFKRFIVNVEEKENESESTRKMIEKEISLSEAKLKRLYTLYASGNSGTDTLLDVIQAEEKTLKNLREELKAEDIREKAGRGEKIEKIKEMSNVWDTLTDSEKNKVLKECVEKVVITGDDIDIHFSIY

SEQ ID NO: 8698 - protein, 451 aa, Unknown
  Description of Unknown: Integrase B8699 sequence
  SM00857,G3DSA:1.10.10.2600,IPR036162,PF13408,PS51737, G3DSA:3.40.50.1390,IPR025827,IPR006119,IPR038109,PF07508, SSF53041,IPR011109,PF00239,PTHR30461,PS51736, Coil,cd00338
MKKLNVGYMRVSTEAQTEKYGLDVQEDKIKELAKKRGVKIARWYVDGGYSGSNIQRPNIQKLLEDAEAGEIQAVYIYKLDRMSRDVVDTLTLVSKLLPKYNVEVVSATEDLRNETPMDRVMLGVNAVMGQYEREVIYMRTRAGMVERVKRGLWMGGGTIPYGYRYDRNDGILHIIPEEAEKVKAIFQMFRDGYSCDRIQKILGMHSEKLVSNIIRRIAYVGKIQYKGRVYQGLHEPIIDEKLFYEVQEEIKKRSTNAYVSNKHMLTGLCYCGKCGTKMRMQKWGKYTKIVCYSQYKEKEHISKTGNPCKNKKVRADVVEKEVEDCFKRFIVNVEEKENESESTRKMIEKEISLSEAKLKRLYTLYASGSSGTDTLFDVIHAEEKTLKNLREELKAEDIREKAGRVEKIEKIKEMSNVWDTLTDSEKNKVLKECVEKVVITGDDIDIHFSIY

SEQ ID NO: 8699 - protein, 451 aa, Unknown
  Description of Unknown: Integrase B8700 sequence
  PTHR30461:SF3,cd00338,SM00857,G3DSA:1.10.10.2600,IPR036162, PF13408,IPR025827,G3DSA:3.40.50.1390,PS51737,IPR006119, IPR038109,PF07508,IPR011109,SSF53041,PTHR30461, PS51736,Coil,PF00239
MKKLNVGYMRVSTEAQTEKYGLDVQEDKINELAKKRGVKIARWYVDGGYSGSNIQRPNIQKLLEDAEAGEIQAVYIYKLDRMSRDVVDTLTLVSKLLPKYNVEVVSATEDLRNETPMDRVMLGVNAVMGQYEREVIYMRTRAGMVERVKRGLWMGGGTIPYGYRYDRNDGILHIIPEEAEKVKAIFQMFRDGYSCDRIQKILGMHSEKLVSNIIRRIAYVGKIQYKGKTYQGLHEPIIDEKLFYEVQEEIKKRSTNAYVSNRYMLTGLCYCGKCGTKMRMQKWGKYTKIVCYSQYKEKEHISKKGSPCKNKKVRADVVEKEVEDCFKRFIVNVEEKENESESTRKMIEKEISLSETKLKRLYTLYASGNSGTDTLLDVIQAEEKTLKNLREELKAEDIREKAGRGEKIEKIKEMSNVWDTLTDSEKNKVLKECVEKVVITGDDIDIHFSIY

SEQ ID NO: 8700 - protein, 451 aa, Unknown
  Description of Unknown: Integrase B8701 sequence
  PTHR30461:SF3,SM00857,G3DSA:1.10.10.2600,IPR036162,PF13408, PS51737,G3DSA:3.40.50.1390,IPR025827,IPR006119,IPR038109, PF07508,SSF53041,IPR011109,PF00239,PTHR30461, PS51736,Coil,cd00338
MKKLNVGYMRVSTEAQTEKYGLDVQEDKIKELAKKRGVKIARWYVDGGYSGSNIQRPNIQKLLEDAEAGEIQAVYIYKLDRMSRDVVDTLTLVSKLLPKYNVEVVSATEDLRNETPMDRVMLGVNAVMGQYEREVIYMRTRAGMVERVKRGLWMGGGTIPYGYRYDRNDGILHIIPEEAEKVKAVFQMFRDGYSCDRIQKILGMHSEKLVSNIIRRIAYVGKIQYKGRVYQGLHEPIIDEKLFYEVQEEIKKRSTNAYVSNKYMLTGLCYCGKCGTKMRMQKWGKYTKIVCYSQYKGKEHISKTGNPCKNKKVRADVVEKEVEDCFKRFIVNVEEKENESESTRKMIEKEISLSEAKLKRLYTLYASGNSGTDTLLDVIQAEEKTLKNLREELKAEDIREKAGRGEKIEKIKEMSNVWDTLTDSEKNKVLKECVEKVVITGDDIDIHFSIY

SEQ ID NO: 8701 - protein, 451 aa, Unknown
  Description of Unknown: Integrase B8702 sequence
  PTHR30461:SF3,SM00857,G3DSA:1.10.10.2600,IPR036162,PF13408, PS51737,G3DSA:3.40.50.1390,IPR025827,IPR006119,IPR038109, PF07508,IPR011109,SSF53041,PF00239,PTHR30461, PS51736,Coil,cd00338
MKKLNVGYMRVSTEAQTEKYGLDVQEDKIKELAKKKGVKIARWYVDGGYSGSNIQRPNIQKLLEDAEAGEIQAVYIYKLDRMSRDVVDTLTLVSKLLPKYNVEVVSATEDLRNETPMDRVMLGVNAVMGQYEREVIYMRTRAGMVERVKRGLWMGGGTIPYGYRYDRNDGILHIIPEEAEKVKAVFQMFRDGYSCDRIQKILGMHSEKLVSNIIRRIAYVGKIQYKGRVYQGLHEPIIDEKLFYEVQEEIKKRSTNAYVSNKYMLTGLCYCGKCGTKMRMQKWGKYTKIVCYSQYKGKEHISKTESPCENKKVRADVVEKEVEDCFKRFIVNVEEKENESESTKKMIEREISLSESKLKRLYTLYANGNSGTDTLLDVIQAEEKTLKNLREELKAEDIREKAGRGEKIEKIKEMSNVWDTLTDSEKNKVLKECVEKVVITGDDIDIHFSIY

SEQ ID NO: 8702 - protein, 451 aa, Unknown
  Description of Unknown: Integrase B8703 sequence
  SM00857,G3DSA:1.10.10.2600,IPR036162,PF13408,IPR025827, G3DSA:3.40.50.1390,PS51737,IPR006119,IPR038109,PF07508, SSF53041,IPR011109,PF00239,PTHR30461,PS51736, Coil,cd00338
MKKLNVGYMRVSTEAQTEKYGLDVQEDKIKELAKKRGVKIARWYVDGGYSGSNIQRPNIQKLLEDAEAGEIQAVYIYKLDRMSRDVVDTLTLVSKLLPKYNVEVVSATEDLRNETPMDRVMLGVNAVMGQYEREVIYMRTRAGMVERVKRGLWMGGGTIPYGYRYDRNDGILHIIPEEAEKVKAVFQMFRDGYSCDRIQKILGMHSEKLVSNIIRRITYVGKIQYKGRVYQGLHEPIIDEKLFYEVQEEIKKRSTNAYVSNKHMLTGLCYCGKCGTKMRMQKWGKYTKIVCYSQYKEKEHISKTGNPCKNKKVRADVVEKEVEDCFKRFIVNVEEKENESESTRKMIEKEISLSEAKLKRLYTLYASGSSGTDTLFDVIHAEEKTLKNLQEELKTEDIREKAGRGKKIEKIKEMSNVWDTLTDSEKNKVLKECVEKVVITGDDIDIHFSIY

SEQ ID NO: 8703 - protein, 451 aa, Unknown
  Description of Unknown: Integrase B8704 sequence
  SM00857,G3DSA:1.10.10.2600,IPR036162,PF13408,PS51737, IPR025827,G3DSA:3.40.50.1390,IPR006119,IPR038109,PF07508, IPR011109,SSF53041,PF00239,PTHR30461,PS51736, Coil,cd00338
MKKLNVGYMRVSTEAQTEKYGLDVQEDKIKELAKKKGVKIARWYVDGGYSGSNIQRPNIQKLLEDAEAGEIQAVYIYKLDRMSRDVVDTLTLVSKLLPKYNVEVVSATEDLRNETPMDRVMLGVNAVMGQYEREVIYMRTRAGMVERVKRGLWMGGGTIPYGYRYDRNDGILHIIPEEAEKVKAIFQMFRDGYSCDRIQKILGMHTEKLVSNIIRRITYVGKIQYKGRVYQGLHEPIIDEKLFYEVQEEIKKRSTNAYVSNKHMLTGLCYCGKCGTKMRMQKWGKYTKIVCYSQYKEKEHISKTGNPCKNKKVRADVVEKEVEDCFKRFIVNVEEKENESESTRKMIEKEISLSEAKLKRLYTLYASGSSGTDTLFDVIQTEEKKLKNLQEELKAEDIREKAGRGEKIEKIKEMSNVWDTLTDSEKNKVLKECVEKVVITGDDIDIHFSIY

SEQ ID NO: 8704 - protein, 451 aa, Unknown
  Description of Unknown: Integrase B8705 sequence
  cd00338,SM00857,G3DSA:1.10.10.2600,IPR036162,PF13408, PS51737,G3DSA:3.40.50.1390,IPR025827,IPR006119,IPR038109, PF07508,SSF53041,IPR011109,PTHR30461,PS51736, Coil,PF00239
MKKLNVGYMRVSTEAQTEKYGLDVQEDKIKELAKKRGVKIARWYVDGGYSGSNIQRPNIQKLLEDAEAGEIQAVYIYKLDRMSRDVVDTLTLVSKLLPKYNVEVVSATEDLRNETPMDRVMLGVNAVMGQYEREVIYMRTRAGMVERVKRGLWMGGGTIPYGYRYDRNDGILHIIPEEAEKVKAIFQMFRDGYSCDRIQKILGMHSEKLVSNIIRRITYVGKIQYKGRVYQGLHEPIIDEKLFCEVQEEIKKRSTNAYVSNKHMLTGLCYCGKCGTKMRMQKWGKYTKIVCYSQYKEKEHISKTGNPCKNKKVRADVVEKEVEDCFKQFIVNVEEKENESESTRKMIEKEISLSESKLKRLYTLYANGNSGTDTLFGVIQAEEKTLKNLQEELKAEDIREKAGRGEKIEKIKEMSNVWDTLTDSEKNKVLKECVEKVVITGDDIDIHFSIY

SEQ ID NO: 8705 - protein, 451 aa, Unknown
  Description of Unknown: Integrase B8706 sequence
  SM00857,G3DSA:1.10.10.2600,IPR036162,PF13408,PS51737, G3DSA:3.40.50.1390,IPR025827,IPR006119,IPR038109,PF07508, SSF53041,IPR011109,PF00239,PTHR30461,PS51736, Coil,cd00338
MKKLNVGYMRVSTEAQTEKYGLDVQEDKIKELAKKRGVKIARWYVDGGYSGSNIQRPNIQKLLEDAEAGEIQAVYIYKLDRMSRDVVDTLTLVSKLLPKYNVEVVSATEDLRNETPMDRVMLGVNAVMGQYEREVIYMRTRAGMVERVKRGLWMGGGTIPYGYRYDRNDGILHIIPEEAEKVKAIFQMFRDGYSCDRIQKILGMHSEKLVSNIIRRITYVGKIQYKGRVYQGLHEPIIDEKLFCEVQEEIKKRSTNAYVSNKHMLTGLCYCGKCGTKMRMQKWGKYTKIVCYSQYKEKEHISKTGNPCKNKKVRADVVEKEVEDCFKRFIVNVEEKENESESTRKMIEKEISLSEAKLKRLYTLYASGSSGTDTLLDVIQAEEKTLKNLREELKAEDIREKAGRGEKIEKIKEMSNVWDTLTDSEKNKVLKECVEKVVITGDDIDIHFSIY

SEQ ID NO: 8706 - protein, 451 aa, Unknown
  Description of Unknown: Integrase B8707 sequence
  PTHR30461:SF3,SM00857,G3DSA:1.10.10.2600,IPR036162,PF13408, PS51737,G3DSA:3.40.50.1390,IPR025827,IPR006119,IPR038109, PF07508,IPR011109,SSF53041,PTHR30461,Coil, PS51736,cd00338,PF00239
MKKLNVGYMRVSTEAQTEKYGLDVQEDKINELAKKRGVKIARWYVDGGYSGSNIQRPNIQKLLEDAEAGEIQAVYIYKLDRMSRDVVDTLTLVSKLLPKYNVEVVSATEDLRNETPMDRVMLGVNAVMGQYEREVIYMRTRAGMVERIKRGLWMGGGTIPYGYRYDRNDGILHIIPEEAEKVKAIFQMFRDGYSCDRIQKILGMHSEKLVSNIIRRIAYVGKIQYKGKTYQGLHEPIIDEKLFYEVQEEIKKRSTNAYVSNKYMLTGLCYCGKCGTKMRMQKWGKYTKIVCYSQYKGKEHISKTGNPCKNKKVRADVVEKEVEDCFKRFIVNVEEKENESENTRKMIEKEISLSEAKLKRLYTLYASGNSGTDTLLDVIQAEEKTLKNLREELKAEDIREKGGRGEKIEKIKEMSNVWDTLTDSEKNKVLKECVEKVVITGDDIDIHFSIY

SEQ ID NO: 8707 - protein, 451 aa, Unknown
  Description of Unknown: Integrase B8708 sequence
  PTHR30461:SF3,SM00857,G3DSA:1.10.10.2600,IPR036162,PF13408, IPR025827,G3DSA:3.40.50.1390,PS51737,IPR006119,IPR038109, PF07508,IPR011109,SSF53041,PF00239,PTHR30461, PS51736,Coil,cd00338
MKKLNVGYMRVSTEAQTEKYGLDVQEDKIKELAKKRGVKIARWYVDGGYSGSNIQRPNIQKLLEDAEAGEIQAVYIYKLDRMSRDVVDTLTLVSKLLPKYNVEVVSATEDLRNETPMDRVMLGVNAVMGQYEREVIYMRTRAGMVERVKRGLWMGGGTIPYGYRYDRNDGILHTIPEEAEKVKAIFQMFRDGYSCDRIQKILGMHSEKLVSNIIRRIAYVGKIQYKGRVYQGLHEPIIDEKLFYEVQEEIKKRSTNAYVSNKHMLTGLCYCGKCGTKMRMQKWGKYTKIVCYSQYKEKEHISKTGNPCKNKKVRADVVEKEVEDCFKRFIVNVEEKENESESTRKMIEKEISLSEAKLKRLYTLYASGNSGTDTLFGVIQEEEKTLKNLQEELKAEDIREKAGRGEKIEKIKEMSNVWDTLTDSEKNKVLKECVEKVVITGDDIDIHFSIY

SEQ ID NO: 8708 - protein, 451 aa, Unknown
  Description of Unknown: Integrase B8709 sequence
  PTHR30461:SF3,cd00338,SM00857,G3DSA:1.10.10.2600,IPR036162, PF13408,PS51737,G3DSA:3.40.50.1390,IPR025827,IPR006119, IPR038109,PF07508,IPR011109,SSF53041,PTHR30461, PS51736,Coil,PF00239
MKKLNVGYMRVSTEAQTEKYGLDVQEDKINELAKKRGVKIARWYVDGGYSGSNIQRPNIQKLLEDAEAGEIQAVYIYKLDRMSRDVVDTLTLVSKLLPKYNVEVVSATEDLRNETPMDRVMLGVNAVMGQYEREVIYMRTRAGMVERVKRGLWMGGGTIPYGYRYDRNDGILHIIPEEAEKVKAIFQMFQDGYSCDRIQKILGMHSEKLVSNIIRRITYVGKIQYKGRVYQGLHEPIIDEKLFYEVQEEIKKRSTNAYVSNKHMLTGLCYCGKCGTKMRMQKWGKYTKIVCYSQYKEKEHISKTGNPCKNKKVRADVVEKEVEDCFKRFIVNVEEKENESESTRKMIEKEISLSEAKLKRLYTLYASGNSGTDTLVDVIQAEEKTLKNLQEELKAEDIREKAGRGEKIEKIKEMSNVWDTLTDSEKNKVLKECVEKVVITGDDIDIHFSIY

SEQ ID NO: 8709 - protein, 451 aa, Unknown
  Description of Unknown: Integrase B8710 sequence
  SM00857,G3DSA:1.10.10.2600,IPR036162,PF13408,IPR025827, G3DSA:3.40.50.1390,PS51737,IPR006119,IPR038109,PF07508, SSF53041,IPR011109,PF00239,PTHR30461,PS51736, Coil,cd00338
MKKLNVGYMRVSTEAQTEKYGLDVQEDKIKELAKKRGVKIARWYVDGGYSGSNIQRPNIQKLLEDAEAGEIQAVYIYKLDRMSRDVVDTLTLVSKLLPKYNVEVVSATEDLRNETPMDRVMLGVNAVMGQYEREVIYMRTRAGMVERVKRGLWMGGGTIPYGYRYDRNDGILHIIPEEAEKVKAIFQMFRDGYSCDRIQRILGMHSEKLVSNIIRRIAYVGKIQYKGRVYQGLHEPIIDEKLFYEVQEEIKKRSTNAYVSNKHMLTGLCYCGKCGTKMRMQKWGKYTKIVCYSQYKEKEHISKTGNPCKNKKVRADVVEKEVEDCFKRFIVNVEEKENESESTRKMIEKEISLSEAKLKRLYTLYASDNSGTDTLFDVIQAEEKTLKNLQEELKAEDIREKAGRGKKIEKIKEMSNVWDTLTDSEKNKVLKECVEKVVITGDDIDIHFSIY

SEQ ID NO: 8710 - protein, 451 aa, Unknown
  Description of Unknown: Integrase B8711 sequence
  SM00857,IPR006118,G3DSA:1.10.10.2600,IPR036162,PF13408, IPR025827,G3DSA:3.40.50.1390,PS51737,PS00397,IPR006119, IPR038109,IPR011109,SSF53041,PTHR30461,Coil, PS51736,cd00338,PF00239
MKCVAYIRVSTDKQVEEGFGLDSQKRDIEDYCRKHEMVISEWYIDAGLSGMEMTKRVELQRLISDLNDIDKILVYKLDRLARDSVDSLFMIEKIFTPKNVEVVSIHDFAKYQTPQDKFQTHIMAAVAEYDRNTMLLRMRGGMLERVKNGYWIGGGNPPYCYNYDRNKGILVPIEERAEKMRTALEMYISGSSECKISKAIGVAEPTIHKNLTSYVNIGMIPYKGKIYQGRHEPIFDKERWKIGKDIRSARAAGSKSVYPPNLLTGLCVCGICGCKMRYQKHYKHGKVICCCSRDKWLYYLPNFDKNCTNRYANPADKIESAVEKEILKISMDISLYKPVKPKSKVEVISNQVEKESNKLKRLYELYAEGNDTVIDMIKKQETRVYEMKKTLTEEEKKEANKPDKSFVYDNIKKIADVWDNIDKTQKNKILRIIIDKVVIVNDDVKIFLRDF

SEQ ID NO: 8711 - protein, 451 aa, Unknown
  Description of Unknown: Integrase B8712 sequence
  PTHR30461:SF3,SM00857,G3DSA:1.10.10.2600,IPR036162,PF13408, IPR025827,G3DSA:3.40.50.1390,PS51737,IPR006119,IPR038109, PF07508,IPR011109,SSF53041,PF00239,PTHR30461, PS51736,Coil,cd00338
MKKLNVGYMRVSTEAQTEKYGLDVQEDKINELAKKRGVKIARWYVDGGYSGSNIQRPNIQKLLEDAEAGEIQAVYIYKLDRMSRDVVDTLTLVSKLLPKYNVEVVSATEDLRNETPMDRVMLGVNAVMGQYEREVIYMRTRAGMVERVKRGLWMGGGTIPYGYRYDRNDGILHIIPEEAEKVKAIFQMFRDGYSCDRIQKILGMHSEKLVSNIIRRIAYVGKIQYKGKTYQGLHEPIIDEKLFYEVQEEIKKRSTNAYVSNRYMLTGLCYCGKCGTKMRMQKWGKYTKIVCYSQYKEKEHISKTGNPCKNKKVRADVVEKEVEDCFKRFIVNVEEKENESESTRKMIEKEISLSEAKLKRLYTLYASGSSGTDTLLDVIQAEEKTLKNLREELKAEDIREKAGRGEKIEKIKEMSNVWDTLTDSEKNKVLKECVEKVVITGDDIDIHFSIY

SEQ ID NO: 8712 - protein, 451 aa, Unknown
  Description of Unknown: Integrase B8713 sequence
  SM00857,G3DSA:1.10.10.2600,IPR036162,PF13408,IPR025827, G3DSA:3.40.50.1390,PS51737,IPR006119,IPR038109,PF07508, SSF53041,IPR011109,PF00239,PTHR30461,PS51736, Coil,cd00338
MKKLNVGYMRVSTEAQAEKYGLDVQEDKIKELAKKRGVKIARWYVDGGYSGSNIQRPNIQKLLEDAEAGEIQAVYIYKLDRMSRDVVDTLTLVSKLLPKYNVEVVSATEDLRNETPMDRVMLGVNAVMGQYEREVIYMRTRAGMVERVKRGLWMGGGTIPYGYRYDRNDGILHIIPEEAEKVKAIFQMFRDGYSCDRIQKILGMHSEKLVSNIIRRIAYVGKIQYKGKTYQGLHEPIIDEKLFYEVQEEIKKRSTNAYVSNKHMLTGLCYCGKCGTKMRMQKWGKYTKIVCYSQYKEKEHISKTGNPCKNKKVRADVVEKEVEDCFKRFIVNVEEKENESESTRKMIEKEISLSEAKLKRLYTLYASGSSGTDTLFDVIQTEEKKLKNLQEELKAEDIREKAGRGEKIEKIKEMSNVWDTLTDSEKNKVLKECVEKVVITEDDIDIHFSIY

SEQ ID NO: 8713 - protein, 451 aa, Unknown
  Description of Unknown: Integrase B8714 sequence
  SM00857,G3DSA:1.10.10.2600,IPR036162,PF13408,PS51737, G3DSA:3.40.50.1390,IPR025827,IPR006119,IPR038109,PF07508, SSF53041,IPR011109,PF00239,PTHR30461,PS51736, Coil,cd00338
MKKLNVGYMRVSTEAQTEKYGLDVQEDKIKELAKKRGVKIARWYVDGGYSGSNIQRPNIQKLLEDAEAGEIQAVYIYKLDRMSRDVVDTLTLVSKLLPKYNVEVVSATEDLRNETPMDRVMLGVNAVMGQYEREVIYMRTRAGMVERVKRGLWMGGGTIPYGYRYDRNDGILHIIPEEAEKVKAVFQMFRDGYSCDRIQKILGMHSEKLVSNIIRRIAYVGKIQYKGKTYQGLHEPIIDEKLFYEVQEEIKKRSTNAYVSNKYMLTGLCYCGKCGTKMRMQKWGKYTKIVCYSQYKGKEHISKTVNPCDNKKVRADVVEKEVEDCFKRFIVNVEEKENESESTRKMIEKEISLSEAKLKRLYTLYASGNSGTDTLLDVIQAEEKTLKNLREELKAEDIREKAGRGEKIEKIKEMSNVWDTLTDSEKNKVLKECVEKVVITGDDIDIHFSIY

SEQ ID NO: 8714 - protein, 451 aa, Unknown
  Description of Unknown: Integrase B8715 sequence
  PTHR30461:SF3,SM00857,G3DSA:1.10.10.2600,IPR036162,PF13408, PS51737,G3DSA:3.40.50.1390,IPR025827,IPR006119,IPR038109, PF07508,SSF53041,IPR011109,PF00239,PTHR30461, PS51736,Coil,cd00338
MKKLNVGYMRVSTEAQTEKYGLDVQEDKIKELAKKRGVKIARWYVDGGYSGSNIQRPNIQKLLEDAEAGEIQAVYIYKLDRMSRDVVDTLTLVSKLLPKYNVEVVSATEDLRNETPMDRVMLGVNAVMGQYEREVIYMRTRAGMVERVKRGLWMGGGTIPYGYRYDRNDGILHIIPEEAEKVKAIFQMFRDGYSCDRIQKILGMHSEKLVSNIIRRIAYVGKIQYKGKTYQGLHEPIIDEKLFYEVQEEIKKRSTNAYVSNKYMLTGLCYCGKCGTKMRMQKWGKYTKIVCYSQYKEKEHISKTGNPCKNKKVRADVVEKEVEDCFKRFIVNVEEKENESESTRKMIEKEISLSETKLKRLYTLYASGSSGTDTLFGVIQEEEKTLKNLQEELKAEDIREKAGRGEKIEKIKEMSNVWDTLTDSEKNKVLKECVEKVVITGDDIDIHFSIY

SEQ ID NO: 8715 - protein, 451 aa, Unknown
  Description of Unknown: Integrase B8716 sequence
  PTHR30461:SF3,SM00857,G3DSA:1.10.10.2600,IPR036162,PF13408, PS51737,G3DSA:3.40.50.1390,IPR025827,IPR006119,IPR038109, PF07508,SSF53041,IPR011109,PF00239,PTHR30461, PS51736,Coil,cd00338
MKKLNVGYMRVSTEAQTEKYGLDVQEDKIKELAKKRGVKIARWYVDGGYSGSNIQRPNIQKLLEDAEAGEIQAVYIYKLDRMSRDVVDTLTLVSKLLPKYNVEVVSATEDLRNETPMDRVMLGVNAVMGQYEREVIYMRTRAGMVERVKRGLWMGGGAIPYGYRYDRNDGILHIIPEEAEKVKAIFQMFRDGYSCDRIQKILGMHSEKLVSNIIRRIAYVGKIQYKGKTYQGLHEPIIDEKLFYEVQEEIKKRSTNAYVSNKYMLTGLCYCGKCGTKMRMQKWGKYTKIVCYSQYKGKEHISKTGNPCKNKKVRADVVEKEVEDCFKRFIVNVEEKENESESTRKMIEKEISLSEAKLKRLYTLYASGNSGTDTLLDVIQAEEKTLKNLREELKAEDIREKGGRGEKIEKIKEMSNVWDTLTDSEKNKVLKECVEKVVITGDDIDIHFSIY

SEQ ID NO: 8716 - protein, 451 aa, Unknown
  Description of Unknown: Integrase B8717 sequence
  PTHR30461:SF3,IPR036162,PS51737,IPR011109,PTHR30461, PS00397,PF00239,G3DSA:1.10.10.2600,IPR006119,SSF53041, cd00338,SM00857,IPR025827,IPR038109,PS51736, IPR006118,PF13408,G3DSA:3.40.50.1390,Coil
MKCVAYIRVSTEKQAEEGYGLDSQKRDILDYCKRNNLAVSEWYIDAGLSGMDMTKRVELQRLISDMSKIDIIVVYKLDRLARDSVDALYMIEKIFIPKGIRVESVHDFAKYDTPQEKFQTQIMAAVAEYDRNTMLLRMRGGMLERVKNGLWMGGGNTPYCYHYSKELGILVPIPERAEKANQAMELFLSGYSDEKIQHICGFRTEKIVRNILTSPVNVGFIPYKGKLYRGKHQPIFDMDRYDRAQNVRRSRSKSKSISTEPNLLTGLCYCGVCGCAMRYQKWTNGRHKIYCMSRNKSMSYLPNYNHDCNNALEWATDIENQVEGEILKISLDLSSHKPKAKETRLEIMQSRLDKEQTKLKRLYKLYADGNDTILEMISEMEEKISETKMEIEEESKNQNVSEKKSLAYENIKKLADIWPDIDKKQKNLILKTIIDKIVIVNGNIEIQLKNF

SEQ ID NO: 8717 - protein, 451 aa, Unknown
  Description of Unknown: Integrase B8718 sequence
  SM00857,G3DSA:1.10.10.2600,IPR036162,PF13408,IPR025827, G3DSA:3.40.50.1390,PS51737,IPR006119,IPR038109,PF07508, SSF53041,IPR011109,PF00239,PTHR30461,PS51736, Coil,cd00338
MKKLNVGYMRVSTEAQTEKYGLDVQEDKIKELAKKRGVKIARWYVDGGYSGSNIQRPNIQKLLEDAEAGEIQAVYIYKLDRMSRDVVDTLTLVSKLLPKYNVEVVSATEDLRNETPMDRVMLGVNAVMGQYEREVIYMRTRAGMVERVKRGLWMGGGTIPYGYRYDRNDGILHIIPEEAEKVKAIFQMFRDGYSCDRIQKILGMHSEKLVSNIIRRIAYVGKIQYKGRVYQGLHEPIIDEKLFYEVQEEIKKRSTNAYVSNKHMLTGLCYCGKCGTKMRMQKWGKYTKIVCYSQYKEKEHISKTGNPCKNKKVRADVVEKEVEDCFKRFIVNVEEKENESESTRKMIEKEISLSEAKLKRLYTLYASGSSGTDTLFDVIHAEEKTLKNLREELKAEDIREKAGRVEKIEKIKEMSNVWDTLTDSEKNKVLKECVEKVVIAGDDIDIHFSIY

SEQ ID NO: 8718 - protein, 451 aa, Unknown
  Description of Unknown: Integrase B8719 sequence
  PTHR30461:SF3,SM00857,G3DSA:1.10.10.2600,IPR036162,PF13408, IPR025827,G3DSA:3.40.50.1390,PS51737,IPR006119,IPR038109, PF07508,SSF53041,IPR011109,PF00239,PTHR30461, PS51736,Coil,cd00338
MKKLNVGYMRVSTEAQTEKYGLDVQEDKIKELAKKRGVKIARWYVDGGYSGSNIQRPNIQKLLEDAEAGEIQAVYIYKLDRMSRDVVDTLTLVSKLLPKYNVEVVSATEDLRNETPMDRVMLGVNAVMGQYEREVIYMRTRAGMVERVKRGLWMGGGTIPYGYRYDRNDGILHIIPEEAEKVKAIFQMFRDGYSCDRIQKILGMHSEKLVSNIIRRIAYVGKIQYKGKTYQGLHEPIIDEKLFYEVQEEIKKRSTNAYVSNKYMLTGLCYCGKCGTKMRMQKWGKYTKIVCYSQYKEKEHISKTGNPCKNKKVRADVVEKEVEDCFKRFIVNVEEKENESESTRKMIEKEISLSEAKLKRLYTLYASGNSGTDTLLDVIQTEEKTLKNLQEELKAEDIREKAGRGEKIEKIKEMSNVWDTLTDSEKNKVLKECVEKVVITGDDIDIHFSIY

SEQ ID NO: 8719 - protein, 451 aa, Unknown
  Description of Unknown: Integrase B8720 sequence
  cd00338,SM00857,G3DSA:1.10.10.2600,IPR036162,PF13408, IPR025827,G3DSA:3.40.50.1390,PS51737,IPR006119,IPR038109, PF07508,IPR011109,SSF53041,PTHR30461,PS51736, Coil,PF00239
MKKLNVGYMRVSTEAQAEKYGLDVQEDKIKELAKKRGVKIARWYVDGGYSGSNIQRPNIQKLLEDAEAGEIQAVYIYKLDRMSRDVVDTLTLVSKLLPKYNVEVVSATEDLRNETPMDRVMLGVNAVMGQYEREVIYMRTRAGMVERVKRGLWMGGGTIPYGYRYDRNDGILHIIPEEAEKVKAIFQMFRDGYSCDRIQKILGMHSEKLVSNIIRRIAYVGKIQYKGKTYQGLHEPIIDEKLFYEVQEEIKKRSTNAYVSNKHMLTGLCYCGKCGTKMRMQKWGKYTKIVCYSQYKEKEHISNTGNPCKNKKVRADVVEKEVEDCFKRFIVNVEEKENESESTRKMIEKEISLSEAKLKRLYTLYASGSSGTDTLFGVIQAEEKTLKNLQEELKAEDIREKAGRGEKIEKIKEMSNVWDTLTDSEKNKVLKECVEKVVITGDDIDIHFSIY

SEQ ID NO: 8720 - protein, 451 aa, Unknown
  Description of Unknown: Integrase B8721 sequence
  PTHR30461:SF3,SM00857,G3DSA:1.10.10.2600,IPR036162,PF13408, PS51737,G3DSA:3.40.50.1390,IPR025827,IPR006119,IPR038109, PF07508,SSF53041,IPR011109,PF00239,PTHR30461, PS51736,Coil,cd00338
MKKLNVGYMRVSTEAQTEKYGLDVQEDKIKELAKKRGVKIARWYVDGGYSGSNIQRPNIQKLLEDAEAGEIQAVYIYKLDRMSRDVVDTLTLVSKLLPKYNVEVVSATEDLRNETPMDRVMLGVNAVMGQYEREVIYMRTRAGMVERVKRGLWMGGGTIPYGYRYDRNDGILHIIPEEAEKVKAIFQMFRDGYSCDRIQKILGMHSEKLVSNIIRRIAYVGKIQYKGKTYQGLHEPIIDEKLFYEVQEEIKKRSTNAYVSNKYMLTGLCYCGKCGTKMRMQKWGKYTKIVCYSQYKGKEHISKTGNPCKNKKVRADVVEKEVEDCFKRFIVNVEEKENESESTRKMIEKEISLSEAKLKRLYTLYASGNSGTDTLLDVIQAEEKTLKNLREELKAEDIREKAGRGEKIEKIKEMSNVWDTLTDSEKNKVLKECVEKVVITEDDIDIHFSIY

SEQ ID NO: 8721 - protein, 451 aa, Unknown
  Description of Unknown: Integrase B8722 sequence
  PTHR30461:SF3,SM00857,G3DSA:1.10.10.2600,IPR036162,PF13408, PS51737,G3DSA:3.40.50.1390,IPR025827,IPR006119,IPR038109, PF07508,SSF53041,IPR011109,PF00239,PTHR30461, PS51736,Coil,cd00338
MKKLNVGYMRVSTEAQTEKYGLDVQEDKIKELAKKRGVKIARWYVDGGYSGSNIQRPNIQKLLEDAESGEIQAVYIYKLDRMSRDVVDTLTLVSKLLPKYNVEVVSATEDLRNETPMDRVMLGVNAVMGQYEREVIYMRTRAGMLERVKRGLWMGGGTIPYGYRYDRNDGILHIIPEEAEKVKAIFQMFRDGYSCDRIQKILGMHSEKLVSNIIRRIAYVGKIQYKGRVYQGLHEPIIDEKLFYEVQEEIKKRSTNAYVSNKYMLTGLCYCGKCGTKMRMQKWGKYTKIVCYSQYKGKEHISKTGNPCKNKKVRADVVEKEVEDCFKRFIVNVEEKENESESTRKMIEKEISLSEAKLKRLYTLYASGNSGTDTLLDVIQAEEKTLKNLREELNAEDIREKAGRGEKIEKIKEMSNVWDTLTDSEKNKVLKECVEKVVITGDDIDIHFSIY

SEQ ID NO: 8722 - protein, 451 aa, Unknown
  Description of Unknown: Integrase B8723 sequence
  SM00857,G3DSA:1.10.10.2600,IPR036162,PF13408,PS51737, G3DSA:3.40.50.1390,IPR025827,IPR006119,IPR038109,PF07508, SSF53041,IPR011109,PF00239,PTHR30461,PS51736, Coil,cd00338
MKKLNVGYMRVSTEAQTEKYGLDVQEDKIKELAKKRGVKIARWYVDGGYSGSNIQRPNIQKLLEDAEAGEIQAVYIYKLDRMSRDVVDTLTLVSKLLPKYNVEVVSATEDLRNETPMDRVMLGVNAVMGQYEREVIYMRTRAGMVERVKRGLWMGGGTIPYGYRYDRNDGILHIIPEEAEKVKAIFQMFRDGYSCDRIQKILGMHSEKLVSNIIRRITYVGKIQYKGRVYQGLHEPIIDEKLFYEVQEEIKKRSTNAYLSNKHMLTGLCYCGKCGTKMRMQKWGKYTKIVCYSQYKEKEHISKTGNPCKNKKVRADVVEKEVEDCFKRFIVNVEEKENESESTRKMIEKEISLSEAKLKRLYTLYASGNSGTDTLFDVIQAEEKTLKNLQEELKAEDIREKAGRGEKIEKIKEMSNVWDTLTDSEKNKVLKECVEKVVIAEDDIDIHFSIY

SEQ ID NO: 8723 - protein, 451 aa, Unknown
  Description of Unknown: Integrase B8724 sequence
  SM00857,G3DSA:1.10.10.2600,IPR036162,PF13408,IPR025827, G3DSA:3.40.50.1390,PS51737,IPR006119,IPR038109,PF07508, SSF53041,IPR011109,PF00239,PTHR30461,PS51736, Coil,cd00338
MKKLNVGYMRVSTEAQTEKYGLDVQEDKIKELAKKRGVKIARWYVDGGYSGSNIQRPNIQKLLEDAEAGEIQAVYIYKLDRMSRDVVDTLTLVSKLLPKYNVEVVSATEDLRNETPMDRVMLGVNAVMGQYEREVIYMRTRAGMVERVKRGLWMGGGTIPYGYRYDRNDGILHIIPEEAEKVKAIFQMFRDGYSCDRIQKILGMHSEKLVSNIIRRITYVGKIQYKGRVYQGLHEPIIDEKLFYEVQEEIKKRSTNAYVSNKHMLTGLCYCGKCGTKMRMQKWGKYTKIVCYSQYKEKEHISKTGNPCKNKKVRADVVEKEVEDCFKRFIVNVEEKENESESTRKMIEKEISLSEAKLKRLYTLYASGNSGTDTLFDVIQAEEKTLKNLQEELKAEDIREKAGRGEKIEKIKEMSNVWDTLTDSEKNKVLKECVEKVVITGDDIDIHFSIY

SEQ ID NO: 8724 - protein, 451 aa, Unknown
  Description of Unknown: Integrase B8725 sequence
  PTHR30461:SF3,cd00338,SM00857,G3DSA:1.10.10.2600,IPR036162, PF13408,IPR025827,G3DSA:3.40.50.1390,PS51737,IPR006119, IPR038109,PF07508,SSF53041,IPR011109,PTHR30461, PS51736,Coil,PF00239
MKKLNVGYMRVSTEAQTEKYGLDVQEDKIKELAKKRGVKIARWYVDGGYSGSNIQRPNIQKLLEDAEAGEIQAVYIYKLDRMSRDVVDTLTLVSKLLPKYNVEVVSATEDLRNETPMDRVMLGVNAVMGQYEREVIYMRTRAGMVERVKRGLWMGGGTIPYGYRYDRNDGILHIIPEEAEKVKAIFQMFRDGYSCDRIQKILGMHSEKLVSNIIRRIAYVGKIQYKGKTYQGLHEPIIDEKLFYEVQEEIKKRSTNAYVSNKYMLTGLCYCGKCGTKMRMQKWGKYTKIVCYSQYKGKEHISKTGNPCKNKKVRADVVEKEVEDCFKRFIVNVEEKENESESTRKMIEKEISLSEAKLKRLYTLYARGNSGTDTLLDVIQAEEKTLKNLREELKAEDIREKAGRGEKIEKIKEMSNVWDTLTDSEKNKVLKECVEKVVITGDDIDIHFSIY

SEQ ID NO: 8725 - protein, 451 aa, Unknown
  Description of Unknown: Integrase B8726 sequence
  PTHR30461:SF3,SM00857,G3DSA:1.10.10.2600,IPR036162,PF13408, PS51737,IPR025827,G3DSA:3.40.50.1390,IPR006119,IPR038109, PF07508,SSF53041,IPR011109,PTHR30461,Coil, PS51736,cd00338,PF00239
MKKLNVGYMRVSTEAQTEKYGLDVQEDKIKELAKKRGVKIARWYVDGGYSGSNIQRPNIQKLLEDAEAGEIRAVYIYKLDRMSRDVVDTLTLVSKLLPKYNVEVVSATEDLRNETPMDRVMLGVNAVMGQYEREVIYMRTRAGMVERVKRGLWMGGGTIPYGYRYDRNDGILHIIPEEAEKVKAVFQMFRDGYSCDRIQKILGMHSEKLVSNIIRRIAYVGKIQYKGKTYQGLHEPIIDEKLFYEVQEEIKKRSTNAYVSNKYMLTGLCYCGKCGTKMRMQKWGKYTKIVCYSQYKDKKYIPQGPEPCKNKKVRADIVEKEVEDCFKRFIVNVEEKENESESTRKMIEKEISLSEAKLKRLYTLYANGNSGTDTLLDVIQAEEKTLKNLREELKAEDIREKAGQQEKIEKIKEMSNVWDTLTDSEKNKVLKECVEKVVITGDDIDIHFSIY

SEQ ID NO: 8726 - protein, 451 aa, Unknown
  Description of Unknown: Integrase B8727 sequence
  SM00857,G3DSA:1.10.10.2600,IPR036162,PF13408,IPR025827, G3DSA:3.40.50.1390,PS51737,IPR006119,IPR038109,PF07508, SSF53041,IPR011109,PF00239,PTHR30461,PS51736, Coil,cd00338
MKKLNVGYMRVSTEAQTEKYGLDVQEDKIKELAKKRGVKIARWYVDGGYSGSNIQRPNIQKLLEDAEAGEIQAVYIYKLDRMSRDVVDTLTLVSKLLPKYNVEVVSATEDLRNETPMDRVMLGVNAVMGQYEREVIYMRTRAGMVERVKRGLWMGGGTIPYGYRYDRNDGILHIIPEEAEKVKAVFQMFRDGYSCDRIQKILGMHSEKLVSNIIRRITYVGKIQYKGRVYQGLHEPIIDEKLFYEVQEEIKKRSTNAYVSNKHMLTGLCYCGKCGTKMRMQKWGKYTKIVCYSQYKEKEHISKTGNPCKNKKVRADVVEKEVEDCFKRFIVNVEEKENESESTRKMIEKEISLSEAKLKRLYTLYASGSSGTDTLFDVIQTEEKKLKNLQEELKAEDIREKAGRGEKIEKIKEMSNVWDTLTDSEKNKVLKECVEKVVITGDDIDIHFSIY

SEQ ID NO: 8727 - protein, 451 aa, Unknown
  Description of Unknown: Integrase B8728 sequence
  SM00857,G3DSA:1.10.10.2600,IPR036162,PF13408,PS51737, G3DSA:3.40.50.1390,IPR025827,IPR006119,IPR038109,PF07508, SSF53041,IPR011109,PF00239,PTHR30461,PS51736, Coil,cd00338
MKKLNVGYMRVSTEAQTEKYGLDVQEDKIKELAKKRGVKIARWYVDGGYSGSNIQRPNIQKLLEDAEAGEIQAVYIYKLDRMSRDVVDTLTLVSKLLPKYNVEVVSATEDLRNETPMDRVMLGVNAVMGQYEREVIYMRTRAGMVERVKRGLWMGGGTIPYGYRYDRNDGILHIIPEEAEKVKAIFQMFRDGYSCDRIQKILGMHSEKLVSNIIRRIAYVGKIQYKGKTYQGLHEPIIDEKLFYEVQEEIKKRSTNAYVSNRYMLTGLCYCGKCGTKMRMQKWGKYTKIVCYSQYKGKEHISKTGNPCKNKKVRADVVEKEVEDCFKRFIVNVEEKENESESTRKMIEKEISLSEAKLKRLYTLYARGNSGTDTLFDVIQTEEKTLKNLQEELKAEDIREKAGRGEKIEKIKEMSNVWDTLTDSEKNKVLKECVEKVVITEDDIDIHFSIY

SEQ ID NO: 8728 - protein, 451 aa, Unknown
  Description of Unknown: Integrase B8729 sequence
  cd00338,SM00857,G3DSA:1.10.10.2600,IPR036162,PF13408, IPR025827,G3DSA:3.40.50.1390,PS51737,IPR006119,IPR038109, SSF53041,IPR011109,PTHR30461,PS51736,Coil, PF00239
MKKVLKIGGYVRVSHEEQKKFGYSTKAQIEEIEKWCNENNHNLIDLYIDEGYSASNMKRPNLQRMINDLPKLDAILFTRIDRLSRNVLEANKLLQLLKQNNTDMIAIKEENVDTTTSNGMFLFNLKLSLAQHELDRGSERIKAVFEYKVREGEAVTGSLPFGYKIGEKDGKKVIIKDKETEAIVNDIFDHFSTYRSIRSTCIYINKKYNLTKDYRTYARILKRDLYTGKYKDNYNYAPAYITEKEYLLNQEYIKGNVKVRKNKNVYLFVGMIKCPECKSSFVGKYYDGKKRYYSYVCGKHKSTKLCSFKKGITEEKIEKFLIENVEDLLNKHIASVRTDVEILPKPEKEKLKKQIKDIKTELDNLNYMFRKGRISASDYDIEYDDLEKELKKIEALTTSNKEIKDINKFFVNDWKTIYNNLEKEKKRALWNSVIKNITIDEDLNITLVFRS

SEQ ID NO: 8729 - protein, 451 aa, Unknown
  Description of Unknown: Integrase B8730 sequence
  PTHR30461:SF3,SM00857,G3DSA:1.10.10.2600,IPR036162,PF13408, IPR025827,G3DSA:3.40.50.1390,PS51737,IPR006119,IPR038109, PF07508,SSF53041,IPR011109,PF00239,PTHR30461, PS51736,Coil,cd00338
MKKLNVGYMRVSTEAQTEKYGLDVQEDKIKELAKKRGVKIARWYVDGGYSGSNIQRPNIQKLLEDAEAGEIQAVYIYKLDRMSRDVVDTLTLVSKLLPKYNVEVVSATEDLRNETPMDRVMLGVNAVMGQYEREVIYMRTRAGMVERVKRGLWMGGGTIPYGYRYDRNDGILHIIPEEAEKVKAVFQMFRDGYSCDRIQKILGMHSEKLVSNIIRRITYVGKIQYKGRVYQGLHEPIIDEKLFYEVQEEIKKRSTNAYVSNKHMLTGLCYCGKCGTKMRMQKWGKYTKIVCYSQYKEKEHISKTGNPCKNKKVRADVVEKEVEDCFKRFIVNVEEKENESESTRKMIEKEISLSEAKLKRLYTLYASGNSGTDTLLDVIQAEEKTLKNLREELKAEDIREKAGRGKKIEKIKEMSNVWDTLTDSEKNKVLKECVEKVVITGDDIDIHFSIY

SEQ ID NO: 8730 - protein, 451 aa, Unknown
  Description of Unknown: Integrase B8731 sequence
  PTHR30461:SF3,cd00338,SM00857,G3DSA:1.10.10.2600,IPR036162, PF13408,PS51737,G3DSA:3.40.50.1390,IPR025827,IPR006119, IPR038109,PF07508,IPR011109,SSF53041,PTHR30461, PS51736,Coil,PF00239
MKKLNVGYMRVSTEAQTEKYGLDVQEDKINELAKKRGVKIARWYVDGGYSGSNIQRPNIQKLLEDAEAGEIRAVYIYKLDRMSRDVVDTLTLVSKLLPKYNVEVVSATEDLRNETPMDRVMLGVNAVMGQYEREVIYMRTRAGMVERVKRGLWMGGGTIPYGYRYDRNDGILHIIPEEAEKVKAIFKMFRDGYSCDRIQKILDMHSEQLVSNIIRSITYVGKIQYKGRVYQGLHEPIIDEKLFYEVQEEIKKRSTNAYVSNKHMLTGLCYCGKCGTKMRMQKWGKYTKIVCYSQYKEKEHISKTGNPCKNKKVRADVVEKEVEDCFKRFIVNVEEKENESESTRKMIEKEISLSEAKLKRLYTLYASGNSGTDTLVDVIQAEEKTLKNLQEELKAEDIKEKAGRGEKIEKIKEMSNVWDTLTDSEKNKVLKECVEKVVITEDDIDIHFSIY

SEQ ID NO: 8731 - protein, 451 aa, Unknown
  Description of Unknown: Integrase B8732 sequence
  IPR036162,PS51737,IPR011109,PTHR30461,PS00397, PF00239,G3DSA:1.10.10.2600,IPR006119,SSF53041,cd00338, SM00857,IPR025827,IPR038109,PS51736,IPR006118, PF13408,G3DSA:3.40.50.1390,PF07508,Coil
MKKMDVAYLRVSTETQTEKYGLDMQRQKIIDYCERNGVTIDKWYVDGGYSGSKLDRPDIQKLLDDAENGLIGRVFIYKLDRMSRDVIDTLNLIYRILPKYGVKVISMTEEIRTENPMDKVMLTMNAAMNQYEREVIRMRMSAGMVERVKKGYWMGGGRTPYGYYYDRNDGILHVDQEQAELVRNAYMLYLDGTSCDKISKMLGFKGERIVTQILKRKSNIGYIVYNGKTYKGLHEPIVDEKTFYDVQEMMKKRSTNSHVSNGNLLTGLCYCGVCGARIRYQKWGSYHKLVCYSQDIHSGKDYMKKSDHCNNAKIKADYVEHEVEECFVQFAINIDDSKPESIDRTDIIEKQIKSINSKIKKLYDLYIERQSDNLLDMINSEEEKVRDLELEIIAERNDSNDGLSEEKISQIKHMADIWDVLKIQEKNKILKQCIDKIVIMNGNVEIHFHTI

SEQ ID NO: 8732 - protein, 451 aa, Unknown
  Description of Unknown: Integrase B8733 sequence
  cd00338,SM00857,G3DSA:1.10.10.2600,IPR036162,PF13408, PS51737,G3DSA:3.40.50.1390,IPR025827,IPR006119,IPR038109, PF07508,SSF53041,IPR011109,PTHR30461,PS51736, Coil,PF00239
MKKLNVGYMRVSTEAQTEKYGLDVQEDKIKELAKKRGVKIARWYVDGGYSGSNIQRPNIQKLLEDAEAGEIQAVYIYKLDRMSRDVVDTLTLVSKLLPKYNVEVVSATEDLRNETPMDRVMLGVNAVMGQYEREVIYMRTRAGMVERVKRGLWMGGGTIPYGYRYDRNDGILHIIPEEAEKVKAIFQMFRDGYSCDRIQKIIGMHSEKLVSNIIRRIAYVGKIQYKGKVYQGLHEPIIDEKLFYEVQEEIKKRSTNAYVSNKYMLTGLCYCGKCGTKMRMQKWGKYTKIVCYSQYKGKEHISKTGNPCKNKKVRADVVEKEVEDCFKRFIVNVEEKENESESTRKMIEKEISLSEAKLKRLYTLYARGNSGTDTLLDVIQAEEKTLKNLREELKAEDIREKAGRGEKIEKIKEMSNVWDTLTDSEKNKVLKECVEKVVIAGDDIDIHFSIY

SEQ ID NO: 8733 - protein, 451 aa, Unknown
  Description of Unknown: Integrase B8734 sequence
  PTHR30461:SF3,SM00857,G3DSA:1.10.10.2600,IPR036162,PF13408, PS51737,G3DSA:3.40.50.1390,IPR025827,IPR006119,IPR038109, PF07508,IPR011109,SSF53041,PTHR30461,Coil, PS51736,cd00338,PF00239
MQRVAIYMRVSTDQQAKHGDSLREQQETLDEYIKRNKNLKVVDKYIDGGISGQKLNRDEFQRLLDDVKNDQIDLILFTKLDRWFRNLRHYLNTQEILEKHNVSWNAVSQQYYDTTTAYGRTFIAQVMSFAELEAQMTSERIKSVFSNKIQQGEVVSGKVPLGYKIENKRLVPTSDKDIVIDLFDYYVRVGSLRKTTTYLEEKHGIVRDYQSVRKLLTNEKYIGKLRNNTNYCEPIIDKDIFETVQLRLSQNVKTSGSHDYIFRGLVRCADCDGSMSCSTLKSKYIKKTDGEVSYYIRSCYRCTRRRNNPTRCKNKKTYYERALERYLLDNIQTNIAMHVRTLKKEVTKKDSVKRKKDALFVKIERLKKAYLNEIIELDEYKRDRELLENEIASLKEPKINKNIAPLKKVLSDDFFEKYEKASINQKNELWRSIIESIEVSVDGNITINFLP

SEQ ID NO: 8734 - protein, 451 aa, Unknown
  Description of Unknown: Integrase B8735 sequence
  SM00857,G3DSA:1.10.10.2600,IPR036162,PF13408,IPR025827, G3DSA:3.40.50.1390,PS51737,IPR006119,IPR038109,PF07508, SSF53041,IPR011109,PF00239,PTHR30461,PS51736, Coil,cd00338
MKKLNVGYMRVSTEAQTEKYGLDVQEDKIKELAKKRGVKIARWYVDGGYSGSNIQRPNIQKLLEDAEAGEIQAVYIYKLDRMSRDVVDTLTLVSKLLPKYNVEVVSATEDLRNETPMDRVMLGVNAVMGQYEREVIYMRTRAGMVERVKRGLWMGGGTIPYGYRYDRNDGILHIIPEEAEKVKAVFQMFRDGYSCDRIQKILGMHSEKLVSNIIRRITYVGKIQYKGRVYQGLHEPIIDEKLFYEVQEEIKKRSTNAYISNKHMLTGLCYCGKCGTKMRMQKWGKYTKIVCYSQYKEKEHISKTGNPCKNKKVRADVVEKEVEDCFKRFIVNVEEKENESESTRKMIEKEISLSEAKLKRLYTLYASGNSGTDTLFDVIQAEEKTLKNLQEELKAEDIREKAGRGEKIEKIKEMSNVWDTLTDSEKNKVLKECVEKVVITGDDIDIHFSIY

SEQ ID NO: 8735 - protein, 451 aa, Unknown
  Description of Unknown: Integrase B8736 sequence
  SM00857,G3DSA:1.10.10.2600,IPR036162,PF13408,IPR025827, G3DSA:3.40.50.1390,PS51737,IPR006119,IPR038109,PF07508, IPR011109,SSF53041,PF00239,PTHR30461,PS51736, Coil,cd00338
MKKLNVGYMRVSTEAQTEKYGLDVQEDKIKELAKKRGVKIARWYVDGGYSGSNIQRPNIQKLLEDAEAGEIQAVYIYKLDRMSRDVVDTLTLVSKLLPKYNVEVVSATEDLRNETPMDRVMLGVNAVMGQYEREVIYMRTRAGMVERVKRGLWMGGGTIPYGYRYDRNDGILHIIPEEAEKVKAIFQMFRDGYSCDRIQRILGMHSEKLVSNIIRRIAYVGKIQYKGRVYQGLHEPIIDEKLFYEVQEEIKKRSTNAYVSNKHMLTGLCYCGKCGTKMRMQKWGKYTKIVCYSQYKEKEHISKTGNPCKNKKVRADVVEKEVEDCFRRFIVNVEEKENESESTRKMIEKEISLSEAKLKRLYTLYASGNSGTDTLFDVIQAEEKTLKNLQEELKAEDIREKAGRGEKIEKIKEMSNVWDTLTDSEKNKVLKECVEKVVITGDDIDIHFSIY

SEQ ID NO: 8736 - protein, 451 aa, Unknown
  Description of Unknown: Integrase B8737 sequence
  PTHR30461:SF3,SM00857,G3DSA:1.10.10.2600,IPR036162,PF13408, PS51737,G3DSA:3.40.50.1390,IPR025827,IPR006119,IPR038109, PF07508,SSF53041,IPR011109,PF00239,PTHR30461, PS51736,Coil,cd00338
MKKINVGYMRVSTEAQTEKYGLDVQEDKIKELAKKRGVKIARWYVDGGYSGSNIQRPNIQKLLEDAEAGEIQAVYIYKLDRMSRDVVDTLTLVSKLLPKYNVEVVSATEDLRNETPMDRVMLGVNAVMGQYEREVIYMRTRAGMVERVKRGLWMGGGTIPYGYRYDRNDGILHIIPEEAEKVKAIFQMFRDGYSCDRIQKILGMHSEKLVSNIIRRIAYVGKIQYKGRVYQGLHEPIIDEKLFYEVQEEIKKRSTNAYVSNKYMLTGLCYCGKCGTKMRMQKWGKYTKIVCYSQYKGKEHISKTGNPCKNKKVRADVVEKEVEDCFKRFIVNVEEKENESESTRKMIEKEISLSEAKLKRLYTLYASGNSGTDTLLDVIQAEEKTLKNLREELKAEDIREKAGRGEKIEKIKEMSNVWDTLTDSEKNKVLKECVEKVVITGDDIDIHFSIY

SEQ ID NO: 8737 - protein, 451 aa, Unknown
  Description of Unknown: Integrase B8738 sequence
  PTHR30461:SF3,SM00857,G3DSA:1.10.10.2600,IPR036162,PF13408, PS51737,IPR025827,G3DSA:3.40.50.1390,IPR006119,IPR038109, PF07508,IPR011109,SSF53041,PF00239,PTHR30461, PS51736,Coil,cd00338
MKKLNVGYMRVSTEAQTEKYGLDVQEDKIKELANKRGVKIARWYVDGGYSGSNIQRPNIQKLLEDAEAGEIQAVYIYKLDRMSRDVVDTLTLVSKLLPKYNVEVVSATEDLRNETPMDRVMLGVNAVMGQYEREVIYMRTRAGMVERVKHGLWMGGGTIPYGYRYDRNDGILHIIPEEAEKVKAVFQMFRDGYSCDRIQKILGMHSEKLVSNIIRRIAYVGKIQYKGKTYQGLHEPIIDEKLFYEVQEEIKKRSTNAYVSNKYMLTGLCYCGKCGTKMRMQKWGKYTKIVCYSQYKGKEHISKTGNPCKNKKVRADVVEKEVEDCFKRFIVNVEEKENESESTRKMIEKEISLSEAKLKRLYTLYASGNSGTDTLLDVIQAEEKTLKNLREELKEEDIREKAGRGEKIEKIKEMSNVWDTLTDSEKNKVLKECVEKVVITGDDIDIHFSIY

SEQ ID NO: 8738 - protein, 451 aa, Unknown
  Description of Unknown: Integrase B8739 sequence
  PTHR30461:SF3,cd00338,SM00857,G3DSA:1.10.10.2600,IPR036162, PF13408,PS51737,G3DSA:3.40.50.1390,IPR025827,IPR006119, IPR038109,PF07508,IPR011109,SSF53041,PTHR30461, PS51736,Coil,PF00239
MKKINVGYMRVSTEAQTEKYGLDVQEDKIKELAKKRGVKIARWYVDWGYSGSNIQRPNIQKLLEDAEAGEIQAVYIYKLDRMSRDVVDTLTLVSKLLPKYNVEVVSATEDLRNETPMDRVMLGVNAVMGQYEREVIYMRTRAGMVERVKRGLWVGGGAIPYGYRYDRNDGILHIIPEEAEKVKAIFQMFRDGYSCDRIQKILGMHSEKLVSNIIRRIAYVGKIQYKGKVYQGLHEPIIDEKLFYEVQEEIKKRSTNAYVSNKYMLTGLCYCGKCGTKMRMQKWGKYTKIVCYSQYKGKEHISKTESPCENKKVRADVVEKEVEDCFKRFIVNVEEKENESENTKKMIEREISLSESKLKRLYTLYANGNSGTDTLLDVINVEEKTLKNLREELKAEDIREKAGRGEKIEKIKEMSNVWDTLTDSEKNKVLKECVEKVVITGDDIDIHFSIY

SEQ ID NO: 8739 - protein, 451 aa, Unknown
  Description of Unknown: Integrase B8740 sequence
  SM00857,G3DSA:1.10.10.2600,IPR036162,PF13408,PS51737, G3DSA:3.40.50.1390,IPR025827,IPR006119,IPR038109,PF07508, SSF53041,IPR011109,PF00239,PTHR30461,PS51736, Coil,cd00338
MKKLNVGYMRVSTEAQTEKYGLDVQEDKIKELAKKRGVKIARWYVDGGYSGSNIQRPNIQKLLEDAEAGEIQAVYIYKLDRMSRDVVDTLTLVSKLLPKYNVEVVSATEDLRNETPMDRVMLGVNAVMGQYEREVIYMRTRAGMVERVKRGLWMGGGTIPYGYRYDRNDGILHIIPEEAEKVKAVFQMFRDGYSCDRIQKILGMHSEKLVSNIIRRIAYVGKIQYKGKVYQGLHEPIIDEKLFYEVQEEIKKRSTNAYVSNKYMLTGLCYCGKCGTKMRMQKWGKYTKIVCYSQYKGKEHISKTGNPCKNKKVRADVVEKEVEDCFKRFIVNVEEKENESESTRKMIEKEISLSEAKLKRLYTLYASGNSGTDTLFDVIQAEEKTLKNLQEELKAEDIREKAGRGEKIEKIKEISNVWDTLTDSEKNKVLKECVEKVVITEDDIDIHFSIY

SEQ ID NO: 8740 - protein, 451 aa, Unknown
  Description of Unknown: Integrase B8741 sequence
  PTHR30461:SF3,SM00857,G3DSA:1.10.10.2600,IPR036162,PF13408, IPR025827,G3DSA:3.40.50.1390,PS51737,IPR006119,IPR038109, PF07508,SSF53041,IPR011109,PF00239,PTHR30461, PS51736,Coil,cd00338
MKKLNVGYMRVSTEAQTEKYGLDVQEDKIKELAKKRGVKIARWYVDGGYSGSNIQRPNIQKLLEDAEAGEIQAVYIYKLDRMSRDVVDTLTLVSKLLPKYNVEVVSATEDLRNETPMDRVMLGVNAVMGQYEREVIYMRTRAGMVERVKRGLWMGGGTIPYGYRYDRNDGILHIIPEEAEKVKAIFQMFRDGYSCDRIQRILGMHSEKLVSNIIRRIAYVGKIQYKGKTYQGLHEPIIDEKLFYEVQEEIKKRSTNAYVSNKHMLTGLCYCGKCGTKMRMQKWGKYTKIVCYSQYKEKEHISKTGNPCKNKKVRADVVEKEVEDCFKRFIVNVEEKENESESTRKMIEKEISLSEAKLKRLYTLYASGNSGTDTLVDVIQTEEKTLKNLQEELKAEDIREKAGRGKKIEKIKEMSNVWDTLTDSEKNKVLKECVEKVVITGDDIDIHFSIY

SEQ ID NO: 8741 - protein, 451 aa, Unknown
  Description of Unknown: Integrase B8742 sequence
  PTHR30461:SF3,SM00857,G3DSA:1.10.10.2600,IPR036162,PF13408, PS51737,G3DSA:3.40.50.1390,IPR025827,IPR006119,IPR038109, PF07508,IPR011109,SSF53041,PF00239,PTHR30461, PS51736,Coil,cd00338
MKKLNVGYMRVSTEAQTEKYGLDVQEDKINELAKKRGVKIARWYVDGGYSGSNIQRPNIQKLLEDAEAGEIQAVYIYKLDRMSRDVVDTLTLVSKLLPKYNVEVVSATEDLRNETPMDRVMLGVNAVMGQYEREVIYMRTRAGMVERVKRGLWMGGGTIPYGYRYDRNDGILHIIPEEAEKVKAIFQMFRDGYSCDRIQKILGMHSEKLVSNIIRRITYVGKIQYKGRVYQGLHEPIIDEKLFCEVQEEIKKRSTNAYVSNKHMLTGLCYCGKCGTKMRMQKWGKYTKIVCYSQYKEKEHISKTGNPCKNKKVRADVVEKEVEDCFKQFIVNVEEKENESESTRKMIEKEISLSESKLKRLYTLYANGNSGTDTLFGVIQAEEKTLKNLQEELKAEDIREKAGRGEKIEKIKEMSNVWDTLTDSEKNKVLKECVEKVVITGDDIDIHFSIY

SEQ ID NO: 8742 - protein, 451 aa, Unknown
  Description of Unknown: Integrase B8743 sequence
  PTHR30461:SF3,cd00338,SM00857,G3DSA:1.10.10.2600,IPR036162, PF13408,IPR025827,G3DSA:3.40.50.1390,PS51737,IPR006119, IPR038109,PF07508,IPR011109,SSF53041,PTHR30461, PS51736,Coil,PF00239
MKKLNVGYMRVSTEAQTEKYGLDVQEDKIKELAKKRGVKIARWYVDGGYSGSNIQRPNIQKLLEDAEAGEIQAVYIYKLDRMSRDVVDTLTLVSKLLPKYNVEVVSATEDLRNETPMDRVMLGVNAVMGQYEREVIYMRTRAGMVERVKRGLWMGGGTIPYGYRYDRNDGILHIIPEEAEKVKAIFQMFRDGYSCDRIQKILGMHSEKLVSNIIRRIAYVGKIQYKGRVYQGLHEPIIDEKLFYEVQEEIKKRSTNAYVSNKHMLTGLCYCGKCGTKMRMQKWGKYTKIVCYSQYKEKEHISKTGNPCKNKKVRADVVEKEVEDCFKRFIVNVEEKENESESTRKMIEKEISLSEAKLKRLYTLYASGSSGTDTLFGVIQEEEKTLKNLQEELKAEDIREKAGRGEKIEKIKEMSNVWDTLTDSEKNKVLKECVEKVVITGDDIDIHFSIY

SEQ ID NO: 8743 - protein, 451 aa, Unknown
  Description of Unknown: Integrase B8744 sequence
  PTHR30461:SF3,SM00857,G3DSA:1.10.10.2600,IPR036162,PF13408, PS51737,G3DSA:3.40.50.1390,IPR025827,IPR006119,IPR038109, PF07508,SSF53041,IPR011109,PF00239,PTHR30461, PS51736,Coil,cd00338
MKKLNVGYMRVSTEAQTEKYGLDVQEDKIKELAKKRGVKIARWYVDGGYSGSNIQRPNIQKLLEDAEAGEIQAVYIYKLDRMSRDVVDTLTLVSKLLPKYNVEVVSATEDLRNETPMDRVMLGVNAVMGQYEREVIYMRTRAGMVERVKRGLWMGGGTIPYGYRYDRNDGILHIIPEEAEKVKAIFQMFRDGYSCDRIQRILGMHSEKLVSNIIRRIAYVGKIQYKGRVYQGLHEPIIDEKLFYEVQEEIKKRSTNSYVSNKHMLTGLCYCGKCGTKMRMQKWGKYTKIVCYSQYKEKKHISKTGNPCKNKKVRADVVEKEVEDCFKQFIVNVEEKENESESTRKMIEKEISLSEAKLKRLYTLYASGSSGTDTLFGVIQEEEKTLKNLQEELKAEDIREKAGRGEKIEKIKEMSNVWDTLTDSEKNKVLKECVEKVVITEDDIDIHFSIY

SEQ ID NO: 8744 - protein, 451 aa, Unknown
  Description of Unknown: Integrase B8745 sequence
  SM00857,G3DSA:1.10.10.2600,IPR036162,PF13408,PS51737, G3DSA:3.40.50.1390,IPR025827,IPR006119,IPR038109,PF07508, SSF53041,IPR011109,PF00239,PTHR30461,PS51736, Coil,cd00338
MKKLNVGYMRVSTEAQTEKYGLDVQEDKIKELAKKRGVKIARWYVDGGYSGSNIQRPNIQKLLEDAEAGEIQAVYIYKLDRMSRDVVDTLTLVSKLLPKYNVEVVSATEDLRNETPMDRVMLGVNAVMGQYEREVIYMRTRAGMVERVKRGLWMGGGTIPYGYRYDRNDGILHIIPEEAEKVKAIFQMFRDGYSCDRIQKILGMHSEKLVSNIIRRIAYVGKIQYKGKVYQGLHEPIIDEKLFFEVQEEIKKRSTNAYVSNKYMLTGLCYCGKCGTKMRMQKWGKYTKIVCYSQYKGKEHISKTGNPCKNKKVRADVVEKEVEDCFKRFIVNVEEKENESESTRKMIEKEISLSEAKLKRLYTLYASGNSGTDTLLDVIQAEEKTLKNLREELKAEDIREKAGRGEKIEKIKEMSNVWDTLTDSEKNKVLKECVEKVVITGDDIDIHFSIY

SEQ ID NO: 8745 - protein, 451 aa, Unknown
  Description of Unknown: Integrase B8746 sequence
  PTHR30461:SF3,cd00338,SM00857,G3DSA:1.10.10.2600,IPR036162, PF13408,PS51737,G3DSA:3.40.50.1390,IPR025827,IPR006119, IPR038109,PF07508,SSF53041,IPR011109,PTHR30461, PS51736,Coil,PF00239
MKKLNVGYMRVSTEAQTEKYGLDVQEDKIKELAKKRGVKIARWYVDGGYSGSNIQRPNIQKLLEDAEAGEIQAVYIYKLDRMSRDVVDTLTLVSKLLPKYNVEVVSATEDLRNETPMDRVMLGVNAVMGQYEREVIYMRTRAGMVERVKRGLWMGGGTIPYGYRYDRNDGILHIIPEEAEKVKAIFQMFRDGYSCDRIQKILGMHSEKLVSNIIRRIAYVGKIQYKGRVYQGLHEPIIDEKLFYEVQEEIKKRSTNAYVSNKYMLTGLCYCGKCGTKMRMQKWGKYTKIVCYSQYKGKEHISKTGNPCKNKKVRADVVEKEVEDCFKRFIVNVEEKENESESTRKMIEKEISLSEAKLKRLYTLYASGNSGTDTLVDVIQTEEKTLKNLQEELKAEDIREKAGRGEKIEKIKEMSNVWDTLTDSEKNKVLKECVEKVVITGDDIDIHFSIY

SEQ ID NO: 8746 - protein, 451 aa, Unknown
  Description of Unknown: Integrase B8747 sequence
  PTHR30461:SF3,SM00857,G3DSA:1.10.10.2600,IPR036162,PF13408, PS51737,G3DSA:3.40.50.1390,IPR025827,IPR006119,IPR038109, PF07508,SSF53041,IPR011109,PF00239,PTHR30461, PS51736,Coil,cd00338
MKKLNVGYMRVSTEAQTEKYGLDVQEDKIKELAKKRGVKIARWYVDGGYSGSNIQRPNIQKLLEDAEAGEIQAVYIYKLDRMSRDVVDTLTLVSKLLPKYNVEVVSATEDLRNETPMDRVMLGVNAVMGQYEREVIYMRTRAGMLERVKRGLWMGGGTIPYGYRYDRNDGILHIIPEEAEKVKAIFQMFRDGYSCDRIQKILGMHSEKLVSNIIRRIAYVGKIQYKGKTYQGLHEPIIDEKLFYEVQEEIKKRSTNAYVSNKYMLTGLCYCGKCGTKMRMQKWGKYTKIVCYSQYKGKEHISKTGNPCKNKKVRADVVEKEVEDCFKRFIVNVEEKENESESTRKMIEKEISLSEAKLKRLYTLYASGNSGTDTLLDVIQAEEKTLKNLREELKAEDIREKAGRGEKIEKIKEMSNVWDTLTDSEKNKVLKECVEKVVITGDDIDIHFSIY

SEQ ID NO: 8747 - protein, 451 aa, Unknown
  Description of Unknown: Integrase B8748 sequence
  SM00857,G3DSA:1.10.10.2600,IPR036162,PF13408,IPR025827, G3DSA:3.40.50.1390,PS51737,IPR006119,IPR038109,PF07508, SSF53041,IPR011109,PF00239,PTHR30461,PS51736, Coil,cd00338
MKKLNVGYMRVSTEAQTEKYGLDVQEDKIKELAKKRGVKIARWYVDGGYSGSNIQRPNIQKLLEDAEAGEIQAVYIYKLDRMSRDVVDTLTLVSKLLPKYNVEVVSATEDLRNETPMDRVMLGVNAVMGQYEREVIYMRTRAGMVERVKRGLWMGGGTIPYGYRYDRNDGILHIIPEEAEKVKAVFQMFRDGYSCDRIQKILGMHSEKLVSNIIRRIAYVGKIQYKGKTYQGLHEPIIDEKLFYEVQEEIKKRSTNAYVSNKYMLTGLCYCGKCGIKMRMQKWGKYTKIVCYSQYKGKEHISKTVNPCDNKKVRADVVEKEVEDCFKRFIVNVEEKENESESTRKMIEKEISLSEAKLKRLYTLYASGNSGTDTLLDVIQAEEKTLKNLREELKAEDIREKAGRGEKIEKIKEMSNVWDTLTDSEKNKVLKECVEKVVITGDDIDIHFSIY

SEQ ID NO: 8748 - protein, 451 aa, Unknown
  Description of Unknown: Integrase B8749 sequence
  PTHR30461:SF3,SM00857,G3DSA:1.10.10.2600,IPR036162,PF13408, IPR025827,PS51737,G3DSA:3.40.50.1390,IPR006119,IPR038109, PF07508,IPR011109,SSF53041,PF00239,PTHR30461, PS51736,Coil,cd00338
MKKLNVGYMRVSTEAQTEKYGLDVQEDKINELAKKRGVKIARWYVDGGYSGSNIQRPNIQKLLEDAEAGEIQAVYIYKLDRMSRDVVDTLTLVSKLLPKYNVEVVSATEDLRNETPMDRVMLGVNAVMGQYEREVIYMRTRAGMVERVKRGLWMGGGTIPYGYRYDRNDGILHIIPEEAEKVKVIFQMFRDGYSCDRIQKILGMHSEKLVSNIIRRITYVGKIQYKGRVYQGLHEPIIDEKLFYEVQEEIKKRSTNAYVSNKHMLTGLCYCGKCGTKMRMQKWGKYTKIVCYSQYKEKEHISKTGTPCKNKKVRADVVEKEVEDCFKRFIVNVEEKENESESTRKMIEKEISLSEAKLKRLYTLYASGNSGTDTLIDVIQTEEKTLKNLQEELKAEDIREKAGRGEKIEKIKEMSNVWDTLTDSEKNKVLKECVEKVVITGDDIDIHFSIY

SEQ ID NO: 8749 - protein, 451 aa, Unknown
  Description of Unknown: Integrase B8750 sequence
  PTHR30461:SF3,SM00857,G3DSA:1.10.10.2600,IPR036162,PF13408, IPR025827,G3DSA:3.40.50.1390,PS51737,IPR006119,IPR038109, PF07508,SSF53041,IPR011109,PTHR30461,Coil, PS51736,cd00338,PF00239
MKKLNVGYMRVSTEAQTEKYGLDVQEDKIKELAKKRGVKIARWYVDGGYSGSNIQRPNIQKLLEDAEAGEIQAVYIYKLDRMSRDVVDTLTLVSKLLPKYNVEVVSATEDLRNETPMDRVMLGVNAVMGQYEREVIYMRTRAGMVERVKRGLWLGGGTIPYGYRYDRNDGILHIIPEEAEKVKAIFQMFRDGYSCDRIQKILGMHSEKLVSNIIRRITYVGKIQYKGRVYQGLHEPIIDEKLFYEVQEEIKKRSTNAYVSNKYMLTGLCYCGKCGTKMRMQKWGKYTKIVCYSQYKGKEHISKTGNPCKNKKVWADVVEKEVEDCFKRFIVNVEEKENESESTRKMIEKEISLSEAKLKRLYTLYASGNSGTDTLLDVIQAEEKTLKNLREELKAEDIREKAGRGEKIEKIKEMSNVWDTLTDSEKNKVLKECVEKVVITEDDIDIHFSIY

SEQ ID NO: 8750 - protein, 451 aa, Unknown
  Description of Unknown: Integrase B8751 sequence
  PTHR30461:SF3,SM00857,G3DSA:1.10.10.2600,IPR036162,PF13408, PS51737,G3DSA:3.40.50.1390,IPR025827,IPR006119,IPR038109, PF07508,SSF53041,IPR011109,PF00239,PTHR30461, PS51736,Coil,cd00338
MKKLNVGYMRVSTEAQTEKYGLDVQEDKIKELAKKRGVKIARWYVDGGYSGSNIQRPNIQKLLEDAEAGEIQAVYIYKLDRMSRDVVDTLTLVSKLLPKYNVEVVSATEDLRNETPMDRVMLGVNAVMGQYEREVIYMRTRAGMVERVKRGLWMGGGTIPYGYRYDRNDGILHIIPEEAEKVKAIFQMFRDGYSCDRIQKILGMHSEKLVSNIIRRIAYVGKIQYKGKTYQGLHEPIIDEKLFYEVQEEIKKRSTNAYVSNKYMLTGLCYCGKCGTKMRMQKWGKYTKIVCYSQYKGKEHISKTGNPCKNKKVRADVVEKEVEDCFKRFIVNVEEKENESESTRKMIEKEISLSEAKLKRLYTLYASGNSGTDTLVDVIQAEEKTLKNLQEELKAEDIREKAGRGKKIEKIKEMSNVWDTLTDSEKNKVLKECVEKVVITGDDIDIHFSIY

SEQ ID NO: 8751 - protein, 451 aa, Unknown
  Description of Unknown: Integrase B8752 sequence
  PTHR30461:SF3,cd00338,SM00857,G3DSA:1.10.10.2600,IPR036162, PF13408,IPR025827,G3DSA:3.40.50.1390,PS51737,IPR006119, IPR038109,IPR011109,SSF53041,PTHR30461,PS51736, Coil,PF00239
MKQKARIYARVSRDEQVKYGYSIDAQLTALKEYCNQNKITVSGIYVDEGISAATTKKRKDYLRMMNNLEENDIILFTKLDRFSRNLLDANLAVLELEKKNVSIKAIHEDDIDTSTADGKFIFNLKLSLAEREREKTSERINDVFKYMAKNGQRISSKVPFGYKIENKLYVRDDKKADALLDAYHMVLLYRSVSYSNKLFNEKYPCYKMEYANFLNRLKNPINIGVHKYNDNFCKGVIPKELFDQVQEIINKNNIRSRKTKSIFLFSGLIRCGTCGRRIVGNKKTDHNSRKNPNWKDTTYYLYRCNHAYQNKVCSNRHIISESKIEKYLLENLNTLLSNYVIDIETKQREQKDHTKDIAKIKKQMMKLKDLYLDDLIQKDEYTNSYKELEIKLKEYSNIKQITVPNEIKQILNINIRDYYETLDRKQKQALWQSIIKEIIYNEDKSFVIYFI

SEQ ID NO: 8752 - protein, 451 aa, Unknown
  Description of Unknown: Integrase B8753 sequence
  SM00857,G3DSA:1.10.10.2600,IPR036162,PF13408,IPR025827, G3DSA:3.40.50.1390,PS51737,IPR006119,IPR038109,PF07508, SSF53041,IPR011109,PF00239,PTHR30461,PS51736, Coil,cd00338
MKKLNVGYMRVSTEAQTEKYGLDVQEDKIKELAKKRGVKIARWYVDGGYSGSNIQRPNIQKLLEDAEAGEIQAVYIYKLDRMSRDVVDTLTLVSKLLPKYNVEVVSATEDLRNETPMDRVMLGVNAVMGQYEREVIYMRTRAGMVERVKRGLWMGGGTIPYGYRYDRNDGILHIIPEEAEKVKAIFQMFRDGYSCDRIQRILGMHSEKLVSNIIRRIAYVGKIQYKGRVYQGLHEPIIDEKLFYEVQEEIKKRSTNAYVSNKHMLTGLCYCGKCGTKMRMQKWGKYTKIVCYSQYKEKEHISKTGNPCKNKKVRADVVEKEVEDCFKRFIVNVEEKENESESTRKMIEKEISLSEAKLKRLYTLYASGNSGTDTLFDVIQTEEKTLKNLQEELKAEDIREKAGRGEKIEKIKEMSNVWDTLTDSEKNKVLKECVEKVVITGDDIDIHFSIY

SEQ ID NO: 8753 - protein, 451 aa, Unknown
  Description of Unknown: Integrase B8754 sequence
  SM00857,G3DSA:1.10.10.2600,IPR036162,PF13408,PS51737, G3DSA:3.40.50.1390,IPR025827,IPR006119,IPR038109,PF07508, IPR011109,SSF53041,PF00239,PTHR30461,PS51736, Coil,cd00338
MKKLNVGYMRVSTEAQTEKYGLDVQEDKIKELAKKRGVKIARWYVDGGYSGSNIQRPNIQKLLEDAEAGEIQAVYIYKLDRMSRDVVDTLTLVSKLLPKYNVEVVSATEDLRNETPMDRVMLGVNAVMGQYEREVIYMRTRAGMVERVKRGLWMGGGTIPYGYRYDRNDGILHIIPEEAEKVKAIFQMFRDGYSCDRIQRILGMHSEKLVSNIIRRIAYVGKIQYKGRVYQGLHEPIIDEKLFCEVQEEIKKRSTNAYVSNKYMLTGLCYCGKCGTKMRMQKWGKYTKIVCYSQYKEKEHISKTVNPCDNKKVRADVVEKEVEDCFKRFIVNVEEKENESESTRKMIEKEISLSEAKLKRLYTLYASGNSGTDTLLDVIQAEEKTLKNLREELKAEDIREKAGQQEKIEKIKEMSNVWDTLTDSEKNKVLKECVEKVVITGDDIDIHFNIY

SEQ ID NO: 8754 - protein, 451 aa, Unknown
  Description of Unknown: Integrase B8755 sequence
  PTHR30461:SF3,SM00857,G3DSA:1.10.10.2600,IPR036162,PF13408, IPR025827,G3DSA:3.40.50.1390,PS51737,IPR006119,IPR038109, PF07508,SSF53041,IPR011109,PF00239,PTHR30461, PS51736,Coil,cd00338
MKKINVGYMRVSTEAQTEKYGLDVQEDKIKELAKKRGVKIARWYVDGGYSGSNIQRPNIQKLLEDAEAGEIQAVYIYKLDRMSRDVVDTLTLVSKLLPKYNVEVVSATEDLRNETPMDRVMLGVNAVMGQYEREVIYMRTRAGMVERVKRGLWMGGGTIPYGYRYDRNDGILHIIPEEAEKVKAIFQMFRDGYSCDRIQKILGMHSEKLVSNIIRRIAYVGKIQYKGKTYQGLHEPIIDEKLFYEVQEEIKKRSTNAYVSNKYMLTGLCYCGKCGTKMRMQKWGKYTKIVCYSQYKGKEHISKTGNPCKNKKVRADVVEKEVEDCFKRFIVNVEEKENESESTRKMIEKEISLSEAKLKRLYTLYASGNSGTDTLVDVIQAEEKTLKNLQEELKAEDIREKAGRGKKIEKIKEMSNVWDTLTDSEKNKVLKECVEKVVITGDDIDIHFSIY

SEQ ID NO: 8755 - protein, 451 aa, Unknown
  Description of Unknown: Integrase B8756 sequence
  PTHR30461:SF3,SM00857,G3DSA:1.10.10.2600,IPR036162,PF13408, PS51737,IPR025827,G3DSA:3.40.50.1390,IPR006119,IPR038109, PF07508,SSF53041,IPR011109,PF00239,PTHR30461, PS51736,Coil,cd00338
MKKINVGYMRVSTEAQTEKYGLDVQEDKIKELAKKRGVKIARWYVDGGYSGSNIQRPNIQKLLEDAEAGEIQAVYIYKLDRMSRDVVDTLTLVSKLLPKYNVEVVSATEDLRNETPMDRVMLGVNAVMGQYEREVIYMRTRAGMVERVKRGLWMGGGTIPYGYRYDRNDGILHIIPEEAEKVKAVFQMFRDGYSCDRIQKILGMHSEKLVSNIIRRIAYVGKIQYKGRVYQGLHEPIIDEKLFYEVQEEIKKRSTNAYVSNKYMLTGLCYCGKCGTKMRMQKWGKYTKIVCYSQYKGKEHISKTGNPCKNKKVRADAVEKEVEDCFKRFIVNVEEKENESESTRKMIEKEISLSEAKLKRLYTLYASGNSGTDTLLDVIQAEEKTLKNLREELKAEDIREKAGQQEKIEKIKEMSNVWDTLTDSEKNKVLKECVEKVVITGDDIDIHFSIY

SEQ ID NO: 8756 - protein, 451 aa, Unknown
  Description of Unknown: Integrase B8757 sequence
  PTHR30461:SF3,SM00857,G3DSA:1.10.10.2600,IPR036162,PF13408, PS51737,G3DSA:3.40.50.1390,IPR025827,IPR006119,IPR038109, PF07508,SSF53041,IPR011109,PTHR30461,Coil, PS51736,cd00338,PF00239
MKKLNVGYMRVSTEAQTEKYGLDVQEDKIKELAKKRGVKIARWYVDGGYSGSNIQRPNIQKLLEDAEAGEIQAVYVYKLDRMSRDVVDTLTLVSKLLPKYNVEVVSATEDLRNETPMDRVMLGVNAVMGQYEREVIYMRTRAGMVERVKRGLWMGGGTIPYGYRYDRNDGILHIIPEEAEKVKAVFQMFRDGYSCDRIQKILGMHSEKLVSNIIRRIAYVGKIQYKGRVYQGLHEPIIDEKLFYEVQEEIKKRSTNAYVSNKYMLTGLCYCGKCGTKMRMQKWGKYTKIVCYSQYKGKEHISKTGNPCKNKKVRADVVEKEVEDCFKRFIVNVEEKENESESTRKMIEKEISLSEAKLKRLYTLYASGNSGTDTLLDVIQAEEKTLKNLREELKAEDIREKAGRGEKIEKIKEMSNVWDTLTDSEKNKVLKECVEKVVITGDDIDIHFSIY

SEQ ID NO: 8757 - protein, 450 aa, Unknown
  Description of Unknown: Integrase B8758 sequence
  PTHR30461:SF3,SM00857,G3DSA:1.10.10.2600,IPR036162,PF13408, IPR025827,G3DSA:3.40.50.1390,PS51737,IPR006119,IPR038109, PF07508,IPR011109,SSF53041,PTHR30461,PS51736, cd00338,PF00239
MINCAIYPRKSKAVDNSDSMDVQIDMCRRYLDDKYGSGNYTATVYDGDYGITGHSTKKRKDFQRMMRDVSDRKIQLVVIQRYDRIARNTRDFCNLYHDMEINGCNLVSVSQQIDTTTPYGKNFMYMQASMAELEWALNSERRKDTIRYAASIGKSILPDHSTPFGYHNAVVNGVRRLVKEEQWEDAVVDLFEYYRKYRNYSATARYINQQYGTNFEIQAIKRIIRSPFYYGCYKDNDNFCEPYISKDDWQDLQQKRPVIRTAGNKKTEVLFSGMIRCPECNRLMRSCQKSHRSGNVYRYYHCEYHSARMCAFSRIKSENLIEEMLLNRVDTFLAERETAMSDQKSEKKHSTNNVSKYRAELDRLNTMFLKGRISEEYYDTEYLRLNDLIGQYEASSRSHDSVKHLREVFVSDWKEMYKDLDKLHRKFFWRDVIRQIIVDDNMIVIDVIFL

SEQ ID NO: 8758 - protein, 450 aa, Unknown
  Description of Unknown: Integrase B8759 sequence
  PTHR30461:SF3,SM00857,G3DSA:1.10.10.2600,IPR036162,PF13408, IPR025827,G3DSA:3.40.50.1390,PS51737,IPR006119,IPR038109, IPR011109,SSF53041,PTHR30461,PS51736,cd00338, PF00239
MIRCAIYDRVSTDLQVEKGLSLATQKDDLTQYAKDHGYVIVGYYEDEGITARKKMKNRKDLMRLLGDVKANKVDLILVTKLDRWFRNVKDYHNTQEILDAHHCNWKTIYEDYDSSTADGQLKINIMLAVAQNECDRTSERIKAVFRHKEAQGKVISGRMAPYGYKVVDGYVQKDESVSHIVVSAYERYFKTFSIRDVIRYLNMKYGENAPSDNVIDRLFKNEKYSGSFRGNPNWCEPYLTREQYEQIRTIGTTKQNTGQYEPYIFTSLIKCPICGNNFTGYRKKQNLKNGGQSIYIKYRCGNKFNRHGGASILEKTVENYLIENVLIFLQRDIEKLKSMAASEQESGNNAKVIHDEMGRLNLMYQKGRITDSYYESQYELLEKKLMELSTVCDIENTIEKRQNLVSFFQGDWINLYRSLDAENKKIFWKKYIKDIQVDPETRKLCGFHFY

SEQ ID NO: 8759 - protein, 450 aa, Unknown
  Description of Unknown: Integrase B8760 sequence
  cd00338,SM00857,G3DSA:1.10.10.2600,IPR036162,PF13408, IPR025827,G3DSA:3.40.50.1390,PS51737,IPR006119,IPR038109, PF07508,IPR011109,SSF53041,PTHR30461,PS51736, Coil,PF00239
MINCAIYPRKSKAVDNSDSMDVQIDMCRRYLDDKYGSGNYTATVYDGDYGITGHSTKKRKDFQRMMRDVSDRKIQLVVIQRYDRIARNTRDFCNLYHDMEINGCNLVSVSQQIDTTTPYGKNFMYMQASMAELEWALNSERRKDTIRYAASIGKSILPDHSTPFGYHNSVVNGVRRLVKEEQWEDAVADLFEYYRKYRNYSATARHINQQYGTRFEIQAIKRIIRSPFYYGCYKDNDNFCEPYISKEDWHDLQQKRPVIRTAGNKRTEVLFSGMIRCPECNRLMRSCQKSHRSGNVYRYYHCEYHSTKMCGFAKVKSENLIEEMLLNRVDTFLAEREADMSDQKSEKKHLTNNVSKYLAELDRLNTMFLKGRISEEYYDTEYLRLNDLIWQYEASRQSHDSVKHLQEVFVSDWKEIYKDLDKLHRKFFWRDVIRQIIVDDNMNVIDVIFL

SEQ ID NO: 8760 - protein, 450 aa, Unknown
  Description of Unknown: Integrase B8761 sequence
  PTHR30461:SF3,SM00857,G3DSA:1.10.10.2600,IPR036162,PF13408, IPR025827,G3DSA:3.40.50.1390,PS51737,IPR006119,IPR038109, PF07508,SSF53041,IPR011109,PTHR30461,PS51736, cd00338,PF00239
MINCAIYPRKSKAVDNSDSMDVQIDMCRRYLDDKYGSGNYTATVYDGDYGITGHSTKKRKDFQRMMRDVSDRKIQLVVIQRYDRIARNTRDFCNLYHDMEVNGCNLVSVSQQIDTTTPYGKNFMYMQASMAELEWALNSERRKDTIRYAASIGKSILPDHSTPFGYHNAVVNGVRRLVKEEQWEDAVADLFEYYRKYRNYSATARHINQQYGTRFEIQAIKRIIRSPFYYGCYKDNDNFCEPYISKEDWQDLQQKRPVIRTAGNKKTEVLFSGMIRCPECNRLMRSCQKSHRSGNVYRYYHCEYHSARMCAFARVKSENLIEEMLLNRVDTFLAEREAAMSDQKSEKKHSTNNVSKYRAELDRLNTMFLKGRISEEYYDTEYLRLNDLIGQYEASRQSHDSVKHLREVFVSDWKEMYKDLDKLHRKLFWRDVIRQIIVDDNMNVIDVIFL

SEQ ID NO: 8761 - protein, 450 aa, Unknown
  Description of Unknown: Integrase B8762 sequence
  PTHR30461:SF3,SM00857,G3DSA:1.10.10.2600,IPR036162,PF13408, PS51737,IPR025827,G3DSA:3.40.50.1390,IPR006119,IPR038109, PF07508,IPR011109,SSF53041,PTHR30461,PS51736, cd00338,PF00239
MINCAIYPRKSKAVDNSDSMDVQIDMCRRYLDDKYGSGNYTATVYDGDYGITGHSTKKRKDFQRMMRDVSDRKIQLVVIQRYDRIARNTRDFCNLYHDMEINGCNLVSVSQQIDTTTPYGKNFMYMQASMAELEWALNSERRKDTIRYAASIGKSILPDHSTPFGYHNAVVNGVRRLVKEEQWEDAVSDLFEYYRKYRNYSATARHINQQYGTNFEIQAIKRIIRSPFYYGCYKDNDNFCEPYISKEEWQDLQQKRPVIRTAGNKRTEVLFSGMIRCPECNRLMRSCQKSHRSGNVYRYYHCEYHSARMCGFVKVKSENLIEEMLLNRVDTFLAEREAAMSDQKSEKKHSTNNATKYREELDRLNTMFLKGRISEEYYDTEYLRLNDLIWQYEASRQSHDSVKHLQEVFVSDWKEIYKDLDKLHRKFFWRDVIRQIIVDDNMNVIDVIFL

SEQ ID NO: 8762 - protein, 450 aa, Unknown
  Description of Unknown: Integrase B8763 sequence
  PTHR30461:SF3,SM00857,G3DSA:1.10.10.2600,IPR036162,PF13408, IPR025827,PS51737,G3DSA:3.40.50.1390,IPR006119,IPR038109, PF07508,IPR011109,SSF53041,PTHR30461,PS51736, cd00338,PF00239
MINCAIYPRKSKAVDNSDSMDVQIDMCRRYLDDKYGSGNYTATVYDGDYGITGHSTKKRKDFQRMMRDVSDRKIQLVVIQRYDRIARNTRDFCNLYHDMEINGCNLVSVSQQIDTTTPYGKNFMYMQASMAELEWALNSERRKDTIRYAASIGKSILPDHSTPFGYHNAVVNGVRRLVKEEQWEDAVADLFEYYRKFRNYSATARHINQQYGTKFEIQAIKRIIRSPFYYGSYKDNDNFCEPYISKEDWQDLQQKRPVIRTAGNKRTEVLFSGMIRCPECNRLMRSCQKSHRSGNVYRYYHCEYHSTKMCGFAKVKSENLIEEMLLNRVDTFLAEREAAMSDQKSEKKHSTNNVSKYRAELDRLNTMFLKGRISEEYYDTEYLRLNDLIGQYEASRQSHDSVKHLQEVFVSDWKEMYKDLDKLHQKFFWRDVIRQIIVDDNMNVIDVIFL

SEQ ID NO: 8763 - protein, 450 aa, Unknown
  Description of Unknown: Integrase B8764 sequence
  PTHR30461:SF3,SM00857,G3DSA:1.10.10.2600,IPR036162,PF13408, PS51737,IPR025827,G3DSA:3.40.50.1390,IPR006119,IPR038109, SSF53041,IPR011109,PTHR30461,PS51736,cd00338, PF00239
MINCAIYPRKSKAVDNSDSMDVQIDMCRRYLDNKYGSGNYTATVYDGDYGITGHSTKKRKDFQRMMRDVSNRKIQLVVIQRYDRIARNTRDFCNLYHDMEINGCNLVSVSQQIDTTTPYGKNFMYMQASMAELEWALNSERRKDTIRYAASIGKCILPDHSTPFGYHNAVVNGVRKLVKEEQWEDAVADLFEYYRKYRNYSATARHINQQYGTKFEIQAIKRIIRSSFYYGCYKDNDNFCEPYISKNEWQDLQQKKPVIRTAGNKRTEVLFSGMIRCPECNRLMRSCQKSHRSGNVYRYYHCEYHSTKMCGFAKVKSENLIEEMLLNRVDIFLAEREAAMSDQKSEKKHSTNNVSKYRAELDRLNTMFLKGRISEEYYDTEYLRLNDLIGQYEASRQSHDSVKHLQEVFVSDWKEMYKDLDKLHQKFFWRDVIRQIIVDDNMNVIDVIFL

SEQ ID NO: 8764 - protein, 450 aa, Unknown
  Description of Unknown: Integrase B8765 sequence
  PTHR30461:SF3,SM00857,G3DSA:1.10.10.2600,IPR036162,PF13408, PS51737,G3DSA:3.40.50.1390,IPR025827,IPR006119,IPR038109, SSF53041,IPR011109,PTHR30461,Coil,PS51736, cd00338,PF00239
MINCAIYPRKSKAVDNSDSMDVQIDMCRRYLDDKYGSGNYTAKVYDGDYGITGHSTKKRKDFQRMMRDVSDRKIQLVVIQRYDRIARNTRDFCNLYHDMEINGCNLVSVSQQIDTTTPYGKNFMYMQASMAELEWALNSERRKDTIRYAASIGKSILPDHSTPFGYHNAVVNGVRRLVKEEQWEDAVADLFAYYRKYRNYSATARHINQQYGTRFEIQAIKRIIRSPFYYGCYKDNDNFCEPYISKDDWQDLQQKRPVIRTAGNKRTEVLFSGMIRCPECNRLMRSCQKSHRSGNVYRYYHCEYHSTKMCGFSKVKSENLIEEMLLNRIDTFLAEREAAMSDQKPEKKHSNNNVSKYREELDRLNTMFLKGRISEEYYDTEYLRLNDLIGQYGDSMRSHDSIKHLREVFVSDWKEMYKDLDKLHRKFFWRDVIRQIVVDDNMNVIDVIFL

SEQ ID NO: 8765 - protein, 450 aa, Unknown
  Description of Unknown: Integrase B8766 sequence
  PTHR30461:SF3,SM00857,G3DSA:1.10.10.2600,IPR036162,PF13408, PS51737,G3DSA:3.40.50.1390,IPR025827,IPR006119,IPR038109, PF07508,IPR011109,SSF53041,PTHR30461,PS51736, cd00338,PF00239
MINCAIYPRKSKAVDNSDSMDVQIDMCRRYLDDKYGSGNYTATVYDGDYGITGHSTKKRKDFQRMMRDVSDRKIQLVVIQRYDRIARNTRDFCNLYHDMEINGCNLVSVSQQIDTTTPYGKNFMYMQASMAELEWALNSERRKDTIRYAASIGKSILPDHSTPFGYHNSVVNGVRRLVKEEQWEDAVADLFEYYRKYRNYSATARHINQQYGTRFEIQAIKRIIRSPFYYGCYKDNDNFCEPYISKEDWQDLQQKKPVIRTAGNKRTEVLFSGMIRCPECNRLMRSCQKSHRSGNVYRYYHCEYHSTKMCGFSKVKSENLIEEMLLNRIDTFLAEREAAMSDQKSEKKHSTNNATKYREELDRLNTMFLKGRISEEYYDTEYLRLNDLIGQYEASRRSHDSIEHLREVFVSDWKEMYKDLDKLHRKFFWRDVIRQIIVDDNMNVIDVIFL

SEQ ID NO: 8766 - protein, 450 aa, Unknown
  Description of Unknown: Integrase B8767 sequence
  PTHR30461:SF3,SM00857,G3DSA:1.10.10.2600,IPR036162,PF13408, IPR025827,PS51737,G3DSA:3.40.50.1390,IPR006119,IPR038109, PF07508,SSF53041,IPR011109,PTHR30461,PS51736, cd00338,PF00239
MINCAIYPRKSKAVDNSDSMDVQIDMCRRYLDDKYGSGNYNATVYDGDYGITGHSTKKRKDFQRMMRDVSDRKIQLVVIQRYDRIARNTRDFCNLYHDMEINGCNLVSVSQQIDTTTPYGKNFMYMQASMAELEWALNSERRKDTIRYAASIGKSILPDHSTPFGYHNAVVNGVRRLVKEEQWEDAVADLFEYYRKYRNYSATARHINQQYGTRFEIQAIKRIIRSPFYYGCYKDNDNFCEPYISKEEWQDLQQKRPVIRTAGNKRTEVLFSGMIRCPECNRLMRSCQKSHRSGNVYRYYHCEYHSTKMCGFAKVKSENLIEEMLLNRVDTFLAEREAAMSDQKSEKKHSTNNASKYRAELDRLNTMFLKGRISEEYYDTEYLRLNDLIGQYEASRKSNDSVKHLREVFVSDWKEMYKDLDKLHRKFFWRDVIRQIIVDNNMNVIDVIFL

SEQ ID NO: 8767 - protein, 450 aa, Unknown
  Description of Unknown: Integrase B8768 sequence
  PTHR30461:SF3,IPR036162,PS51737,IPR011109,PTHR30461, PS00397,PF00239,G3DSA:1.10.10.2600,IPR006119,SSF53041, cd00338,SM00857,IPR025827,IPR038109,PS51736, IPR006118,PF13408,G3DSA:3.40.50.1390,Coil
MDIIRAALYIRVSTEEQVREGYSVEAQRDNLKRYAKNKGYSVVGVYADEGITARKKYTNRKEFMRLLDDVEAGKIDVILFIKLDRWFRNVGDYYKIQEILERNNVGWTATTENYDTTTANGRLYVNIRLAVAQDESDRTSERIKFVFEKKVADGEAIWGLAPFGYKVENKKVVIDEDLYPIVVDTFEAFIKLRSVNSVCVYINEKYGTHYSYNIFKRILRDNTAFYYGTYRNNTSYCPPYLSKAQYEIIKEISDSTTTIRSSGKKYDYIFSGMLECGYCGKRLVGGGSTRRDNGKAYYGYRCTGYRGGTCSNKISELKIESLLFAALEDEVKKYKVDYEIKQKKKKPAYINKSSIEKKIARLRNLYLNEVIEIDDYTVEYRKLQDKLKEYEESINKVEDNKDFTALDNLLKSDFKKIYNELSNIDKRTLWHSVIKRIIIKDKQIQEIIFK

SEQ ID NO: 8768 - protein, 450 aa, Unknown
  Description of Unknown: Integrase B8769 sequence
  PTHR30461:SF3,SM00857,G3DSA:1.10.10.2600,IPR036162,PF13408, IPR025827,G3DSA:3.40.50.1390,PS51737,IPR006119,IPR038109, SSF53041,IPR011109,PTHR30461,PS51736,cd00338, PF00239
MIRCAIYDRVSTDLQVEKGLSLATQKDDLTQYAKDHGYVIVGYYEDEGITARKKMKNRRDLMRLLDDVKANKVDLILVTKLDRWFRNVKDYHNTQEILDAHHCNWKTIYEDYDSSTADGQLKINIMLAVAQNECDRTSERIKAVFRHKEAQGKVISGRMAPYGYKVVDGYVQKDESVSHIVVSAYERYFKTFSIRDVIRYLNMKYGENAPSDNVIDRLFKNEKYSGSFRGNPNWCEPYLTREQYEQIHTIGTTKQNTGQYEPYIFTSLIKCPICGNNFTGYRKKQNLKNGGQSIYIKYRCGNKFNRHGGASILEKTVENYLIENVLIFLQRDIEKLKSMAASEQESGNNAKVIHDEMGRLNLMYQKGRITDSYYESQYELLEKKLMELSTVCDIENTIEKRENLVSFFQGDWINLYRSLDAENKKIFWKKYIKDIQVDPETRKLCGFHFY

SEQ ID NO: 8769 - protein, 450 aa, Unknown
  Description of Unknown: Integrase B8770 sequence
  PTHR30461:SF3,SM00857,G3DSA:1.10.10.2600,IPR036162,PF13408, IPR025827,PS51737,G3DSA:3.40.50.1390,IPR006119,IPR038109, PF07508,IPR011109,SSF53041,PTHR30461,PS51736, cd00338,PF00239
MINCAIYPRKSKAVDNSDSMDVQIDMCRRYLDDKYGSGNYTATVYDGDYGITGHSTKKRKDFQRMMRDVSDRKIQLVVIQRYDRIARNTRDFCNLYHDMEINGCNLVSVSQQIDTTTPYGKNFMYMQASMAELEWALNSERRKDTIRYAASIGKSILPDHSTPFGYHNAVVNGVRRLVKEEQWEDAVADLFEYYRKYRNYSATARYINQQYGTNFEIQAIKRIIRSPFYYGCYKDNDNFCEPYISKEEWQDLQQKRPVIRTAGNKRTEVLFSGMIRCPECNRLMRSCQKSHRSGNVYRYYHCEYHSTKMCGFARVKSENLIEEMLLNRVDTFLAEREAAMSDQKSEKKHSTNNVSKYRAELDRLNTMYLKGRISEEYYDTEYLRLNDLIWQYEASRQSHDSVKHLQEVFVSDWKEIYKDLDKLHRKFFWRDVIRQIIVDDNMNVIDVIFL

SEQ ID NO: 8770 - protein, 450 aa, Unknown
  Description of Unknown: Integrase B8771 sequence
  PTHR30461:SF3,SM00857,G3DSA:1.10.10.2600,IPR036162,PF13408, IPR025827,G3DSA:3.40.50.1390,PS51737,IPR006119,IPR038109, PF07508,IPR011109,SSF53041,PTHR30461,PS51736, cd00338,PF00239
MINCAIYPRKSKAVDNSDSMDVQIDMCRRYLDDKYGSGNYTATVYDGDYGITGHSTKKRKDFQRMMRDVSDRKIQLVVIQRYDRIARNTRDFCNLYHDMEINGCNLVSVSQQIDTTTPYGKNFMYMQASMAELEWALNSERRKDTIRYAASIGKSILPDHSTPFGYHNAVVNGVRRLVKEEQWKDAVADLFEYYRKYRNYSATARHINQQYGTRFEIQAIKRIIRSPFYYGCYKDNDNFCEPYISKEDWQDLQQKRPVIRTAGNKRTEVLFSGMIRCPECNRLMRSCQKSHRSGNVYRYYHCEYHSARMCGFVKVKSENLIEEMLLNRVDTFLAEREAAMSDQKSEKKHSTNNASKYRAELDRLNTMFLKGRISEEYYDTEYLRLNDLIGQYEASRQSHDSVKHLQEVFVSDWKEMYKDLDKLHRKFFWRDVIRQIIVDDNMNVIDVIFL

SEQ ID NO: 8771 - protein, 450 aa, Unknown
  Description of Unknown: Integrase B8772 sequence
  PTHR30461:SF3,SM00857,G3DSA:1.10.10.2600,IPR036162,PF13408, IPR025827,G3DSA:3.40.50.1390,PS51737,IPR006119,IPR038109, IPR011109,SSF53041,PTHR30461,PS51736,cd00338, PF00239
MIRCAIYDRVSTDLQVEKGLSLATQKDDLTQYAKDHGYVIVGYYEDEGITARKKMKNRKDLMRLLDDVKANKVDLILVTKLDRWFRNVKDYHNTQEILDAHHCNWKTIYEDYDSSTADGQLKINIMLAVAQNECDRTSERIKAVFRHKEAQGKVISGRMAPYGYKVVDGYVQKDESVSHIVVSAYERYFKTFSIRDVIRYLNMKYGENAPSDNVIDRLFKNEKYSGSFRGNPNWCEPYLTREQYEQIRTIGTTKQNTGQYEPYIFTSLIKCPICGNNFTGYRKKQNLKNGGQSIYIKYRCGNKFNRHGGASILEKTVENYLIENVLIFLQRDIEKLKSMAASEQESGNNAKVIHDEMGRLNLMYQKGRITDSYYESQYELLEKKLMELSTVCDIENTIEKRENLVSFFQGDWINLYRSLDAENKKIFWKKYIKDIQVDPETRKLCGFHFY

SEQ ID NO: 8772 - protein, 450 aa, Unknown
  Description of Unknown: Integrase B8773 sequence
  PTHR30461:SF3,SM00857,G3DSA:1.10.10.2600,IPR036162,PF13408, IPR025827,PS51737,G3DSA:3.40.50.1390,IPR006119,IPR038109, IPR011109,SSF53041,PTHR30461,PS51736,cd00338, PF00239
MIRCAIYDRVSTDLQVEKGLSLATQKDDLTQYAKDHGYVIVGYYEDEGITARKKMKNRKDLMRLLDDVKANKVDLILVTKLDRWFRNVKDYHNTQEILDAHHCNWKTIYEDYDSSTADGQLKINIMLAVAQNECDRTSERIKAVFRHKEAQGKVISGRMAPYGYKVVEGYVQKDESVSHIVVSAYERYFKTFSIRDVIRYLNMKYGENAPSDNVIDRLFKNEKYSGSFRGNPNWCEPYLTREQYEQIRTIGTTKQNTGQYEPYIFTSLIKCPICGNNFTGYRKKQNLKNGGQSIYIKYRCGNKFNRHGGASILEKTVENYLIENVLIFLQRDIEKLKSMAASEQESGNNAKVIHDEMGRLNLMYQKGRITDSYYESQYELLEKKLMELSTVCDIENTIEKRQNLVSFFQGDWINLYRSLDAENKKIFWKKYIKDIQVDPETRKLCGFHFY

SEQ ID NO: 8773 - protein, 450 aa, Unknown
  Description of Unknown: Integrase B8774 sequence
  PTHR30461:SF3,SM00857,G3DSA:1.10.10.2600,IPR036162,PF13408, PS51737,G3DSA:3.40.50.1390,IPR025827,IPR006119,IPR038109, PF07508,IPR011109,SSF53041,PTHR30461,PS51736, cd00338,PF00239
MINCAIYPRKSKAVDNSDSMDVQIDMCRRYLDDKYGSENYTATVYDGDYGITGHSTKKRKDFQRMMRDVSDRKIQLVVIQRYDRIARNTRDFCNLYHDMEVNGCNLVSVSQQIDTTTPYGKNFMYMQASMAELEWALNSERRKDTIRYAASIGKSILPDHSTPFGYHNAVVNGVRRLVKEEQWEDAVADLFEYYRKFRNYSATARHINQQYGTKFEIQAIKRIIRSPFYYGSYKDNDNFCEPYISKEDWQDLQQKRPVIRTAGNKRTEVLFSGMIRCPECNRLMRSCQKSHRSGNVYRYYHCEYHSTKMCGFAKVKSENLIEEMLLNRVDTFLAEREAAMSDQKSEKKHSTNNVSKYRAELDRLNTMFLKGRISEEYYDTEYLRLNDLIGQYEASRQSHDSVKHLQEVFVSDWKEMYKDLDKLHQKFFWRDVIRQIIVDDNMNVIDVIFL

SEQ ID NO: 8774 - protein, 450 aa, Unknown
  Description of Unknown: Integrase B8775 sequence
  PTHR30461:SF3,SM00857,G3DSA:1.10.10.2600,IPR036162,PF13408, IPR025827,G3DSA:3.40.50.1390,PS51737,IPR006119,IPR038109, PF07508,IPR011109,SSF53041,PTHR30461,PS51736, cd00338,PF00239
MINCAIYPRKSKAVDNSDSMDVQIDMCRRYLDDKYGSGNYTATVYDGDYGITGHSTKKRKDFQRMMRDVSDRKIQLVVIQRYDRIARNTRDFCNLYHDMEINGCNLVSVSQQIDTTTPYGKNFMYMQASMAELEWALNSERRKDTIRYAASIGKSILPDHSTPFGYHNAVVNGVRRLVKEEQWEDAVADLFEYYRKYRNYSATARYINQQYGTNFEIQAIKRIIRSHFYYGCYKDNDNFCEPYISKEDWQDLQQKRPVIRTEGNKRTEVLFSGMIRCPECNRLMRSCQKSHRSGNVYRYYHCEYHSTKMCGFAKVKSENLIEEMLLNRVDTFLAEREAAMSDQKSEKKHSTNNVSKYRAELDRLNTMFLKGRISEEYYDTEYLRLNDLIGQYEASRQSHDSVKHLQEVFVSDWKEMYKDLDKLHRKFFWRDVIRQIVVDDNMNVIDVIFL

SEQ ID NO: 8775 - protein, 450 aa, Unknown
  Description of Unknown: Integrase B8776 sequence
  SM00857,G3DSA:1.10.10.2600,IPR036162,PF13408,PS51737, G3DSA:3.40.50.1390,IPR025827,IPR006119,IPR038109,PF07508, IPR011109,SSF53041,PF00239,PTHR30461,PS51736, Coil,cd00338
MINCAIYPRKSKAVDNSDSMDVQIDMCRRYLDDKYGSGNYTATVYDGDYGITGHSTKKRKDFQRMMRDVSDRKIQLVVIQRYDRIARNTRDFCNLYHDMEINGCNLVSVSQQIDTTTPYGKNFMYMQASMAELEWALNSERRKDTIRYAASIGKSILPDHSTPFGYHNAVVNGVRRLVKEEQWEDAVADLFEYYRKYRNYSATARHINQQYGTRFEIQAIKRIIRSPFYYGCYKDNDNFCEPYISKDDWQDLQQKRPVIRTAGNKRTEVLFSGMIRCPECNRLMRSCQKSHRSGNVYRYYHCEYHSARMCSFARVKSENLIEEMLLNRVDTFLAEREAAMSDQKSEKKHLTNNATKYREELDRLNTMFLKGRISEEYYDTEYLRINDLIGQYGDSRRSHDSIKHLRDVFVSDWKEMYKDLDKLHRKFFWRDVIRQIIVDDNMNVIDVIFL

SEQ ID NO: 8776 - protein, 450 aa, Unknown
  Description of Unknown: Integrase B8777 sequence
  PTHR30461:SF3,SM00857,G3DSA:1.10.10.2600,IPR036162,PF13408, IPR025827,G3DSA:3.40.50.1390,PS51737,IPR006119,IPR038109, SSF53041,IPR011109,PTHR30461,PS51736,cd00338, PF00239
MIRCAIYDRVSTDLQVEKGLSLATQKDDLTQYAKDHGYVIVGYYEDEGITARKKMKNRKDLMRLLDDVKANKVDLILVTKLDRWFRNVKDYHNTQEILDAHHCNWKTIYEDYDSSTADGQLKINIMLAVAQNECDRTSERIKAVFRHKESQGKVISGRMAPYGYKVVDGYVQKDESVSHIVVSAYERYFKTFSIRDVIRYLNMKYGENAPSDNVIDRLFKNEKYSGSFRGNPNWCEPYLTREQYEQIRTIGTTKQNTGQYEPYIFTSLIKCPICGNNFTGYRKKQNLKNGGQSIYIKYRCGNKFNRHGGASILEKTVENYLIENVLIFLQLDIQKLKSMAASEQESGNNAKVIHDEMGRLNLMYQKGRITDSYYESQYELLEKKLMELSTVCDIENTIEKRQNLVSFFQGDWINLYRSLDAENKKIFWKKYIKDIQVDPETRKLCGFHFY

SEQ ID NO: 8777 - protein, 450 aa, Unknown
  Description of Unknown: Integrase B8778 sequence
  PTHR30461:SF3,SM00857,G3DSA:1.10.10.2600,IPR036162,PF13408, PS51737,G3DSA:3.40.50.1390,IPR025827,IPR006119,IPR038109, PF07508,IPR011109,SSF53041,PTHR30461,Coil, PS51736,cd00338,PF00239
MINCAIYPRKSKAVDNSDSMDVQIDMCRRYLDDKYGSGNYTATVYDGDYGITGHSTKKRKDFQRMMRDVSDRKIQLVVIQRYDRIARNTRDFCNLYHDMEINGCNLVSVSQQIDTTTPYGKNFMYMQASMAELEWALNSERRKDTIRYAASIGKSILPNHSTPFGYHNAVVNGVRRLVKEEQWEDAVADLFEYYRKYRNYSATARHINQQYGTNFEIQAIKRIIRSPFYYGCYKDNDNFCEPYISKEEWKNLQQKKPVIRTAGNKRTEVLFSGMIRCPECNRLMRSCQKSHRSGNVYRYYHCEYHSTKMCGFSKVKSENLIEEMLLNRIDTFLAEREAAMSDQKPEKKHSNNNVSKYREELDRLNTMFLKGRISEEYYDTEYLRLNDLIGQYEASRRSHDSIEHLQEVFVSDWKEMYKDLDKLHRKFFWRDVIRQIIVDDNMNVIDVIFL

SEQ ID NO: 8778 - protein, 450 aa, Unknown
  Description of Unknown: Integrase B8779 sequence
  PTHR30461:SF3,SM00857,G3DSA:1.10.10.2600,IPR036162,PF13408, IPR025827,PS51737,G3DSA:3.40.50.1390,IPR006119,IPR038109, PF07508,IPR011109,SSF53041,PTHR30461,PS51736, cd00338,PF00239
MINCAIYPRKSKAVDNSDSMDVQIDMCRRYLDDKYGSGNYTATVYDGDYGITGHSTKKRKDFQRMMRDVSDRKIQLVVIQRYDRIARNTRDFCNLYHDMEINGCNLVSVSQQIDTTTPYGKNFMYMQASMAELEWALNSERRKDTIRYAASIGKSILPDHSTPFGYHNAVVNGVRRLVKEEQWKDAVADLFEYYRKYRNYSATARHINQQYGTRFEIQAIKRIIRSPFYYGCYKDNDNFCEPYISKEDWQDLQQKRPVIRTAGNKKTEVLFSGMIRCPECNRLMRSCQKSHRSGNVYRYYHCEYHSARMCAFARVKSENLIEEMLLNRVDTFLAEREAAMSDQKSEKKHSTNNVSKYRAELDRLNTMFLKGRISEEYYDTEYLRLNDLIGQYEASRQSHDSVKHLREVFVSDWKEMYKDLDKLHRKLFWRDVIRQIIVDDNMNVIDVIFL

SEQ ID NO: 8779 - protein, 450 aa, Unknown
  Description of Unknown: Integrase B8780 sequence
  PTHR30461:SF3,SM00857,G3DSA:1.10.10.2600,IPR036162,PF13408, IPR025827,G3DSA:3.40.50.1390,PS51737,IPR006119,IPR038109, IPR011109,SSF53041,PTHR30461,PS51736,cd00338, PF00239
MIRCAIYDRVSTDLQVEKGLSLATQKDDLTQYAKDHGYVIVGYYEDEGITARKKMKNRKDLMRLLDDVKANKVDLILVTKLDRWFRNVKDYHNTQEILDAHHCNWKTIYEDYDSSTADGQLKINIMLAVAQNECDRTSERIKAVFRHKEAQGKVISGRMAPYGYKVVDGYVQKDESVSHIVVSAYERYFKTFSIRDVIRYLNMKYGENAPSDNVIDRLFKNEKYSGSFRGNPNWCEPYLTREQYEQIRTIGTTKQNTGQYEPYIFTSLIKCPICGNNFTGYRKKQNLKNGGQSIYIKYRCGNKFNRHGGASILEKTVENYLIENVLIFLQRDIEKLKSMAASEQESGNNAKVIHDEMGRLNLMYQKGRITDSYYESQYELLEKKLMELSTVCDIENTIEKRENLVSFFQGDWINLYRSLDAENKKIFWKKYIKAIQVDPETRKLCGFHFY

SEQ ID NO: 8780 - protein, 449 aa, Unknown
  Description of Unknown: Integrase B8781 sequence
  PTHR30461:SF3,IPR036162,PS51737,IPR011109,PTHR30461, PS00397,PF00239,G3DSA:1.10.10.2600,IPR006119,SSF53041, cd00338,SM00857,IPR025827,IPR038109,PS51736, IPR006118,PF13408,G3DSA:3.40.50.1390,PF07508
MLKRAALYIRVSTDQQAKHGDSLDAQIATLKDYVSTQDNLTIIDTYIDDGISGQKLYRDEFQRLLEDIKKNRIDIILFTKLDRWFRNLRHYLNIQEILDNSGVTWLAVSQPFFNTDTAYGRSFVNQSMSFAELEAQMASERIKAVFENKIRKGEVVTGSVPFGYKICDKKLIPNENAPIAKDIFKHYSIHNSIRLTVEYLFNEYDITRSSRTIKHMLRNRKYIGEVSGNKNYCPPIVDKETFEKVQNLLDKNISSIAKRTYIFSGLVVCSCCGKKMTGRYRKRKYIKKDGTVMYYTKKVYRCNGNTYKRNKCPNKINIPEEILEEYLLNNIKADAENFEAKQKKIAVSAPEKNNNSKVLKKIERLKKAYLNEVISLDEYKKDRKELEQMIVQVKPKETIVFKSNWFKKNIESTYRDFDEEEKRFVWRSVLKNLIVDPHGKITINFLTKN

SEQ ID NO: 8781 - protein, 449 aa, Unknown
  Description of Unknown: Integrase B8782 sequence
  IPR036162,PS51737,IPR011109,PTHR30461,PS00397, PF00239,G3DSA:1.10.10.2600,IPR006119,SSF53041,cd00338, SM00857,IPR025827,IPR038109,PS51736,IPR006118, PF13408,G3DSA:3.40.50.1390,PF07508,Coil
MSKLQVAYLRVSTETQTEKYGLDMQKQKIMDYCEKHGITIDKWYIDGGYSGSKLDRPEIQELLNHAKSGIIDTVYIYKLDRMSRDVIDTLNLFYKILPGYGVKVISMTEELRTENPMDRMMLTMNAAMNQYEREVIRMRMSAGMLERVKKGYWMGGGRTPWGYYYDRNDGILHINEQQASVVRKVYDLYLNGFSCENISKILGFKGEPIVKGILKRKSNIGLIEYKGKVYKGRHEPIIDEKVFWKVQDEMKKRHTNAYLSSGHLLTGLCHCGYCGARMRYQKWTAKTMKLVCYSHYQSSKAYMRKSDCCKNHPVDAYKIEAEVEECFKNFAININEYTESHQDSTEILVESLKKSDTKVRRLYGLYADNPSENLLDVIKTEEENIKKLKKKLDDAKTEKRCDPTKISEIRHMSDIWDSLTLKEKNKILKQCVEDIVVDKDEITIRFVTL

SEQ ID NO: 8782 - protein, 449 aa, Unknown
  Description of Unknown: Integrase B8783 sequence
  IPR036162,PS51737,IPR011109,PTHR30461,PS00397, PF00239,G3DSA:1.10.10.2600,IPR006119,SSF53041,cd00338, SM00857,IPR025827,IPR038109,PS51736,IPR006118, PF13408,G3DSA:3.40.50.1390,PF07508,Coil
MRKLNVAYLRVSTEAQTEKYGLDVQKQKILDHCEKKGVVIDKWYIDGGYSGSKLDRPKIQELLDDAEKGLIGTVFIYKLDRMSRDVIDTLNLFYKVLPKYGVKVVSMTEDLRTEKPMDRVMLTMNAAMNQYEREVIRMRMSAGMLERVKNGLWMGGGRIPWGYYYDRNDGILHVDEEQAKMVRNAYKLYLEGYSCDKIATMLGFRGERIVTQILKRKSNIGLIEYKGNVYQGNHEPIVDEKLFWDVQDAINKRKSNSHISNNHLLTGLCYCGYCGSKMRYQKWGRSGHRLVCYSHYKSGKPYMRKVDSCISKPERADFLENEIEDAFKKFAIHVDETENECLDQSIILERTIKSEHERLKKMYTLYISCMSDDLLELIKEKEESIKKLQKQLEENEREKGCDVEKIEEIKQMADVWDSLTVKEKNRILKECVEKIIIKGSDIEVSFVTF

SEQ ID NO: 8783 - protein, 449 aa, Unknown
  Description of Unknown: Integrase B8784 sequence
  PTHR30461:SF3,SM00857,IPR036162,PF13408,IPR025827, PS51737,G3DSA:3.40.50.1390,IPR006119,IPR011109,SSF53041, PTHR30461,PS51736,cd00338,PF00239
MGILRVGLYERVSTTEQSLNGYSIETQISNLEEYAKKNKMKIVDHYTDEGISGAKPPLKRPALKRLLEDVKAGKIDMILFTKLDRWFRSVKEYFKVQEILDKYKVQWKAIQEDYDTSTANGQMSITIFLAVAQNERDRTAERIKVVLEHKRKNKEACFGGNAIPLGYMKEPDEDGVMRLVKDPETQQAVQEFWDIMIESNNLNKAIRHMVNVYGINKDWKSWMRMTRSDFYCGIHRGVQDFCEPYVTPEDFLRLHEKRPQKATPTGRTYLLRGLIRCPECGNKLCGDADTRKSKVYKTYRCAYRARGCSNHGSYSELKLEKQLLTRLDEFLRDEIALAEIELSKPKPKPSVDVKALKEKQRRLTVAYMAGNKSDDEYLQEDRELKALIEKAEKTAPPEPRNIEPLKELLNSDFRSLYDSLIEEEKQLFWARLIQEIKLDGKTIKRVIFF

SEQ ID NO: 8784 - protein, 449 aa, Unknown
  Description of Unknown: Integrase B8785 sequence
  PTHR30461:SF3,IPR036162,PS51737,IPR011109, PTHR30461,PS00397,PF00239,G3DSA:1.10.10.2600, IPR006119,SSF53041,cd00338,SM00857,IPR025827,IPR038109 ,PS51736,IPR006118,PF13408,G3DSA:3.40.50.1390,PF07508
MLKRAALYIRVSTDQQAKHGDSLDAQIATLKDYVSTQDNLTIIDTYIDDGISGQKLYRDEFQRLLEDIKKNRIDIILFTKLDRWFRNLRHYLNIQEILDNSGVTWLAVSQPFFNTDTAYGRSFVNQSMSFAELEAQMASERIKAVFENKIRKGEVVTGSVPFGYKICDKKLIPNENAPIAKDIFRHYSIHNSIRLTVEYLFNEYDITRSSRTIKHMLRNRKYIGEVSGNKNYCPPIVDKETFEKVQNLLDKNISSIAKRTYIFSGLVVCSCCGKKMTGRYRKRKYIKKDGTVMYYTKKVYRCNGNTYKRNKCPNKINIPEEILEEYLLNNIKADAENFEAKQKKIAVSAPEKNNNSKILKKIERLKKAYLNEVISLDEYKKDRKELEQMIVQVKPKETIVFKSNWFNKNIESTYRDFDEEEKRFVWRSVLKNLLVDPHGKITINFLTKN

SEQ ID NO: 8785 - protein, 449 aa, Unknown
  Description of Unknown: Integrase B8786 sequence
  IPR036162,PS51737,IPR011109,PTHR30461,PS00397, PF00239,G3DSA:1.10.10.2600,IPR006119,SSF53041,cd00338, SM00857,IPR025827,IPR038109,PS51736,IPR006118, PF13408,G3DSA:3.40.50.1390,PF07508,Coil
MSKLQVAYLRVSTETQTEKYGLDMQKQKIMDYCEKHGITVDKWYIDGGYSGSKLDRPKIQELLDHAKSGIIDTVYIYKLDRMSRDVIDTLTLFYKTLPSYGVKVISMTEELRTENPMDRMMLTMNAAMNQYEREVIRMRMSSGMVERVKNGLWPGGGNIPVGYHYDRNDGILHIDADKAALVRDAFGLYLKGYSCNRIANILGFSCEKAVDNALKRKTYIGLIEYKGNVYKGKHEPIIDEEIFYMAQDMRKKRSTNAHVSNGYLLSGLCYCGICGARMRYHKWDGIKPRIICYSQYSGKSYMIRDKNCINIKAYAEIIEADVEDCFKKFAINVKANTSQKDDPVAKLKVAIRKENEHVKRLYVLYAENPSKNLMDVIKETEKKIEKLNKQLLTENDRKEPDNTQKIQKIKHVSDVWDTLSVKEKNRVLKECIERIVINGNDIEIRFVTF

SEQ ID NO: 8786 - protein, 449 aa, Unknown
  Description of Unknown: Integrase B8787 sequence
  IPR036162,PS51737,IPR011109,PTHR30461,PS00397, PF00239,G3DSA:1.10.10.2600,IPR006119,SSF53041,cd00338, SM00857,IPR025827,IPR038109,PS51736,IPR006118, PF13408,G3DSA:3.40.50.1390,PF07508,Coil
MSKLQVAYLRVSTETQTEKYGLDMQKQKIMDYCEKHGITIDKWYIDGGYSGSKLDRPEIQELLNHAKSGIIDTVYIYKLDRMSRDVIDTLNLFYKILPGYGVKVISMTEELRTENPMDRMMLTMNAAMNQYEREVIRMRMSAGMLERVKKGYWMGGGRTPWGYYYDRNDGILHINEQQASVVRKVYDLYLNGFSCENISKILGFKGEPIVKGILKRKSNIGLIEYKGKVYKGRHEPIIDEKVFWKVQDEMKKRHTNAYLSSGHLLTGLCHCGYCGARMRYQKWTAKTMKLVCYSHYQSSKAYMRKSDCCKNHPVDAYKIEAEVEECFKNFAININEYTESHQDSTEILVESLKKSDTKVRRLYGLYADNPSENLLDVIKAEEENIKKLKKKLDDAKTEKRCDPTKIAEIRHMSDVWDSLTLKEKNKILKQCVEDIVVDKDEITIRFVTL

SEQ ID NO: 8787 - protein, 449 aa, Unknown
  Description of Unknown: Integrase B8788 sequence
  PTHR30461:SF3,IPR036162,PS51737,IPR011109,PTHR30461, PS00397,PF00239,G3DSA:1.10.10.2600,IPR006119,SSF53041, cd00338,SM00857,IPR025827,IPR038109,PS51736, IPR006118,PF13408,G3DSA:3.40.50.1390,PF07508
MLKRAALYIRVSTDQQAKHGDSLDAQIATLKDYVSTQDNLTIIDTYIDDGISGQKLYRDEFQRLLEDIKKNRIDIILFTKLDRWFRNLRHYLNIQEILDNSGVTWLAVSQPFFNTDTAYGRSFVNQSMSFAELEAQMASERIKAVFENKIRKGEVVTGSVPFGYKICDKKLIPNENAPIAKDIFKHYSIHNSIRLTVEYLFNEYDITRSSRTIKHMLRNRKYIGEVSGNKNYCPPIVDKETFEKVQNLLDKNISSIAKRTYIFSGLVVCSCCGKKMTGRYRKRKYIKKDGTVMYYTKKVYRCNGNTYKRNKCPNKINIAEEILEEYLLNNIKADAENFEAKQKKIAVSAPEKNNNSKILKKIERLKKAYLNEVISLDEYKKDRKELEQMMIQVKPKETIVFKSNWFNKNIESTYRDFDEEEKRFVWRSVLKNLIVDPHSKITINFLTKN

SEQ ID NO: 8788 - protein, 449 aa, Unknown
  Description of Unknown: Integrase B8789 sequence
  PTHR30461:SF3,IPR036162,PS51737,IPR011109,PTHR30461, PS00397,PF00239,G3DSA:1.10.10.2600,IPR006119,SSF53041, cd00338,SM00857,IPR025827,IPR038109,PS51736, IPR006118,PF13408,G3DSA:3.40.50.1390,PF07508
MLKRAALYIRVSTDQQAKHGDSLDAQIATLKDYVSTQDNLTIIDTYIDDGISGQKLYRDEFQRLLEDIKKNRIDIILFTKLDRWFRNLRHYLNIQEILDNSGVTWLAVSQPFFNTDTAYGRSFVNQSMSFAELEAQMASERIKAVFENKIRKGEVVTGSVPFGYKICDKKLIPNENAPIAKDIFKHYSIHNSIRLTVEYLFNEYDITRSSRTIKHMLRNRKYIGEVSGNKNYCPPIVDKETFEKVQNLLDKNISSIAKRTYIFSGLVVCSCCGKKMTGRYRKRKYIKKDGTVMYYTKKVYRCNGNTYKRNKCPNKINIAEEILEEYLLNNIKADAENFEAKQKKIAVSAPEKNNNSKILKKIERLKKAYLNEVISLDEYKKDRKELEQMIVQVKPKETIVFKSNWFNKNIESTYHDFDEEEKRFVWRSVLKNLIVDPHGKITINFLTKN

SEQ ID NO: 8789 - protein, 449 aa, Unknown
  Description of Unknown: Integrase B8790 sequence
  PTHR30461:SF3,SM00857,IPR006118,IPR036162,PF13408, PS51737,G3DSA:3.40.50.1390,IPR025827,IPR006119,IPR011109, SSF53041,PF00239,PTHR30461,PS00397,PS51736, Coil,cd00338
MSGDVIRAAGYIRVSTAEQALRGLSLEAQEAEIRRYAAQRNIRLEKIYVDKGITARKQLHRRVAFTQLMHAVDAGELDLIIVMRLDRWFRNVYDYHRMMNEHLIPHGVNWCAVKEEYDTTTTNGRLMINLRLSIAEQECDTDGDRIRDVQQNLIAKGCWPFGGAPLGYRIENKRLVKDPETEPQVSFFFQHMLAHGSLRGALFAMNERFGTGYEYRRAQDLSRKSVYYGTYGENTSFCPAYITFEEHERIRALAEKNVRVWSSPTAWPHLFSGLLICDDCHRRLNAQTIRRPSGIYTTYRCSHSTDNHGCVNNRCISEKVIEAYLLDYLNTHLKDYLVEIEVVQKKAAAQPDNTEKIRAKQERVKTLFINNLIDLAEYKSRMESLEQQIVRPTAPPAPQNTQKLKEILESDVLRLYPELSREEKRSFWRGFIKELHIYRGTIQGPPIFW

SEQ ID NO: 8790 - protein, 449 aa, Unknown
  Description of Unknown: Integrase B8791 sequence
  PTHR30461:SF3,SM00857,IPR036162,PF13408,IPR025827, PS51737,G3DSA:3.40.50.1390,IPR006119,IPR011109,SSF53041, PTHR30461,PS51736,cd00338,PF00239
MGILRVGLYERVSTTEQSLNGYSIETQISNLEEYAKKNKMKIVDHYTDEGISGAKPPLKRPALKRLLEDVKAGKIDMILFTKLDRWFRSVKEYFKVQEILDKYKVQWKAIQEDYDTSTANGQMSITIFLAVAQNERDRTAERIKVVLEHKRKNKEACFGGNAIPLGYMKEPDEDGVMRLVKDPETQQAVQEFWDIMIESNNLNKAIRHMVNVYGINKDWKSWMRMTRSDFYCGIHRGVQDFCEPYVTPEDFLRLHEKRPQKATPTGRTYLLRGLIRCPECGNKLCGDADTRKSKVYKTYRCAYRARGCSNHGSYSELKLEKQLLTRLDEFLRDEIALAEIELSKPKPKPSVDVKALKEKQRRLTVAYMAGNKSDDEYLQEDRELKVLIEKAEKTAPPEPRNIEPLKELLNSDFRSLYEGLIEEEKQLFWARLIQEIKLDGKTIKRVIFF

SEQ ID NO: 8791 - protein, 449 aa, Unknown
  Description of Unknown: Integrase B8792 sequence
  PTHR30461:SF3,cd00338,SM00857,IPR006118, IPR036162,PF13408,IPR025827,G3DSA:3.40.50.1390, PS51737,IPR006119,IPR011109,SSF53041, PTHR30461,PS00397,PS51736,Coil,PF00239
MSAPVVRAAGYIRVSTAEQALRGLSLEAQEAEIRRWAAEHHVRLENIYVDKGITARKQLHRRAAFMQMMQAVDAGQIDLILVMRLDRWFRNVYDYHKMMNEHLIPHGVNWCAVKEDYDTTTTNGRLMINLRLSIAEQECDTDADRIRDVQQNMVAKGRWPFGAAPLGYRIEEKRLVKDPHTQPQVEFFFRHMLANGSLRGALFAMNDRFGTSYEYRRAQDLSRKSVYYGVYGENQSFCPAYITLEEHQRIRSLAEKNVRVWSSPTAWPHLFSGLLICDDCHRRLNAQTIRRPSGVYTTYRCSHSTDNHGCANNRSISEKVIEEYLLNYVREDLAQYIVQMEVSQKKAAALPDNTAKIRAKQERVKTLFINNFIDLEEYKRRIQELEGQIIRRPPSEKTKDVSKLKQLLEDGALKMYPTLTREEKRAFWRGFLKELHIYRGTIQGPPIFL

SEQ ID NO: 8792 - protein, 449 aa, Unknown
  Description of Unknown: Integrase B8793 sequence
  PTHR30461:SF3,cd00338,SM00857,G3DSA:1.10.10.2600,IPR036162, PF13408,IPR025827,G3DSA:3.40.50.1390,IPR006119,IPR038109, SSF53041,PTHR30461,PS51736,Coil,PF00239
MLRGFLYARISVEERNQKKYSIPAQIARMEEHCRVNHIKICDTFIDDGISAATIKKRKELCRMLDSLDDADIVLFTQLDRFSRNVLDANRLLEQFEKHNVSFRAVDEDDIDTSTADGRFIFNLKVNLAERERIKTSERIKAVNEFKRKNKQVTFGVGPTGYEVKDHKWVTNEKATMIYDLFDTYIKTGSRQAAREMLARKYDYDCEPSTVSHFLSQKCYTGEYKGIPDYYPQIITIEMWKEAERLRKEMCVRNRAVGIVYIFRGLLRCKYCGHIMTGAFPLSKPGATRKAVYRCARKANNIGEKIFCTEIHQIREEVVEAYLLENVEKQIKEYMIEIAQEESKKQEKKIDAASIKNKLTKIKDLYLADMIQLSDYEKEYKSLTKQLEEVDKQKTKKAAPDYKPFKAVLSGFLENEYKDFTNEQKRYFWQSLIDYIEVDKQKNMTIYFRR

SEQ ID NO: 8793 - protein, 449 aa, Unknown
  Description of Unknown: Integrase B8794 sequence
  IPR036162,PS51737,IPR011109,PTHR30461, PS00397,PF00239,G3DSA:1.10.10.2600,IPR006119, SSF53041,cd00338,SM00857,IPR025827,IPR038109,PS51736 ,IPR006118,PF13408,G3DSA:3.40.50.1390,PF07508,Coil
MSKLQVAYLRVSTETQTEKYGLDMQKQKIMDYCEKHGITIDKWYIDGGYSGSKLDRPEIQELLNHAKSGIIDTVYIYKLDRMSRDVIDTLNLFYKILPGYGVKVISMTEELRTENPMDRMMLTMNAAMNQYEREVIRMRMSAGMLERVKKGYWMGGGRTPWGYYYDRNDGILHINEQQASVVRKVYDLYLNGFSCENISKILGFKGEPIVKGILKRKSNIGLIEYKGKVYKGRHEPIIDEKVFWKVQDEMKKRHTNAYLSSGHLLTGLCHCGYCGARMRYQKWTAKTMKLVCYSHYQSSKAYMRKSDCCKNRPVDAYKVEAEVEECFKNFAININEYTESHQDSTEILVETLKKSDTKVRRLYGLYADNPSENLLDVIKAEEENIKKLKKKLDDAKTEKRCDPTKIAEIRHMSDVWDSLTLKEKNKILKQCVEDIVVDKDEITIRFVTL

SEQ ID NO: 8794 - protein, 449 aa, Unknown
  Description of Unknown: Integrase B8795 sequence
  IPR036162,PS51737,IPR011109,PTHR30461,PS00397, PF00239,G3DSA:1.10.10.2600,IPR006119,SSF53041,cd00338, SM00857,IPR025827,IPR038109,PS51736,IPR006118, PF13408,G3DSA:3.40.50.1390,PF07508,Coil
MRKLNVAYLRVSTEAQTEKYGLDVQKQKILDHCEKKGVVIDKWYIDGGYSGSKLDRPKIQELLDDAEKGLIGTVFIYKLDRMSRDVIDTLNLFYKVLPKYGVKVVSMTEDLRTEKPMDRVMLTMNAAMNQYEREVIRMRMSAGMLERVKKGLWMGGGRIPWGYYYDRNDGILHVDEEQAKMVRNAYKLYLEGYSCDKIATMLGFRGERIVTQILKRKSNIGLIEYKGNVYQGKHEPIVDEKLFWDVQDAINKRKTNSHISNNHLLTGLCYCGYCGSKMRYQKWGRSGHRLVCYSHYKSGKPYMRKVDSCISKPERADFLENEIEDAFKKFAIHVDETENECLDQSIILERTIKSEHERLKKMYTLYISCMSDDLLELIKEKEESIKKLQKQLEENEREKGCDVEKIEEIKQMADVWDSLTVKEKNRILKECVEKIIIKGSDIEVSFVTF

SEQ ID NO: 8795 - protein, 449 aa, Unknown
  Description of Unknown: Integrase B8796 sequence
  PTHR30461:SF3,cd00338,SM00857,IPR006118,IPR036162, PF13408,IPR025827,G3DSA:3.40.50.1390,PS51737,IPR006119, IPR011109,SSF53041,PTHR30461,PS00397,PS51736, Coil,PF00239
MSAPVVRAAGYIRVSTAEQALRGLSLEAQEAEIRRWAAEHHVRLENIYVDKGITARKQLHRRAAFMQMMQAVDAGQIDLILVMRLDRWFRNVYDYHKMMNEHLIPHGVNWCAVKEDYDTTTTNGRLMINLRLSIAEQECDTDADRIRDVQQNMVAKGRWPFGAAPLGYRIEEKRLVKDPHTQPQVEFFFQHMLANGSLRGALFAMNDRFGTSYEYRRAQDLSRKSVYYGVYGENQSFCPAYITLEEHQRIRSLAEKNVRVWSSPTAWPHLFSGLLICDDCHRRLNAQTIRRPSGVYTTYRCSHSTDNHGCANNRSISEKVIEEYLLNYVREDLAQYIVQMEVSQKKAAALPDNTAKIRAKQERVKTLFINNFIDLEEYKRRIQELEGQIIRRPPSEKTKDVSKLKQLLEDGALKMYPTLTREEKRAFWRGFLKELHIYRGTIQGPPIFL

SEQ ID NO: 8796 - protein, 449 aa, Unknown
  Description of Unknown: Integrase B8797 sequence
  IPR036162,PS51737,IPR011109,PTHR30461,PS00397, PF00239,G3DSA:1.10.10.2600,IPR006119,SSF53041,cd00338, SM00857,IPR025827,IPR038109,PS51736,IPR006118, PF13408,G3DSA:3.40.50.1390,PF07508,Coil
MSKLQVAYLRVSTETQTEKYGLDMQKQKIMDYCEKHGITIDKWYIDGGYSGSKLDRPEIQELLNHAKSGIIDTVYIYKLDRMSRDVIDTLNLFYKILPGYGVKVISMTEELRTENPMDRMMLTMNAAMNQYEREVIRMRMSAGMLERVKKGYWMGGGRTPWGYYYDRNDGILHINEQQASVVRKVYDLYLNGFSCENISKILGFKGEPIVKGILKRKSNIGLIEYKGKVYKGRHEPIIDEKVFWKVQDEMKKRHTNAYLSSGHLLTGLCHCGYCGARMRYQKWTVKTMKLVCYSHYQSSKAYMRKSDCCKNHPVDAYKIEAEVEECFKNFAININEYTESHQDGTEILVESLKKSDTKVRRLYGLYADNPSENLLDVIKTEEENIKKLKKKLDDAKTEKRCDPTKIAEIRHMSDVWESLTLKEKNKILKQCVEDIVVDKDEITIRFVTL

SEQ ID NO: 8797 - protein, 449 aa, Unknown
  Description of Unknown: Integrase B8798 sequence
  IPR036162,PS51737,IPR011109,PTHR30461,PS00397, PF00239,G3DSA:1.10.10.2600,IPR006119,SSF53041,cd00338, SM00857,IPR025827,IPR038109,PS51736,IPR006118, PF13408,G3DSA:3.40.50.1390,PF07508,Coil
MRKLNVAYLRVSTEAQTEKYGLDVQKQKILDHCEKKGVVIDKWYIDGGYSGSKLDRPKIQELLDDAEKGLIGTVFIYKLDRMSRDVIDTLNLFYKVLPKYGVKVVSMTEDLRTEKPMDRVMLTMNAAMNQYEREVIRMRMSAGMLERVKKGLWMGGGRIPWGYYYDRNDGILHVDEEQAKMVRNAYKLYLEGYSCDKIATMLGFRGERIVTQILKRKSNIGLIEYKGNVYQGKHEPIVDEKLFWDVQDAINKRKSNSHISNNHLLTGLCYCGYCGSKMRYQKWGRSGHRLVCYSHYKSGKPYMRKVDSCISKPERADFLENEIEDAFKKFAIHVDETENECLDQSIILERTIKSEHERLKKMYTLYISCMSDDLLELIKEKEESIKKLQKQLEENEREKGCDVEKIEEIKQMADVWDSLTVKEKNQILKECVEKIIIKGSDIEVSFVTF

SEQ ID NO: 8798 - protein, 448 aa, Unknown
  Description of Unknown: Integrase B8799 sequence
  PTHR30461:SF3,IPR036162,PS51737,IPR011109,PTHR30461, PS00397,PF00239,G3DSA:1.10.10.2600,IPR006119,SSF53041, cd00338,SM00857,IPR025827,IPR038109,PS51736, IPR006118,PF13408,G3DSA:3.40.50.1390,Coil
MSITNVAIYVRVSTDRQAKKGDSIDEQLSTCKNYIDSKENMVLAGTYIDDGISGRKIKRGDFEQLLDDVRLGRIDLIIFTKLDRWFRSLRHYLNTQAILEANHCDWLAVDQPYFDTTTPHGRAFVAQSMTFAELEAENDSVRIRDVFDYKYRQGEVLSGKVPLGYSIENKHLVLNQDADKVLHIFQFYAECGSLNQTISHLERDMGIIMSQDNLKKSVLKNKKYIGVFRDNDHYCPALVSADLFERVQELLAINIKVSQKYSYVFSGLLRCAHCGQAFSGAMRKIKKRNGDGYYKYPFYRCHGAYPNKRCVNRKIIFESYIERYLLSNIKDLLQKYIADYEITTAKVVDYDSRRASILKKIDKLKDLYVNDIITMDELKQDKERYIKELESLPRNQSQKDMAPIRELLKMDLNSVYETLDPAERRQLWRSVIKEIQIDDRRNLKVIFL

SEQ ID NO: 8799 - protein, 448 aa, Unknown
  Description of Unknown: Integrase B8800 sequence
  PTHR30461:SF3,IPR036162,PS51737,IPR011109,PTHR30461, PS00397,PF00239,G3DSA:1.10.10.2600,IPR006119,SSF53041, cd00338,SM00857,IPR025827,IPR038109,PS51736, IPR006118,PF13408,G3DSA:3.40.50.1390,Coil
MKQRAALYVRVSTEEQAKHGLSLQEQLNSLKAYAEKNGMDVVGVYSDAGISARKPYTKRPDLLRLLSDCEAHKVDVILFIKLDRWFRNVGNYYAVQDILDRCGVSWQATKEDYETRTASGRLKVNIMLSVAQDEADRTSERIRFITEAKKAKGQSTNAKAPLGIKVVNSHYTIDPETADIARDMFAQYIALQSALGVSKYMRERYGITRTYNNFVRYIKNRLYIGEAYGVENAFPALIDKKDFDLANAILARRSTRNSSENADRVYLFSRLLVCRECGKSMQSETKIKGENGKTYTYIYYRCRTKMIKGTCKHVHRVKEDVLEDYLLREIVHLIEAYRFQVEKRAKKEKAPAVTPESIRRKMQKLKDLYLSDLIEIEDYKKDYAGLKEQLETLEMVQKMAPPPTPISEIKCQLEEYPSMTRAQKKAFWARTVQRIEADDNGAFFVTPV

SEQ ID NO: 8800 - protein, 448 aa, Unknown
  Description of Unknown: Integrase B8801 sequence
  PTHR30461:SF3,IPR036162,PS51737,IPR011109,PTHR30461, PS00397,PF00239,G3DSA:1.10.10.2600,IPR006119,SSF53041, cd00338,SM00857,IPR025827,IPR038109,PS51736, IPR006118,PF13408,G3DSA:3.40.50.1390,Coil
MSITNVAIYVRVSTDRQAKKGDSIDEQLSTCKNYIDSKENMVLAGTYIDDGISGRKIKRGDFEQLLDDVRLGRVNLIIFTKLDRWFRSLRHYLNTQAILEANHCDWLAVDQPYFDTTTPHGRAFVAQSMTFAELEAENDSVRIRDVFDYKYRQGEVLSGKVPLGYSIENKHLVLNQDADKVLHIFQFYAECGSLNQTISHLERDMGIIMSQDNLKKSVLKNKKYIGVFRDNDHYCPALVSADLFERVQELLAINIKVSQKYSYVFSGLLRCAHCGQAFSGAMRKIKKRNGDGYYKYPFYRCHGAYPNKRCVNRKIIFESYIERYLLSNIQDLLQKYIADYEIAAAKVVDYDSRRASILKKIDKLKDLYVNDIITMDELKQDKERYTKELESLPRNQSQKDMAPIRKLLKMDLNSVYETLDPAERRQLWRSVIKEIQIDDRRNLKVIFL

SEQ ID NO: 8801 - protein, 448 aa, Unknown
  Description of Unknown: Integrase B8802 sequence
  IPR036162,PS51737,IPR011109,PTHR30461,PS00397, PF00239,G3DSA:1.10.10.2600,IPR006119,SSF53041,cd00338, SM00857,IPR025827,IPR038109,PS51736,IPR006118, PF13408,G3DSA:3.40.50.1390,PF07508,Coil
MSKLQVAYLRVSTETQTEKYGLDMQKQKIMDYCEKHGITIDKWYIDGGYSGSKLDRPEIQELLKHAKSGIIDTVYIYKLDRMSRDVIDTLTLFYKTLPGYGVKVVSMTEELRTENPMDRMMLTMNAAMNQYEREVIRMRMSSGMVERVKNGFWPGGGNVPVGYYYDRNDGILHIDNKKADMVRDTFRLYLDGYSCIRIADILGFSCERIVVNILKRKTYIGLIEYKGNVYKGKHESIIDEETFYKVQEMHKKRSTNAHVSRRYLLTGLCYCGVCGARMRYHQWNGINPRIVCYSQYGKDYMARDRNCNNLKPHASHIESEVEECFKQFAINVKQKDKQKDDPVNKLKVAIKKEEDGVKRLYLVYAENPTKNLMDVIKETEKKITRLNKKLLEESSRKEMNNSKKIQDIRRVSDVWDTLTTQEKNKILKECIEKVVISGNDLEIRFITF

SEQ ID NO: 8802 - protein, 448 aa, Unknown
  Description of Unknown: Integrase B8803 sequence
  SM00857,IPR006118,G3DSA:1.10.10.2600,IPR036162,PF13408, IPR025827,PS51737,G3DSA:3.40.50.1390,IPR006119,IPR038109, PF07508,IPR011109,SSF53041,PTHR30461,PS00397, PS51736,cd00338,PF00239
MSKLNVAYLRVSTESQTEKYGLDVQRQKILDYCERKGVKIDKWYIDGGYSGSKLDRPEIKELLDHAEKGLIGTVYIYKLDRMSRDVIDTLNLFYKILPKYGVKVVSMTEDLRTDNPMDRVMLTMNAAMNQYEREVIRMRMTAGMIERVKKGFWMGGGLIPWGYYYDRNDGILHVDQKEAEMVRKAFNMYLDGYSCENIAKIVGFKSEKIVRDILKRKSNIGMIEYKGKVYKGKHEPIIDEATFNRVQDLMRKRTTNSHVNHDNLLTGLCYCGVCGARMRYQKWGNYHKIVCYSQYKNKEYMQRSDHCYNLKPFASDIEAEVEDCFKRFLINIDNQDEPPKNHKEEIEESIKKSSAKVKRLYMLYADNPSDNLLEVIKEEEDKICSLKKQLELEIENDRRSDTEKIEKIKRMSDVWDTLTVRDKNRVLKECIERIIITGSDIEIRFITL

SEQ ID NO: 8803 - protein, 448 aa, Unknown
  Description of Unknown: Integrase B8804 sequence
  PTHR30461:SF3,IPR036162,PS51737,IPR011109,PTHR30461, PS00397,PF00239,G3DSA:1.10.10.2600,IPR006119,SSF53041, cd00338,SM00857,IPR025827,IPR038109,PS51736, IPR006118,PF13408,G3DSA:3.40.50.1390,Coil
MRQRAALYIRVSTEEQAKHGLSLQEQLNSLKDYAEKNGMDVVGVYSDAGISARKPYTKRPDLLRLLSDCEAHKVDVILFIKLDRWFRNVGNYYAVQDILDRCGVSWQATKEDYETRTASGRLKVNIMLSVAQDEADRTSERIRFITDAKKAKGQSPNAKAPLGIKVVDSHYVIDPETADIARDMFAQYIALQSALGLSKYMRQRYGITRTYNNYMRYLKNRLYIGEAYGIENALPALISRKDFDLVGDILARRSTRNASAGENHTYLFSGLLLCHECKKTMQAETIVKGQNGKTYTYVYYRCRTKMFKGTCRHVHRVKEDVLEDYLLREIVHLIEAYRFQAEKRAKKEKAPAVTPESIRRKMQKLKDLYLMDMIEIEDYKADYSALKEQLESLEMVQKMSPPPTPISEIECQLAEYPDMSRTQKKAFWVRTVKRIEADDNGAFFVTPV

SEQ ID NO: 8804 - protein, 448 aa, Unknown
  Description of Unknown: Integrase B8805 sequence
  IPR036162,PS51737,IPR011109,PTHR30461,PS00397, PF00239,G3DSA:1.10.10.2600,IPR006119,SSF53041,cd00338, SM00857,IPR025827,IPR038109,PS51736,IPR006118, PF13408,G3DSA:3.40.50.1390,PF07508,Coil
MKKMNVGYLRVSTENQTEKYGLDLQKNKIIERAEKEGDKIDKWYIDGGYSGSTLDRPDIQRLLEDSKNGYIEKVYIYKLDRVSRDTIDTLVILYRTLPEYNVKIVSATEELSLDTPMDKMKIGIDALMGQYEREIISMRTKAGMLERVKSGLWMGGGRVPFGYYYDRNDGILHPKEEEAEKVRTMYRLYNDGYSCQKISEMLGMKGERIVIQILKRKSNIGYIEYKGNIYKGKHEAIIDEETFYKTQKFMEKRANNSYICNKFLLSGLCFCGKCGARMRYKKWANRHVLECYSRDGYKEYMVKNPNCDNKRPDAKDVEKEVSDCFKRFAVNITGRREKQLSKKELIEKEMKSTVDKLKKLYELYATSESETLLEVIGKSEKRVKELRRELDRETRKKSLNTPERIEKIKKISDVWDKLDVKEQNKILKECIDKIVITDGNIDIYFNLL

SEQ ID NO: 8805 - protein, 448 aa, Unknown
  Description of Unknown: Integrase B8806 sequence
  PTHR30461:SF3,cd00338,SM00857,G3DSA:1.10.10.2600,IPR036162, PF13408,IPR025827,G3DSA:3.40.50.1390,IPR006119,IPR038109, SSF53041,PTHR30461,PS51736,Coil,PF00239
MKCVAYMRVSTEKQAEEGNGLESQKRDIENYCRKNELIIADWYVDEGYTGSNMNRPELQRLITDCSRKKVNCVVAFKLDRISRSMVDGIYIIEKVFQSNNVAFKCVHDSISYDSPMEQAYTQMMAVFAQLDKNTMMLRMRGGMQGYWWGGGNTPYCYRYDKEQGILIPIPERAEQARKALELFISGYSDAKIKEICGFKSELVTRKVLTGVVNIGMIPYKGNIYQGKHKPIFDKDRFELAQELRKSRCSAKISCFTEPNLLTGLCYCGVCGCKMRYQKWSNGNHKIYCCSRNKGLKYLPNYNPNCNNSLEWADDIEKQVTDEILKISLNLSSYKPKAKETKLEIMQSQLEREQTKLKRLYSLYADGNDTVLEMIKDLESQISKTKEDISVESKNAINTQKKEFTYQNIKKLADVWDNIDKKQKNFILKTIIDKVIIVNGNVEIQLKNF

SEQ ID NO: 8806 - protein, 448 aa, Unknown
  Description of Unknown: Integrase B8807 sequence
  PTHR30461:SF3,IPR036162,PS51737,IPR011109,PTHR30461, PS00397,PF00239,G3DSA:1.10.10.2600,IPR006119,SSF53041, cd00338,SM00857,IPR025827,IPR038109, PS51736,IPR006118,PF13408,G3DSA:3.40.50.1390,Coil
MSITNVAIYVRVSTDRQAKKGDSIDEQLSTCKNYIDSKENMVLAGTYIDDGISGRKIKRGDFEQLLDDVRLGRIDLIIFTKLDRWFRSLRHYLNTQAILEANHCDWLAVDQPYFDTTTPHGRAFVAQSMTFAELEAENDSVRIRDVFDYKYRQGEVLSGKVPLGYSIENKHLVLNQDADKVLHIFQFYAECGSLNQTISHLERDIGIIMSQDNLKKSVLKNKKYIGVFRDNDHYCPALVSADLFERVQELLAINIKVSQKYSYVFSGLLRCAHCGQAFSGAMRKIKKRNGDGYYKYPFYRCHGAYPNKRCVNRKIIFESYIERYLLSNIKDLLQKYIADYEITTAKVVDYDSRRASILKKIDKLKDLYVNDIITMDELKQDKERYIKELESLPRNQSQKDMAPIRELLKMDLNSVYETLDPAERRQLWRSVIKEIQIDDRRNLKVIFL

SEQ ID NO: 8807 - protein, 448 aa, Unknown
  Description of Unknown: Integrase B8808 sequence
  PTHR30461:SF3,IPR036162,PS51737,IPR011109,PTHR30461, PS00397,PF00239,G3DSA:1.10.10.2600,IPR006119,SSF53041, cd00338,SM00857,IPR025827,IPR038109,PS51736, IPR006118,PF13408,G3DSA:3.40.50.1390,Coil
MSIINVAIYVRVSTDRQAKKGDSIDEQLSTCKNYIASKENMVLAGVYIDDGISGRKIKRGDFEQLLDDVRLGRVDLIIFTKLDRWFRSLRHYLNTQAILEANHCDWLAVDQPYFDTTTPHGRAFVAQSMTFAELEAENDSVRIRDVFDYKYRQGEVLSGKVPLGYSIENKHLVLNQDADKVLHIFQFYAECGSLNQTISHLERDMGIIMSQDNLKKSVLKNKKYIGVFRDNDHYCPALVSADLFERVQELLAINIKVSQKYSYVFSGLLRCAHCGQAFSGAMRKIKKRNGDGYYKYPFYRCHGAYPNKRCVNRKIIFESYIERYLLSNIKDLLQKYIADYEITTAKVVDYDSRRATILKKIDKLKDLYINDIITMDELKRDKERYIKELESLPRNQSQKDMAPIRELLKMDLNSVYETLDPAERRQLWRSVIKEIQIDDRRNLKVIFL

SEQ ID NO: 8808 - protein, 448 aa, Unknown
  Description of Unknown: Integrase B8809 sequence
  SM00857,IPR006118,IPR036162,PF13408,IPR025827, G3DSA:3.40.50.1390,IPR006119,SSF53041,PF00239,PTHR30461, PS00397,PS51736,Coil,cd00338
MTEKEEQKRAAIYVRVSTAEQKEHGLSVDNQLDALKSYCQERGFTVAGIYNDAGISARKKYKSRPALLKLLEDCQKHKIDIILFTKLDRWFRSVADYYAVQQVLDGAKVPWRAIWEDYETETSAGVFKVNIMLSVAQAESDRTSERIKAVLEYKREHGHIIAGRMPLGYIRTSSSTIDYDPATKDAMQAFFGTYLNTYSPAKAIDAAKELGLRITRKNAHDILDKEPYYGTYYGVEVPAYITPEQHKIIENARVHYARTPKYDRVYIFTGLIFCATCGARMGSKLSKHIKASGEMIEKGYYQCRTNTMRKGICEKPAFMMEYKLEEYLIEHMSELIENYTADIAQSQEKAKDVEKEITRIKSKLQRLRDVYLDGDMSRAEYIEKTSQLKADIVELESQKVPLSPIKQFPDDWAEIYRQLSKEGKRDFWHRTIRRIEIDGKKVTKVFFV

SEQ ID NO: 8809 - protein, 448 aa, Unknown
  Description of Unknown: Integrase B8810 sequence
  PTHR30461:SF3,IPR036162,PS51737,IPR011109, PTHR30461,PS00397,PF00239,G3DSA:1.10.10.2600, IPR006119,SSF53041,cd00338,SM00857,IPR025827,IPR038109 ,PS51736,IPR006118,PF13408,G3DSA:3.40.50.1390,Coil
MSITNVAIYVRVSTDRQAKKGDSIDEQLSTCKNYIDSKENMVLAGTYIDDGISGRKIKRGDFEQLLDDVRLGRIDLIIFTKLDRWFRSLRHYLNTQAILEANHCDWLAVDQPYFDTTTPHGRAFVAQSMTFAELEAENDSVRIRDVFDYKYRQGEVLSGKVPLGYSIENKHLVLNQDADKVLHIFQFYAECGSLNQTISHLERDMGIIMSQDNLKKSVLKNKKYIGVFRDNDHYCPALVSADLFERVQELLAINIKVSQKYSYVFSGLLRCAHCGQAFSGAMRKIKKRNGDGYYKYPFYRCHGAYPNKRCVNRKIIFESYIERYLLSNIKDLLQNYIADYEITTAKVVDYDSRRATILKKIDKLKDLYINDIITMDELKRDKERYIKELESLPRNQSQKDMAPIRELLKMDLNSVYETLDPAERRQLWRSVIKEIQIDDRRNLKVIFL

SEQ ID NO: 8810 - protein, 448 aa, Unknown
  Description of Unknown: Integrase B8811 sequence
  PTHR30461:SF3,IPR036162,PS51737,IPR011109,PTHR30461, PS00397,PF00239,G3DSA:1.10.10.2600,IPR006119,SSF53041, cd00338,SM00857,IPR025827,IPR038109,PS51736, IPR006118,PF13408,G3DSA:3.40.50.1390,Coil
MSITNVAIYVRVSTDRQAKKGDSIDEQLSTCKNYIDSKENMVLAGTYIDDGISGRKINRGDFEQLLDDVRLGRIDLIIFTKLDRWFRSLRHYLNTQAILEANHCDWLAVDQPYFDTTTPHGRAFVAQSMTFAELEAENDSVRIRDVFDYKYRQGEVLSGKVPLGYSIENKHLVLNQDADKVLHIFQFYAECGSLNQTISHLERDMGIIMSQDNLKKSVLKNKKYIGVFRDNDHYCPALVSADLFERVQELLAINIKVNQKYSYVFSGLLRCAHCGQAFSGAMRKIKKRNGDGYYKYPFYRCHGAYPNKRCVNRKIVFESYIERYLLSNIKDLLQKYIADYEIATAKVIDYDSRRASILKKIDKLKDLYVNDIITMDELKQDKERYIKELESLPRNQPQKDMAPIRKLLKMDLNSVYETLDPAERRQLWRSVIKEIQIDDRRNLKVIFL

SEQ ID NO: 8811 - protein, 448 aa, Unknown
  Description of Unknown: Integrase B8812 sequence
  PTHR30461:SF3,IPR036162,PS51737,IPR011109,PTHR30461, PS00397,PF00239,G3DSA:1.10.10.2600,IPR006119,SSF53041, cd00338,SM00857,IPR025827,IPR038109,PS51736, IPR006118,PF13408,G3DSA:3.40.50.1390,Coil
MSITNVAIYVRVSTDRQAKKGDSIDEQLSTCKNYIDSKENMVLAGTYIDDGISGRKINRGDFEQLLDDVRLGRIDLIIFTKLDRWFRSLRHYLNTQAVLEANHCDWLAVDQPYFDTTTPHGRAFVAQSMTFAELEAENDSVRIRDVFDYKYRQGEVLSGKVPLGYSIENKHLVLNQDADKVLHIFQFYAECGSLNQTISHLERDMGIIMSQDNLKKSVLKNKKYIGVFRDNDHYCPALVSADLFERVQELLAINIKVSQKYSYVFSGLLRCAHCGQAFSGAMRKIKKRNGDGYYKYPFYRCHGAYPNKRCINRKIVFESYIERYLLSNIKDLLQKYIADYEIATAKVIDYDSRRASILKKINKLKDLYVNDIITMDELKQDKERYIKELESLPRNQPQKDMAPIRKLLKMDLNSVYETLDPAERRQLWRSVIKEIQIDDRRNLKVIFL

SEQ ID NO: 8812 - protein, 448 aa, Unknown
  Description of Unknown: Integrase B8813 sequence
  SM00857,IPR006118,IPR036162,PF13408,PS51737, G3DSA:3.40.50.1390,IPR025827,IPR006119,SSF53041,IPR011109, PF00239,PTHR30461,PS00397,PS51736,Coil, cd00338
MTEKEEQKRAAIYVRVSTAEQKEHGLSVDNQLDALKSYCQERGFTVAGIYNDAGISARKKYKSRPALLKLLEDCQKHKIDIILFTKLDRWFRSVADYYAVQQVLDGAKVPWRAIWEDYETETSAGVFKVNIMLSVAQAESDRTSERIKAVLEYKREHGHIIAGRMPLGYIRTSSSTIDYDPATKDAMQAFFDTYLGTYSPVAAMDAARKLGLRMSRKTAHFILDKEPYYGTYFGVDVPAYITPEQHKIIQNARVHYARTPKDDRVYIFTGLIFCANCGARMGSKLSKHIKASGETIERGYYQCRTKTVRKDICEKPAFMMEHKLEDYLIEHMSELITDYEASIAQSREKAKDAEKEISRIKGKLQRLKDVYLDGDMSRAEYVEKTSQLKADMAEFESQRVPLSPIKQLPDDWEEMYRQLSKGGKRDFWHRTIRRIEIDGKKVTKVFFV

SEQ ID NO: 8813 - protein, 448 aa, Unknown
  Description of Unknown: Integrase B8814 sequence
  PTHR30461:SF3,IPR036162,PS51737,IPR011109,PTHR30461, PS00397,PF00239,G3DSA:1.10.10.2600,IPR006119,SSF53041, SM00857,IPR025827,IPR038109,PS51736,cd03768, IPR006118,PF13408,G3DSA:3.40.50.1390,PF07508,Coil
MRTGLYVRVSTTEQEKHGYSIKVQLEKLRAFASAKDYTVVKEYVDAAQSGAKLERPGLKQLIEDVENNALDCVLVYRLDRLSRSQKDTMYLIEDVFLKNSVAFVSLQESFDTTSSFGRAMIGMLSVFAQLERDNITERLFSGRAHRAKRGFHHGGGIIPFGYRYDVETGELKRFENESNEVKAMFEMIANGKSVSSVAKEFNTYDTTIRRRIANSVYIGKIQFDGETFDGQHEPIISKELFDKANVRMNARASSLPFKRTYLLSGLIYCGKCGERCSAYESRSKHNGKEYRRAYYRCNARTWKYKQKHGRTCEQPHIRVDELEQAVMEQVKRLPLKHKAKKRAFDFKPVENQIATIDKQKERLLDLYLNEHLDNEMFNKKSKELDKSRDKLAKQLERMRMQAADSVESYQWLDGIDWNALDKDTLREVLERIIERIVIRDKDVEIYFK

SEQ ID NO: 8814 - protein, 448 aa, Unknown
  Description of Unknown: Integrase B8815 sequence
  PTHR30461:SF3,IPR036162,PS51737,IPR011109,PTHR30461, PS00397,PF00239,G3DSA:1.10.10.2600,IPR006119,SSF53041, cd00338,SM00857,IPR025827,IPR038109,PS51736, IPR006118,PF13408,G3DSA:3.40.50.1390,Coil
MSITNVAIYVRVSTDRQAKKGDSIDEQLSTCKNYIDSKENMVLAGTYIDDGISGRKIKRGDFEQLLDDVRLGRIDLIIFTKLDRWFRSLRHYLNTQAILEANHCDWLAVDQPYFDTTTPHGRAFVAQSMTFAELEAENDSVRIRDVFDYKYRQGEVLSGKVPLGYSIENKHLVLNQDADKVLHIFQFYAECGSLNQTISHLERDMGIIMSQDNLKKSVLKNKKYIGVFRDNDHYCPALVSADLFERVQELLAINIKVSQKYSYVFSGLLRCAHCGQAFSGAMRKIKKRNGDGYYKYPFYRCHGAYPNKRCVNRKIIFESYIERYLLSNIKDLLQKYIADYEITTAKVVDYDSRRASILKKIDKLKDLYLNDIITMDELKQDKERYIKELESLPRNQSQKDMAPIRELLKMDLNSVYETLDPAERRQLWRSVIKEIQIDDRRNLKVIFL

SEQ ID NO: 8815 - protein, 448 aa, Unknown
  Description of Unknown: Integrase B8816 sequence
  PTHR30461:SF3,cd00338,SM00857,IPR006118,IPR036162, PF13408,IPR025827,G3DSA:3.40.50.1390,PS51737,IPR006119, SSF53041,IPR011109,PTHR30461,PS00397,PS51736, Coil,PF00239
MAEKEGQKRAAIYVRVSTAEQRDHGLSVDSQISALKNYCTQHNFAIAGIYNDAGISARKKYKARPALLQLLEDCQKHKIDIILFTRLDRWFRSVSDYYKVQAVLDETKVPWRTIWEDYETETSSGLLKVNIMLAIAQSESDRTSERIKAVLEYKREHGHIIAGRMPLGYIRTSSSTIDYDPATKDAMQAFFDTYLGTYSPVAAMDAARKLGLRMSRKTAHFILDKEPYYGTYFGVDVPAYITPEQHKIIQNARVHYARTPKDDRVYIFTGLIFCANCGARMGSKLSKHIKASGETIERGYYQCRTKTVRKDICEKPAFMMEHKLEDYLIEHMSELITDYEASVAQSREKAKDAEKEIIRIKGKLQRLKDVYLDGDMSRTEYVERTSQLKADMAELESQRVPLSPIKQLPDDWVEMYRQLSKDGKRDFWHRTIRRIEIDGKKVSKVFFI

SEQ ID NO: 8816 - protein, 448 aa, Unknown
  Description of Unknown: Integrase B8817 sequence
  PTHR30461:SF3,IPR036162,PS51737,IPR011109,PTHR30461, PS00397,PF00239,G3DSA:1.10.10.2600,IPR006119,SSF53041, cd00338,SM00857,IPR025827,IPR038109,PS51736, IPR006118,PF13408,G3DSA:3.40.50.1390,Coil
MSIINVAIYVRVSTDRQAKKGDSIDEQLSTCKNYIASKENMVLAGVYIDDGISGRKIKRGDFEQLLDDVRLGRVDLIIFTKLDRWFRSLRHYLNTQAILEANHCDWLAVDQPYFDTTTPHGRAFVAQSMTFAELEAENDSVRIRDVFDYKYRQGEVLSGKVPLGYSIENKHLVLNQDADKVLHIFQFYAECGSLNQTISHLERDMGIIMSQDNLKKSVLKNKKYIGVFRDNDHYCPALVSADLFERVQELLAINIKVSQKYSYVFSGLLRCAHCGQAFSGAMRKIKKRNGDGYYKYPFYRCHGAYPNKRCVNRKIIFESYIERYLLSNIKDLLQKYIADYEITTAKVVDYDSRRASILKKIDKLKDLYVNDIITMDELKQDKERYIKELESLPRNQSQKDMAPIRELLKMDLNSVYETLDPAERRQLWRSVIKEIQIDDRRNLKVIFL

SEQ ID NO: 8817 - protein, 448 aa, Unknown
  Description of Unknown: Integrase B8818 sequence
  IPR036162,PS51737,IPR011109,PTHR30461,PS00397, PF00239,G3DSA:1.10.10.2600,IPR006119,SSF53041,cd00338, SM00857,IPR025827,IPR038109,PS51736,IPR006118, PF13408,G3DSA:3.40.50.1390,PF07508,Coil
MSKLQVAYLRVSTETQTEKYGLDMQKQKIMDYCEKHGITIDKWYIDGGYSGSKLDRPEIQELLEHAKSGIIDTVYIYKLDRMSRDVIDTLTLFYKTLPGYGVKVVSMTEELRTENPMDRMMLTMNAAMNQYEREVIRMRMSSGMVERVKNGFWPGGGNVPVGYYYDRNDGILHIDNKKADMVRDTFRLYLDGYSCIRIADILGFSCERIVVNILKRKTYIGLIEYKGNVYKGKHESIIDEETFYKVQEMHKKRSTNAHVSRRYLLTGLCYCGVCGARMRYHQWNGINPRIVCYSQYGKDYMARDRNCNNLKPHASHIESEVEECFKQFAINVKQKDKQKDDPVNKLKVAIKKEEDGVKRLYLVYAENPTKNLMDVIKETEKKITRLNKKLLEESSRKEMNNSKKIQEIRRVSDVWDTLTTQEKNKILKECIEKVVISGNDLEIRFITF

SEQ ID NO: 8818 - protein, 448 aa, Unknown
  Description of Unknown: Integrase B8819 sequence
  PTHR30461:SF3,SM00857,G3DSA:1.10.10.2600,IPR036162,PF13408, IPR025827,PS51737,G3DSA:3.40.50.1390,IPR006119,IPR038109, PF07508,IPR011109,SSF53041,PTHR30461,PS51736, cd00338,PF00239
MERIIQKVTPPARKKAPKLKRVAAYARVSSGREAPLHSLSAQISQYSGMIQKTPGWQYAGVYADEALTGTKDSRGEFQRLLADCRAGKIDMIITKSVSRFARNTVTTLRTIRELRLMGVDVFFEEQNIHTMGEDGELLLTLLAAYAEEEARSVSENQKWRIKSNYEQGLPWSITMYGYRQVNGRLEVVPEEAEIIRLAADLYLEGYGRCKLEDAFAAVNIKGRHGANMGGNSIVDLICNEKIVGDMLLQKTFVVDPITKEVRKNNGEKPQYFVEGSHEGILDRETYEKVLAERARRAAAYKPRSGNYERNRFPFSGKIHCGKCGKSFTRKVLNGNTPYEKRGWLCRTFNQKGKAHCDAKQIPEEILKRVSAEAMGLPEFDEAAFAAKVEEIQVPENGVLVFVFYDGHTVTKTWDNPSRRHSWNPENRQRARELALRQAAERRLAKCQQ

SEQ ID NO: 8819 - protein, 448 aa, Unknown
  Description of Unknown: Integrase B8820 sequence
  PTHR30461:SF3,IPR036162,PS51737,IPR011109,PTHR30461, PS00397,PF00239,G3DSA:1.10.10.2600,IPR006119,SSF53041, cd00338,SM00857,IPR025827,IPR038109,PS51736, IPR006118,PF13408,G3DSA:3.40.50.1390,Coil
MSITNVAIYVRVSTDRQAKRGDSIDEQLSTCKNYIDSKENMVLAGTYIDDGISGRKINRGDFEQLLDDVRLGRIDLIIFTKLDRWFRSLRHYLNTQAVLEANHCDWLAVDQPYFDTTTPHGRAFVAQSMTFAELEAENDSVRIRDVFDYKYRQGEVLSGKVPLGYSIENKHLVLNQDADKVLHIFQFYAECGSLNQTISHLERDMGIIMSQDNLKKSVLKNKKYIGVFRDNDHYCPALVSTGLFERVQELLAINIKVSQKYSYVFSGLLRCAHCGQAFSGAMRKIKKRNGDGYYKYPFYRCHGAYPNKRCINRKIVFESYIERYLLSNIKDLLQKYIADYEITTAKVVDYDSRRASILKKIDKLKDLYVNDIITMDELKQDKERYIKELESLPRNQSQKDMAPIRKLLKMDLNSVYETLDPAERRQLWRSVIKEIQIDDRRNLKVIFL

SEQ ID NO: 8820 - protein, 447 aa, Unknown
  Description of Unknown: Integrase B8821 sequence
  PTHR30461:SF3,IPR036162,PS51737,IPR011109,PTHR30461, PS00397,PF00239,G3DSA:1.10.10.2600,IPR006119,SSF53041, cd00338,SM00857,IPR025827,IPR038109,PS51736, IPR006118,PF13408,G3DSA:3.40.50.1390,Coil
MSITNVAIYVRVSTDRQAKKGDSIDEQLSTCKAYIASKENMVLAGTYIDDGISGRKIKRGDFEQLLDDVRLGRVNLIIFTKLDRWFRSLRHYLNTQAVLEANHCDWLAVDQPYFDTTTPHGRAFVAQSMTFAELEAENDSVRIRDVFDYKYRQGEVLAGKAPLGFSIENKHLVPNQDAEKVLHIFQFYAACNSLNQTITHLESDMGIVMTQSNLKTAILKNKKYIGVFRDNDHYCPAIIPLDLFERVQELLAINVKISQKYNYIFSGLLRCAHCGHSFSGATRKIKKKAGGFYKYPLYKCHGAYPSKRCSNRKVIFESCIERYLIANIKPLLQEHIAEYEITSAKVIDYDSRRAALLRKIDKLKDLYVNDIITMDELKRDKEKYIKELENLPRNQEQKDLAPIQKLLKMDLDSIYQTLEPAERRQLWRSVIKEIQIDDHKNLKVIFL

SEQ ID NO: 8821 - protein, 447 aa, Unknown
  Description of Unknown: Integrase B8822 sequence
  SM00857,IPR006118,G3DSA:1.10.10.2600,IPR036162,PF13408, IPR025827,PS51737,PS00397,G3DSA:3.40.50.1390,IPR006119, IPR038109,IPR011109,SSF53041,PTHR30461,Coil, PS51736,cd00338,PF00239
MVKKHVALYVRVSTEEQKNHGLSVDSQIDALEKYCAEHDYAIFHIYNDAGHSAAKRYTTRPALLQLMEDCSHGMFDLILFTRLDRWFRSVPDYYQVQSVLDHNHIAWRAIWEDYETETSEGVFKVNIMLSIAQAEAQRTSEKIRSVLQYKRDSGGYVGQPPMGYIRINKRDLIFDDSIKDAIRELFKVYLTTNSIVKAVQSAHDNGLQISAQQAYRILKKEAYAGLAVGGYKCPAYISWEDHEKILSMMKQHTRKTTPARTYYFSGLLFCENCGYRLAAGASHKRSASGEDYYIKYYRCNGFRTMRSDCPGSYLNEKKLEKYLLDHLNAELDQYNVNLMTHSKDYDPDEIKKQIAALESRMRRIGDRYEDGDISREEYRNKRYEITYRINTLRSLIAKNPTPIHLADDWMAVYQGFDAEHKRQFWRSIIERMDVPVEDSYHVKIHFC

SEQ ID NO: 8822 - protein, 447 aa, Unknown
  Description of Unknown: Integrase B8823 sequence
  PTHR30461:SF3,IPR036162,PS51737,IPR011109,PTHR30461, PS00397,PF00239,G3DSA:1.10.10.2600,IPR006119,SSF53041, cd00338,SM00857,IPR025827,IPR038109,PS51736, IPR006118,PF13408,G3DSA:3.40.50.1390,Coil
MSITNVAIYVRVSTDRQAKKGDSIDEQLSTCKAYIASKENMVLAGTYIDDGISGRKIKRGDFEQLLDDVRLGRVNLIIFTKLDRWFRSLRHYLNTQAVLEANHCDWLAVDQPYFDTTTPHGRAFVAQSMTFAELEAENDSVRIRDVFDYKYRQGEVLAGKAPLGFSIENKHLVPNQDAEKVLHIFQFYAACNSLNQTITHLESNMGIVMTQSNLKTAILKNKKYIGVFRDNDHYCPAIIPLDLFERVQELLAINVKISQKYNYIFSGLLRCAHCGHSFSGATRKIKKKAGGFYKYPLYKCHGAYPSKRCSNRKVIFESCIERYLIANIKPLLQEHIAEYEITSAKVIDYDSRRAALLKKIDKLKDLYVNDIITMDELKRDKEKYIKELENLPRNQEQKDLAPIRKLLKMDLDSIYQTLEPAERRQLWRSVIKEIQIDDHKNLKVIFL

SEQ ID NO: 8823 - protein, 447 aa, Unknown
  Description of Unknown: Integrase B8824 sequence
  PTHR30461:SF3,IPR036162,PS51737,IPR011109,PTHR30461, PS00397,PF00239,G3DSA:1.10.10.2600,IPR006119,SSF53041, cd00338,SM00857,IPR025827,IPR038109,PS51736, IPR006118,PF13408,G3DSA:3.40.50.1390,Coil
MSITNVAIYVRVSTDRQAKKGDSIDEQLSTCKAYIASKENMVLAGTYIDDGISGRKIKRGDFEQLLDDVRLGRVNLIIFTKLDRWFRSLRHYLNTQAVLEANHCDWLAVDQPYFDTTTPHGRAFVAQSMTFAELEAENDSVRIRDVFDYKYRQGEVLAGKAPLGFSIENKHLVPNQDAEKVLHIFQFYAACNSLNQTITHLESDMGIVMTQSNLKTAILKNKKYIGVFRDNDHYCPAIIPLDLFERVQELLAINVKISQKYNYIFSGLLRCAHCGHSFSGATRKIKKKTGGFYKYPLYKCHGAYPSKRCSNRKVVFESCIERYLIANIKPLLQEHIAEYEITSAKVIDYDSRRAALLRKIDKLKDLYVNDIITMDELKRDKEKYIKELENLPRNQEQKDLAPIQKLLKMDLDSIYQTLEPAERRQLWRSVIKEIQIDDHKNLKVIFL

SEQ ID NO: 8824 - protein, 447 aa, Unknown
  Description of Unknown: Integrase B8825 sequence
  SM00857,G3DSA:1.10.10.2600,IPR036162,PF13408,PS51737, IPR025827,G3DSA:3.40.50.1390,mobidb-lite,IPR006119,IPR038109, PF07508,IPR011109,SSF53041,PTHR30461,PS51736, cd00338,PF00239
MREIQLVTPNNRPILVRKRVCAYARVSTAKDAMLHSLSSQVSYYQKYIQAHKDWEFCGVYADEGLTGTKESRAQFQEMLKECRYGNIDIILTKSISRFARNTVDLLNTVRELKSLGIAVYFEEQNINTLSSDGELMLTILASYAQEESLSASENMKWSIRKGFENGELCCFRFMYGYRIERGSVTVCEEEAAIVQEVFDRFAKGESMLAIAKDLNARGISTHSKRQMRWSGKRIGKMLTNEKYAGNALLQKTYINNHLEKKRMVNRGELPKYYAEQTHPAIIDAQTYRLVQERIERNRGRHTVKIGYLKSAFTGKMFCGYCGEPVWRGKNNGRTIWGCRNARGKGVLTCHAASIRNDILEETCCSLFGLSTFDPTFIDQNVREIILYDNRLVFSMTDGREEKISWKNKSRSQSWTPEMKERARQRTMERLQNRRINDADSKGNTSDS

SEQ ID NO: 8825 - protein, 447 aa, Unknown
  Description of Unknown: Integrase B8826 sequence
  SM00857,G3DSA:1.10.10.2600,IPR036162,PF13408,IPR025827, G3DSA:3.40.50.1390,PS51737,IPR006119,IPR038109,PF07508, SSF53041,IPR011109,PTHR30461,Coil,PS51736, cd00338,PF00239
MGKMNVAYMRVSTEAQTEKYGLDVQRDKIQDLADKNNAKIERWYVDGGYSGSNIDRPEMQRLLDDARDGKISSVYVYKLDRMSRDAIDTLTLLYRTLPKYGVKIESVTEELRFETPMDKVMVGVNAIMGQYEREVIYMRTRAGMVERVKKGLWMGGGNQPYGYYYDRNDGILHPKEDEAENVRRMFEMYNSGMSCRSISEILGIKCEKVVRDVLRRKSNIGYIEYNGVLYKGLHEPIVDEDVFWNTQELIERRSNNYYLANKHILSGLCFCGKCGAKMRYKMWGSYFILECYSREGTKKNMVKSSHCDNKRNKASYIEKEVTDCFKKFIINVEPNSDRSENKELVKNEIKKSNEKLKRLYLLYSDSGNDVLFGVIKDEEKRLNSLKVKLEDEIRRENSNKESKIKRIRKMSDIWDELDTQEKNKILKECIEKIIITDDDIEIRFNIE

SEQ ID NO: 8826 - protein, 447 aa, Unknown
  Description of Unknown: Integrase B8827 sequence
  PTHR30461:SF3,IPR036162,PS51737,IPR011109,PTHR30461, PS00397,PF00239,G3DSA:1.10.10.2600,IPR006119,SSF53041, cd00338,SM00857,IPR025827,IPR038109,PS51736, IPR006118,PF13408,G3DSA:3.40.50.1390,Coil
MSITNVAIYVRVSTDRQAKKGDSIDEQLSTCKAYIASKENMVLAGTYIDDGISGRKIKRGDFEQLLDDVRLGRVNLIIFTKLDRWFRSLRHYLNTQAILEANHCDWLAVDQPYFDTTTPHGRAFVAQSMTFAELEAENDSVRIRDVFDYKYRQGEVLAGKAPLGFSIENKHLVPNQDAEKVLHIFQFYAACNSLNQTITHLESDMGIVMTQSNLKTAILKNKKYIGVFRDNDHYCPAIIPLDLFERVQELLAINVKISQKYNYIFSGLLRCAHCGHSFSGATRKIKKKAGGFYKYPLYKCHGAYPSKRCSNRKVIFESCIERYLIANIKPLLQEHIAEYEITSAKVIDYDSRRTALLKKIDKLKDLYINDIITMDELKRDKEKYIKELENLPRNQEQKDLTPIRKLLKMDLDSIYQTLEPAERRQLWRSVIKEIQIDDHKNLKVIFL

SEQ ID NO: 8827 - protein, 447 aa, Unknown
  Description of Unknown: Integrase B8828 sequence
  PTHR30461:SF3,IPR036162,PS51737,IPR011109,PTHR30461, PS00397,PF00239,G3DSA:1.10.10.2600,IPR006119,SSF53041, cd00338,SM00857,IPR025827,IPR038109,PS51736, IPR006118,PF13408,G3DSA:3.40.50.1390,PF07508,Coil
MNRLNVGYLRVSTEAQTEKYGLDLQKQKIIERANKDGTTIDRWYIDGGYSGSKLDRPDIQRLLEDVEFGIVKSVYVYKLDRMSRDTIDALTLLCRTLPKYGVKLISATEELRIDTPSDKFLTSVTAVVGQYERELIYMRTRAGMVERVKKGLWMGGGRIPYGYYYDRNDGILHIDEENAIKVRKAYELYLKGFSCQKISDVLGMSGDTIVHRALTNKVYLGYIFYKDKLYKGLHEPIIDQKTYDDVQRFMKKRSTNSFVGNKYMLSGLCYCGKCGARMRYKKWSQRYIMECYSRDGGKPYMVRDSKCDNRRINVEIIEQEVSDCFRRFIVNAKASERKESKKVATEKEIKKTTYKLKKLYNLYVDSESETLFSIIQQEEKKRKLLEKELEEAIREESSDTNVKIEEIKRISNIWDDLTTKEQNRILKECVEKIVITDGNIDIHFRII

SEQ ID NO: 8828 - protein, 447 aa, Unknown
  Description of Unknown: Integrase B8829 sequence
  PTHR30461:SF3,SM00857,IPR006118,G3DSA:1.10.10.2600,IPR036162, PF13408,IPR025827,G3DSA:3.40.50.1390,PS51737,IPR006119, IPR038109,IPR011109,SSF53041,PTHR30461,PS00397, PS51736,cd00338,PF00239
MSITNVAIYVRVSTDRQAKKGDSIDEQLSTCKNYIASKENMVLAGVYIDDGISGRKIKRGDFEQLLDDVRLGRVDLIIFTKLDRWFRSLRHYLNTQAILEVNHCDWLAVDQPYFDTTTPHGRAFVAQSMTFAELEAENDSVRIRDVFDYKYRQGEVLSGKVPLGYSIENKHLVPNQDADKALRIFQFYAECGSLNQTITHLESDMGIIMSQDNLKKSILKNKKYIGVFRDNDHYCPAIIPADLFDRVQELLAINVKSSQKYSYVFSGLLRCAHCGQAFSGFTQKAKKKAGGFYKYPYYKCHGAYPNKRCINRKMVPESYIEKYLLINVKDLLQEHIAEYEIASAKIVDYDSRRATLLKKIDKLKDLYINDIITMDELKMDKEKYMKELEDLPHNQNQKDLAPIKKLLKMDLDSIYKTLEPAERRQLWRSVIKEIQIDDHKNLKIIFL

SEQ ID NO: 8829 - protein, 447 aa, Unknown
  Description of Unknown: Integrase B8830 sequence
  PTHR30461:SF3,IPR036162,PS51737,IPR011109,PTHR30461, PS00397,PF00239,G3DSA:1.10.10.2600,IPR006119,SSF53041, cd00338,SM00857,IPR025827,IPR038109,PS51736, IPR006118,PF13408,G3DSA:3.40.50.1390,Coil
MSITNVAIYVRVSTDRQAKKGDSIDEQLSTCKAYIASKENMVLAGTYIDDGISGRKIKRGDFEQLLDDVRLGRVNLIIFTKLDRWFRSLRHYLNTQAVLEAKHCDWLAVDQPYFDTTTPHGRAFVAQSMTFAELEAENDSVRIRDVFDYKYRQGEVLSGKAPLGFSVENKHLVPNQDAEKVLHIFQFYAACNSLNQTTAHLESDMGIVMTQSNLKTAILKNKKYIGVFRDNDHYCPAIIPLDLFERVQELLAINVKISQKYNYIFSGLLRCAHCGHSFSGATRKIKKKTGGFYKYPFYKCHGAYPSKRCSNRKVMFESCIERYLIANIKPLLQEHIAEYEITSAKVIDYDSRRTALLKKIDKLKDLYINDIITMDELKRDKEKYIKELENLPRNQEQKDLTPIQKLLKMDLDSIYQTLEPVERRQLWRSVIKEIQIDDHKNLKVIFL

SEQ ID NO: 8830 - protein, 447 aa, Unknown
  Description of Unknown: Integrase B8831 sequence
  PTHR30461:SF3,IPR036162,PS51737,IPR011109,PTHR30461, PS00397,PF00239,G3DSA:1.10.10.2600,IPR006119,SSF53041, cd00338,SM00857,IPR025827,IPR038109,PS51736, IPR006118,PF13408,G3DSA:3.40.50.1390,Coil
MSITNVAIYVRVSTDRQAKKGDSIDEQLSTCKAYIASKENMVLAGTYIDDGISGRKIKRGDFEQLLDDVRLGRVNLIIFTKLDRWFRSLRHYLNTQAVLEANHCDWLAVDQPYFDTTTPHGRAFVAQSMTFAELEAENDSVRIRDVFDYKYRQGEVLAGKAPLGFSIENKHLVPNQDAEKVLHIFQFYATCNSLNQTITHLESDMGIVMTQSNLKTAILKNKKYIGVFRDNDHYCPAIIPLDLFERVQELLAINVKISQKYNYIFSGLLRCAHCGHSFSGATRKIKKKAGGFYKYPLYKCHGAYPSKRCSNRKVIFESCIERYLIANIKPLLQEHIAEYEITSAKVIDYDSRRTALLKKIDKLKDLYINDIITMDELKRDKEKYIKELENLPRNQEQKDLAPIRKLLNMDLDSIYQTLEPAERRQLWRSVIKEIQIDDHKNLKVIFL

SEQ ID NO: 8831 - protein, 447 aa, Unknown
  Description of Unknown: Integrase B8832 sequence
  PTHR30461:SF3,IPR036162,PS51737,IPR011109,PTHR30461, PS00397,PF00239,G3DSA:1.10.10.2600,IPR006119,SSF53041, cd00338,SM00857,IPR025827,IPR038109,PS51736, IPR006118,PF13408,G3DSA:3.40.50.1390,Coil
MSITNVAIYVRVSTDRQAKKGDSIDEQLSTCKNYIASKENMVLAGVYIDDGISGRKIKRGDFEQLLDDVRLGRVDLIIFTKLDRWFRSLRHYLNTQAILEVNHCDWLAVDQPYFDTTTPHGRAFVAQSMTFAELEAENDSVRIRDVFDYKYRQGEVLSGKVPLGYSIENKHLAPNQDAGKVLHIFQFYAECGSLNQTIAHLESDMGIIMSQDNLKKSILKNKKYIGAFRDNDHYCPAIIPVDLFERVQELLAINIKSSQKYSYVFSGLLRCAHCGQAFSGFTQKAKKKAGGFYKYPYYKCHGAYPNKRCINRKMVPESYIEKYLLINVKDLLQEHIAEYEIASAKIVDYDSQRATLLKKIDKLKDLYINDIITMDELKMDKEKYMKELEDLPRNQDQKDLAPIKKLLKMDLDSIYKTLEPEERRQLWRSVIKEIQIDDHKNLKIIFL

SEQ ID NO: 8832 - protein, 447 aa, Unknown
  Description of Unknown: Integrase B8833 sequence
  PTHR30461:SF3,IPR036162,PS51737,IPR011109,PTHR30461, PS00397,PF00239,G3DSA:1.10.10.2600,IPR006119,SSF53041, cd00338,SM00857,IPR025827,IPR038109,PS51736, IPR006118,PF13408,G3DSA:3.40.50.1390,Coil
MSITNVAIYVRVSTDRQAKKGDSIDEQLSTCKNYIASKENMVLAGVYIDDGISGRKIKRGDFEQLLDDVRLGRVDLIIFTKLDRWFRSLRHYLNTQAILEANHCDWLAVDQPYFDTTTPHGRAFVAQSMTFAELEAENDSVRIRDVFDYKYRQGEVLSGKVPLGYSIENKHLVLNQDADKALHIFQFYAECGSLNQTIAHLESDMGIIMSQDNLKKSILKNKKYIGAFRDNDHYCPAIIPVDLFERVQELLAINIKSSQKYSYVFSGLLRCAHCGQAFSGFTQKAKKKAGGFYKYPYYKCHGAYPNKRCINRKMVPESYIEKYLLINVKDLLQEHIAEYEIASAKIVDYDSRRATLLKKIDKLKDLYINDIITMDELKMDKEKYMKELEDLPRNQNQKDLAPIKKLLRMDLASIYKTLEPAERRQLWRSVIKEIQIDDHKNLKIIFL

SEQ ID NO: 8833 - protein, 447 aa, Unknown
  Description of Unknown: Integrase B8834 sequence
  PTHR30461:SF3,IPR036162,PS51737,IPR011109,PTHR30461, PS00397,PF00239,G3DSA:1.10.10.2600,IPR006119,SSF53041, cd00338,SM00857,IPR025827,IPR038109,PS51736, IPR006118,PF13408,G3DSA:3.40.50.1390,Coil
MSITNVAIYVRVSTDRQAKKGDSIDEQLSTCKAYIASKENMVLAGTYIDDGISGRKIKRGDFEQLLDDVRLGRVNLIIFTKLDRWFRSLRHYLNTQAILEANHCDWLAVDQPYFDTTTPHGRAFVAQSMTFAELEAENDSVRIRDVFDYKYRQGEVLAGKAPLGFSIENKHLVPNQDAEKVLHIFQFYAACNSLNQTITHLESDMGIVMTQSNLKTAILKNKKYIGVFRDNDHYCPAIIPLDLFERVQELLAINVKISQKYNYIFSGLLRCAHCGHSFSGATRKIKKKAGGFYKYPFYKCHGAYPSKRCSNRKVMFESCIERYLIANIKPLLQEHIAEYEITSAKVIDYDSRRTALLKKIDKLKDLYINDIITMDELKRDKEKYIKELENLPRNQEQKDLTPIRKLLKMDLDSIYQTLEPAERRQLWRSVIKEIQIDDHKNLKVIFL

SEQ ID NO: 8834 - protein, 447 aa, Unknown
  Description of Unknown: Integrase B8835 sequence
  SM00857,G3DSA:1.10.10.2600,IPR036162,PF13408,PS51737, IPR025827,PS51736,G3DSA:3.40.50.1390,IPR006119,IPR038109, PF07508,IPR011109,SSF53041,PTHR30461,mobidb-lite, cd00338,PF00239
MREIQLVTPNNRPILVRKRVCAYARVSTAKDAMLHSLSSQVSYYQKYIQAHKDWEFCGVYADEGLTGTKESRAQFQEMLKECRYGNIDIILTKSISRFARNTVDLLNTVRELKSLGIAVYFEEQNINTLSSDGELMLTILASYAQEESLSASENMKWSIRKGFEHGELCCFRFMYGYRIERGSVTVCEEEAAIVQEVFDRFAKGESMLAIAKNLNARGISTHSKRQMRWSGKRIGKMLINEKYTGNALLQKTYINNHLEKKRMVNRGELPKYYAEQTHPAIIDAQTYRLVQERIERNRGRHTVKIGYLKSAFTGKMFCGYCGEPVWRGKNNGRTIWGCRNARGKGVLTCHAASIRNDILEETSCSLFGLSTFDPTFIEQNVRKIILYDNRLVFSMADGREEKISWKNKSRSQSWTPEMKEHARQRTMERLQNRRINDADSKGNTSDS

SEQ ID NO: 8835 - protein, 447 aa, Unknown
  Description of Unknown: Integrase B8836 sequence
  PTHR30461:SF3,IPR036162,PS51737,IPR011109,PTHR30461, PS00397,PF00239,G3DSA:1.10.10.2600,IPR006119,SSF53041, cd00338,SM00857,IPR025827,IPR038109,PS51736, IPR006118,PF13408,G3DSA:3.40.50.1390,Coil
MSITNVAIYVRVSTDRQAKKGDSIDEQLSTCKNYIASKENMVLAGVYIDDGISGRKIKRGDFEQLLDDVRLGRVDLIIFTKLDRWFRSLRHYLNTQAILEANHCDWLAVDQPYFDTTTPHGRAFVAQSMTFAELEAENDSVRIRDVFDYKYRQGEVLSGKVPLGYSIENKHLVPNHGADKVLHIFQFYAECGSLNQTIAHLESDIGIIMSQDNLKKSILKNKKYIGVFRDNDHYCPAIIPVDLFERVQELLAINIKSSQKYSYVFSGLLRCAHCGQAFSGFTQKAKKKAGGFYKYPYYKCHGAYPNKRCINRKMVPESYIEKYLLINVKDLLQEHIAEYEIASAKIVDYDSRRATLLKKIDKLKDLYINDIITMDELKMDKEKYMKELEDLPRNQNQKDLAPIKKLLKMDLDSIYKTLEPAERRQLWRSVIKEIQIDDHKNLKIIFL

SEQ ID NO: 8836 - protein, 447 aa, Unknown
  Description of Unknown: Integrase B8837 sequence
  SM00857,G3DSA:1.10.10.2600,IPR036162,PF13408,IPR025827, G3DSA:3.40.50.1390,mobidb-lite,PS51737,IPR006119,IPR038109, PF07508,IPR011109,SSF53041,PTHR30461,PS51736, cd00338,PF00239
MREIQLVTPNNRPILVRKRVCAYARVSTAKDAMLHSLSSQVSYYQKYIQAHKDWEFCGVYADEGLTGTKESRAQFQEMLKECRYGNIDIILTKSISRFARNTVDLLNTVRELKSLGIAVYFEEQNLNTLSSDGELMLTILASYAQEESLSASENMKWSIRKGFEHGELCCFRFMYGYRIERGSVTVCEEEAAIVQEVFDRFAKGESMLAIAKNLNARGISTHSKRQMRWSGKRIGKMLTNEKYTGNALLQKTYINNHLEKKRMVNRGELPKYYAEQTHPAIIDAQTYRLVQERIERNRGRHTVKIGYLKSAFTGKMFCGYCGEPVWRGKNNGRTIWGCRNARGKGVLTCHAASIRNDILEETCCSLFGLSTFDPTFIEQNVRKIILYDNRLVFSMADGREEKISWKNKSRSQSWTPEMKEHARQRTMERLQNRRINDADSKGNTSDS

SEQ ID NO: 8837 - protein, 447 aa, Unknown
  Description of Unknown: Integrase B8838 sequence
  PTHR30461:SF3,IPR036162,PS51737,IPR011109,PTHR30461, PS00397,PF00239,G3DSA:1.10.10.2600,IPR006119,SSF53041, cd00338,SM00857,IPR025827,IPR038109,PS51736, IPR006118,PF13408,G3DSA:3.40.50.1390,Coil
MSITNVAIYVRVSTDRQAKKGDSIDEQLSTCKNYIVSKENMVLAGVYIDDGISGRKIKRGDFEQLLDDVRLGRVDLIIFTKLDRWFRSLRHYLNTQAILEANHCDWLAVDQPYFDTTTPHGRAFVAQSMTFAELEAENDSVRIRDVFDYKYRQGEVLSGKVPLGYSIENKHLVPNHDADKVLHIFQFYAECGSLNQTITHLESDMGIIMSQDNLKKSILKNKKYIGVFRDNDHYCPAIIPADLFDRVQELLAINVKSSQKYSYVFSGLLRCAHCGQAFSGFTQKAKKKAGGFYKYPYYKCHGAYPNKRCINRKMVSESYIEKYLLINVKDLLQEHIAEYEIASAKIVDYDSRRATLLKKIDKLKDLYINDIITMDELKMDKEKYMKELEDLPRNQDQKDLAPIKKLLKMDLDSIYKTLELAERRQLWRSVIKEIQIDDHKNLKIIFL

SEQ ID NO: 8838 - protein, 447 aa, Unknown
  Description of Unknown: Integrase B8839 sequence
  PTHR30461:SF3,IPR036162,PS51737,IPR011109,PTHR30461, PS00397,PF00239,G3DSA:1.10.10.2600,IPR006119,SSF53041, cd00338,SM00857,IPR025827,IPR038109,PS51736, IPR006118,PF13408,G3DSA:3.40.50.1390,Coil
MSITNVAIYVRVSTDRQAKKGDSIDEQLSTCKNYIASKENMVLAGVYIDDGISGRKIKRGDFEQLLDDVRLGRVDLIIFTKLDRWFRSLRHYLNTQAILEANHCDWLAVDQPYFDTTTPHGRAFVAQSMTFAELEAENDSVRIRDVFDYKYRQGEVLSGKVPLGYSIENKHLVLNQDADKALHIFQFYAECGSLNQTIAHLESDMGIIMSQDNLKKSILKNKKYIGAFRDNDHYCPAIIPVDLFERVQELLAINIKSSQKYSYVFSGLLRCAHCGQAFSGFTQKAKKKAGGFYKYPYYKCHGAYPNKRCINRKMVPESYIEKYLLINVKDLLQEHIAEYEIASAKIVDYDSRRATLLKKIDKLKDLYINDIITMDELKMDKEKYMKELEDLPRNQNQKDLAPIKKLLKMDLDSIYKTLEPAERRQLWRSVIKEIQIDDHKNLKIIFL

SEQ ID NO: 8839 - protein, 447 aa, Unknown
  Description of Unknown: Integrase B8840 sequence
  PTHR30461:SF3,IPR036162,PS51737,IPR011109,PTHR30461, PS00397,PF00239,G3DSA:1.10.10.2600,IPR006119,SSF53041, cd00338,SM00857,IPR025827,IPR038109,PS51736, IPR006118,PF13408,G3DSA:3.40.50.1390,Coil
MSITNVAIYVRVSTDRQAKKGDSIDEQLSTCKAYIASKENMVLAGTYIDDGISGRKIKRGDFEQLLDDVRLGRVNLIIFTKLDRWFRSLRHYLNTQAVLEANHCDWLAVDQPYFDTTTPHGRAFVAQSMTFAELEAENDSVRIRDVFDYKYRQGEVLAGKAPLGFSIENKHLVPNQDAEKVLHIFQFYAACNSLNQTITHLESDMGIVMTQSNLKTAILKNKKYIGVFRDNDHYCPAIIPLDLFERVQELLAINVKISQKYNYIFSGLLRCAHCGHSFSGATRKIKKKAGGFYKYPLYKCHGAYPSKRCSNRKVVFESCIERYLIANIKPLLQEHIAEYEITSAKVIDYDSRRAALLRKIDKLKDLYVNDIITMDELKRDKEKYIKELENLPHNQEQKDLAPIQKLLKMDLDSIYQTLEPAERRQLWRSVIKEIQIDDHKNLKVIFL

SEQ ID NO: 8840 - protein, 447 aa, Unknown
  Description of Unknown: Integrase B8841 sequence
  PTHR30461:SF3,IPR036162,PS51737,IPR011109,PTHR30461, PS00397,PF00239,G3DSA:1.10.10.2600,IPR006119,SSF53041, cd00338,SM00857,IPR025827,IPR038109,PS51736, IPR006118,PF13408,G3DSA:3.40.50.1390,PF07508,Coil
MGKMNVGYLRVSTENQTEKYGLDVQRGAIEDYCKKNNITIDKWYVDGGYSGKKMQRPAMLELLSDCEKGIIDTVYTYKLDRMSRDTIDTLNLLYNTLPNYDVKIVSMSEQISTKTPMDKVFVTLNAAMNQYEREIIRTRMTAGLQERVKGGKWRGGGNIPYGYRYDRNDGLLHIYEPEAAVVRKVYDLYIDGNSCLSIPDLIGVKKTERAIILILKNTTYTGVVKYRGVEYPGNHEAIISKEKFDLVQRIMEKRSKKIKPVSNNLLTGLIYCGNCGARMRYQKWGKYYYKLICYSYQGCKKYLIKDPNCDNSGIRADTVESEVEDCFKRFAISSGSDDNDEKSKIETLRESLSSIGKKLKRLYVLYADSDSDALIDTISELESQKKTLESELESEIERSRKKSQNNYTHIAEIWDELSTKDKNSILKMCIDKILIYRDNIEIHFITN

SEQ ID NO: 8841 - protein, 447 aa, Unknown
  Description of Unknown: Integrase B8842 sequence
  PTHR30461:SF3,IPR036162,PS51737,IPR011109,PTHR30461, PS00397,PF00239,G3DSA:1.10.10.2600,IPR006119,SSF53041, cd00338,SM00857,IPR025827,IPR038109,PS51736, IPR006118,PF13408,G3DSA:3.40.50.1390,PF07508,Coil
MNKLNVGYLRVSTEAQTEKYGLDLQKQKIIERANKDGTTIDRWYIDGGYSGSKLDRPDIQRLLEDVEFGIVKSVYVYKLDRMSRDTIDALTLLCRTLPKYGVKLISATEELRIDTPSDKFLTSVTAVVGQYERELIYMRTRAGMVERVKKGLWMGGGRIPYGYYYDRNDGILHVKSGESEKVIEAYELYLKGYSCQRISDLLDFSCDKHVKNILTSKVYLGYIFYKGKYYKGLHEPIVSEKMFNSVHIFMKKRSSNAYIGNKFMLSGLCYCGKCGARMRYKKWGNCHIMECYSRDGGKQRMVRDPNCKNLRMDAKMIEQEVSDCFRRFIVNVKAEEKKENQKSIIEKKIKKSIDKLKKLYALYGEGDSDTLLSVIQEEEKRQKSLKTELEESIREESVDSSVKIENIQRVSTIWDTLTPKEQNKILKECVEKVVITDGDIDIHFNIS

SEQ ID NO: 8842 - protein, 447 aa, Unknown
  Description of Unknown: Integrase B8843 sequence
  PTHR30461:SF3,IPR036162,PS51737,IPR011109,PTHR30461, PS00397,PF00239,G3DSA:1.10.10.2600,IPR006119,SSF53041, cd00338,SM00857,IPR025827,IPR038109,PS51736, IPR006118,PF13408,G3DSA:3.40.50.1390,Coil
MSITNVAIYVRVSTDRQAKKGDSIDEQLSTCKAYIASKENMVLAGTYIDDGISGRKIKRGDFEQLLDDVRLGRVNLIIFTKLDRWFRSLRHYLNTQAVLEANHCDWLAVDQPYFDTTTPHGRAFVAQSMTFAELEAENDSVRIRDVFDYKYRQGEVLAGKAPLGFSIENKHLVPNQDAEKVLHIFQFYAACNSLNQTITHLESDMGIVMTQSNLKTAILKNKKYIGVFRDNDHYCPAIIPLDLFERVQELLAINVKISQKYNYIFSGLLRCAHCGHSFSGATRKIKKKAGGFYKYPLYKCHGAYPSKRCSNRKVIFESCIERYLIANIKPLLQEHIAEYEITSAKVIDYDSRRAALLKKIDKLKDLYVNDIITMDELKRDKEKYIKELENLPRNQEQKDLAPIRKLLKMDLDSIYQTLEPAERRQLWRSVIKEIQIDDHKNLKVIFL

SEQ ID NO: 8843 - protein, 447 aa, Unknown
  Description of Unknown: Integrase B8844 sequence
  PTHR30461:SF3,SM00857,IPR006118,IPR036162,PF13408, PS51737,G3DSA:3.40.50.1390,IPR025827,IPR006119,SSF53041, IPR011109,PF00239,PTHR30461,PS00397,PS51736, Coil,cd00338
MEGKKRAAIYVRVSTAEQRDHGLSVDSQIDALQKYCRENGLEVAGIYNDAGISARKKYKARPALLQLIEDCQNKKVDIILFTKLDRWFRSVADYYEVQSQLDAAKVPWRAIWEDYETETSAGVFKVNIMLSIAQAESDRTSERIRAVNEYRKSQGYIIVGKMPLGYIRTSASTIDFDPKTKDAMQTFFDTYLNTYSPVQAMDAAAEKGLKMSRKTAHFLLDKEPYYGTYYGVSVPGYITPAQHELIQQARQHYPRQPKADRVYIFTGLIFCASCGARMGSKCTCYTSYGKPSEKLYYQCRMRTVRRGECKNAAFIMEHNLESYMIDHLEELIVDYNASVQKLAAKAKSTEGKIEKIKGRLERLKDIYLDGDMSRAEYLEKTKELKAQLAQLAELESLATPALPVSQMPDNWREIYEQLSRQGKRDFWHRVVRRIEIKRHSVDKVYFV

SEQ ID NO: 8844 - protein, 447 aa, Unknown
  Description of Unknown: Integrase B8845 sequence
  PTHR30461:SF3,IPR036162,PS51737,IPR011109,PTHR30461, PS00397,PF00239,G3DSA:1.10.10.2600,IPR006119,SSF53041, cd00338,SM00857,IPR025827,IPR038109,PS51736, IPR006118,PF13408,G3DSA:3.40.50.1390,Coil
MSITNVAIYVRVSTDRQAKKGDSIDEQLSTCKAYIASKENMVLAGTYIDDGISGRKIKRGDFEQLLDDVRLGRVNLIIFTKLDRWFRSLRIQIVSQAVLEANHCDWLAVDQPYFDTTTPHGRAFVAQSMTFAELEAENDSVRIRDVFDYKYRQGEVLAGKAPLGFSIENKHLVPNQDAEKVLHIFQFYAACNSLNQTITHLESDMGIVMTQSNLKTAILKNKKYIGVFRDNDHYCPAIIPLDLFERVQELLAINVKISQKYNYIFSGLLRCAHCGHSFSGATRKIKKKAGGFYKYPLYKCHGAYPSKRCSNRKVIFESCIERYLIANIKPLLQEHIAEYEITSAKVIDYDSRRTALLKKIDKLKDLYINDIITMDELKRDKEKYIKELENLPRNQEQKDLTPIRKLLKMDLDSIYQTLEPAERRQLWRSVIKEIQIDDHKNLKVIFL

SEQ ID NO: 8845 - protein, 447 aa, Unknown
  Description of Unknown: Integrase B8846 sequence
  PTHR30461:SF3,IPR036162,PS51737,IPR011109,PTHR30461, PS00397,PF00239,G3DSA:1.10.10.2600,IPR006119,SSF53041, cd00338,SM00857,IPR025827,IPR038109,PS51736, IPR006118,PF13408,G3DSA:3.40.50.1390,PF07508,Coil
MNKLNVGYLRVSTEAQTEKYGLDLQKQKIIERANKDGATIDRWYIDGGYSGSKLDRPDIQRLLEDVEFGIVKSVYVYKLDRMSRDTIDALTLLCRTLPKYGVKLISATEELRIDTPSDKFLTSVTAVVGQYERELIYMRTRAGMVERVKKGLWMGGGRIPYGYYYDRNDGILHVKSGESEKVIEAYELYLKGYSCQRISDLLDFSCDKHVKNILTSKVYLGYIFYKGKYYKGLHEPIVSEKMFNSVHIFMKKRSSNAYIGNKFMLSGLCYCGKCGARMRYKKWGNCHIMECYSRDGGKQRMVRDPNCKNLRMDAKMIEQEVSDCFRRFIVNVKAEEKKENQKSIIEKKIKKSIDKLKKLYALYGEGDSDTLLSVIQEEEKRQKSLKTELEESIREESVDSSVKIENIQRVSTIWDTLTPKEQNKILKECVEKVVITDGDIDIHFNIS

SEQ ID NO: 8846 - protein, 447 aa, Unknown
  Description of Unknown: Integrase B8847 sequence
  PTHR30461:SF3,IPR036162,PS51737,IPR011109,PTHR30461, PS00397,PF00239,G3DSA:1.10.10.2600,IPR006119,SSF53041, cd00338,SM00857,IPR025827,IPR038109,PS51736, IPR006118,PF13408,G3DSA:3.40.50.1390,Coil
MSITNVAIYVRVSTDRQAKKGDSIDEQLSTCKNYIASKENMVLAGVYIDDGISGRKIKRGDFEQLLDDVRLGRVDLIIFTKLDRWFRSLRHYLNTQAILEANHCDWLAVDQPYFDTTTPHGRAFVAQSMTFAELEAENDSVRIRDVFDYKYRQGEVLSGKVPLGYSIENKHLVPNHDVDKVLHIFQFYAECGSLNQTIAHLESDMGIIMSQDNLKKSILKNKKYIGAFRDNDHYCPAIIPVDLFERVQELLAINIKSSQKYSYVFSGLLRCAHCGQAFSGFTQKAKKKAGGFYKYPYYKCHGAYPNKRCINRKMVPESYIEKYLLINVKDLLQEHIAEYEIASAKIVDYDSRRATLLKKIDKLKDLYINDIITMDELKMDKEKYMKELEDLPRNQDQKDLAPIKKLLKMDLDSIYKTLEPAERRQLWRSVIKEIQIDDHKNLKIIFL

SEQ ID NO: 8847 - protein, 447 aa, Unknown
  Description of Unknown: Integrase B8848 sequence
  PTHR30461:SF3,IPR036162,PS51737,IPR011109,PTHR30461, PS00397,PF00239,G3DSA:1.10.10.2600,IPR006119,SSF53041, cd00338,SM00857,IPR025827,IPR038109,PS51736, IPR006118,PF13408,G3DSA:3.40.50.1390,Coil
MSITNVAIYVRVSTDRQAKKGDSIDEQLSTCKAYIASKENMVLAGTYIDDGISGRKIKRGDFEQLLDDVRLGRVNLIIFTKLDRWFRSLRHYLNTQAVLEANHCDWLAVDQPYFDTTTPHGRAFVAQSMTFAELEAENDSVRIRDVFDYKYRQGEVLSGRAPLGFSVENKHLVPNQDAEKVLHIFQFYATCNSLNQTIAHLESDMGIVMTQSNLKTAILKNKKYIGVFRDNDHYCPAIIPLDLFERVQELLSINVKISQKYNYIFSGLLRCTHCGHSFSGATRKIKKKTGGFYKYPFYKCHGAYPSKRCSNRKVMFESCIERYLIANIKPLLQEHIAEYEITSAKVIDYDSRRTALLKKIDKLKDLYINDIITMDELKRDKEKYIKELENLPRNQEQKDLTPIRKLLKMDLDSIYQTLEPAERRQLWRSVIKEIQIDDHKNLKVIFL

SEQ ID NO: 8848 - protein, 447 aa, Unknown
  Description of Unknown: Integrase B8849 sequence
  PTHR30461:SF3,IPR036162,PS51737,IPR011109,PTHR30461, PS00397,PF00239,G3DSA:1.10.10.2600,IPR006119,SSF53041, cd00338,SM00857,IPR025827,IPR038109,PS51736, IPR006118,PF13408,G3DSA:3.40.50.1390,Coil
MSITNVAIYVRVSTDRQAKKGDSIDEQLSTCKAYIASKENMVLAGTYIDDGISGRKIKRGDFEQLLDDVRLGRVNLIIFTKLDRWFRSLRHYLNTQAILEANHCDWLAVDQPYFDTTTPHGRAFVAQSMTFAELEAENDSVRIRDVFDYKYRQGEVLAGKAPLGFSVENKHLVPNQDAEKVLHIFQFYAACNSLNQTITHLESDMGIVMTQSNLKTAILKNKKYIGVFRDNDHYCPAIIPLDLFERVQELLAINVKISQKYNYIFSGLLRCTHCGHSFSGATRKIKKKAGGFYKYPLYKCHGAYPSKRCSNRKVIFESCIERYLIANIKPLLQEHIAEYEITSAKVIDYDSRRAALLRKIDKLKDLYINDIITMDELKRDKEKYIKELENLPRNQEQKDLAPIRKLLKMDLESIYQTLEPAERRQLWRSVIKEIQIDDHKNLKVIFL

SEQ ID NO: 8849 - protein, 447 aa, Unknown
  Description of Unknown: Integrase B8850 sequence
  PTHR30461:SF3,IPR036162,PS51737,IPR011109,PTHR30461, PS00397,PF00239,G3DSA:1.10.10.2600,IPR006119,SSF53041, cd00338,SM00857,IPR025827,IPR038109,PS51736, IPR006118,PF13408,G3DSA:3.40.50.1390,Coil
MSITNVAIYVRVSTDRQAKKGDSIDEQLSTCKAYIASKENMVLAGTYIDDGISGRKIKRGDFEQLLDDVRLGRVNLIIFTKLDRWFRSLRHYLNTQAILEANHCDWLAVDQPYFDTTTPHGRAFVAQSMTFAELEAENDSVRIRDVFDYKYRQGEVLAGKAPLGFSVEKKHLVPNQDAEKVLHIFQFYAACNSLNQTITHLESDMGIVMTQSNLKTAILKNKKYIGVFRDNDHYCPAIIPLDLFERVQELLAINVKISQKYNYIFSGLLRCAHCGHSFSGATRKIKKKAGGFYKYPLYKCHGAYPSKRCSNRKVIFESCIERYLIANIKPLLQEHIAEYEITSAKVIDYDSRRAALLRKIDKLKDLYVNDIITMDELKRDKEKYIKELENLPRNQEQKDLAPIRKLLKMDLDSIYQTLEPAERRQLWRSVIKEIQIDDHKNLKVIFL

SEQ ID NO: 8850 - protein, 447 aa, Unknown
  Description of Unknown: Integrase B8851 sequence
  PTHR30461:SF3,IPR036162,PS51737,IPR011109,PTHR30461, PS00397,PF00239,G3DSA:1.10.10.2600,IPR006119,SSF53041, cd00338,SM00857,IPR025827,IPR038109,PS51736, IPR006118,PF13408,G3DSA:3.40.50.1390,Coil
MSITNVAIYVRVSTDRQAKKGDSIDEQLSTCKAYIASKENMVLAGTYIDDGISGRKIKRGDFEQLLDDVRLGRVNLIIFTKLDRWFRSLRHYLNTQAVLEANHCDWLAVDQPYFDTTTPHGRAFVAQSMTFAELEAENDSVRIRDVFDYKYRQGEVLAGKAPLGFSIENKHLVPNQDAEKVLHIFQFYAACNSLNQTITHLESDMGIVMTQSNLKTAILKNKKYIGVFRDNDHYCPAIIPLDLFERVQELLAINVKISQKYNYIFSGLLRCAHCGHSFSGATRKIKKKAGGFYKYPLYKCHGAYPSKRCSNRKVIFESCIERYLIANIKPLLQEHIAEYEITSAKVIDYDSRRTALLKKIDKLKDLYINDIITMDELKRDKEKYIKELENLPRNQEQKDLTPIRKLLKMDLDSIYQTLEPAERRQLWRSVIKEIQIDDHKNLKVIFL

SEQ ID NO: 8851 - protein, 447 aa, Unknown
  Description of Unknown: Integrase B8852 sequence
  PTHR30461:SF3,IPR036162,PS51737,IPR011109,PTHR30461, PS00397,PF00239,G3DSA:1.10.10.2600,IPR006119,SSF53041, cd00338,SM00857,IPR025827,IPR038109,PS51736, IPR006118,PF13408,G3DSA:3.40.50.1390,Coil
MSITNVAIYVRVSTDRQAKKGDSIDEQLSTCKNYIDSKENMVLAGTYIDDGISGRKIKRGDFEQLLDDVRLGRVNLIIFTKLDRWFRSLRHYLNTQAVLEANHCDWLAVDQPYFDTTTPHGRAFVAQSMTFAELEAENDSVRIRDVFDYKYRQGEVLAGKAPLGFSIENKHLVPNQDAEKVLHIFQFYAACNSLNQTITHLESDMGIVMTQSNLKTAILKNKKYIGVFRDNDHYCPAIIPLDLFERVQELLAINVKISQKYNYIFSGLLRCAHCGHSFSGATRKIKKKAGGFYKYPLYKCHGAYPSKRCSNRKVIFESCIERYLIANIKPLLQEHIAEYEITSAKVIDYDSRRAALLKKIDKLKDLYINDIITMDELKRDKEKYIKELENIPRNQEQKDLAPIRKLLKMDLDSIYQTLEPAERRQLWRSVIKEIQIDDHKNLKVIFL

SEQ ID NO: 8852 - protein, 447 aa, Unknown
  Description of Unknown: Integrase B8853 sequence
  PTHR30461:SF3,IPR036162,PS51737,IPR011109,PTHR30461, PS00397,PF00239,G3DSA:1.10.10.2600,IPR006119,SSF53041, cd00338,SM00857,IPR025827,IPR038109,PS51736, IPR006118,PF13408,G3DSA:3.40.50.1390,PF07508,Coil
MGKMNVGYLRVSTENQTEKYGLDVQRGAIEDYCKKNNITIDKWYVDGGYSGKKMQRPAMLELLSDCEKGIIDTVYTYKLDRMSRDTIDTLNLLYNTLPNYDVKIVSMSEQISTKTPMDKVFVTLNAAMNQYEREIIRTRMTAGLQERVKGGKWRGGGNIPYGYRYDRNDGLLHIYEPEAAVVRKVYDLYIDGNSCLSIPDLIGVKKTERAIILILKNTTYTGVVKYRGVEYPGNHEAIISKEKFDLVQRIMEKRSKKIKPVSNNLLTGLIYCGNCGARMRYQKWGKYYYKLICYSYQGCKKYLIKDPNCDNSGIRADTVESEVEDCFKRFAISSGSDDNDEKSKIETIRESLSSIGKKLKRLYVLYADSDSDALIETISELESQKKTLESELESEIERSRKKSQNNYTHIAEIWDELSTKDKNSILKMCIDKILIYRDNIEIHFITN

SEQ ID NO: 8853 - protein, 447 aa, Unknown
  Description of Unknown: Integrase B8854 sequence
  PTHR30461:SF3,IPR036162,PS51737,IPR011109,PTHR30461, PS00397,PF00239,G3DSA:1.10.10.2600,IPR006119,SSF53041, cd00338,SM00857,IPR025827,IPR038109,PS51736, IPR006118,PF13408,G3DSA:3.40.50.1390,Coil
MCQKIVVTLPNNLRIRVALYIRVSTEEQAKHGLSLADQREALIAYAAAHGMEVVGIYEDAGISARKPYKKRPALMRLLDDCRAGKIDTILFVKLDRWFRNVAGYYAVQEVLDKNHVAWQAIREDYETRTASGRLKVNIMLSVAQDEADRTSERIKAINEGKRAKGQPTNGRTPIGIKTENRAYVIDEETADIARDMFLAFIRLQSVLALRRYMAETWGVRRSYNKYKQALSNHLYIGEAFGIENALPPLIDRKTFDLAGELLQRRSQRNAGTDDRVYLFSGLLRCRECGRTMQSETVKKVYTYYRCRTHMLDPADCPHALRIREDVLEEYLLKEITGIAERYYSKAKGAQKKTAKTAEQIRRKMQKLKELYLSDLIELDDYRRDYTELKQQLSQAEPQEEKAFDIGTLRRGLEAYPGLDRQGKKEFWTRTIKRLEADNNGAFFVTPV

SEQ ID NO: 8854 - protein, 447 aa, Unknown
  Description of Unknown: Integrase B8855 sequence
  PTHR30461:SF3,IPR036162,PS51737,IPR011109,PTHR30461, PS00397,PF00239,G3DSA:1.10.10.2600,IPR006119,SSF53041, cd00338,SM00857,IPR025827,IPR038109,PS51736, IPR006118,PF13408,G3DSA:3.40.50.1390,Coil
MSITNVAIYVRVSTDRQAKKGDSIDEQLSTCKAYIASKENMVLAGTYIDDGISGRKIKRGDFEQLLDDVRLGRVNLIIFTKLDRWFRSLRHYLNTQAVLEANHCDWLAVDQPYFDTTTPHGRAFVAQSMTFAELEAENDSVRIRDVFDYKYRQGEVLAGKAPLGFSIENKHLVPNQDAEKVLHIFQFYAACNSLNQTITHLESDMGIVMTQSNLKTAILKNKKYIGVFRDNDHYCPAIIPLDLFERVQELLAINVKISQKYNYIFSGLLRCAHCGHSFSGATRKIKKKAGGFYKYPLYKCHGAYPSKRCSNRKVIFESCIERYLIANIKPLLQEHIAEYEITSAKVIDYDSRRAALLRKIDKLKDLYVNDIITMDELKRDKEKYIKELENLPRNQEQKDLAPIRKLLKMDLESIYQTLEPAERRQLWRSVIKEIQIDDHKNLKVIFL

SEQ ID NO: 8855 - protein, 447 aa, Unknown
  Description of Unknown: Integrase B8856 sequence
  PTHR30461:SF3,IPR036162,PS51737,IPR011109,PTHR30461, PS00397,PF00239,G3DSA:1.10.10.2600,IPR006119,SSF53041, cd00338,SM00857,IPR025827,IPR038109,PS51736, IPR006118,PF13408,G3DSA:3.40.50.1390,Coil
MSITNVAIYVRVSTDRQAKKGDSIDEQLSTCKAYIASKENMVLAGTYIDDGISGRKIKRGDFEQLLDDVRLGRVNLIIFTKLDRWFRSLRHYLNTQAILEANHCDWLAVDQPYFDTTTPHGRAFVAQSMTFAELEAENDSVRIRDVFDYKYRQGEVLAGKAPLGFSIENKHLVPNQDAEKVLHIFQFYAACNSLNQTITHLESDMGIVMTQSNLKTAILKNKKYIGVFRDNDHYCPAIIPLDLFERVQELLAINVKISQKYNYIFSGLLRCAHCGHSFSGATRKIKKKAGGFYKYPLYKCHGAYPSKRCSNRKVIFESCIERYLIANIKPLLQEHIAEYEITSAKVIDYDSRRTALLKKIDKLKDLYINDIITMDELKRDKEKYIKELENLPRNQEQKDLAPIRKLLKMDLESIYQTLEPAERRQLWRSVIKEIQIDDHKNLKVIFL

SEQ ID NO: 8856 - protein, 447 aa, Unknown
  Description of Unknown: Integrase B8857 sequence
  PTHR30461:SF3,IPR036162,PS51737,IPR011109,PTHR30461, PS00397,PF00239,G3DSA:1.10.10.2600,IPR006119,SSF53041, cd00338,SM00857,IPR025827,IPR038109,PS51736, IPR006118,PF13408,G3DSA:3.40.50.1390,Coil
MSITNVAIYVRVSTDRQAKKGDSIDEQLSTCKNYIDSKENMVLAGTYIDDGISGRKIKRGDFEQLLDDVRLGRIDLIIFTKLDRWFRSLRHYLNTQAILEVNHCDWLAVDQPYFDTTTPHGRAFVAQSMTFAELEAENDSVRIRDVFDYKYRQGEVLAGKAPLGFSIENKHLVPNQDAEKVLHIFQFYAACNSLNQTITHLESDMGIVMTQSNLKTAILKNKKYIGVFRDNDHYCPAIIPLDLFERVQELLAINVKISQKYNYIFSGLLRCAHCGHSFSGATRKIKKKAGGFYKYPLYKCHGAYPSKRCSNRKVIFESCIERYLIANIKPLLQEHIAEYEITSAKVIDYDSRRAALLKKIDKLKDLYVNDIITMDELKRDKEKYIKELENLPRNQEQKDLAPIRKLLKMDLDSIYQTLEPAERRQLWRSVIKEIQIDDHKNLKVIFL

SEQ ID NO: 8857 - protein, 447 aa, Unknown
  Description of Unknown: Integrase B8858 sequence
  PTHR30461:SF3,IPR036162,PS51737,IPR011109,PTHR30461, PS00397,PF00239,G3DSA:1.10.10.2600,IPR006119,SSF53041, cd00338,SM00857,IPR025827,IPR038109,PS51736, IPR006118,PF13408,G3DSA:3.40.50.1390,Coil
MSITNVAIYVRVSTDRQAKKGDSIDEQLSTCKAYIASKENMVLAGTYIDDGISGRKIKRGDFEQLLDDVRLGRVNLIIFTKLDRWFRSLRHYLNTQAILEANHCDWLAVDQPYFDTTTPHGRAFVAQSMTFAELEAENDSVRIRDVFDYKYRQGEVLAGKAPLGFSIENKHLVPNQDAEKVLHIFQFYAACNSLNQTITHLESDMGIVMTQSNLKTAILKNKKYIGVFRDNDHYCPAIIPLDLFERVQELLAINVKISQKYNYIFSGLLRCAHCGHSFSGATRKIKKKAGGFYKYPLYKCHGAYPSKRCSNRKVIFESCIERYLIANIKPLLQEHIADYEITSAKVIDYDSRRAALLRKIDKLKDLYVNDIITMDELKRDKEKYIKELENLPRNQEQKDLAPIRKLLKMDLDSIYQTLEPAERRQLWRSVIKEIQIDDHKNLKVIFL

SEQ ID NO: 8858 - protein, 447 aa, Unknown
  Description of Unknown: Integrase B8859 sequence
  PTHR30461:SF3,IPR036162,PS51737,IPR011109,PTHR30461, PS00397,PF00239,G3DSA:1.10.10.2600,IPR006119,SSF53041, cd00338,SM00857,IPR025827,IPR038109,PS51736, IPR006118,PF13408,G3DSA:3.40.50.1390,Coil
MSITNVAIYVRVSTDRQAKKGDSIDEQLSTCKNYIVSKENMVLAGVYIDDGISGRKIKRGDFEQLLDDVRLGRVDLIIFTKLDRWFRSLRHYLNTQAILEANHCDWLAVDQPYFDTTTPHGRAFVAQSMTFAELEAENDSVRIRDVFDYKYRQGEVLSGKVPLGYSIDNKHLVLNQDADKALHIFQFYAECGSLNQTILHMERDMGIIMTQDNLKKAILKNKKYTGVFRDNDHYCPAIVPADLFERVQELLAINIKSSQKYSYVFSGLLRCAHCGQAFSGFTQKAKKKAGGFYKYPYYKCHGAYPNKRCINRKMVPESYIEKYLLINVKDLLQEHIAEYEIASAKIVDYDSRRATLLKKIDKLKDLYINDIITMDELKMDKEKYMKELEDLPRNQNQKDLAPIKKLLKMDLDSIYKTLEPAERRQLWRSVIKEIQIDDHKNLKIIFL

SEQ ID NO: 8859 - protein, 447 aa, Unknown
  Description of Unknown: Integrase B8860 sequence
  PTHR30461:SF3,IPR036162,PS51737,IPR011109,PTHR30461, PS00397,PF00239,G3DSA:1.10.10.2600,IPR006119,SSF53041, cd00338,SM00857,IPR025827,IPR038109,PS51736, IPR006118,PF13408,G3DSA:3.40.50.1390,PF07508,Coil
MNKLNVGYLRVSTEAQTEKYGLDLQKQKIIERANKDGTTIDRWYIDGGYSGSKLDRPDIQRLLEDVEFGIVKSVYVYKLDRMSRDTIDALTLLCRTLPKYGVKLISATEELRIDTPSDKFLTSVTAVVGQYERELIYMRTRAGMVERVKKGLWMGGGRIPYGYYYDRNDGILHIDEENAIKVRKAYELYLKGFSCQKISDVLGMSGDTIVRRTLTNKVYLGYIFYKDKLYKGLHEPIIDQKTYDDVQRFMKKRSTNSFVGNKYMLSGLCYCGKCGARMKYKKWAQRYIMECYSRDGGKPYMIRDSKCDNRRMNVEIIEQEVSDCFRRFIVNAKASEKKESRKAVTEKEIKKTTDKLKKLYNLYVDSESETLLSIIQQEEKKRKLLEKELEETIREESSDTNVKIEEIKRISNIWDDLTPKEQNRILKECVEKIVITDDNIDIHFRII

SEQ ID NO: 8860 - protein, 447 aa, Unknown
  Description of Unknown: Integrase B8861 sequence
  PTHR30461:SF3,IPR036162,PS51737,IPR011109,PTHR30461, PS00397,PF00239,G3DSA:1.10.10.2600,IPR006119,SSF53041, cd00338,SM00857,IPR025827,IPR038109,PS51736, IPR006118,PF13408,G3DSA:3.40.50.1390,PF07508,Coil
MNKLNVGYLRVSTEAQTEKYGLDLQKQKIIERANKDGTTIDRWYIDGGYSGSRLDRPDIQRLLEDVEFWIIKSVYVYKLDRMSRDTIDALTLLCRTLPKYGVKLISATEELRIDTPSDKFLTSVTAVVGQYERELIYMRTRAGMVERVKKGLWMGGGRIPYGYYYDRNDGILHVKSGESEKVIEAYELYLKGYSCQRISDLLDFSCDKHVKNILTSKVYLGYIFYKGKYYKGLHEPIVSEKMFNSVHIFMKKRSSNAYIGNKFMLSGLCYCGKCGARMRYKKWGNCHIMECYSRDGGKQRMVRDPNCKNLRMDAKMIEQEVSDCFRRFIVNVKAEEKKENQKSIIEKKIKKSIDKLKKLYALYGEGDSDTLLSVIQEEEKRQKSLKTELEESIREESVDSSVKIENIQRVSTIWDTLTPKEQNKILKECVEKVVITDGDIDIHFNIS

SEQ ID NO: 8861 - protein, 447 aa, Unknown
  Description of Unknown: Integrase B8862 sequence
  PTHR30461:SF3,IPR036162,PS51737,IPR011109,PTHR30461, PS00397,PF00239,G3DSA:1.10.10.2600,IPR006119,SSF53041, cd00338,SM00857,IPR025827,IPR038109,PS51736, IPR006118,PF13408,G3DSA:3.40.50.1390,Coil
MSITNVAIYVRVSTDRQAKKGDSIDEQLSTCKAYIASKENMVLAGTYIDDGISGRKIKRGDFEQLLDDVRLGRVNLIIFTKLDRWFRSLRHYLNTQAVLEANHCDWLAVDQPYFDTTTPHGRAFVAQSMTFAELEAENDSVRIRDVFDYKYRQGEVLSGKAPLGFSVENKHLVPNQDAEKVLHIFQFYAACNSLNQTITHLESDMGIVMTQSNLKTAILKNKKYIGVFRDNDHYCPAIIPLDLFERVQELLAINVKISQKYNYIFSGLLRCAHCGHSFSGATRKIKKKTGGFYKYPFYKCHGAYPSKRCSNRKVMFESCIERYLIANIKPLLQEHIAEYEITSAKVIDYDSRRAALLRKIDKLKDLYVNDIITMDELKRDKEKYIKELENLPHNQEQKDLAPIQKLLKMDLDSIYQTLEPAERRQLWRSVIKEIQIDDHKNLKVIFL

SEQ ID NO: 8862 - protein, 447 aa, Unknown
  Description of Unknown: Integrase B8863 sequence
  PTHR30461:SF3,IPR036162,PS51737,IPR011109,PTHR30461, PS00397,PF00239,G3DSA:1.10.10.2600,IPR006119,SSF53041, cd00338,SM00857,IPR025827,IPR038109,PS51736, IPR006118,PF13408,G3DSA:3.40.50.1390,Coil
MSITNVAIYVRVSTDRQAKKGDSIDEQLSTCKAYIASKENMVLAGTYIDDRISGRKIKRGDFEQLLDDVRLGRVNLIIFTKLDRWFRSLRHYLNTQAVLEANHCDWLAVDQPYFDTTTPHGRAFVAQSMTFAELEAENDSVRIRDVFDYKYRQGEVLAGKAPLGFSVENKHLVPNQDAEKVLHIFQFYAACNSLNQTITHLESDMGIVMTQSNLKTAILKNKKYIGVFRDNDHYCPAIIPLDLFERVQELLAINVKISQKYNYIFSGLLRCAHCGHSFSGATRKIKKKAGGFYKYPLYKCHGAYPSKRCSNRKVIFESCIERYLIANIKPLLQEHIAEYEITSAKVIDYDSRRAALLRKIDKLKDLYINDIITMDELKRDKEKYIKELENLPRNQEQKDLAPIRKLLKMDLESIYQTLEPAERRQLWRSVIKEIQIDDHKNLKVIFL

SEQ ID NO: 8863 - protein, 447 aa, Unknown
  Description of Unknown: Integrase B8864 sequence
  PTHR30461:SF3,IPR036162,PS51737,IPR011109,PTHR30461, PS00397,PF00239,G3DSA:1.10.10.2600,IPR006119,SSF53041, cd00338,SM00857,IPR025827,IPR038109,PS51736, IPR006118,PF13408,G3DSA:3.40.50.1390,Coil
MSITNVAIYVRVSTDRQAKKGDSIDEQLSTCKAYIASKESMVLAGTYIDDGISGRKIKRGDFEQLLDDVRLGRIDLIIFTKLDRWFRSLRHYLNTQAILEANHCDWLAVDQPYFDTTTPHGRAFVAQSMTFAELEAENDSVRIRDVFDYKYRQGEVLSGKAPLGFSVENKHLVPNQDAEKVLHIFQFYAACNSLNQTTAHLESDMGIVMTQSNLKTAILKNKKYIGVFRDNDHYCPAIIPLDLFERVQELLAINVKISQKYNYIFSGLLRCAHCGHSFSGATRKIKKKTGGFYKYPFYKCHGAYPSKRCSNRKVMFESCIERYLIANIKPLLQEHIAEYEITSAKVIDYDSRRTALLKKIDKLKDLYINDIITMDELKRDKEKYIKELENLPRNQEQKDLTPIRKLLKMDLDSIYQTLEPAERRQLWRSVIKEIQIDDHKNLKVIFL

SEQ ID NO: 8864 - protein, 447 aa, Unknown
  Description of Unknown: Integrase B8865 sequence
  PTHR30461:SF3,IPR036162,PS51737,IPR011109,PTHR30461, PS00397,PF00239,G3DSA:1.10.10.2600,IPR006119,SSF53041, cd00338,SM00857,IPR025827,IPR038109,PS51736, IPR006118,PF13408,G3DSA:3.40.50.1390,Coil
MSITNVAIYVRVSTDRQAKKGDSIDEQLSTCKAYIASKENMVLAGTYIDDGISGRKIKRGDFEQLLDDVRLGRVNLIIFTKLDRWFRSLRHYLNTQAILEANHCDWLAVDQPYFDTTTPHGRAFVAQSMTFAELEAENDSVRIRDVFDYKYRQGEVLAGKAPLGFSIENKHLVPNQDAEKVLHIFQFYAACNSLNQTITHLESDMGIVMTQSNLKTAILKNKKYIGVFRDNDHYCPAIIPLDLFERVQELLAINVKISQKYNYIFSGLLRCAHCGHSFSGATRKIKKKAGGFYKYPLYKCHGAYPSKRCSNRKVIFESCIERYLIANIKPLLQEHIAEYEITSAKVIDYDSRRAALLRKIDKLKDLYVNDIITMDELKRDKEKYIKELENLPRNQEQKDLAPIRKLLKMDLESIYQTLEPAERRQLWRSVIKEIQIDDHKNLKVIFL

SEQ ID NO: 8865 - protein, 447 aa, Unknown
  Description of Unknown: Integrase B8866 sequence
  PTHR30461:SF3,IPR036162,PS51737,IPR011109,PTHR30461, PS00397,PF00239,G3DSA:1.10.10.2600,IPR006119,SSF53041, cd00338,SM00857,IPR025827,IPR038109,PS51736, IPR006118,PF13408,G3DSA:3.40.50.1390,Coil
MSITNVAIYVRVSTDRQAKKGDSIDEQLSTCKAYIASKENMVLAGTYIDDGISGRKIKRGDFEQLLDDVRLGRVNLIIFTKLDRWFRSLRHYLNTQAILEANHCDWLAVDQPYFDTTTPHGRAFVAQSMTFAELEAENDSVRIRDVFDYKYRQGEVLAGKAPLGFSVENKHLVPNQDAEKVLHIFQFYAACNSLNQTITHLESDMGIVMTQSNLKTAILKNKKYIGVFRDNDHYCPAIIPLDLFERVQELLAINVKISQKYNYIFSGLLRCAHCGHSFSGATRKIKKKAGGFYKYPLYKCHGAYPSKRCSNRKVIFESCIERYLIANIKPLLQEHIAEYEITSAKVIDYDSRRAALLRKIDKLKDLYVNDIITMDELKRDKEKYIKELENLPRNQEQKDLAPIRKLLKMDLDSIYQTLEPAERRQLWRSVIKEIQIDDYKNLKVIFL

SEQ ID NO: 8866 - protein, 447 aa, Unknown
  Description of Unknown: Integrase B8867 sequence
  PTHR30461:SF3,IPR036162,PS51737,IPR011109,PTHR30461, PS00397,PF00239,G3DSA:1.10.10.2600,IPR006119,SSF53041, cd00338,SM00857,IPR025827,IPR038109,PS51736, IPR006118,PF13408,G3DSA:3.40.50.1390,PF07508,Coil
MNRLNVGYLRVSTEAQTEKYGLDLQKQKIIERANKDGTTIDRWYIDGGYSGSKLDRPDIQRLLEDVEFGIVKSVYVYKLDRMSRDTIDALTLLCRTLPKYGVKLISATEELRIDTPSDKFLTSVTAVVGQYERELIYMRTRAGMVERVKKGLWMGGGRIPYGYYYDRNDGILHIDEENAIKVRKTYELYLKGFSCQKISDVLGMSGDTIVHRALTNKVYLGYIFYKDKLYKGLHEPIIDQKTYDDVQRFMKKRSTNSFVGNKYMLSGLCYCGKCGARMRYKKWSQRYIMECYSRDGGKPYMVRDSKCDNRRINVEIIEQEVSDCFRRFIVNAKASERKESKKVATEKEIKKTTYKLKKLYNLYVDSESETLFSIIQQEEKKRKLLEKELEEAIREESSDTNVKIEEIKRISNIWDDLTTKEQNRILKECVEKIVITDGNIDIHFRII

SEQ ID NO: 8867 - protein, 447 aa, Unknown
  Description of Unknown: Integrase B8868 sequence
  PTHR30461:SF3,IPR036162,PS51737,IPR011109,PTHR30461, PS00397,PF00239,G3DSA:1.10.10.2600,IPR006119,SSF53041, cd00338,SM00857,IPR025827,IPR038109,PS51736, IPR006118,PF13408,G3DSA:3.40.50.1390,Coil
MSITNVAIYVRVSTDRQAKKGDSIDEQLSTCKAYIASKENMVLAGTYIDDGISGRKIKRGDFEQLLDDVRLGRVNLIIFTKLDRWFRSLRHYLNTQAILEANHCDWLAVDQPYFDTTTPHGRAFVAQSMTFAELEAENDSVRIRDVFDYKYRQGEVLAGKAPLGFSIENKHLVPNQDAEKVLHIFQFYAACNSLNQTITHLESDMGIVMTQSNLKTAILKNKKYIGVFRDNDHYCPAIIPLDLFERVQELLAINVKISQKYNYIFSGLLRCAHCGHSFSGATRKIKKKAGGFYKYPLYKCHGAYPSKRCSNRKVIFESCIERYLIANIKPLLQEHIAEYEITSAKVIDYDSRRTALLKKIDKLKDLYINDIITMDELKRDKEKYIKELENLPRNQEQKDLAPIRKLLKMDLDSIYQTLEPAERRQLWRSVIKEIQIDDHKNLKVIFL

SEQ ID NO: 8868 - protein, 447 aa, Unknown
  Description of Unknown: Integrase B8869 sequence
  SM00857,IPR006118,G3DSA:1.10.10.2600,IPR036162,PF13408, PS51737,G3DSA:3.40.50.1390,IPR025827,IPR006119,IPR038109, IPR011109,SSF53041,PTHR30461,PS00397,PS51736, cd00338,PF00239
MAKKHVALYVRVSTEEQKNHGLSVDSQIDALEKYCAEHDYAIFRIYNDAGHSAAKRYTTRPALLQLMEDCSHGMFDLILFTRLDRWFRSVPDYYQVQSVLDHNHIAWRAIWEDYETETSEGVFKVNIMLSIAQAEAQRTSEKIRSVLQYKRDSGGYVGQPPMGYIRVNKRDLIFDDSIKDAIRELFKVYLTTNSIVKAVQSAHDNGLQISAQQAYRILKKEAYAGLAVGGYKCPAYISWEDHEKILSMMKQHTRKTTPARTYYFSGLLFCENCGYRLAAGASHKRSASGEDYYIKYYRCNGFRTMRNDCPGSYLNEKKLEKYLLDHLDAELDQYNVNLITHSKDYAPDEIKKQITALESRMRRIGDRYEDGDISREEYRNKRYEITHRINTLRSLIAKNPTPIHLADDWQAVYQGFDAEHKHQFWRSIIERIDVPVKDSYHIKIHFC

SEQ ID NO: 8869 - protein, 447 aa, Unknown
  Description of Unknown: Integrase B8870 sequence
  PTHR30461:SF3,SM00857,IPR006118,G3DSA:1.10.10.2600,IPR036162, PF13408,PS51737,G3DSA:3.40.50.1390,IPR025827,IPR006119, IPR038109,SSF53041,IPR011109,PTHR30461,PS00397, PS51736,cd00338,PF00239
MSITNVAIYVRVSTDRQAKKGDSIDEQLSTCKNYIASKENMVLAGVYIDDGISGRKIKRGDFEQLLDDVRLGRVDLIIFTKLDRWFRSLRHYLNTQAILEANHCDWLAVDQPYFDTTTPHGRAFVAQSMTFAELEAENDSVRIRDVFDYKYRQGEVLSGKAPLGYSIENKHLVLNQDADKALHIFQFYAECGSLNQTIAHLESDMGIIMSQDNLKKSILKNKKYIGVFRDNDHYCPAIIPVDLFERVQELLAINIKSSQKYSYVFSGLLRCAHCGQAFSGFTQKAKKKAGGFYKYPYYKCHGAYPNKRCINRKMVPESYIEKYLLINVKDLLQEHIVEYEIASAKIVDYDSRRATLLKKIDKLKDLYINDIITMDELKMDKEKYMKELEDLPRSQNQKDLAPIKKLLKMDLDSIYKTLEPAERRQLWRSVIKEIQIDDHKNLKIIFL

SEQ ID NO: 8870 - protein, 447 aa, Unknown
  Description of Unknown: Integrase B8871 sequence
  PTHR30461:SF3,IPR036162,PS51737,IPR011109,PTHR30461, PS00397,PF00239,G3DSA:1.10.10.2600,IPR006119,SSF53041, cd00338,SM00857,IPR025827,IPR038109,PS51736, IPR006118,PF13408,G3DSA:3.40.50.1390,Coil
MSITNVAIYVRVSTDRQAKKGDSIDEQLSTCKNYIASKENMVLAGVYIDDGISGRKIKRGDFEQLLDDVRLGRVDLIIFTKLDRWFRSLRHYLNTQAILEANHCDWLAVDQPYFDTTTPHGRAFVAQSMTFAELEAENDSVRIRDVFDYKYRQGEVLSGKVPLGYSIENKHLVPNQDADKALRIFQFYAECGSLNQTITHLESDMGIIMSQDNLKKSILKNKKYIGVFRDNDHYCPAIIPADLFDRVQELLAINVKSSQKYSYVFSGLLRCAHCGQAFSGFTQKAKKKAGGFYKYPYYKCHGAYPNKRCINRKMVPESYIEKYLLINVKGLLQKHIAEYEIASAKIVDYDSRRATLLKKIDKLKDLYINDIITMDELKMDKEKYMKELEDLPRNQNQKDLAPIKKLLKMDLDSIYKTLEPAERRQLWRSVIKEIQIDDHKNLKIIFL

SEQ ID NO: 8871 - protein, 447 aa, Unknown
  Description of Unknown: Integrase B8872 sequence
  PTHR30461:SF3,IPR036162,PS51737,IPR011109,PTHR30461, PS00397,PF00239,G3DSA:1.10.10.2600,IPR006119,SSF53041, cd00338,SM00857,IPR025827,IPR038109,PS51736, IPR006118,PF13408,G3DSA:3.40.50.1390,Coil
MSITNVAIYVRVSTDRQAKKGDSIDEQLSTCKAYIASKENMVLAGTYIDDGISGRKIKRGDFEQLLDDVRLGRVNLIIFTKLDRWFRSLRHYLNTQAILEANHCDWLAVDQPYFDTTTPHGRAFVAQSMTFAELEAENDSVRIRDVFDYKYRQGEVLAGKAPLGFSVENKHLVPNQDAEKVLHIFQFYAACNSLNQTITHLESDMGIVMTQSNLKTAILKNKKYIGVFRDNDHYCPAIIPLDLFERVQELLAINVKISQKYNYIFSGLLRCAHCGHSFSGATRKIKKKAGGFYKYPLYKCHGAYPSKRCSNRKVIFESCIERYLIANIKPLLQEHIAEYEITSAKVIDYDSRRAALLRKIDKLKDLYVNDIITMDELKRDKEKYIKELENLPRNQEQKDLAPIRKLLKMDLDSIYQTLEPAERRQLWRSVIKEIQIDDHKNLKVIFL

SEQ ID NO: 8872 - protein, 447 aa, Unknown
  Description of Unknown: Integrase B8873 sequence
  PTHR30461:SF3,IPR036162,PS51737,IPR011109,PTHR30461, PS00397,PF00239,G3DSA:1.10.10.2600,IPR006119,SSF53041, cd00338,SM00857,IPR025827,IPR038109,PS51736, IPR006118,PF13408,G3DSA:3.40.50.1390,Coil
MSITNVAIYVRVSTDRQAKKGDSIDEQLSTCKAYIASKENMVLAGTYIDDGISGRKIKRGDFEQLLDDVRLGRVNLIIFTKLDRWFRSLRHYLNTQAVLEANHCDWLAVNQPYFDTTTPHGRAFVAQSMTFAELEAENDSVRIRDVFDYKYRQGEVLAGKAPLGFSIENKHLVPNQDAEKVLHIFQFYAACNSLNQTITHLESDMGIVMTQSNLKTAILKNKKYIGVFRDNDHYCPAIIPLDLFERVQELLAINVKISQKYNYIFSGLLRCAHCGHSFSGATRKIKKKAGGFYKYPLYKCHGAYPSKRCSNRKVIFESCIERYLIANIKPLLQEHIAEYEITSAKVIDYDSRRAALLRKIDKLKDLYVNDIITMDELKRDKEKYIKELENLPRNQEQKDLAPIRKLLKMDLESIYQTLEPAERRQLWRSVIKEIQIDDHKNLKVIFL

SEQ ID NO: 8873 - protein, 447 aa, Unknown
  Description of Unknown: Integrase B8874 sequence
  SM00857,IPR006118,G3DSA:1.10.10.2600,IPR036162,PF13408, IPR025827,PS51737,Coil,G3DSA:3.40.50.1390,IPR006119, IPR038109,IPR011109,SSF53041,PTHR30461,PS00397, PS51736,cd00338,PF00239
MVKKHVALYVRVSTEEQKNHGLSVDSQIDALEKYCAEHDYAIFHIYNDAGHSAAKRYTTRPALLQLMEDCSHGMFDLILFTRLDRWFRSVPDYYQVQSVLDHNHIAWRAIWEDYETETSEGVFKVNIMLSIAQAEAQRTSEKIRSVLQYKRDSGGYVGQPPMGYIRINKRDLIFDDSIKDAIRELFKVYLTTNSIVKAVQSAHDNGLQISAQQAYRILKKEAYAGLAVGGYKCPAYISWEDHEKILSMMKQHTRKTTPARTYYFSGLLFCENCGYRLAAGASHKRSASGEDYYIKYYRCNGFRTMRSDCPGSYLNEKKLEKYLLDHLNAELDQYNVNLMTHSKDYDPDEIKKQIVALESRMRRIGDRYEDGDISREEYRNKRYEITYRINTLRSLIAKNPTPIHLADDWMAVYQGFDAEHKRQFWRSIIERMDVPVEDSYHVKIHFC

SEQ ID NO: 8874 - protein, 447 aa, Unknown
  Description of Unknown: Integrase B8875 sequence
  PTHR30461:SF3,IPR036162,PS51737,IPR011109,PTHR30461, PS00397,PF00239,G3DSA:1.10.10.2600,IPR006119,SSF53041, cd00338,SM00857,IPR025827,IPR038109,PS51736, IPR006118,PF13408,G3DSA:3.40.50.1390,Coil
MSITNVAIYVRVSTDRQAKKGDSIDEQLSTCKAYIASKENMVLAGTYIDDGISGRKIKRGDFEQLLDDVRLGRVNLIIFTKLDRWFRSLRHYLNTQAVLEANHCDWLAVDQPYFDTTTPHGRAFVAQSMTFAELEAENDSVRIRDVFDYKYRQGEVLSGKAPLGFSVENKHLVPNQDAEKVLHIFQFYAACNSLNQTTAHLESDMGIVMTQSNLKTAILKNKKYIGVFRDNDHYCPAIIPLDLFERVQELLAINVKISQKYNYIFSGLLRCAHCGHSFSGATRKIKKKTGGFYKYPFYKCHGAYPSKRCSNRKVMFESCIERYLIANIKPLLQEHIAEYEITSAKVIDYDSRRTALLKKIDKLKDLYINDIITMDELKRDKEKYIKELENLPRNQEQKDLAPIRKLLKMDLESIYQTLEPAERRQLWRSVIKEIQIDDHKNLKVIFL

SEQ ID NO: 8875 - protein, 447 aa, Unknown
  Description of Unknown: Integrase B8876 sequence
  PTHR30461:SF3,IPR036162,PS51737,IPR011109,PTHR30461, PS00397,PF00239,G3DSA:1.10.10.2600,IPR006119,SSF53041, cd00338,SM00857,IPR025827,IPR038109,PS51736, IPR006118,PF13408,G3DSA:3.40.50.1390,Coil
MSITNVAIYVRVSTDRQAKKGDSIDEQLSTCKAYIASKENMVLAGTYIDDGISGRKIKRGDFEQLLDDVRLGRVNLIIFTKLDRWFRSLRHYLNTQAVLEANHCDWLAVDQPYFDTTTPHGRAFVAQSMTFAELEAENDSVRIRDVFDYKYRQGEVLAGKAPLGFSIENKHLVPNQDAEKVLHIFQFYATCNSLNQTITHLESDMGIVMTQSNLKTAILKNKKYIGVFRDNDHYCPAIIPLDLFERVQELLAINVKISQKYNYIFSGLLRCAHCGHSFSGATRKIKKKAGGFYKYPLYKCHGAYPSKRCSNRKVIFESCIERYLIANIKPLLQEHIAEYEITSAKVIDYDSRRAALLRKIDKLKDLYVNDIITMDELKRDKEKYIKELENLPRNQEQKDLAPIRKLLKMDLESIYQTLEPAERRQLWRSVIKEIQIDDHKNLKVIFL

SEQ ID NO: 8876 - protein, 447 aa, Unknown
  Description of Unknown: Integrase B8877 sequence
  PTHR30461:SF3,IPR036162,PS51737,IPR011109,PTHR30461, PS00397,PF00239,G3DSA:1.10.10.2600,IPR006119,SSF53041, cd00338,SM00857,IPR025827,IPR038109,PS51736, IPR006118,PF13408,G3DSA:3.40.50.1390,Coil
MSITNVAIYVRVSTDRQAKKGDSIDEQLSTCKAYIASKENMVLAGTYIDDGISGRKIKRGDFEQLLDDVRLGRVNLIIFTKLDRWFRSLRHYLNTQAVLEANHCDWLAVDQPYFDTTTPHGRAFVAQSMTFAELEAENDSVRIRDVFDYKYRQGEVLAGKAPLGFSIENKHLVPNQDAEKVLHIFQFYAACNSLNQTITHLESDMGIVMTQSNLKTAILKNKKYIGVFRDNDHYCPAIIPLDLFERVQELLAINVKISQKYNYIFSGLLRCAHCGHSFSGATRKIKKKAGGFYKYPLYKCHGAYPSKRCSNRKVIFESCIERYLIANIKPLLQEHIAEYEITSAKVIDYDSRRAALLKKIDKLKDLYINDIITMDELKRDKEKYIKELENIPRNQEQKDLAPIRKLLKMDLDSIYQTLEPAERRQLWRSVIKEIQIDDHKNLKVIFL

SEQ ID NO: 8877 - protein, 447 aa, Unknown
  Description of Unknown: Integrase B8878 sequence
  PTHR30461:SF3,IPR036162,PS51737,IPR011109,PTHR30461, PS00397,PF00239,G3DSA:1.10.10.2600,IPR006119,SSF53041, cd00338,SM00857,IPR025827,IPR038109,PS51736, IPR006118,PF13408,G3DSA:3.40.50.1390,Coil
MSITNVAIYVRVSTDRQAKKGDSIDEQLSTCKAYIASKENMVLAGTYIDDGISGRKIKRGDFEQLLDDVRLGRVNLIIFTKLDRWFRSLRHYLNTQAVLEANHCDWLAVDQPYFDTTTPHGRAFVAQSMTFAELEAENDSVRIRDVFDYKYRQGEVLAGKAPLGFSIENKHLVPNQDAEKVLHIFQFYAACNSLNQTITHLESDMGIVMTQSNLKTAILKNKKYIGVFRDNDHYCPAIIPLDLFERVQELLAINVKISQKYNYIFSGLLRCAHCGHSFSGATRKIKKKAGGFYKYPLYKCHGAYPSKRCSNRKVIFESCIERYLIANIKPLLQEHIADYEITSAKVIDYDSRRATLLRKIDKLKDLYVNDIITMDELKRDKEKYIKELENLPRNQEQKDLAPIRKLLNMDLESIYQTLEPAERRQLWRSVIKEIQIDDHKNLKVIFL

SEQ ID NO: 8878 - protein, 447 aa, Unknown
  Description of Unknown: Integrase B8879 sequence
  PTHR30461:SF3,IPR036162,PS51737,IPR011109,PTHR30461, PS00397,PF00239,G3DSA:1.10.10.2600,IPR006119,SSF53041, cd00338,SM00857,IPR025827,IPR038109,PS51736, IPR006118,PF13408,G3DSA:3.40.50.1390,Coil
MCQKIVVTLPNNLRIRVALYIRVSTEEQAKHGLSLADQREALIAYAAAHGMEVVGIYEDAGISARKPYKKRPALMRLLDDCRAGKIDTILFVKLDRWFRNVAGYYAVQEVLDKNHVAWQAIREDYETRTASGRLKVNIMLSVAQDEADRTSERIKAINEGKRAKGQPTNGRTPIGIKTENRAYVIDAETADIARDMFLAFIRLQSVLALRRYMAETWGVRRSYNKYKQALSNHLYIGEAFGIENALPPLIDRKTFDLAGELLQRRSQRNAGTDDRVYLFSGLLRCRECGRTMQSETVKKVYTYYRCRTHMLDPADCPHALRIREDVLEEYLLKEITGIAERYYSKAKGAQKKTAKTAEQIRRKMQKLKELYLSDLIELDDYRRDYTELKQQLSQAEPQEEKAFDIGTLQRGLEAYPGLDRQGKKEFWTRTIKRLEADNNGAFFVTPV

SEQ ID NO: 8879 - protein, 447 aa, Unknown
  Description of Unknown: Integrase B8880 sequence
  PTHR30461:SF3,IPR036162,PS51737,IPR011109,PTHR30461, PS00397,PF00239,G3DSA:1.10.10.2600,IPR006119,SSF53041, cd00338,SM00857,IPR025827,IPR038109,PS51736, IPR006118,PF13408,G3DSA:3.40.50.1390,Coil
MSIINVAIYVRVSTDRQAKKGDSIDEQLSTCKAYIASKENMVLAGVYIDDGISGRKIKRGDFEQLLDDVRLGRVDLIIFTKLDRWFRSLRHYLNTQAILEANHCDWLAVDQPYFDTTTPHGRAFVAQSMTFAELEAENDSVRIRDVFDYKYRQGEVLSGKVPLGYSIENKHLVLNQDADKALHIFQFYAECGSLNQTIAHLESDMGIIMSQDNLKKSILKNKKYIGAFRDNDHYCPAIIPVDLFERVQELLAINIKSSQKYSYVFSGLLRCAHCGQAFSGFTQKAKKKAGGFYKYPYYKCHGAYPNKRCINRKMVPESYIEKYLLINVKDLLQEHIAEYEIASAKIVDYDSRRATLLKKIDKLKDLYINDIITMDELKMDKEKYMKELEDLPRNQNQKDLAPIKKLLKMDLDSIYKTLEPAERRQLWRSVIKEIQIDDHKNLKIIFL

SEQ ID NO: 8880 - protein, 446 aa, Unknown
  Description of Unknown: Integrase B8881 sequence
  PTHR30461:SF3,IPR036162,PS51737,IPR011109,PTHR30461, PS00397,PF00239,G3DSA:1.10.10.2600,IPR006119,SSF53041, cd00338,SM00857,IPR025827,IPR038109,PS51736, IPR006118,PF13408,G3DSA:3.40.50.1390,Coil
MKRAALYIRVSTEEQARHGLSLEDQKNNLTQFSKSHGMKIAGIYEDAGISARKPYKKRPALLRLLEDCKAGKIDLILFIKLDRWFRNVGNYYAVQEILDQYNVSWQATQEDYETTTASGRLKVNIMLSVAQDEADRTSERIKFVFEGKRARLEPLTGNIPFGYKIEGKSFKKDESKEALVNDFFKKYLASGSISKTSEFIREKYGVLMRYHLIDKMLRSTTYYGKYYNMDGMCPAYITKEDHEQIQAMRRKVVRKAKNNRTYLFSGLVVCPECGNRMGARINTKQTYVFYNCNGHYTKQNGCQNRVNLGERKIEEYLLATVANKFHEYKANFSALKNAEINKRSRAEISAAKSKLNKLKDLYLNDIITLEELKTDRESLLAKISDLEKAALPEQKQDFESIDRVLIENWKESYDGLNREEKREFWRIIIKEIKIYPDRHIEYSLNV

SEQ ID NO: 8881 - protein, 446 aa, Unknown
  Description of Unknown: Integrase B8882 sequence
  PTHR30461:SF3,SM00857,IPR006118,G3DSA:1.10.10.2600,IPR036162, PF13408,IPR025827,PS51737,G3DSA:3.40.50.1390,IPR006119, IPR038109,SSF53041,IPR011109,PTHR30461,PS00397, PS51736,cd00338,PF00239
MCQKIVVTLPNNLRIRVALYIRVSTEEQAKHGLSLADQRDALIAYAAAHGMEVVGIYEDAGISARKPYKKRPALMRLLDDCRAGKIDTILFVKLDRWFRNVAGYYAVQEVLDKNHVDWQAIREDYETRTASGRLKVNIMLSVAQDEADRTSERIKAINEGKRAKGQPTNGKTPIGICVKNRRYDIDEKTADAARDMFPAFIRLQSILALRRYMATEWGIKRSYNKYKDALRSRLYLGEAFGVENALPALVDRETFDLAGKILERRSQRNASADRIYLFTGILRCRECGRNMQPETVKQVYKYYRCRTHTLDPADCPHILRIREDVLEDYLLREFEGIAKKYYSKSKTAEKKPPKTAEQIKRKMQKLKDLYLSDLIEIEEYKKDYTELKQQLATINPEPIKEFDLETLRRELKEYPDLDRQAKKEFWVRTIQRIDADNDGAFFVTPS

SEQ ID NO: 8882 - protein, 446 aa, Unknown
  Description of Unknown: Integrase B8883 sequence
  PTHR30461:SF3,cd00338,SM00857,IPR036162,PS51736, PF13408,G3DSA:3.40.50.1390,IPR025827,IPR006119,SSF53041, PTHR30461,mobidb-lite,Coil,PF00239
MNIAIYPRKSKKDDNSESMEQQIDDCKKYINKTYHNANIIVYSGDYAITGHSTAKRKDFQRMMDDVRAGRINAVVIMRYDRIARNMRDFCNLYHDMESAGCNLISVSQQIDTSTPYGKNFMYQMANMAELEWAVISERYKDTAAYKIREGKAYTGRVPIGFKIEKIDGVKKVVHDNEEQTRAIFDYLLATKSKRGTVLWVRENFIPDFTRHKLDTMIKSDLYIGKVRENDHFCEPYFTKDQMEEIRSVNQIKYAPSGHIYLFSGLFRCPICGRKMASFYSIDKKTKKHRQYQRCWFGGNEKLHKTKLVSEAKTEKYLLENLDATLKNLEFDVKKEAGKPKRNLNKKLNDAIGERERLNYLFEKGRIDIPEYEKKYSVLSEKINSITEELSNNKVVRIEEFKKQIPEDWKELYEQLDQKGKQEFWHRIIKEIYLNEAFEITGFIFYI

SEQ ID NO: 8883 - protein, 446 aa, Unknown
  Description of Unknown: Integrase B8884 sequence
  PTHR30461:SF3,SM00857,IPR006118,G3DSA:1.10.10.2600, IPR036162,PF13408,PS51737,G3DSA:3.40.50.1390, IPR025827,IPR006119,IPR038109,IPR011109, SSF53041,PTHR30461,PS00397,PS51736,cd00338,PF00239
MCQKIVVTLPNNLRIRVALYIRVSTEEQAKHGLSLADQREALIAYAAAHGMEVVGIYEDAGISARKPYKKRPALMRLLDDCRAGKIDTILFVKLDRWFRNVAGYYAVQEVLDKNHVDWQAIREDYETRTASGRLKVNIMLSVAQDEADRTSERIKAINEGKRLKGQPTTWRTPIGICVKDRHYAIDEETADAARDMFPAFIRLQSILALRRYMATEWGIKRSYNKYKDALSNRLYLGEAFGVENVLPALVDQETFNLAGRILEQRSQRNASADRIYLFTGILRCRECGRNMQPETVKQVYKYYRCRTHTLDPADCPHILRIREDVLEDYLLREFEGIAKKYYSKSKTAEKKPPKTAEQIKRKMQKLKDLYLSDLIEIEEYKKDYTELKQQLAAINPEPIKEFDLETLRRELKEYPDLDRQAKKEFWVRTIQRIDADNDGAFFVTPS

SEQ ID NO: 8884 - protein, 446 aa, Unknown
  Description of Unknown: Integrase B8885 sequence
  PTHR30461:SF3,cd00338,SM00857,IPR036162,PF13408, IPR025827,PS51736,G3DSA:3.40.50.1390,IPR006119,SSF53041, PTHR30461,mobidb-lite,Coil,PF00239
MNIAIYPRKSKKDDNSESMEQQIDDCKKYIDKTYHNANIIVYSGDYAITGHSTAKRKDFQRMMDDVRAGRINAVVIMRYDRIARNMRDFCNLYHDMESAGCNLISVSQQIDTSTPYGKNFMYQMANMAELEWAVISERYKDTAAYKIREGKAYTGRVPIGFKIEKTDGVKKVVHDNEEQTRAIFDYLLATKSKRGTVLWVRENLIPDFTRHKLDTMIKSDLYIGKVRENENFCEPYFTKEQMEEIRSVNQIKYAPSGHIYLFSGLFRCPICGRKMASFYSIDRKTKKHRQYQRCWFGGNEKLHKTKLVSEAKTEKYLLENLDAALKNLEFDVKKEAGKPKRNLNKKLNDAIGERERLNYLFEKGRIDIPEYEKKYSILSGKINLISEELSNNKIVKIEEFKKQIPSNWKVLYEQLDQKGKQEFWHRIIKEIYLNEAFEITGFIFYI

SEQ ID NO: 8885 - protein, 446 aa, Unknown
  Description of Unknown: Integrase B8886 sequence
  PTHR30461:SF3,cd00338,SM00857,IPR036162, PF13408,IPR025827,G3DSA:3.40.50.1390,PS51736, IPR006119,SSF53041,PTHR30461,mobidb-lite, Coil,PF00239
MNIAIYPRKSKKDDNSESMEQQIDDCRKYINKTYPDANIIVYSGDYAITGHSTAKRKDFQRMMDDVRAGRINAVVIMRYDRIARNMRDFCNLYHDMESSGCNLISVSQQIDTSTPYGKNFMYQMANMAELEWAVISERYKDTAAYKIREGKAYTGRVPIGFKIEKIDGVKKVVHDNEEQTRAIFDYLLATKSKRGTVLWVRENFIPDFTRHKLDTMIKSDLYIGKVRENENFCEPYFTKEKMEEIRSVNQIKYAPSGHIYLFSGLFRCPICGRKMASFYSIDRKTKKHRQYQRCWFGGNEKLHKTKLVSEAKTEKYLLENLDAALKNLEFDVKKEAGKPKQNLNKKLNDAIGERERLNYLFEKGRIDIPEYEKKYSVLSEKINSITEELSNNKVVRIEEFKKQIPEDWKELYEQLDQKGKQEFWHRIIKEIYLNEAFEITGFIFYI

SEQ ID NO: 8886 - protein, 446 aa, Unknown
  Description of Unknown: Integrase B8887 sequence
  PTHR30461:SF3,SM00857,IPR006118,G3DSA:1.10.10.2600,IPR036162, PF13408,IPR025827,G3DSA:3.40.50.1390,PS51737,IPR006119, IPR038109,IPR011109,SSF53041,PTHR30461,PS00397, PS51736,cd00338,PF00239
MCQKIVVTLPNNLRIRVALYIRVSTEEQAKHGLSLADQRDALIAYAAAHGMEVVGIYEDAGISARKPYKKRPALMRLLDDCRAGKIDTILFVKLDRWFRNVAGYYAVQEVLDKNHVDWQAIREDYETRTASGRLKVNIMLSVAQDEADRTSERIKAINEGKRAKGQPTNGKTPIGICVKNRRYAIDEETADAARDMFPAFIRLQSILALRRYMATEWGIKRSYNKYKDALRSRLYLGEAFGVENALPALVDRETFDLAGKILERRSQRNASADRIYLFTGILRCRECGRNMQPETVKQVYKYYRCRTHTLDPADCPHILRIREDVLEDYLLREFEGIAKKYYSKSKTAEKKPPKTAEQIKRKMQKLKDLYLSDLIEIEEYKKDYTELKQQLAAINPEPIKEFDLETLRRELKEYPDLDRQAKKEFWVRTIQRIDADNDGAFFVTPS

SEQ ID NO: 8887 - protein, 446 aa, Unknown
  Description of Unknown: Integrase B8888 sequence
  PTHR30461:SF3,SM00857,PS51736,PF13408,IPR025827, IPR036162,G3DSA:3.40.50.1390,IPR006119,SSF53041,PF00239, PTHR30461,mobidb-lite,Coil,cd00338
MNIAIYPRKSKKDDNSESMEQQIDDCRKYIDKTYHNANIIVYSGDYAITGHSTAKRKDFQRMMDDVRAGRINAVVIMRYDRIARNMRDFCNLYHDMESAGCNLISVSQQIDTSTPYGKNFMYQMANMAELEWAVISERYKDTAAYKIREGKAYTGRVPIGFKIEKIDGIKKVVHDNEEQTRAIFDYLLATKSKRGTVLWVRENLIPDFTRHKLDTMIKSDLYIGKVRENENFCEPYFTQKQMEEIRSVNQIKYAPSGHIYLFSGLFRCPICGRKMASFYSIDKKTKKHRQYQRCWFGGNEKLHKTKLVSEAKTEKYLLENLDAALKNLEFDVKKEAGKPKRNLNKKLNDAIAERDRLNYLFEKGRIDIPEYEKKYSVLSEKINSITEELSNNKVVRIEEFKKQIPEDWKVLYEQLDQKGKQEFWHRIIKEIYLNEAFEITGFIFYI

SEQ ID NO: 8888 - protein, 446 aa, Unknown
  Description of Unknown: Integrase B8889 sequence
  PTHR30461:SF3,IPR036162,PS51737,IPR011109, PTHR30461,PS00397,PF00239,G3DSA:1.10.10.2600, IPR006119,SSF53041,cd00338,SM00857,IPR025827,IPR038109 ,PS51736,IPR006118,PF13408,G3DSA:3.40.50.1390,Coil
MQRAALYIRVSTEEQARHGLSLEDQKNSLTQFSKSHGMKIVGIYEDAGISARKPYKKRPALLKLLDDCRVGKIDLILFIKLDRWFRNVGNYYAVQEILDQYGVSWQATQEDYETTTASGRLKVNIMLSVAQDEADRTSERIKFVFEGKRARLEPLTGNIPFGYKIEGKSFKKDESKEALVNDFFKKYLASGSISKTSEFIREKYGVLMRYHLIDKMLRSTTYYGKYYNMDGMCPAYITKEDHEQIQAMRRKVVRKAKNNRTYLFSGLVVCPECGNRMGARINTKQTYVFYNCNGHYTKQNGCQNRVNLGERKIEEYLLATVANKFHEYKANFSALKNAEINKRSRAEISAAKSKLNKLKDLYLNDIITLEELKTDREALLAKISDLEKAALPEQKQDFESIDRVLTENWKESYDGLNREEKREFWRIIVKEIKIYPDRHIEYSLNV

SEQ ID NO: 8889 - protein, 446 aa, Unknown
  Description of Unknown: Integrase B8890 sequence
  PTHR30461:SF3,SM00857,IPR006118,G3DSA:1.10.10.2600,IPR036162, PF13408,IPR025827,PS51737,G3DSA:3.40.50.1390,IPR006119, IPR038109,IPR011109,SSF53041,PTHR30461,PS00397, PS51736,cd00338,PF00239
MCQKIVVTLPNNLRIRVALYIRVSTEEQAKHGLSLADQRDALIAYAAAHGMEVVGIYEDAGISARKPYKKRPALMRLLDDCRAGKIDTILFVKLDRWFRNVAGYYAVQEVLDKNHVDWQAIREDYETRTASGRLKVNIMLSVAQDEADRTSERIKAINEGKRAKGQPTNGKTPIGICVRNRRYDIDEETADAARDMFPAFIRLQSILALRRYMATEWGIKRSYNKYKDALRSRLYLGEAFGVENALPALIDQETFDLAGKILERRSQRNASADRIYLFTGILRCRECGRNMQPETVKKVYKYYRCRTHTLDPADCPHILRIREDVLEDYLLREFEGIAKKYYSKSKTAEKKPPKTAEQIKRKMQKLKDLYLSDLIEIEEYKKDYTELKQQLAAINPEPIKEFDLETLRRELKEYPDLDRQAKKEFWVRTIQRIDADNDGAFFVTPS

SEQ ID NO: 8890 - protein, 446 aa, Unknown
  Description of Unknown: Integrase B8891 sequence
  PTHR30461:SF3,SM00857,IPR006118,G3DSA:1.10.10.2600,IPR036162, PF13408,PS51737,IPR025827,G3DSA:3.40.50.1390,IPR006119, IPR038109,IPR011109,SSF53041,PTHR30461,PS00397, PS51736,cd00338,PF00239
MCQKIVVTLPNILRIRVALYIRVSTEEQAKHGLSLADQREALTDYATAHNMEVVGIYEDAGISARKPYKKRPALMRLLDDCNAGKVDTILFVKLDRWFRNVAGYYAVQEVLDKNHVAWQAIREDYETRTASGRLKVNIMLSVAQDEADRTSERIKDINEGKRAKGQPTNGRTPIGICVKNRRYAIDEETADAARDMFPAFIRLQSILALRRYMATEWGIKRSYNKYKDALGNRLYLGEAFGVENALPALIDQETFDLAGKILERRSQRNASADRIYLFTGILRCRECGRNMQPETVKQVYKYYRCRTHTLDPADCPHILRIREDVLEDYLLREFEGIAKKYYSKSKTAEKKPPKTAEQIKRKMQKLKDLYLSDLIEIEEYKKDYTDLKQQLAAINPEPIKEFDLETLRRELKEYPDLDRQAKKEFWVRTIQRIDADNDGAFFVTPS

SEQ ID NO: 8891 - protein, 446 aa, Unknown
  Description of Unknown: Integrase B8892 sequence
  PTHR30461:SF3,SM00857,IPR006118,G3DSA:1.10.10.2600,IPR036162, PF13408,IPR025827,G3DSA:3.40.50.1390,PS51737,IPR006119, IPR038109,IPR011109,SSF53041,PTHR30461,PS00397, PS51736,cd00338,PF00239
MCQKIVVTLPNNLRIRVALYIRVSTEEQAKHGLSLADQREALIAYAAAHGMEVVGIYEDAGISARKPYKKRPALMRLLDDCRAGKIDTILFVKLDRWFRNVAGYYAVQEVLDKNHVDWQAIREDYETRTASGRLKVNIMLSVAQDEADRTSERIKAINEGKRAKGQPTNGKTPIGICVKNRRYAIDEETAAAARDMFPAFIRLQSILALRRYMATEWGIKRSYNKYKDALRSRLYLGEAFGVENALPALVDRETFDLAGKILERRSQRNASADRIYLFTGILRCRECGRNMQPETVKQVYKYYRCRTHTLDPADCPHILRIREDVLEDYLLREFEGIAKKYYSKSKTAEKKPPKTAEQIKRKMQKLKDLYLSDLIEIEEYKKDYTELKQQLAAINPEPIKEFDLETLRRELKEYPDLDRQAKKEFWVRTIQRIDADNDGAFFVTPS

SEQ ID NO: 8892 - protein, 446 aa, Unknown
  Description of Unknown: Integrase B8893 sequence
  PTHR30461:SF3,SM00857,IPR006118,G3DSA:1.10.10.2600,IPR036162, PF13408,IPR025827,G3DSA:3.40.50.1390,PS51737,IPR006119, IPR038109,IPR011109,SSF53041,PTHR30461,PS00397, PS51736,cd00338,PF00239
MCQKIVVTLPNNLRIRVALYIRVSTEEQAKHGLSLADQREALIAYAAAHGMEVVGIYEDAGISARKPYKKRPALMRLLDDCRAGKIDTILFVKLDRWFRNVAGYYAVQEVLDKNHVDWQAIREDYETRTASGRLKVNIMLSVAQDEADRTSERIKAINEGKRAKGQPTNGKTPIGICVKNRRYAIDEETADAARDMFPAFIRLQSILALRRYMATEWGIKRSYNKYKDALRSRLYLGEAFGVENALPALVDRETFDLAGKILERRSQRNASADRIYLFTGILRCRECGRNMQPETVKQVYKYYRCRTHTLDPADCPHILRIREDVLEDYLLREFEGIAKKYYSKSKTAEKKPPKTAEQIKRKMQKLKDLYLSDLIEIEEYKKDYTELKQQLAAINPEPIKEFDLETLRRELKEYPDLDRQAKKEFWVRTIQRIDADNDGAFFVTPS

SEQ ID NO: 8893 - protein, 446 aa, Unknown
  Description of Unknown: Integrase B8894 sequence
  PTHR30461:SF3,SM00857,IPR006118,G3DSA:1.10.10.2600,IPR036162, PF13408,IPR025827,PS51737,G3DSA:3.40.50.1390,IPR006119, IPR038109,IPR011109,SSF53041,PTHR30461,PS00397, PS51736,cd00338,PF00239
MCQKIVVTLPNNLRIRVALYIRVSTEEQAKHGLSLADQRDALIAYAAAHGMEVVGIYEDAGISARKPYKKRPALMRLLDDCRAGKIDTILFVKLDRWFRNVAGYYAVQEVLDKNHVDWQAIREDYETRTASGRLKVNIMLSVAQDEADRTSERIKAINEGKRAKGQPTNGKTPIGICVKNRRYAIDEETADAARDMFPAFIRLQSILALRRYMATEWGIKRSYNKYKDALRSRLYLGEAFGVENALPALIDQETFDLAGKILERRSQRNASADRIYLFTGILRCRECGRNMQPETVKQVYKYYRCRTHTLDPADCPHILRIREDVLEDYLLREFEGIAKKYYSKSKTAEKKPPKTAEQIKRKMQKLKDLYLSDLIEIEEYKKDYTELKQQLAAINPEPIKEFDLETLRRELKEYPDLDRQAKKEFWVRTIQRIDADNDGAFFVTPS

SEQ ID NO: 8894 - protein, 446 aa, Unknown
  Description of Unknown: Integrase B8895 sequence
  PTHR30461:SF3,cd00338,SM00857,PS51736,IPR036162, PF13408,G3DSA:3.40.50.1390,IPR025827,IPR006119,SSF53041, PTHR30461,mobidb-lite,Coil,PF00239
MNIAIYPRKSKKDDNSESMEQQIDDCKKYIDKTYHNANIIVYSGDYAITGHSTAKRKDFQRMMDDVRAGRINAVVIVRYDRIARNMRDFCNLYHDMESAGCNLISVSQQIDTSTPYGKNFMYQMANMAELEWAVISERYKDTAAYKIREGKAYTGRVPIGFKIEKIDGVKKVVHDNEEQTRAIFDYLLATKSKRGTVLWVRKNFIPDFTRHKLDTMIKSDLYIGKVRDNDHFCDPYFTKEQMEEIRSVNQIKYAPSGHIYLFSGLFRCPICGRKMSSFYSIDRKTKKHRQYQRCWFGGNEKLHKTKLVSEAKTEKYLLENLDAALKNLEFDVKKEAGKPKQNLNKKLNDAIGERERLNYLFEKGRIDIPEYEKKYSILSEKINSITEELSNNKVVRIEEFKKQIPEDWKELYEQLDQKGKQEFWHRIIKEIYLNEAFEITGFIFYI

SEQ ID NO: 8895 - protein, 446 aa, Unknown
  Description of Unknown: Integrase B8896 sequence
  PTHR30461:SF3,cd00338,SM00857,IPR036162,PS51736,PF13408, G3DSA:3.40.50.1390,IPR025827,IPR006119,SSF53041,PTHR30461 ,mobidb-lite,Coil,PF00239
MNIAIYPRKSKKDDNSESMEQQIDDCKKYIDKTYHNANIIVYSGDYAITGHSTAKRKDFQRMMDDVRAGRINAVVIMRYDRIARNMRDFCNLYHDMESAGCNLISVSQQIDTSTPYGKNFMYQMANMAELEWAVISERYKDTAAYKIREGKAYTGRVPIGFKIEKIDGIKKVVHDNEEQTRAIFDYLLATKSKRGTVLWVRENLIPDFTRHKLDTMIKSDLYIGKVRENENFCEPYFTQKQMEEIRSVNQIKYAPSGHIYLFSGLFRCPICGRKMSSFYSIDRKTKKHRQYQRCWFGGNEKLHKTKLVSEAKTEKYLLENLDAALKNLEFDVKKEAGKPKRNLNKKLNDAIGERDRLNYLFEKGRIDIPEYEKKYSVLSEKINSITEELSNNKVVRIEEFKKQIPEDWKELYEQLDQKGKQEFWHRIIKEIYLNEAFEITGFIFYI

SEQ ID NO: 8896 - protein, 446 aa, Unknown
  Description of Unknown: Integrase B8897 sequence
  PTHR30461:SF3,cd00338,SM00857,IPR036162,PS51736, PF13408,G3DSA:3.40.50.1390,IPR025827,IPR006119,SSF53041, PTHR30461,mobidb-lite,Coil,PF00239
MNIAIYPRKSKKDDNSESMEQQIDDCKKYINKTYHNANIIVYSGDYAITGHSTAKRKDFQRMMDDVRAGRINAVVIMRYDRIARNMRDFCNLYHDMESAGCNLISVSQQIDTSTPYGKNFMYQMANMAELEWAVISERYKDTAAYKIREGKAYTGRVPIGFKIEKIDGVKKVVHDNEEQTRAIFDYLLATKSKRGTVLWVRENLIPDFTRHKLDTMIKSDLYIGKVRENENFCEPYFTKEQMEEIRSVNQIKYAPSGHIYLFSGLFRCPICGRKMSSFYSIDRKTKKHRQYQRCWFGGNEKLHKTKLVSEAKTEKYLLENLDAALKNLEFDVKKEAGKPKRNLNKKLNDAIGERDRLNYLFEKGRIDIPEYEKKYSVLSEKINSITEELSNNKVVRIEEFKKQIPEDWKELYEQLDQKGKQEFWHRIIKEIYLNEAFEITGFIFYI

SEQ ID NO: 8897 - protein, 446 aa, Unknown
  Description of Unknown: Integrase B8898 sequence
  PTHR30461:SF3,cd00338,SM00857,IPR036162,PS51736,PF13408, G3DSA:3.40.50.1390,IPR025827,IPR006119,SSF53041,PTHR30461 ,mobidb-lite,Coil,PF00239
MNIAIYPRKSKKDDNSESMEQQIDDCRKYINKTYPDANIIVYSGDYAITGHSTAKRKDFQRMMDDVRAGRINAVVIMRYDRIARNMRDFCNLYHDMESAGCNLISVSQQIDTSTPYGKNFMYQMANMAELEWAVISERYKDTAAYKIREGKAYTGRVPIGFKIEKIDGVKKVVHDNEEQTRAIFDYLLATKSKRGTVLWVRENFIPDFTRHKLDTMIKSDLYIGKVRENDHFCEPYFTKDQMEEIRSVNQIKYAPSGHIYLFSGLFRCPICGRKMSSFYSIDRKTKKHRQYQRCWFGGNEKLHKTKLVSEAKTEKYLLENIDTALKNLEFDVKKEESKPKRNLNKKLNDAIGERDRLNYLFEKGRIDIPEYEKKYSILSGKINSISEELSNNKVVKIEEFKKQIPSDWRVLYEQLDQKGKQEFWHRIIKEIYLNEAFEITGFIFYI

SEQ ID NO: 8898 - protein, 446 aa, Unknown
  Description of Unknown: Integrase B8899 sequence
  PTHR30461:SF3,SM00857,IPR006118,G3DSA:1.10.10.2600,IPR036162, PF13408,IPR025827,G3DSA:3.40.50.1390,PS51737,IPR006119, IPR038109,SSF53041,IPR011109,PTHR30461,PS00397, PS51736,cd00338,PF00239
MCQKIVVTLPNNLRIRVALYIRVSTEEQAKHGLSLADQRDALIAYAAAHGMEVVGIYEDAGISARKPYKKRPALMRLLDDCRAGKIDTILFVKLDRWFRNVAGYYAVQEVLDKNHVDWQAIREDYETRTASGRLKVNIMLSVAQDEADRTSERIKAINEGKRAKGQPTNGKTPIGICVKNRRYAIDEETADAARDMFPAFIRLQSILALRRYMATEWGIKRSYNKYKDALRSRLYLGEAFGVENALPALVDRETFDLAGKILERRSQRNASADRIYLFTGILRCRECGRNMQPETVKQVYKYYRCRTHTLDPADCPHILRIREDVLEDYLLREFEGIAKKYYSKSKTAEKKPPKTAEQIKRKMKKLKDLYLSDLIEIEEYKKDYTELKQQLAAINPEPIKEFDLETLQRELKEYPDLDRQAKKEFWVRTIQRIDADNDGAFFVTPS

SEQ ID NO: 8899 - protein, 446 aa, Unknown
  Description of Unknown: Integrase B8900 sequence
  PTHR30461:SF3,cd00338,SM00857,IPR036162,PF13408, IPR025827,G3DSA:3.40.50.1390,PS51736,IPR006119,SSF53041, PTHR30461,mobidb-lite,Coil,PF00239
MNIAIYPRKSKKDDNSESMEQQIDDCKKYINKTYHNANIIVYSGDYAITGHSTAKRKDFQRMMDDVRAGRINAVVIMRYDRIARNMRDFCNLYHDMESAGCNLISVSQQIDTSTPYGKNFMYQMANMAELEWAVISERYKDTAAYKIREGKAYTGRVPIGFKIEKIDGVKKVVHDNEEQTRAIFDYLLATKSKRGTVLWVRENLIPDFTRHKLDTMINSDLYIGKVRENENFCEPYFTKEQMEEIRSVNQIKYAPSGHIYLFSGLFRCPICGRKMASFYSIDRKTKKHRQYQRCWFGGNEKLHKTKLVSEAKTEKYLLENLDAALKNLEFDVKKEAGKPKQNLNKKLNDAIGERDRLNYLFEKGRIDIPEYEKKYSVLSEKINSITEELSNNKVVRIEEFKKQIPEDWKELYEQLDQKGKQEFWHRIIKEIYLNEAFEITGFIFYI

SEQ ID NO: 8900 - protein, 446 aa, Unknown
  Description of Unknown: Integrase B8901 sequence
  PTHR30461:SF3,cd00338,SM00857,PS51736, IPR036162,PF13408,IPR025827,G3DSA:3.40.50.1390, IPR006119,SSF53041,PTHR30461,mobidb-lite, Coil,PF00239
MNIAIYPRKSKKDDNSESMEQQIDDCKKYINKTYPNANIIVYSGDYAITGHSTAKRKDFQRMMDDVRAGRINAVVIMRYDRIARNMRDFCNLYHDMESAGCNLISVSQQIDTSTPYGKNFMYQMANMAELEWAVISERYKDTAAYKIREGKAYTGRVPIGFKIEKIDGVKKVVHDNEEQTRAIFDYLLATKSKRGTVLWVRENLISDFTRHKLDSMINSDLYIGKVRENENFCEPYFTKEQMEEIRSVNQIKYAPSGHIYLFSGLFRCPICGRKMASFYSIDRKTKKHRQYQRCWFGGNEKLHKTKLVSEAKTEKYLLENLDTALKNLEFDVKKEAGKPKRNLNKKLNDAIGERDRLNYLFEKGRIDIPEYEKKYSVLSEKINSITEELSNNKVVRIEEFKKQIPEDWKELYEQLDQKGKQEFWHRIIKEIYLNEAFEITGFIFYI

SEQ ID NO: 8901 - protein, 446 aa, Unknown
  Description of Unknown: Integrase B8902 sequence
  PTHR30461:SF3,cd00338,SM00857,IPR036162,PS51736, PF13408,G3DSA:3.40.50.1390,IPR025827,IPR006119,SSF53041, PTHR30461,mobidb-lite,Coil,PF00239
MNIAIYPRKSKKDDNSESMEQQIDDCRKYINKTYPDANIIVYSGDYAITGHSTAKRKDFQRMMDDVRAGRINAVVIMRYDRIARNMRDFCNLYHDMESAGCNLISVSQQIDTSTPYGKNFMYQMANMAELEWAIISERYKDTAAYKIREGKAYTGRVPIGFKIEKIDGVKKVVHDNEEQTRAIFDYLLATKSKRGTVLWVRENLIPDFTRHKLDTMIKSDLYIGKVRENDHFCQPYFTKDQMEEIRSVNQIKYAPSGHIYLFSGLFRCPICGRKMSSFYSIDRKTKKHRQYQRCWFGGNEKLHKTKLVSEAKTEKYLLENLDAALKNLEFDVKKEAGKPKQNLNKKLNDAIGERERLNYLFEKGRIDIPEYEKKYSVLSEKINSITEELSNNKVVRIEEFKKQIPEDWKELYEQLDQKGKQEFWHRIIKEIYLNEAFEITGFIFYI

SEQ ID NO: 8902 - protein, 446 aa, Unknown
  Description of Unknown: Integrase B8903 sequence
  PTHR30461:SF3,cd00338,SM00857,IPR036162, PF13408,IPR025827,G3DSA:3.40.50.1390,PS51736, IPR006119,SSF53041,PTHR30461,mobidb-lite, Coil,PF00239
MNIAIYPRKSKKDDNSESMEQQIDDCRKYINKTYPDANIIVYSGDYAITGHSTAKRKDFQRMMDDVRAGRINAVVIMRYDRIARNMRDFCNLYHDMESAGCNLISVSQQIDTSTPYGKNFMYQMANMAELEWAVISERYKDTAAYKIREGKAYTGRVPIGFKIEKIDGVKKVVHDNEEQTRAIFDYLLATKSKRGTVLWVRENLIPDFTRHKLDTMIKSDLYIGKVRENENFCEPYFTQKQMEEIRSVNQIKYAPSGHIYLFSGLFRCPICGRKMASFYSIDKKTKKHRQYQRCWFGGNEKLHKTKLVSEAKTEKYLLENLDAALKNLEFDVKKEAGKPKRNLNKKLNDAIGERDRLNYLFEKGRIDIPEYEKKYSILSGKINSISEELSNNKVVRIEEFKKQIPSNWKVLYEQLDQKGKQEFWHRIIKEIYLNEAFEITGFIFYI

SEQ ID NO: 8903 - protein, 446 aa, Unknown
  Description of Unknown: Integrase B8904 sequence
  PTHR30461:SF3,cd00338,SM00857,IPR036162,PF13408, IPR025827,G3DSA:3.40.50.1390,PS51736,IPR006119,SSF53041, PTHR30461,mobidb-lite,Coil,PF00239
MNIAIYPRKSKKDDNSESMEQQIDDCRKYINKTYPDANIIVYSGDYAITGHSTAKRKDFQRMMDDVRAGRINAVVIMRYDRIARNMRDFCNLYHDMESAGCNLISVSQQIDTSTPYGKNFMYQMANMAELEWAVISERYKDTAAYKIREGKAYTGRVPIGFKIEKIDGIKKVVHDNEEQTRAIFDYLLATKSKRGTVLWVRENLIPDFTRHKLDTMIKSDLYIGKVRENENFCEPYFTQKQMEEIRSVNQIKYAPSGHIYLFSGLFRCPICGRKMSSFYSIDRKTKKHRQYQRCWFGGNEKLHKTKLVSETKTEKYLLENLDAALKNLEFDVKKEAGKPKRNLNKKLNDAIAERDRLNYLFEKGRIDIPEYEKKYSILSGKINSISEELSNNKVVKIEEFKKQIPSDWKVLYEQLDQKGKQEFWHRIIKEIYLNEAFEISGFIFYI

SEQ ID NO: 8904 - protein, 446 aa, Unknown
  Description of Unknown: Integrase B8905 sequence
  PTHR30461:SF3,cd00338,SM00857,IPR036162, PF13408,IPR025827,G3DSA:3.40.50.1390,mobidb-lite, IPR006119,SSF53041,PTHR30461,PS51736, Coil,PF00239
MNIAIYPRKSKKDDNSESMEQQIDDCKKYIDKTYTNANIIVYSGDYAITGHSTAKRKDFQRMMDDVRAGRINAVVIMRYDRIARNMRDFCNLYHDMESAGCNLISVSQQIDTSTPYGKNFMYQMANMAELEWAVISERYKDTAAYKIREGKAYTGRVPIGFKIEKIDGVKKVVHDNEEQTRAIFDYLLATKSKRGTVLWVRENFIPDFTRHKLDTMIKSDLYIGKVRENENFCEPYFTKEKMEEIRSVNQIKYAPSGHIYLFSGLFRCPICGRKMASFYSIDRKTKKHRQYQRCWFGGNEKLHKTKLVSEAKTEKYLLENLDAALKNLEFDVKKEAGKPKRNLNKKLNDAIAERDRLNYLFEKGRIDIPEYEKKYSILSGKINSISEELSNNKVVRIEEFKKQIPSNWKVLYEQLDQKGKQEFWHRIIKEIYLNEAFEITGFIFYI

SEQ ID NO: 8905 - protein, 446 aa, Unknown
  Description of Unknown: Integrase B8906 sequence
  PTHR30461:SF3,SM00857,IPR006118,G3DSA:1.10.10.2600,IPR036162, PF13408,IPR025827,G3DSA:3.40.50.1390,PS51737,IPR006119, IPR038109,IPR011109,SSF53041,PTHR30461,PS00397, PS51736,cd00338,PF00239
MCKKIVVTLPNNLRIRVALYIRVSTEEQAKHGLSLADQREALIAYAAAHGMEVVGIYEDAGISARKPYKKRPALLRLLDDCSAGKIDTILFVRLDRWFRNVAGYYAVQEVLDKNHVDWQAIREDYETRTASGRLKVNIMLSVAQDEADRTSERIKAINEGKRAKGQPTNGKTPIGICVKNRRYTIDEETADAARDMFPAFIRLQSILALRRYMATEWGIKRSYNKYKDALGNRLYLGEAFGVENALPALIDQETFDLAGKILERRSQRNASADRIYLFTGILRCRECGRNMQPETVKQVYKYYRCRTHTLDPADCPHILRIREDVLEDYLLREFEGIAKKYYSKSKTAEKKPPKTAEQIKRKMQKLKDLYLSDLIEIEEYKKDYTELKQQLAAINPEPIKEFDLETLRRELKEYPDLDRQAKKEFWVRTIQRIDADNDGAFFVTPS

SEQ ID NO: 8906 - protein, 446 aa, Unknown
  Description of Unknown: Integrase B8907 sequence
  PTHR30461:SF3,cd00338,SM00857,IPR036162,PF13408, IPR025827,G3DSA:3.40.50.1390,mobidb-lite,IPR006119,SSF53041, PTHR30461,PS51736,Coil,PF00239
MNIAIYPRKSKKDDNSESMEQQIDDCKKYIDKTYTNANIIVYSGDYAITGHSTAKRKDFQRMMDDVRAGRINAVVIMRYDRIARNMRDFCNLYHDMESAGCNLISVSQQIDTSTPYGKNFMYQMANMAELEWAVISERYKDTAAYKIREGKAYTGRVPIGFKIEKIDGVKKVVHDNEEQTRAIFDYLLATKSKRGTVLWVRENFIPDFTRHKLDTMIKSDLYIGKVRENENFCEPYFTKEKMEEIRSVNQIKYAPSGHIYLFSGLFRCPICGRKMASFYSIDRKTKKHRQYQRCWFGGNEKLHKTKLVSEAKTEKYLLENLDAALKNLEFDVKKEAGKPKRNLNKKLNDAIGERDRLNYLFEKGRIDIPEYEKKYSVLSEKINSITEELSNNKVVRIEEFKKQIPEDWKELYEQLDQKGKQEFWHRIIKEIYLNEAFEITGFIFYI

SEQ ID NO: 8907 - protein, 446 aa, Unknown
  Description of Unknown: Integrase B8908 sequence
  PTHR30461:SF3,SM00857,IPR006118,G3DSA:1.10.10.2600, IPR036162,PF13408,IPR025827,PS51737, G3DSA:3.40.50.1390,IPR006119,IPR038109,SSF53041, IPR011109,PTHR30461,PS00397,PS51736,cd00338,PF00239
MCQKIVVTLPNNLRIRVALYIRVSTEEQAKHGLSLADQRDALIAYAAAHGMEVVGIYEDAGISARKPYKKRPALMRLLDDCRAGKIDTILFVKLDRWFRNVAGYYAVQEVLDKNHVDWQAIREDYETRTASGRLKVNIMLSVAQDEADRTSERIKAINEGKRAKGQPTNGKTPIGICVKNRRYDIDEKTADAARDMFPAFIRLQSILALRRYMATEWGIKRSYNKYKDALRSRLYLGEAFGVENALPALVDRETFDLAGKILERRSQRNASADRIYLFTGILRCRECGRNMQPETVKQVYKYYRCRTHTLDPADCPHILRIREDVLEDYLLREFEGIAKKYYSKSKTAEKKPPKTAEQIKRKMQKLKDLYLSDLIEIEEYKKDYTELKQQLAAINPEPIKEFDLETLRRELKEYPDLDRQAKKEFWVRTIQRIDADNDGAFFVTPS

SEQ ID NO: 8908 - protein, 446 aa, Unknown
  Description of Unknown: Integrase B8909 sequence
  PTHR30461:SF3,SM00857,IPR006118,G3DSA:1.10.10.2600,IPR036162, PF13408,IPR025827,PS51737,G3DSA:3.40.50.1390,IPR006119, IPR038109,SSF53041,IPR011109,PTHR30461,PS00397, PS51736,cd00338,PF00239
MCQKIVVTLPNNLRIRVALYIRVSTEEQAKHGLSLADQREALTDYAAAHNMEVVGIYEDAGISARKPYKKRPALLRLLDDCRAGKIDTILFVKLDRWFRNVAGYYAVQEVLDKNHVDWQAIREDYETRTASGRLKVNIMLSVAQDEADRTSERIKAINEGKRAKGQPTNGKTPIGICVKNRRYDIDEETADAARDMFPAFIRLQSILALRRYMATEWGIKRSYNKYKDALRSRLYLGEAFGVENALPALVDRETFDLAGKILERRSQRNASADRIYLFTGILRCRECGRNMQPETVKQVYKYYRCRTHTLDPADCPHILRIREDVLEDYLLREFEGIAKKYYSKSKTAEKKPPKTAEQIKRKMQKLKDLYLSDLIEIEEYKKDYTELKQQLAAINPEPIKEFDLETLRRELKEYPDLDRQAKKEFWVRTIQRIDADNDGAFFVTPS

SEQ ID NO: 8909 - protein, 446 aa, Unknown
  Description of Unknown: Integrase B8910 sequence
  PTHR30461:SF3,SM00857,PS51736,IPR036162,PF13408, G3DSA:3.40.50.1390,IPR025827,IPR006119,SSF53041,PF00239, PTHR30461,mobidb-lite,Coil,cd00338
MNIAIYPRKSKKDDNSESMEQQIDDCRKYINKTYPDANIIVYSGDYAITGHSTAKRKDFQRMMDDVRAGRINAVVIMRYDRIARNMRDFCNLYHDMESAGCNLISVSQQIDTSTPYGKNFMYQMANMAELEWAVISERYKDTAAYKIREGKAYTGRVPIGFKIEKIDGVKKVVHDNEEQTRAIFDYLLATKSKRGTVLWVRENFIPDFTRHKLDTMIKSDLYIGKVRENDHFCEPYFTEDQMEEIRSVNQIKYAPSGHIYLFSGLFRCPICGRKMASFYSIDRKTKKHRQYQRCWFGGNEKLHNTKLVSEAKTEKYLLENLDAALKNLEFDVKKEAGKPKRNLNKKLNDAIAERDRLNYLFEKGRIDIPEYEKKYSVLSEKINSINEELSNNKVVRIEEFKKQIPEDWKELYEQLDQKGKQEFWHRIIKEIYLNEAFEITGFIFYI

SEQ ID NO: 8910 - protein, 446 aa, Unknown
  Description of Unknown: Integrase B8911 sequence
  PTHR30461:SF3,IPR036162,PS51737,IPR011109, PTHR30461,PS00397,PF00239,G3DSA:1.10.10.2600, IPR006119,SSF53041,cd00338,SM00857,IPR025827,IPR038109 ,PS51736,IPR006118,PF13408,G3DSA:3.40.50.1390,PF07508,Coil
MVTALYARVSTDAQAEEGYSIDIQGERLEAYCKLKGYKSFEHYVDGGYTGSNLNRPAMTRLIEDCKCGEVERVVVFKLDRLSRSQKDTLYLIEEVFLPHNVDFVSISESFDTATPFGRAMIGILSVFAQLERENIKERTKAGMLGRVREGYWPGGGRTPFGYDYDPKLKTLVPNKDAETVRKIYDLYIGGCSTYEIQRILGMKYDRLAEQILARKTNTGVIVYNGVEYQGKHEPIISLETYERAMACMKKRSAAPTPRNNVYLLTGLLVCGVCGAKMRYQGGHIYCYSRQKSKAYLVKDPNCDNESHNVQDIENAVLSIFFQNTSRFTRAESYDVKTNVLDELMQQKKGLEQKIKRLYGLYGDGGDDYLIEAIEESKQQLVRIADKIANEEERNKEEAKRRKLVEKVSNIRDRWNTMAPEEQREVLHEAIKQITITHDKINIDFNL

SEQ ID NO: 8911 - protein, 446 aa, Unknown
  Description of Unknown: Integrase B8912 sequence
  PTHR30461:SF3,SM00857,IPR036162,PF13408,IPR025827, G3DSA:3.40.50.1390,PS51736,IPR006119,SSF53041,PF00239, PTHR30461,mobidb-lite,Coil,cd00338
MNIAIYPRKSKKDDNSESMEQQIDDCKKYIDKTYHNANIIVYSGDYAITGHSTAKRKDFQRMMDDVRAGRINAVVIMRYDRIARNMRDFCNLYHDMESAGCNLISVSQQIDTSTPYGKNFMYQMANMAELEWAVISERYKDTAAYKIREGKAYTGRVPIGFKIEKIDGVKKVVHDNEEQTRSIFDYLLATKSKRGTVLWVRENLIPDFTRHKLDTMIKSDLYIGKVRENENFCEPYFTKDQMEEIRSVNQIKYAPSGHIYLFSGLFRCPICGRKMASFYSIDRKTKKHRKYQRCWFGGNEKLHKTKLVSEAKTEKYLLENLDTALKNLEFDVKKEAGKPKRNLNKKLNDAIGERDRLNYLFEKGRIDIPEYEKKYSVLSEKINSITEELSNNKVVRIEEFKKQIPEDWKELYEQLDQKGKQEFWHRIIKEIYLNEAFEITGFIFYI

SEQ ID NO: 8912 - protein, 446 aa, Unknown
  Description of Unknown: Integrase B8913 sequence
  PTHR30461:SF3,cd00338,SM00857,IPR036162, PF13408,IPR025827,G3DSA:3.40.50.1390,mobidb-lite, IPR006119,SSF53041,PTHR30461,PS51736, Coil,PF00239
MNIAIYPRKSKKDDNSESMEQQIDDCKKYIDKTYTNANIIVYSGDYAITGHSTAKRKDFQRMMDDVRAGRINAVVIMRYDRIARNMRDFCNLYHDMESAGCNLISVSQQIDTSTPYGKNFMYQMANMAELEWAVISERYKDTAAYKIREGKAYTGRVPIGFKIEKIDGVKKVVHDNEEQTRAIFDYLLATKSKRGTVLWVRENLIPDFTRHKLDTMIKSDLYIGKVRENENFCEPYFTKEQMEEIRSVNQIKYAPSGHIYLFSGLFRCPICGRKMSSFYSIDRKTKKHRQYQRCWFGGNEKLHKTKLVSEAKTEKYLLENLDAALKNLEFDVKKEAGKPKRNLNKKLNDAIGERDRLNYLFEKGRIDIPEYEKKYSVLSEKINSITEELSNNKVVRIEEFKKQIPEDWKELYEQLDQKGKQEFWHRIIKEIYLNEAFEITGFIFYI

SEQ ID NO: 8913 - protein, 446 aa, Unknown
  Description of Unknown: Integrase B8914 sequence
  PTHR30461:SF3,cd00338,SM00857,IPR036162,PF13408, IPR025827,G3DSA:3.40.50.1390,PS51736,IPR006119,SSF53041, PTHR30461,mobidb-lite,Coil,PF00239
MNIAIYPRKSKKDDNSESMEQQIDDCKKYINKTYHNANILVYSGDYAITGHSTAKRKDFQRMMDDVRAGRINAVVIMRYDRIARNMRDFCNLYHDMESAGCNLISVSQQIDTSTPYGKNFMYQMANMAELEWAVISERYKDTAAYKIREGKAYTGRVPIGFKIEKIDGVKKVVHDNEEQTRAIFDYLLATKSKRGTVLWVRENFIPDFTRHKLDTMIKSDLYIGKVRENDHFCEPYFTKEQMEEIRSVNQIKYAPSGHIYLFSGLFRCPICGRKMASFYSIDRKTKKHRQYQRCWFGGNEKLHKTKLVSEAKTEKYLLENLDAALKNLEFDVKKEAGKPKRNLNKKLNDAIAERDRLNYLFEKGRIDIPEYEKKYSVLSEKINSINEELSNNKVVRIEEFKKQIPEDWKELYEQLDQKGKQEFWHRIIKEIYLNEAFEITGFIFYI

SEQ ID NO: 8914 - protein, 446 aa, Unknown
  Description of Unknown: Integrase B8915 sequence
  PTHR30461:SF3,SM00857,IPR006118,G3DSA:1.10.10.2600, IPR036162,PF13408,IPR025827,G3DSA:3.40.50.1390, PS51737,IPR006119,IPR038109,IPR011109, SSF53041,PTHR30461,PS00397,PS51736,cd00338,PF00239
MCQKIVVTLPNNLRIRVALYIRVSTEEQAKHGLSLADQREALIAYAAAHGMEVVGIYEDAGISARKPYKKRPALMRLLDDCSAGKIDTILFVKLDRWFRNVAGYYAVQEVLDKNHVDWQAIREDYETRTASGRLKVNIMLSVAQDEADRTSERIKAINEGKRAKGQPTNGKTPIGICVKNRRYDIDEETADAARDMFQAFIRLQSILALRRYMATEWGIKRSYNKYKDALRSRLYLGEAFGVENALPALVDQETFDLAGKILERRSQRNASADRIYLFTGILRCRECGRNMQPETVKQVYKYYRCRTHTLDPADCPHILRIREDVLEDYLLREFEGIAKKYYSKSKTAEKKPPKTAEQIKRKMQKLKDLYLSDLIEIEEYKKDYTELKQQLAAINPEPMKEFDLETLRRELKEYPDLDRQAKKEFWVRTIQRIDADNDGAFFVTPS

SEQ ID NO: 8915 - protein, 446 aa, Unknown
  Description of Unknown: Integrase B8916 sequence
  PTHR30461:SF3,cd00338,SM00857,PS51736,PF13408, IPR025827,G3DSA:3.40.50.1390,IPR036162,IPR006119,SSF53041, PTHR30461,mobidb-lite,Coil,PF00239
MNIAIYPRKSKKDDNSESMEQQIDDCRKYINKTYPDANIIVYSGDYAITGHSTAKRKDFQRMMDDVRAGRINAVVIMRYDRIARNMRDFCNLYHDMESAGCNLISVSQQIDTSTPYGKNFMYQMANMAELEWAVISERYKDTAAYKIREGKAYTGRVPIGFKIEKIDGVKKVVHDNEEQTRAIFDYLLATKSKRGTVLWVRENFIPDFTRHKLDTMIKSDLYIGKVRENDHFCEPYFTKEQMEEIRSVNQIKYAPSGHIYLFSGLFRCPICGRKMASFYSIDRKTKKHRQYQRCWFGGNEKLHKTKLVSEAKTEKYLLENLDAALKNLEFDVKKEAGKPKRNLNKKLNDAIAERDRLNYLFEKGRIDIPEYEKKYSVLSEKINSINEELSNNKVVRIEEFKKQIPEDWKELYEQLDQKGKQEFWHRIIKEIYLNEAFEITGFIFYI

SEQ ID NO: 8916 - protein, 446 aa, Unknown
  Description of Unknown: Integrase B8917 sequence
  PTHR30461:SF3,cd00338,SM00857,IPR036162,PS51736,PF13408, G3DSA:3.40.50.1390,IPR025827,IPR006119,SSF53041,PTHR30461 ,mobidb-lite,Coil,PF00239
MNIAIYPRKSKKDDNSESMEQQIDDCRKYINKTYPDANIIVYSGDYAITGHSTAKRKDFQRMMDDVRAGRINAVVIMRYDRIARNMRDFCNLYHDMESAGCNLISVSQQIDTSTPYGKNFMYQMANMAELEWAVISERYKDTAAYKIREGKAYTGRVPIGFKIEKIDGVKKVVHDNEEQTRAIFDYLLATKSKRGTVLWVRENLIPDFTRHKLDSMIKSDLYIGKVRENDHFCEPYFTKDQMEEIRSVNQIKYAPSGHIYLFSGLFRCPICGRKMSSFYSIDRKTKKHRQYQRCWFGGNEKLHKTKLVSEAKTEKYLLENIDTALKNLEFDVKKEESKPKRNLNKKLNDAIGERDRLNYLFEKGRIDIPEYEKKYSVLSEKINSITEELSNNKVVRIEEFKKQIPEDWKGLYEQLDQKGKQEFWHRIIKEIYLNEAFEITGFIFYI

SEQ ID NO: 8917 - protein, 446 aa, Unknown
  Description of Unknown: Integrase B8918 sequence
  PTHR30461:SF3,SM00857,IPR006118,G3DSA:1.10.10.2600,IPR036162, PF13408,IPR025827,G3DSA:3.40.50.1390,PS51737,IPR006119, IPR038109,IPR011109,SSF53041,PTHR30461,PS00397, PS51736,cd00338,PF00239
MCQKIVVTLPNNLRIRVALYIRVSTEEQAKHGLSLADQREALTAYAAAHSMEVVGIYEDAGISARKPYKKRPALMRLLDDCRAGKIDTILFVKLDRWFRNVAGYYAVQEVLDKNHVDWQAIREDYETRTASGRLKVNIMLSVAQDEADRTSERIKAINEGKRAKGQPTNGKTPIGICVKNRRYDIDEKTADAARDMFPAFIRLQSILALRRYMATEWGIKRSYNKYKDALRSRLYLGEAFGVENALPALVDRETFDLAGKILERRSQRNASADRIYLFTGILRCRECGRNMQPETVKQVYKYYRCRTHTLDPADCPHILRIREDVLEDYLLREFEGIAKKYYSKSKTAEKKPPKTAEQIKRKMQKLKDLYLSDLIEIEEYKKDYTELKQQLAAINPEPIKEFDLETLRRELKEYPDLDRQAKKEFWVRTIQRIDADNDGAFFVTPS

SEQ ID NO: 8918 - protein, 446 aa, Unknown
  Description of Unknown: Integrase B8919 sequence
  PTHR30461:SF3,SM00857,IPR036162,PF13408,IPR025827, G3DSA:3.40.50.1390,mobidb-lite,IPR006119,SSF53041,PF00239, PTHR30461,PS51736,Coil,cd00338
MNIAIYPRKSKKDDNSESMEQQIDDCRKYINKTYPNANIIVYSGDYAITGHSTAKRKDFQRMMDDVRAGRINAVVIMRYDRIARNMRDFCNLYHDMESAGCNLISVSQQIDTSTPYGKNFMYQMANMAELEWAVISERYKDTAAYKIREGKAYTGRLPIGFKIEKIDGVKKVVHDNEEQTRAIFDYLLATKSKRGTVLWVRENLIPDFTRHKLDSMIKSDLYIGKVRENENFCEPYFTKEQMEEIRSVNQIKYAPSGHIYLFSGLFRCPICGRKMSSFYSIDRKTKKHRQYQRCWFGGNEKLHKTKLVSEAKTEKYLLENIDTALKNLEFDVKKEESKPKRNLNKKLTDAIGERDRLNYLFEKGRIDIPEYEKKYSILSGKINSISEELSNNKVVKIEEFKKQIPSDWRVLYEQLDQKGKQEFWHRIIKEIYLNEAFEITGFIFYI

SEQ ID NO: 8919 - protein, 446 aa, Unknown
  Description of Unknown: Integrase B8920 sequence
  PTHR30461:SF3,cd00338,SM00857,IPR036162, PF13408,IPR025827,G3DSA:3.40.50.1390,PS51736, IPR006119,SSF53041,PTHR30461,mobidb-lite, Coil,PF00239
MNIAIYPRKSKKDDNSESMEQQIDDCRKYINKTYPDANIIVYSGDYAITGHSTAKRKDFQRMMDDVRAGRINAVVIMRYDRIARNMRDFCNLYHDMESAGCNLISVSQRIDTSTPYGKNFMYQMANMAELEWAIISERYKDTAAYKIREGKAYTGRVPIGFKIEKIDGVKKVVHDNEEQTRAIFDYLLATKSKRGTVLWVRENLIPDFTRHKLDSMIKSDLYIGKVRENENFCEPYFTKDQMEEIRSVNQIKYAPSGHIYLFSGLFRCPICGRKMASFYSIDRKTKKHRQYQRCWFGGNEKLHKTKLVSEAKTEKYLLENLDAALKNLEFDVKKEAGKPKRNLNKKLNDAIAERDRLNYLFEKGRIDIPEYEKKYSVLSEKINSINEELSNNKVVRIEEFKKQIPEDWKELYEQLDQKGKQEFWHRIIKEIYLNEAFEITGFIFYI

SEQ ID NO: 8920 - protein, 446 aa, Unknown
  Description of Unknown: Integrase B8921 sequence
  PTHR30461:SF3,IPR036162,PS51737,IPR011109,PTHR30461, PS00397,PF00239,G3DSA:1.10.10.2600,IPR006119,SSF53041, cd00338,SM00857,IPR025827,IPR038109,PS51736, IPR006118,PF13408,G3DSA:3.40.50.1390,Coil
MIKQKVRLYARVSTEEQARKKNSIPAQLNKLYAYCKENDYEVVNEYIDEGISASTIKKRKALLRMLNDLQRNDIILFTNLDRFSRNVLDANKMIEMFEPLNVSFKAIGEEDIDITTADGRFLFNLKVNLAERERAKVSERILTVFDYKLSQGKLINGRLPRGYTRSADGYAVINDDADFIRDVYRTFEDVRQIRTLTRVINNKYKLDLCSKTYRRILKQQAYIGLYRDKYIFPPIIKNEQFERVQRIFDGNTIKATKNQTYIFSGLIKCKVCGMRLGGSSSNGNSGDRKLKYKMYKCPKCQRGNGTHQCLAEKKLEKHLLPIVMDAIQNKIYTLSAYESQITQNRDIIDATKDKIKRLQDLYIDGKISKEQFDNKYEGLNKILDEESKKTNLKMIAKAKEDYEKLLNMNISEIYDQFDDNGKSVFWHSFIDYIVVNDYDNIDIFLQ

SEQ ID NO: 8921 - protein, 446 aa, Unknown
  Description of Unknown: Integrase B8922 sequence
  PTHR30461:SF3,SM00857,IPR006118,G3DSA:1.10.10.2600,IPR036162, PF13408,IPR025827,PS51737,G3DSA:3.40.50.1390,IPR006119, IPR038109,IPR011109,SSF53041,PTHR30461,PS00397, PS51736,cd00338,PF00239
MCPKIVVTLPNNLRIRVALYIRVSTEEQAKHGLSLADQREALIAYAAAHGMEVVGIYEDAGISARKPYKKRPALMRLLDDCSAGKIDTILFVKLDRWFRNVAGYYAVQEVLDKNHVDWQAIREDYETRTASGRLKVNIMLSVAQDEADRTSERIKAINEGKRAKGQPTNGKTPIGICVKNRLYAIDEETADAARDMFPAFIRLQSILALRRYMATEWGIKRSYNKYKDALRSRLYLGEAFGVENALPALVDQETFDLAGKILERRSQRNASADRIYLFTGILRCRECGRNMQPETVKQVYKYYRCRTHTLDPADCPHILRIREDALEDYLLREFEGIAKKYYSKSKTAEKKPPKTAEQIKRKMQKLKDLYLSDLIEIEEYKKNYTELKQQLAAINPEPIKEFDLETLRRELKEYPDLDRQAKKEFWVRTIQRIDADNDGAFFVTPS

SEQ ID NO: 8922 - protein, 446 aa, Unknown
  Description of Unknown: Integrase B8923 sequence
  PTHR30461:SF3,SM00857,IPR006118,G3DSA:1.10.10.2600,IPR036162, PF13408,IPR025827,G3DSA:3.40.50.1390,PS51737,IPR006119, IPR038109,SSF53041,IPR011109,PTHR30461,PS00397, PS51736,cd00338,PF00239
MCQKIVVTLPNNLRIRVALYIRVSTEEQAKHGLSLADQREALTDYAAAHNMEVVGIYEDAGISARKPYKKRPALLRLLDDCRAGKIDTILFVKLDRWFRNVAGYYAVQEVLDKNHVDWQAIREDYETRTASGRLKVNIMLSVAQDEADRTSERIKAINEGKRAKGQPTNGKTPIGICVKNRRYAIDEETAAAARDMFPAFIRLQSILALRRYMATEWGIKRSYNKYKDALRSRLYLGEAFGVENALPALVDRETFDLAGKILERRSQRNASADRIYLFTGILRCRECGRNMQPETVKQVYKYYRCRTHTLDPADCPHILRIREDVLEDYLLREFEGIAKKYYSKSKTAEKKPPKTAEQIKRKMQKLKDLYLSDLIEIEEYKKDYTELKQQLAAINPEPIKEFDLETLRRELKEYPDLDRQAKKEFWVRTIQRIDADNDGAFFVTPS

SEQ ID NO: 8923 - protein, 446 aa, Unknown
  Description of Unknown: Integrase B8924 sequence
  PTHR30461:SF3,SM00857,IPR006118,G3DSA:1.10.10.2600,IPR036162, PF13408,PS51737,IPR025827,G3DSA:3.40.50.1390,IPR006119, IPR038109,IPR011109,SSF53041,PTHR30461,PS00397, PS51736,cd00338,PF00239
MCQKIVVTLPNNLRIRVALYIRVSTEEQAKHGLSLADQREALIAYAATHGMEVVGIYEDAGISARKPYKKRPALMRLLDDCRAGKIDTILFVKLDRWFRNVAGYYAVQEVLDKNHVDWQAIREDYETRTASGRLKVNIMLSVAQDEADRTSERIKAINEGKRAKGQPTNGKTPIGICVKNRRYVIDEETADAARDMFPAFIRLQSILALRRYMATEWGIKRSYNKYKDALSNRLYLGEAFGVENALPALVDQETFDLAGKILERRSQRNASADRIYLFTGILRCRECGRNMQPETVKQVYKYYRCRTHTLDPADCPHILRIREDVLEDYLLREFEGIAKKYYSKSKTAEKKPPKTAEQIKRKMQKLKDLYLSDLIEIEEYKKDYTELKQQLAAINPEPIKEFDLETLRRELKEYPDLDRQAKKEFWVRTIQRIDADNDGAFFVTPS

SEQ ID NO: 8924 - protein, 446 aa, Unknown
  Description of Unknown: Integrase B8925 sequence
  PTHR30461:SF3,IPR036162,PS51737,IPR011109,PTHR30461, PS00397,PF00239,G3DSA:1.10.10.2600,IPR006119,SSF53041, cd00338,SM00857,IPR025827,IPR038109,PS51736, IPR006118,PF13408,G3DSA:3.40.50.1390,Coil
MCQKIVVTLPNNLRIRVALYIRVSTEEQAKHGLSLADQREALTDYAAAHNMEVVGIYEDAGISARKPYKKRPALMRLLDDCNAGKVDTILFVKLDRWFRNVAGYYAVQEVLDKNHVAWQAIREDYETRTASGRLKVNIMLSVAQDEADRTSERIKDINEGKRAKGQPTNGRTPIGICVKNRRYAIDEETADAARDMFPAFIRLQSILALRRYMATEWGIKRSYNKYKDALGNRLYLGEAFGVENALPALIDQETFDLAGKILERRSQRNASADRIYLFTGILRCRECGRNMQPETVKQVYKYYRCRTHTLDPADCPHILRIREDVLEDYLLREFEGIAKKYYSKSKTAEKKPPKTAEQIKRKMQKLKELYLSDLIEIEEYKKDYTGLKQQLAAINSEPIKEFDLETLRRELKEYPNLDRQAKKEFWVRTIQRIDADNDGAFFVTPS

SEQ ID NO: 8925 - protein, 446 aa, Unknown
  Description of Unknown: Integrase B8926 sequence
  PTHR30461:SF3,SM00857,IPR006118,G3DSA:1.10.10.2600,IPR036162, PF13408,IPR025827,G3DSA:3.40.50.1390,PS51737,IPR006119, IPR038109,IPR011109,SSF53041,PTHR30461,PS00397, PS51736,cd00338,PF00239
MCQKIVVTLPNNLRIRVALYIRVSTEEQAKHGLSLADQREALIAYAAAHGMEVVGIYEDAGISARKPYKKRPALMRLLDDCSAGKIDTILFVKLDRWFRNVAGYYAVQEVLDKNHVDWQAIREDYETRTASGRLKVNIMLSVAQDEADRTSERIKAINEGKRAKGQPTNGKTPIGICVKNRRYAIDEETADAARDMFPAFIRLQSILALRRYMATEWGIKRSYNKYKDALRSRLYLGEAFGVENALPALVDRETFDLAGKILERRSQRNASADRIYLFTGILRCRECGRNMQPETVKQVYKYYRCRTHTLDPADCPHILRIREDVLEDYLLREFEGIAKKYYSKSKTAEKKPPKTAEQIKRKMQKLKDLYLSDLIEIEEYKKDYTELKQQLAAINPEPIKEFDLETLRRELKEYPDLDRQAKKEFWVRTIQRIDADNDGAFFVTPS

SEQ ID NO: 8926 - protein, 446 aa, Unknown
  Description of Unknown: Integrase B8927 sequence
  PTHR30461:SF3,SM00857,IPR006118,G3DSA:1.10.10.2600,IPR036162, PF13408,PS51737,G3DSA:3.40.50.1390,IPR025827,IPR006119, IPR038109,IPR011109,SSF53041,PTHR30461,PS00397, PS51736,cd00338,PF00239
MCQKIVVTLPNNLRIRVALYIRVSTEEQAKHGLSLADQREALIAYAAAHGMEVVGIYEDAGISARKPYKKRPALMRLLDDCRAGKIDTILFVKLDRWFRNVAGYYAVQEVLDKNHVDWQAIREDYETRTASGRLKVNIMLSVAQDEADRTSERIKAINEGKRAKGQPTNGKTPIGICVKNRRYAIDEETADAARDMFPAFIRLQSILALRRYMATEWGIKRSYNKYKDALKSRLYLGEAFGVENALPALVDQETFDLAGKILERRSQRNASADRIYLFTGILRCRECGRNMQPETVKQVYKYYRCRTHTLDPADCPHILRIREDVLEDYLLREFEGIAKKYYSKSKTAEKKQPKTAEQIKRKMQKLKDLYLSDLIEIEEYKKDYTELKQQLAAINPEPIKEFDLETLRRELKEYPDLDRQAKKEFWVRTIQRIDADNDGAFFVTPS

SEQ ID NO: 8927 - protein, 446 aa, Unknown
  Description of Unknown: Integrase B8928 sequence
  PTHR30461:SF3,cd00338,SM00857,IPR036162,PF13408, IPR025827,G3DSA:3.40.50.1390,PS51736,IPR006119,SSF53041, PTHR30461,mobidb-lite,Coil,PF00239
MNIAIYPRKSKKDDNSESMEQQIDDCRKYIDKTYHNANIIVYSGDYAITGHSTAKRKDFQRMMDDVRAGRINAVVIMRYDRIARNMRDFCNLYHDMESAGCNLISVSQQIDTSTPYGKNFMYQMANMAELEWAVISERYKDTAAYKIREGKAYTGRVPIGFKIEKIDGVKKVVHDNEEQTRAIFDYLLATKSKRGTVLWVRENLIPDFTRHKLDSMIKSDLYIGKVRENDHFCEPYFTKDQMEEIRSVNQIKYAPSGHIYLFSGLFRCPICGRKMSSFYSIDRKTKKHRQYQRCWFGGNEKLHKTKLVSEAKTEKYLLENLDAALKNLEFDVKKEAGKPKRNLNKKLNDAIGERERLNYLFEKGRIDITEYEKKYSVLSEKINSITEELSNNKVVRIEEFKKQIPEDWKELYEQLDQKGKQEFWHRIIKEIYLNEAFEITGFIFYI

SEQ ID NO: 8928 - protein, 446 aa, Unknown
  Description of Unknown: Integrase B8929 sequence
  PTHR30461:SF3,cd00338,SM00857,PS51736, IPR036162,G3DSA:3.40.50.1390,IPR006119,SSF53041, PTHR30461,mobidb-lite,Coil,PF00239
MNIAIYPRKSKKDDNSESMEQQIDDCRKYINKTYHNANIIVYSGDYAITGHSTAKRKDFQRMMDDVRAGRINAVVIMRYDRIARNMRDFCNLYHDMESVGCNLISVSQQIDTSTPYGKNFMYQMANMAELEWAVISERYKDTAAYKIREGKAYTGRVPIGFKIEKIDGVKKVVHDNEEQTRAIFDYLLATKSKRGTVLWVRENLIPDFTRHKLDTMIKSDLYIGKVRENENFCEPYFTKEQMEEIRSVNQIKYAPSGHIYLFSELFRCPICGRKMSSFYSIDRKTKKHRQYQRCWFGGNEKLHKTKLVSEAKTEKYLLENLDTALKNLEFDVKKEAGKPKRNLNKKLNDAIGERERLNYLFEKGRIDIPEYEKKYSVLSEKINSITEELSNNKVVKIEEFKKQIPSDWRVLYEQLDQKGKQEFWHRIIKEIYLNEAFEITGFIFYI

SEQ ID NO: 8929 - protein, 446 aa, Unknown
  Description of Unknown: Integrase B8930 sequence
  PTHR30461:SF3,SM00857,IPR036162,PS51736,PF13408, G3DSA:3.40.50.1390,IPR025827,IPR006119,SSF53041,PF00239, PTHR30461,mobidb-lite,Coil,cd00338
MNIAIYPRKSKKDDNSESMEQQIDDCKKYINKTYHNANIIVYSGDYAITGHSTAKRKDFQRMMDDVRAGRINAVVIMRYDRIARNMRDFCNLYHDMESAGCNLISVSQQIDTSTPYGKNFMYQMANMAELEWAVISERYKDTAAYKIREGKAYTGRVPIGFKIEKIDGIKKVVHDNEEQTRAIFDYLLATKSKRGTVLWVRENFIPDFTRHKLDTMIKSDLYIGKVRENENFCEPYFTKEKMEEIRSVNQIKYAPSGHIYLFSGLFRCPICGRKMASFYSIDRKTKKHRQYQRCWFGGNEKLHKTKLVSEAKTEKYLLENLDAALKNLEFDVKKEAGKPKRNLNKKLNDAIAERDRLNYLFEKGRIDIPEYEKKYSVLSEKINSITEELSNNKVIRIEEFKKQIPEDWKELYEQLDQKGKQEFWHRIIKEIYLNEAFEITGFIFYI

SEQ ID NO: 8930 - protein, 446 aa, Unknown
  Description of Unknown: Integrase B8931 sequence
  PTHR30461:SF3,SM00857,IPR006118,G3DSA:1.10.10.2600, IPR036162,PF13408,IPR025827,PS51737, G3DSA:3.40.50.1390,IPR006119,IPR038109,IPR011109, SSF53041,PTHR30461,PS00397,PS51736,cd00338,PF00239
MQVIRGAGYIRVSTTEQATRGLSLEAQEAEIRRYAKERGIVLVQIYVDRGITARKKLHRREAFAQMMRDVDAGLIDRIIVMRLDRWFRNVYDYHKMMNEHLIPHNVDWCAVKEDYDTTTTNGRLMINLRLAIAEQECDTDGDRIRDVQENMIQKGCWPFGQAPLGYRIVNKHLEKDPEQEECIRYFFEHMLLNGSLRAALFATNERYGTTYEYKRAQHLSRASVYYGEYGTNKSFCPAYITREEHERIRYLASKNIRVRKSPDKVAHLFSGLLICSDCGRRLSGQTIRRPSGVYVTYRCAHAYDNNGCPNTKSFSERIVENYLLHYMESELEEFIFTVEAESKTISLPIDNTEQIRAKQEKVKELFINDLIDLSEYKKRIDELESKIIVTAPKPRANTERLKKLLETNALSFYQTFTRDEKRAFWRGIIKELHIYRGTVQGPPIFL

SEQ ID NO: 8931 - protein, 446 aa, Unknown
  Description of Unknown: Integrase B8932 sequence
  PTHR30461:SF3,IPR036162,PS51737,IPR011109,PTHR30461, PS00397,PF00239,G3DSA:1.10.10.2600,IPR006119,SSF53041, cd00338,SM00857,IPR025827,IPR038109,PS51736, IPR006118,PF13408,G3DSA:3.40.50.1390,Coil
MIKQKVRLYARVSTEEQARKKNSIPAQLNKLYAYCKENDYEVVNEYIDEGISASTIKKRKALLRMLNDLQHNDIILFTNLDRFSRNVLDANKMIEMFEPLNVSFKAIGEEDIDITTADGRFLFNLKVNLAERERAKVSERILTVFDYKLSQGKLINGRLPRGYTRSADGYAVINDDADFIRDVYRTFEDVRQIRTLTRVINNKYKLDLCSKTYRRILKQQAYIGLYRDKYIFPPIIKNEQFERVQRIFDGNTIKATKNQTYIFSGLIKCKVCGMRLGGSSSNGNSGDRKLKYKMYKCPKCQRGNGTHQCLAEKKLEKHLLPIVMDAIQNKIYTLSAYESQITQNRDIIDATKDKIKRLQDLYIDGKISKEQFDNKYEGLNKILDEESKKTNLKMIAKAKEDYEKLLNMNISEIYDQFDDNGKSVFWHSFIDYIVVNDYDNIDIFLQ

SEQ ID NO: 8932 - protein, 446 aa, Unknown
  Description of Unknown: Integrase B8933 sequence
  PTHR30461:SF3,cd00338,SM00857,IPR036162,PF13408, IPR025827,G3DSA:3.40.50.1390,PS51736,IPR006119,SSF53041, PTHR30461,mobidb-lite,Coil,PF00239
MNIAIYPRKSKKDDNSESMEQQIDDCRKYINKTYHNANIIVYSGDYAITGHSTAKRKDFQRMMDDVRAGRINAVVIMRYDRIARNMRDFCNLYHDMESAGCNLISVSQQIDTSTPYGKNFMYQMANMAELEWAVISERYKDTAAYKIREGKAYTGRVPIGFKIEKIDGVKKVVHDNEEQTRAIFDYLLATKSKRGTVLWVRENLIPDFTRHKLDTMIKSDLYIGKVRENENFCEPYFTKEQMEEIRSINQIKYAPSGHIYLFSGLFRCPICGRKMASFYSIDRKTKKHRQYQRCWFGGNEKLHKTKLVSEAKTEKYLLENLDAALKNLEFDVKKEAGKPKRNLNKKLNDAIGERDRLNYLFEKGRIDIPEYEKKYSVLSEKINSITEELSNNKVVRIEEFKKQIPEDWKELYEQLDQKGKQEFWHRIIKEIYLNEAFEITGFIFYI

SEQ ID NO: 8933 - protein, 446 aa, Unknown
  Description of Unknown: Integrase B8934 sequence
  PTHR30461:SF3,cd00338,SM00857,PS51736,PF13408,IPR025827, G3DSA:3.40.50.1390,IPR036162,IPR006119,SSF53041,PTHR30461 ,mobidb-lite,Coil,PF00239
MNIAIYPRKSKKDDNSESMEQQIDDCRKYINKTYPNANIIVYSGDYAITGHSTAKRKDFQHMMDDVRAGRINAVVIMRYDRIARNMRDFCNLYHDMESVGCNLISVSQQIDTSTPYGKNFMYQMANMAELEWAVISERYKDTAAYKIREGKAYTGRVPIGFKIEKIDGVKKVVHDNEEQTRAIFDYLLATKSKRGTVLWVRENLIPDFTRHKLDSMIKSDLYIGKVRENENFCEPYFTKEQMEEIRSVNQIKYAPSGHIYLFSGLFRCPICGRKMSSFYSIDRKTKKHRQYQRCWFGGNEKLHKTKLVSEAKTEKYLLENIDTALKNLEFDVKKGAGKPKSNLNKKLNDAIGERDRLNYLFEKGRIDIPEYEKKYSVLSEKINSITEELSNNKVVRIEEFKKRIPEDWKDIYEQLDQKGKQEFWHRIIKEIYLNEAFEITGFIFYI

SEQ ID NO: 8934 - protein, 446 aa, Unknown
  Description of Unknown: Integrase B8935 sequence
  PTHR30461:SF3,SM00857,IPR036162,PF13408,IPR025827, G3DSA:3.40.50.1390,PS51736,IPR006119,SSF53041,PF00239, PTHR30461,mobidb-lite,Coil,cd00338
MNIAIYPRKSKKDDNSESMEQQIDDCKKYINKTYPNANIIVYSGDYAITGHSTAKRKDFQRMMDDVRAGRINAVVIMRYDRIARNMRDFCNLYHDMESAGCNLISVSQQIDTSTPYGKNFMYQMANMAELEWAVISERYKDTAAYKIREGKAYTGRVPIGFKIEKIDGVKKVVHDNDEQTRAIFDYLLATKSKRGTVLWVRENFIPDFTRHKLDTMIKSDLYIGKVRENDHFCEPYFTKDQMEEIRSINQIKYAPSGHIYLFSGLFRCPICGRKMASFYSIDRKTKKHRQYQRCWFGGNEKLHKTKLVSEAKTEKYLLENLDAALKNLEFDVKKEAGKPKQNLNKKLNDAIGERERLNYLFEKGRIDIPEYEKKYSVLSEKINSITEELSNNKVVRIEEFKKQIPEDWKELYEQLDQKGKQEFWHRIIKEIYLNEAFEITGFIFYI

SEQ ID NO: 8935 - protein, 446 aa, Unknown
  Description of Unknown: Integrase B8936 sequence
  PTHR30461:SF3,IPR036162,PS51737,IPR011109, PTHR30461,PS00397,PF00239,G3DSA:1.10.10.2600, IPR006119,SSF53041,cd00338,SM00857,IPR025827,IPR038109 ,PS51736,IPR006118,PF13408,G3DSA:3.40.50.1390,Coil
MQRAALYIRVSTEEQARHGLSLEDQKNSLTKFSKSHGMKIVGIYEDAGISARKPYKKRPALLKLLDDCRVGKIDLILFIKLDRWFRNVGNYYAVQEILDQYGVSWQATQEDYETTTASGRLKVNIMLSVAQDEADRTSERIKFVFEGKRARLEPLTGNIPFGYKIEGKSFKKDESKEALVNDFFKKYLASGSISKTTEFIREKYGVLMRYHLIDKMLRSTTYYGKYYNMDGMCPAYITKEDHEQIQAMRRKVVRKTKNNRTYLFSGLVVCPECGNRMGARINTKQTYVFYNCNGHYTKQNGCQNRVNLGERKIEEYLLATVANKFHEYKANFSALKNAEINKRSRAEISAAKSKLNKLKDLYLNDIITLEELKTDREALLAKISDLEKAALPEQKQDFESIDRVLTENWKESYDGLNREEKREFWRIIVKEIKIYPDRHIEYSLNV

SEQ ID NO: 8936 - protein, 446 aa, Unknown
  Description of Unknown: Integrase B8937 sequence
  PTHR30461:SF3,SM00857,IPR006118,IPR036162,PF13408, IPR025827,G3DSA:3.40.50.1390,PS51737,IPR006119,IPR011109, SSF53041,PTHR30461,PS00397,PS51736,cd00338, PF00239
MRCALYIRVSSDEQKRKGYSLPEQRHALTQYAEEKGYTVVDLYADEGVSSSKNPQRRHEFQRMLSDVRNRKIDIIVFLKLDRWFRNVGDYYITQEILDQNGVKWECVTEHYDTTTRTGKLNLNIKLTIAEDEAANTSERVKFVQAGKVRNREPITGNQPFGYKIATIDGVKRIIKDPETQAECEDMFNTFFATGSGGATGKYINAKYGRSLAENAIPRRLKNPAYTGEYRGIPDYYPPYITKEQHARILSIFAKRTRSTKRKKVYLFAGLIKCPVCGRTMVSCTMNKKTLGYRCRHHYMNKCTFVHTITEERIESFLLENIGSMLEQYLISYKEQNKAKKKPDPRKLEDRLSRLNNIYMMGNISDSEYTKKANEIAAQIAAIKCANSNDLPIPEESIKLLSDKRFATLYADLPRESRKALWMSIIDSIEVEGLYPKQVFFIGQERL

SEQ ID NO: 8937 - protein, 446 aa, Unknown
  Description of Unknown: Integrase B8938 sequence
  PTHR30461:SF3,cd00338,SM00857,PS51736,PF13408, IPR025827,IPR036162,G3DSA:3.40.50.1390,IPR006119,SSF53041, PTHR30461,mobidb-lite,Coil,PF00239
MNIAIYPRKSKKDDNSESMEQQIDDCRKYINKTYPNANIIVYSGDYAITGHSTAKRKDFQRMMDDVRAGRINAVVIMRYDRIARNMRDFCNLYHDMESAGCNLISVSQQIDTSTPYGKNFMYQMANMAELEWAVISERYKDTAAYKIREGKAYTGRVPIGFKIEKIDGVKKVVHDNEKQTRAIFDYLLATKSKRGTVLWVRENFIPDFTRHKLDTMIKSDLYIGKVRENDHFCEPYFTKDQMEEIRSINQIKYAPSGHIYLFSGLFRCPICGRKMASFYSIDRKTKKHRQYQRCWFGGNEKLHKTKLVSEAKTEKYLLENLDAALKNLEFDVKKEAGKPKRNLNKKLNDAIGERDRLNYLFEKGRIDIPEYEKKYSVLSEKINSINEELSNNKVVRIEEFKKQIPEDWKVLYEQLDPKGKQEFWHRIIKEIYLNEAFEITGFIFYI

SEQ ID NO: 8938 - protein, 446 aa, Unknown
  Description of Unknown: Integrase B8939 sequence
  PTHR30461:SF3,IPR036162,PS51737,IPR011109, PTHR30461,PS00397,PF00239,G3DSA:1.10.10.2600, IPR006119,SSF53041,cd00338,SM00857,IPR025827,IPR038109 ,PS51736,IPR006118,PF13408,G3DSA:3.40.50.1390,PF07508,Coil
MVTALYARVSTDAQAEEGYSIDIQGERLEAYCKLKGYKSFEHYVDGGYTGSNLNRPAMTRLIEDCKCGEVERVVVFKLDRLSRSQKDTLYLIEEVFLPHNVDFVSISESFDTATPFGRAMIGILSVFAQLERENIKERTKAGMLGRVREGYWPGGGRTPFGYDYDPKLKTLVPNKDAETVRKIYDLYIGGCSTYEIQRILGMKYDRLAEQILARKTNTGVIVYNGVEYQGKHEPIISLETYERAMACMKKRSAAPTPRNNVYLLTGLLVCGVCGAKMRYQGGHIYCYSRQKSKAYLVKDPNCDNESHNVQDIENAVLTIFFQNTSRFNKAEAYDIKTNVLDELVQQKKTLEQKIRRLYGLYGDGGDDYLIEAIEESKQQLVRIADKIVNEEDREKEETKRRRLVEKVGNIRDRWDTMAPEEQREVLHEAIKQITITHDKINIDFNL

SEQ ID NO: 8939 - protein, 446 aa, Unknown
  Description of Unknown: Integrase B8940 sequence
  PTHR30461:SF3,cd00338,SM00857,IPR036162,PS51736, PF13408,G3DSA:3.40.50.1390,IPR025827,IPR006119,SSF53041, PTHR30461,mobidb-lite,Coil,PF00239
MNIAIYPRKSKKDDNSESMEQQIDDCRKYINKTYPDANIIVYSGDYAITGHSTAKRKDFQRMMDDVRAGRINAVVIMRYDRIARNMRDFCNLYHDMESAGCNLISVSQQIDTSTPYGKNFMYQMANMAELEWAVISERYKDTAAYKIREGKAYTGRVPIGFKIEKIDGVKKVVHDNEEQTRAIFDYLLATKSKRGTVLWVRENLIPDFTRHKLDTMIKSDLYIGKVRENENFCEPYFTKDQMEEIRSVNQIKYAPSGHIYLFSGLFRCPICGRKMSSFYSIDRKTKKHRQYQRCWFGGNEKLHKTKLVSEAKTEKYLLENLDAAFKNLEFDVKKEAGKPKRNLNKKLNDAIGERDRLNYLFEKGRIDIPEYEKKYSVLSEKINSITEELSNNKVVRIEEFKKQIPEDWKELYEQLDQKGKQEFWHRIIKEIYLNEAFEITGFIFYI

SEQ ID NO: 8940 - protein, 446 aa, Unknown
  Description of Unknown: Integrase B8941 sequence
  PTHR30461:SF3,cd00338,SM00857,IPR036162,PS51736,PF13408, G3DSA:3.40.50.1390,IPR025827,IPR006119,SSF53041,PTHR30461 ,mobidb-lite,Coil,PF00239
MNIAIYPRKSKKDDNSESMEQQIDDCRKYINKTYPDANIIVYSGDYAITGHSTAKRKDFQRMMDDVRAGRINAVVIMRYDRIARNMRDFCNLYHDMESAGCNLISVSQQIDTSTPYGKNFMYQMANMAELEWAVISERYKDTAAYKIREGKAYTGRVPIGFKIEKIDGVKKVVHDNEEQTRAIFDYLLATKSKRGTVLWVRENLIPDFTRHKLDTMIKSDLYIGKVRENDHFCEPYFTKDQMEEIRSVNQIKYAPSGHIYLFSGLFRCPICGRKMSSFYSIDRKTKKHRQYQRCWFGGNEKLHKTKLVSEAKTEKYLLENLDAALKNLEFDVKKEAGKPKRNLNKKLNDAIGERERLNYLFEKGRIDIPEYEKKYSILSGKINSISEELSNNKVVRIEEFKKQIPEDWKELYEQLDQKGKQEFWHRIIKEIYLNEAFEITGFIFYI

SEQ ID NO: 8941 - protein, 446 aa, Unknown
  Description of Unknown: Integrase B8942 sequence
  PTHR30461:SF3,cd00338,SM00857,IPR036162,PF13408, IPR025827,G3DSA:3.40.50.1390,mobidb-lite,IPR006119,SSF53041, PTHR30461,PS51736,Coil,PF00239
MNIAIYPRKSKKDDNSESMEQQIDDCRKYINKTYPNANMIVYSGDYAITGHSTAKRKDFQRMMDDVRAGRINAVVIMRYDRIARNMRDFCNLYHDMESAGCNLISVSQQIDTSTPYGKNFMYQMANMAELEWAVISERYKDTAAYKIREGKAYTGRVPIGFKIEKIDGVKKVVHDNEEQTRAIFDYLLATKSKRGTVLWVRENLISDFTRHKLDSMINSDLYIGKVRENENFCEPYFTKEQMEEIRSVNQIKYAPSGHIYLFSGLFRCPICGRKMSSFYSIDRKTKKHRQYQRCWFGGNEKLHKTKLVSEAKTEKYLLENLDAALKNLEFDVKKEAGKPKRNLNKKLNDAIGERERLNYLFEKGRIDIPEYEKKYSVLSEKINSITEELSNNKVVRIEEFKKQIPEDWKELYEQLDQKGKQEFWHRIIKEIYLNEAFEITGFIFYI

SEQ ID NO: 8942 - protein, 446 aa, Unknown
  Description of Unknown: Integrase B8943 sequence
  SM00857,IPR006118,G3DSA:1.10.10.2600,IPR036162, PF13408,IPR025827,PS51737,Coil, G3DSA:3.40.50.1390,IPR006119,IPR038109,SSF53041, IPR011109,PTHR30461,PS00397,PS51736,cd00338,PF00239
MCQKIVVTLPNILRIRVALYIRVSTEEQAKHGLSLADQREALTDYAAAHNMEVVGIYEDAGISARKPYKKRPALLRLLDDCRAGKIDTILFVKLDRWFRNVAGYYAVQEVLDKNHVDWQAIREDYETRTASGRLKVNIMLSVAQDEADRTSERIKAINEGKRAKGQPTNGKTPIGICVKNRRYAIDEETADAARDMFPAFIRLQSILALRRYMATEWRIKRSYNKYKDALGNRLYLGEAFGVENALPALVDQETFDLAGKILERRSQRNASADRIYLFTGILRCRECGRNMQPETVKKVYKYYRCRTHILDPADCPHILRIREDVLEDYLLREFEGIAKKYYSKSKTAEKKPPKTAEQIKRKMQKLKELYLSDLIEIEEYKKDYTGLKQQLAAINSETIKEFDLETLRRELKEYSNLDRQAKKEFWVRTIQRIDADNDGAFFVTPS

SEQ ID NO: 8943 - protein, 446 aa, Unknown
  Description of Unknown: Integrase B8944 sequence
  PTHR30461:SF3,SM00857,IPR036162,PF13408,IPR025827, G3DSA:3.40.50.1390,mobidb-lite,IPR006119,SSF53041,PF00239, PTHR30461,PS51736,Coil,cd00338
MNIAIYPRKSKKDDNSESMEQQIDDCRKYINKTYPNANIIVYSGDYAITGHSTAKRKDFQRMMDDVRAGRINAVVIMRYDRIARNMRDFCNLYHDMESAGCNLISVSQQIDTSTPYGKNFMYQMANMAELEWAVISERYKDTAAYKIREGKAYTGRVPIGFKIEKIDGVKKVVHDNEEQTRAIFDYLLATKSKRGTVLWVRENFIPDFTRHKLDSMIKSDLYIGKVRENENFCEPYFTKEQMEEIRSVNQIKYAPSGHIYLFSGLFRCPICGRKMSSFYSIDRKTKKHRQYQRCWFGGNEKLHKTKLVSEAKTEKYLLENIDTALKNLEFDVKKEESKPKRNLNKKLNDAIGERDRLNYLFEKGRIDIPEYEKKYSILSGKINSISEELSNNKVVKIEEFKKQIPSDWRVLYEQLDQKGKQEFWHRIIKEIYLNEAFEITGFIFYI

SEQ ID NO: 8944 - protein, 446 aa, Unknown
  Description of Unknown: Integrase B8945 sequence
  SM00857,IPR006118,G3DSA:1.10.10.2600,IPR036162, PF13408,PS51737,IPR025827,Coil, G3DSA:3.40.50.1390,IPR006119,IPR038109,IPR011109, SSF53041,PTHR30461,PS00397,PS51736,cd00338,PF00239
MKVIRGAGYVRVSTAEQALRGLSLESQEMDIRAYAETHGIQLVRIYVDKGITARKALNKRQAFQEMMRDVDDGKIDRIIVMRLDRWFRNVYDYHRMMNEHLIPHGVDWCAVKEDYDTTTTNGRLMINLRLAIAEQECDTDGDRIRDVQHNMILKGRWPFGMAPLGYKLENKRLVKDPDTQAHVDFFFRHLLANGSLRGALHATNDAFGTHYEYKRAQTMAHRSIYYGEYDQQREFCPAYITKEEHERILYLVSKNIRVRKSPDAGIHLFSSLLICDDCGRRLNAQIIRRPSGTYTTYRCAHAMDNQLCPNNRSLSERVVEKYLLDYIQNDLAQYMVEVEVQGASQRPAQDNTDVIRAKQERVKELFIDGLISLDEYKARIDELERKIIVLPQRSGPNLGRLKQLMEGDFQTIYNGLSREEKRSFWRSILRELHVYRGTIQGPPVFL

SEQ ID NO: 8945 - protein, 446 aa, Unknown
  Description of Unknown: Integrase B8946 sequence
  PTHR30461:SF3,cd00338,SM00857,PS51736,PF13408, IPR025827,G3DSA:3.40.50.1390,IPR036162,IPR006119,SSF53041, PTHR30461,mobidb-lite,Coil,PF00239
MNIAIYPRKSKKDDNSESMEQQIDDCKKYIDKTYHNANIIVYSGDYAITGHSTAKRKDFQRMMDDVRAGRINAVVIMRYDRIARNMRDFCNLYHDMESVGCNLISVSQQIDTSTPYGKNFMYQMANMAELEWAVISERYKDTAAYKIREGKAYTGRVPIGFKIEKIDGIKKVVHDNEEQTRAIFDYLLATKSKRGTVLWVRENFIPDFTRHKLDTMIKSDLYIGKVRENENFCEPYFTKEKMEEIRSVNQIKYAPSGHIYLFSGLFRCPICGRKMSSFYSIDRKTKKHRQYQRCWFGGNEKLHKTKLVSEAKTEKYLLENLDAALKNLEFDVKKEAGKPKRNLNKKLNDAIGERDRLNYLFEKGRIDIPEYEKKYSVLSEKINSITEELSNNKVVRIEEFKKQIPEDWKELYEQLDQKGKQEFWHRIIKEIYLNEAFEITGFIFYI

SEQ ID NO: 8946 - protein, 446 aa, Unknown
  Description of Unknown: Integrase B8947 sequence
  PTHR30461:SF3,SM00857,IPR006118,G3DSA:1.10.10.2600, IPR036162,PF13408,PS51737,IPR025827, G3DSA:3.40.50.1390,IPR006119,IPR038109,IPR011109, SSF53041,PTHR30461,PS00397,PS51736,cd00338,PF00239
MCQKIVITLPNILRIRVALYIRVSTEEQAKHGLSLADQREALTDYATAHNMEVVGIYEDAGISARKPYKKRPALMRLLDDCNAGKVDTILFVKLDRWFRNVAGYYAVQEVLDKNHVAWQAIREDYETRTASGRLKVNIMLSVAQDEADRTSERIKDINEGKRAKGQPTNGRTPIGICVKNRRYAIDEETADAARDMFPAFIRLQSILALRRYMATEWGIKRSYNKYKDALGNRLYLGEAFGVENALPALIDQETFDLAGKILERRSQRNASADRIYLFTGILRCRECGRNMQPETVKQVYKYYRCRTHTLDPADCPHILRIREDVLEDYLLREFEGIAKKYYSKSKTAEKKPPKTAEQIKRKMQKLKDLYLSDLIEIEEYKKDYTDLKQQLAAINPEPIKEFDLETLRRELKEYPDLDRQAKKEFWVRTIQRIDADNDGAFFVTPS

SEQ ID NO: 8947 - protein, 446 aa, Unknown
  Description of Unknown: Integrase B8948 sequence
  PTHR30461:SF3,SM00857,IPR036162,PS51736,PF13408, G3DSA:3.40.50.1390,IPR025827,IPR006119,SSF53041,PF00239, PTHR30461,mobidb-lite,Coil,cd00338
MNIAIYPRKSKKDDNSESMEQQIDDCRKYINKTYPDANIIVYSGDYAITGHSTAKRKDFQRMMDDVRAGRINAVVIMRYDRIARNMRDFCNLYHDMESAGCNLISVSQQIDTSTPYGKNFMYQMANMAELEWAVISERYKDTAAYKIREGKAYTGRVPIGFKIEKIDGIKKVVHDNEEQTRAIFDYLLATKSKRGTVLWVRENLIPDFTRHKLDTMINSDLYIGKVRENENFCEPYFTKEQMEEIRSVNQIKYAPSGHIYLFSGLFRCPICGRKMSSFYSIDRKTKKHRQYQRCWFGGNEKLHKTKLVSEAKTEKYLLENLDAALKNLEFDVKKEAGKPKRNLNKKLNDAIAERDRLNYLFEKGRIDIPEYEKKYSVLSEKINSITEELSNNKVVRIEEFKKQIPEDWKELYEQLDQKGKQEFWHRIIKEIYLNEAFEITGFIFYI

SEQ ID NO: 8948 - protein, 446 aa, Unknown
  Description of Unknown: Integrase B8949 sequence
  PTHR30461:SF3,cd00338,SM00857,IPR036162, PF13408,IPR025827,PS51736,G3DSA:3.40.50.1390, IPR006119,SSF53041,PTHR30461,mobidb-lite, Coil,PF00239
MNIAIYPRKSKKDDNSESMEQQIDDCRKYINKTYHNANIIVYSGDYAITGHSTAKRKDFQRMMDDVRAGRINAVVIMRYDRIARNMRDFCNLYHDMESAGCNLISVSQQIDTSTPYGKNFMYQMANMAELEWAVISERYKDTAAYKIREGKAYTGRVPIGFKIEKIDGVKKVVHDNEEQTRAIFDYLLATKSKRGTVLWVRENFIPDFTRHKLDTMIKSDLYIGKVRENDHFCEPYFTKEQMEEIRSVNQIKYAPSGHIYLFSGLFRCPICGRKMASFYSIDRKTKKHRQYQRCWFGGNEKLHKTKLVSEAKTEKYLLENLDAALKNLEFDVKKEAGKPKQNLNKKLNDAIGERERLNYLFEKGRIDIPEYEKKYSILSGKINSLSEELSNNKVVRIEEFKKQIPEDWKELYEQLDQKGKQEFWHRIIKEIYLNEAFEITGFIFYI

SEQ ID NO: 8949 - protein, 446 aa, Unknown
  Description of Unknown: Integrase B8950 sequence
  PTHR30461:SF3,IPR036162,PS51737,IPR011109,PTHR30461, PS00397,PF00239,G3DSA:1.10.10.2600,IPR006119,SSF53041, cd00338,SM00857,IPR025827,IPR038109,PS51736, IPR006118,PF13408,G3DSA:3.40.50.1390,Coil
MKRAALYIRVSTEEQARHGLSLEDQKNNLTQFSKSHGMKIAGIYEDAGISARKPYKKRPALLRLLEDCKAGKIDLILFIKLDRWFRNVGNYYAVQEILDQYNVSWQATQEDYETTTASGRLKVNIMLSVAQDEADRTSERIKFVFEGKRARLEPLTGNIPFGYKIEGKAFKKDESKEALVNDFFKKYLASGSISKTSEFIREKYGISMRYHLIDKMLRSTTYYGKYYNMDGMCPAYITKEDHEKIQAMRRKVVRKAKNNRTYLFSGLVVCPECGNRMGARINTKQTYVFYNCNGHYTKQNGCQNRVNLGERKIEEYLLATVDNKFHEYKANFSALKNAEINKRARAEISAAKSKLNKLKDLYLNDIITLEELKADRESLLAKISDLEKAALPEQKQDFESIDRVLIENWKESYDGLNREEKREFWRIIIKEIKIYPDRHIEYSLNV

SEQ ID NO: 8950 - protein, 446 aa, Unknown
  Description of Unknown: Integrase B8951 sequence
  PTHR30461:SF3,SM00857,IPR036162,PS51736,PF13408, G3DSA:3.40.50.1390,IPR025827,IPR006119,SSF53041,PF00239, PTHR30461,mobidb-lite,Coil,cd00338
MNIAIYPRKSKKDDNSESMEQQIDDCRKYINKTYPDANIIVYSGDYAITGHSTAKRKDFQRMMDDVRAGRINAVVIMRYDRIARNMRDFCNLYHDMESAGCNLISVSQQIDTSTPYGKNFMYQMANMAELEWAVISERYKDTAAYKIREGKAYTGRVPIGFKIEKIDGVKKVVHDNEEQTRAIFDYLLATKSKRGTVLWVRENLISDFTRHKLDSMINSDLYIGKVRENENFCEPYFTKEQMEEIRSVNQIKYAPSGHIYLFSGLFRCPICGRKMASFYSIDKKTKKHRQYQRCWFGGNEKLHKTKLVSEAKTEKYLLENLDAALKNLEFDVKKEAGKPKRNLNKKLNDAIGERDRLNYLFEKGRIDIPEYEKKYSVLSEKINSITEELSNNKVVRIEEFKKQIPEDWKELYEQLDQKGKQEFWHRIIKEIYLNEAFEITGFIFYI

SEQ ID NO: 8951 - protein, 446 aa, Unknown
  Description of Unknown: Integrase B8952 sequence
  PTHR30461:SF3,cd00338,SM00857,IPR036162, PF13408,IPR025827,G3DSA:3.40.50.1390,PS51736, IPR006119,SSF53041,PTHR30461,mobidb-lite, Coil,PF00239
MNIAIYPRKSKKDDNSESMEQQIDDCKKYINKTYHNANIIVYSGDYAITGHSTAKRKDFQRMMDDVRAGRINAVVIMRYDRIARNMRDFCNLYHDMESAGCNLISVSQQIDTSTPYGKNFMYQMANMAELEWAVISERYKDTAAYKIREGKAYTGRVPIGFKIEKTDGVKKVVHDNEEQTRAIFDYLLATKSKRGTVLWVRENFIPDFTRHKLDTMIKSDLYIGKVRENDHFCEPYFTKDQMEEIRSVNQIKYAPSGHIYLFSGLFRCPICGRKMASFYSIDRKTKKHRQYQRCWFGGNEKLHKTKLVSEAKTEKYLLENLDAALKNLEFDVKKEAGKPKRNLNKKLNDAIGERDRLNYLFEKGRIDIPEYEKKYSILSGKINSISEELSNNKVVRIEEFKKQIPSNWKVLYEQLDQKGKQEFWHRIIKEIYLNEAFEITGFIFYI

SEQ ID NO: 8952 - protein, 446 aa, Unknown
  Description of Unknown: Integrase B8953 sequence
  PTHR30461:SF3,SM00857,IPR006118,G3DSA:1.10.10.2600,IPR036162, PF13408,IPR025827,G3DSA:3.40.50.1390,PS51737,IPR006119, IPR038109,IPR011109,SSF53041,PTHR30461,PS00397, PS51736,cd00338,PF00239
MCQKIVVTLPNNLRIRVALYIRVSTEEQAKHGLSLADQREALIAYAAAHGMEVVGIYEDAGISARKPYKKRPALMRLLDDCSAGKIDTILFVKLDRWFRNVAGYYAVQEVLDKNHVDWQAIREDYETRTASGRLKVNIMLSVAQDEADRTSERIKAINEGKRAKGQPTNGKTPIGICVKNRRYAIDEETADAARDMFPAFIRLQSILALRRYMATEWGIKRSYNKYKDALRSRLYLGEAFGVENALPALVDQETFDLAGKILERRSQRNASVDRIYLFTGILRCRECGRNMQPETVKQVYKYYRCRTHTLDPADCPHILRIREDVLEDYLLREFEGIAKKYYSKSKTAEKKPPKTAEQIKRKMQKLKDLYLSDLIEIEEYKKDYTELKQQLAAINPEPIKEFDLETLRRELKEYPDLDRQAKKEFWVRTIQRIDADNDGAFFVTPS

SEQ ID NO: 8953 - protein, 446 aa, Unknown
  Description of Unknown: Integrase B8954 sequence
  PTHR30461:SF3,SM00857,PS51736,PF13408,IPR025827, IPR036162,G3DSA:3.40.50.1390,IPR006119,SSF53041,PF00239, PTHR30461,mobidb-lite,Coil,cd00338
MNIAIYPRKSKKDDNSESMEQQIDDCRKYINKTYPNANIIVYSGDYAITGHSTAKRKDFQRMMDDVRAGRINAVVIMRYDRIARNMRDFCNLYHDMESAGCNLISVSQQIDTSTPYGKNFMYQMANMAELEWAVISERYKDTAAYKIREGKAYTGRVPIGFKIEKIDGVKKVVHDNEEQTRAIFDYLLATKSKRGTVLWVRENLIPDFTRHKLDSMIKSDLYIGKVRENENFCEPYFTKEQMEEIRSVNQIKYAPSGHIYLFSGLFRCPICGRKMSSFYSIDRKTKKHRQYQRCWFGGNEKLHKTKLVSEAKTEKYLLENLDSALKNLEFDVKKEAGKPKRNLNKKLNDAIAERDRLNYLFEKGRIDIPEYEKKYSILSGKINLIIEELSNNKVVKIEEFKKQIPSDWKVLYEQLDQKGKQEFWHRIIKEIYLNEAFEITGFIFYI

SEQ ID NO: 8954 - protein, 446 aa, Unknown
  Description of Unknown: Integrase B8955 sequence
  PTHR30461:SF3,SM00857,IPR006118,G3DSA:1.10.10.2600, IPR036162,PF13408,IPR025827,PS51737, G3DSA:3.40.50.1390,IPR006119,IPR038109,IPR011109, SSF53041,PTHR30461,PS00397,PS51736,cd00338,PF00239
MCQKIVVTLPNNLRIRVALYIRVSTEEQAKHGLSLADQRDALIAYAAAHGMEVVGIYEDAGISARKPYKKRPALMRLLDDCRAGKIDTILFVKLDRWFRNVAGYYAVQEVLDKNHVDWQAIREDYETRTASGRLKVNIMLSVAQDEADRTSERIKAINEGKRAKGQPTNGKTPIGICVRNRRYDIDEETADAARDMFPAFIRLQSILALRRYMATEWGIKRSYNKYKDALRSRLYLGEAFGVENALPALIDQETFDLAGKILERRSQRNASADRIYLFTGILRCRECGRNMQPETVKKVYKYYRCRTHTLDPADCPHILRIREDVLEDYLLREFEGIAEKYYSKSKTAEKKPPKTAEQIKRKMQKLKDLYLSDLIEIEEYKKDYTELKQQLAAINPEPIKEFDLETLRRELKEYPDLDRQAKKEFWVRTIQRIDADNDGAFFVTPS

SEQ ID NO: 8955 - protein, 446 aa, Unknown
  Description of Unknown: Integrase B8956 sequence
  PTHR30461:SF3,SM00857,IPR036162,PF13408,IPR025827, G3DSA:3.40.50.1390,PS51736,IPR006119,SSF53041,PF00239, PTHR30461,mobidb-lite,Coil,cd00338
MNIAIYPRKSKKDDNSESMEQQIDDCRKYINKTYPDANIIVYSGDYAITGHSTAKRKDFQRMMDDVRAGRINAVVIMRYDRIARNMRDFCNLYHDMESAGCNLISVSQQIDTSTPYGKNFMYQMANMAELEWAVISERYKDTAAYKIREGKAYTGRVPIGFKIEKIDGIKKVVHDNEEQTRAIFDYLLATKSKRGTVLWVRENLIPDFTRHKLDTMIKSDLYIGKVRENENFCEPYFTQKQMEEIRSVNQIKYAPSGHIYLFSGLFRCPICGRKMSSFYSIDRKTKKHRQYQRCWFGGNEKLHKTKLVSETKTEKYLLENLDAALKNLEFDVKKEAGKPKQNLNKKLNDAIGERERLNYLFEKGRIDIPEYEKKYSVLSEKINSITEELSNNKVVRIEEFKKQIPEDWKVLYEQLDPKGKQEFWHRIIKEIYLNEAFEITGFIFYI

SEQ ID NO: 8956 - protein, 446 aa, Unknown
  Description of Unknown: Integrase B8957 sequence
  PTHR30461:SF3,SM00857,IPR006118,G3DSA:1.10.10.2600, IPR036162,PF13408,PS51737,IPR025827, G3DSA:3.40.50.1390,IPR006119,IPR038109,IPR011109, SSF53041,PTHR30461,PS00397,PS51736,cd00338,PF00239
MCQKIVVTLPNNLRIRVALYIRVSTEEQAKHGLSLADQREALIAYAAAHGMEVVGIYEDAGISARKPYKKRPALMRLLDDCRAGKIDTILFVKLDRWFRNVAGYYAVQEVLDKNHVDWQAIREDYETRTASGRLKVNIMLSVAQDEADRTSERIKAINEGKRAKGQPTNGKTPIGICVKNRRYAIDEETADAARDMFPAFIRLQSILALRRYMATEWGIKRSYNKYKDALRSRLYLGEAFGVENALPALVDQETFNLARRILEQRSQRNASADRIYLFTGILRCRECGRNMQPETVKQVYKYYRCRTHTLDPADCPHILRIREDVLEDYLLREFEGIAKKYYSKSKTAEKKPPKTAEQIKRKMQKLKDLYLSDLIEIEEYKKDYTELKQQLAAINPEPIKEFDLETLRRELKEYPDLDRQAKKEFWVRTIQRIDADNDGAFFVTPS

SEQ ID NO: 8957 - protein, 446 aa, Unknown
  Description of Unknown: Integrase B8958 sequence
  PTHR30461:SF3,cd00338,SM00857,IPR036162,PF13408, IPR025827,G3DSA:3.40.50.1390,PS51736,IPR006119,SSF53041, PTHR30461,mobidb-lite,Coil,PF00239
MNIAIYPRKSKKDDNSESMEQQIDDCKKYINKTYPNANIIVYSGDYAITGHSTAKRKDFQRMMDDVRAGRINAVVIMRYDRIARNMRDFCNLYHDMESAGCNLISVSQQIDTSTPYGKNFMYQMANMAELEWAVISERYKDTAAYKIREGKAYTGRVPIGFKIEKIDGVKKVVHDNEEQTRAIFDYLLATKSKRGTVLWVRENLIPDFTRHKLDTMIKSDLYIGKVRENENFCEPYFTKEKMEEIRSVNQIKYAPSGHIYLFSGLFRCPICGRKMASFYSIDRKTKKHRQYQRCWFGGNEKLHKTKLVSEAKTEKYLLENLDAALKNLEFDVKKEAGKPKRNLNKKLNDAIGERDRLNYLFEKGRIDIPEYEKKYSVLSEKINSITEELSNNKVVRIEEFKKQIPEDWKELYEQLDQKGKQEFWHRIIKEIYLNEAFEITGFIFYI

SEQ ID NO: 8958 - protein, 446 aa, Unknown
  Description of Unknown: Integrase B8959 sequence
  PTHR30461:SF3,SM00857,IPR006118,G3DSA:1.10.10.2600, IPR036162,PF13408,PS51737,G3DSA:3.40.50.1390, IPR025827,IPR006119,IPR038109,SSF53041, IPR011109,PTHR30461,PS00397,PS51736,cd00338,PF00239
MCQKIVVTLPNNLRIRVALYIRVSTEEQAKHGLSLADQRDALIAYAAAHGMEVVGIYEDAGISARKPYKKRPALMRLLDDCRAGKIDTILFVKLDRWFRNVAGYYAVQEVLDKNHVDWQAIREDYETRTASGRLKVNIMLSVAQDEADRTSERIKAINEGKRAKGQPTNGKTPIGICVKNRRYAIDEETADAARDMFPAFIRLQSILALRRYMATEWGIKRSYNKYKDALRSRLYLGEAFGVENALPALVDQETFDLAGKILERRSQRNASADRIYLFTGILRCRECGRNMQPETVKKVYKYYRCRTHTLDPADCPHILRIREDVLEDYLLREFEGIAKKYYSKSKTAEKKPPKTAEQIKRKMQKLKDLYLSDLIEIEEYKKDYTELKQQLAAINPEPIKEFDLETLRRELKEYPDLDRQAKKEFWVRTIQRIDADNDGAFFVTPS

SEQ ID NO: 8959 - protein, 446 aa, Unknown
  Description of Unknown: Integrase B8960 sequence
  PTHR30461:SF3,cd00338,SM00857,PS51736,IPR036162, PF13408,G3DSA:3.40.50.1390,IPR025827,IPR006119,SSF53041, PTHR30461,mobidb-lite,Coil,PF00239
MNIAIYPRKSKKDDNSESMEQQIDDCKKYINKTYPNANIIVYSGDYAITGHSTAKRKDFQRMMDDVRAGRINAVVIMRYDRIARNMRDFCNLYHDMESAGCNLISVSQQIDTSTPYGKNFMYQMANMAELEWAVISERYKDTAAYKIREGKAYTGRVPIGFKIEKIDGVKKVVHDNEEQTRAIFDYLLATKSKRGTVLWVRENLISDFTRHKLDSMINSDLYIGKVRENENFCEPYFTKEQMEEIKSVNQIKYAPSGHIYLFSGLFRCPICGRKMSSFYSIDRKTKKHRQYQRCWFGGNEKLHKTKLVSEAKTEKYLLENLDAALKNLEFDVKKEAGKPKRNLNKKLNDAIGERERLNYLFEKGRIDIPEYEKKYSVLSEKINSITEELSNNKVVRIEEFKKQIPEDWKELYEQLDQKGKQEFWHRIIKEIYLNEAFEITGFIFYI

SEQ ID NO: 8960 - protein, 446 aa, Unknown
  Description of Unknown: Integrase B8961 sequence
  PTHR30461:SF3,SM00857,IPR006118,G3DSA:1.10.10.2600, IPR036162,PF13408,IPR025827,G3DSA:3.40.50.1390, PS51737,IPR006119,IPR038109,SSF53041, IPR011109,PTHR30461,PS00397,PS51736,cd00338,PF00239
MCQKIVVTLPNNLRIRVALYIRVSTEEQAKHGLSLADQREALIAYAAAHGMEVVGIYEDAGISARKPYKKRPALLRLLDDCRAGKIDTILFAKLDRWFRNVAGYYAVQEVLDKNHVDWQAIREDYETRTASGRLKVNIMLSVAQDEADRTSERIKAINEGKRAKGQPTNGKTPIGICVKNRRYAIDEETADAARDMFPAFIRLQSILALRRYMATEWGIKRSYNKYKDALRSRLYLGEAFGVENVLPALVDRETFDLAGKILERRSQRNASADRIYLFTGILRCRECGRNMQPETVKQVYKYYRCRTHTLDPADCPHILRIREDVLEDYLLREFEGIAKKYYSKSKTAEKKPPKTAEQIKRKMQKLKDLYLSDLIEIEEYKKDYTELKQQLAAINPEPIKEFDLETLRRELKEYPDLDRQAKKEFWVRTIQRIDADNDGAFFVTPS

SEQ ID NO: 8961 - protein, 446 aa, Unknown
  Description of Unknown: Integrase B8962 sequence
  PTHR30461:SF3,SM00857,IPR006118,G3DSA:1.10.10.2600,IPR036162, PF13408,PS51737,IPR025827,G3DSA:3.40.50.1390,IPR006119, IPR038109,SSF53041,IPR011109,PTHR30461,PS00397, PS51736,cd00338,PF00239
MCQKIVVTLPNNLRIRVALYIRVSTEEQAKHGLSLADQREALIAYAAAHGMEVVGIYEDAGISARKPYKKRPALMRLLDDCRAGKIDTILFVKLDRWFRNVAGYYAVQEVLDKNHVDWQAIREDYETRTASGRLKVNIMLSVAQDEADRTSERIKAINEGKRAKGRPTNGKTPIGICVKNRRYAIDEETADAARDMFPAFIRLQSILALRRYMATEWGIKRSYNKYKDALRSRLYLGEAFGVENALPALVDQETFDLAGKILERRSQRNASADRIYLFTGILRCRECGRNMQPETVKKVYKYYRCRTHTLDPADCPHILRIREDVLEDYLLREFEGIAEKYYSKSKTAEKKPPKTAEQIKRKMQKLKDLYLSDLIEIEEYKKDYTELKQQLAAINPEPIKEFDLETLRRELKEYPDLDRQAKKEFWVRTIQRIDADNDGAFFVTPS

SEQ ID NO: 8962 - protein, 446 aa, Unknown
  Description of Unknown: Integrase B8963 sequence
  PTHR30461:SF3,SM00857,IPR036162,PS51736,PF13408, G3DSA:3.40.50.1390,IPR025827,IPR006119,SSF53041,PTHR30461, mobidb-lite,cd00338,PF00239
MNIAIYPRKSKKDDNSESMEQQIDDCRKYINKTYPDANIIVYSGDYAITGHSTAKRKDFQRMMDDVRAGRINAVVIMRYDRIARNMRDFCNLYHDMESAGCNLISVSQQIDTSTPYGKNFMYQMANMAELEWAVISERYKDTAAYKIREGKAYTGRVPIGFKIEKIDGVKKVVHDNEAQTRVIFDYLLATKSKRGTVLWVRENLIPDFTRHKLDSMIKSDLYIGKVRENENFCEPYFTKEQMEEIRSVNQIKYAPSGHIYLFSGLFRCPICGRKMSSFYSIDRKTKKHRQYQRCWFGGNEKLHKTKLVSEAKTEKYLLENIDTALKNLEFDVKKESGKPKQNLNKKLNDAIGERDRLNYLFEKGRIDIPEYEKKYSILSGKINSISEELSNNKVVKIEEFKKQIPSDWKVLYEQLDQKGKQEFWHRIIKEIYLNEAFEITGFIFYI

SEQ ID NO: 8963 - protein, 446 aa, Unknown
  Description of Unknown: Integrase B8964 sequence
  PTHR30461:SF3,SM00857,IPR006118,G3DSA:1.10.10.2600, IPR036162,PF13408,IPR025827,G3DSA:3.40.50.1390, PS51737,IPR006119,IPR038109,IPR011109, SSF53041,PTHR30461,PS00397,PS51736,cd00338,PF00239
MCQKIVVTLPNNLRIRVALYIRVSTEEQAKHGLSLADQREALIAYAAAHGMEVVGIYEDAGISARKPYKKRPALMRLLDDCSAGKIDTILFVKLDRWFRNVAGYYAVQEVLDKNHVDWQAIREDYETRTASGRLKVNIMLSVAQDEADRTSERIKAINEGKRAKGQPTNGKTPIGICVKNRRYAIDEETADAARDMFPAFIRLQSILALRRYMATEWGIKRSYNKYKDALSNRLYLGEAFGVENALPALVDQETFNLARRILEQRSQRNASADRIYLFTGILRCRECGRNMQPETVKQVYKYYRCRTHTLDPADCPHILRIREDVLEDYLLREFEGIAKKYYSKSKTAEKKPPKTAEQIKRKMQKLKDLYLSDLIEIEEYKKDYTELKQQLAAINPEPIKEFDLETLRRELKEYPDLDRQAKKEFWVRTIQRIDADNDGAFFVTPS

SEQ ID NO: 8964 - protein, 446 aa, Unknown
  Description of Unknown: Integrase B8965 sequence
  PTHR30461:SF3,cd00338,SM00857,IPR036162,PF13408, IPR025827,G3DSA:3.40.50.1390,mobidb-lite,IPR006119,SSF53041, PTHR30461,PS51736,Coil,PF00239
MNIAIYPRKSKKDDNSESMEQQIDDCKKYIDKTYTNANIIVYSGDYAITGHSTAKRKDFQRMMDDVRAGRINAVVIMRYDRIARNMRDFCNLYHDMESAGCNLISVSQQIDTSTPYGKNFMYQMANMAELEWAVISERYKDTAAYKIREGKAYTGRVPIGFKIEKIDGVKKVVHDNEEQTRAIFDYLLATKSKRGTVLWVRENLIPDFTRHKLDTMIKSDLYIGKVRENENFCEPYFTKEKMEEIRSVNQIKYAPSGHIYLFSGLFRCPICGRKMASFYSIDRKTKKHRQYQRCWFGGNEKLHNTKLVSEAKTEKYLLENLDAALKNLEFDVKKEAGKPKRNLNKKLNDAIGERDRLNYLFEKGRIDIPEYEKKYSVLSEKINSITEELSNNKVVRIEEFKKQIPEDWKVLYEQLDQKGKQEFWHRIIKEIYLNEAFEISGFIFYI

SEQ ID NO: 8965 - protein, 446 aa, Unknown
  Description of Unknown: Integrase B8966 sequence
  PTHR30461:SF3,SM00857,PS51736,IPR036162, PF13408,G3DSA:3.40.50.1390,IPR025827,IPR006119, SSF53041,PTHR30461,Coil,mobidb-lite, cd00338,PF00239
MNIAIYPRKSKKDDNSESMEQQIDDCRKYINKTYPDANIIVYSGDYAITGHSTAKRKDFQRMMDDVRAGRINAVVIMRYDRIARNMRDFCNLYHDMESAGCNLISVSQQIDTSTPYGKNFMYQMANMAELEWAVISERYKDTAAYKIREGKAYTGRVPIGFKIEKIDGVKKVVHDNEEQTRAIFDYLLATKSKRGTVLWVRKNFIPDFTRHKLDTMIKSDLYIGKVRDNDHFCDPYFTKEQMEEIRSVNQIKYAPSGHIYLFSGLFRCPICGRKMASFYSIDRKTKKHRQYQRCWFGGNEKLHKTKLVSEAKTEKYLLENLDAALKNLEFDVKKEAGKPKQNLNKKLNDAIGERERLNYLFEKGRIDIPEYEKKYSVLSEKINSITEELSNNKVVRIEEFKKQIPEDWKVLYEQLDPKGKQEFWHRIIKEIYLNEAFEITGFIFYI

SEQ ID NO: 8966 - protein, 446 aa, Unknown
  Description of Unknown: Integrase B8967 sequence
  PTHR30461:SF3,SM00857,IPR006118,G3DSA:1.10.10.2600,IPR036162, PF13408,PS51737,IPR025827,G3DSA:3.40.50.1390,IPR006119, IPR038109,IPR011109,SSF53041,PTHR30461,PS00397, PS51736,cd00338,PF00239
MRCALYIRVSSDEQKRNGFSLPEQRHALMQYAKEKGYTIVDLYADEGVSSSKNPQRRHEFQRMLSDVKKGKIDIIVFLKLDRWYRNVGDYYLTQAILDQYGVKWECVVEKYDTTTRTGKLGLNIKLTVAEDESANASERVKFVQAGKVRNREPITGNQPFGYKIETIDGVKRIVKDPETQAECEDMFETFFATGSGGATSKYINAKYGRSLAENAIPRRLKNPFYTGEYRGVPDYCPAYITKEQHARILAIFAKRTRSTKRKKVYLFAGLIKCPVCGRTMVSCTMNKKTLGYRCRHHYMNKCTFVHTITEERIESFLLENIGSMLEQYLISYKEQNKAKKKPDPRKLEDRLSRLNNIYMMGNISDSEYTKKANEITAQIAAIKCANSNDLPIPEESIKLLSDKRFATLYADLPRESRKALWMSLIDSIEVEGLYPKQVFFIGQERL

SEQ ID NO: 8967 - protein, 446 aa, Unknown
  Description of Unknown: Integrase B8968 sequence
  PTHR30461:SF3,SM00857,IPR006118,G3DSA:1.10.10.2600,IPR036162, PF13408,PS51737,IPR025827,G3DSA:3.40.50.1390,IPR006119, IPR038109,SSF53041,IPR011109,PTHR30461,PS00397, PS51736,cd00338,PF00239
MRCALYIRVSSDEQKRNGFSLPEQRHALMQYAKEKGYTIVDLYADEGVSSSKNPQRRHEFQRMLSDVKKGKIDIIVFLKLDRWYRNVGDYYLTQAILDQYGVKWECVVEKYDTTTRTGKLGLNIKLTVAEDEAANASERVKFVQAGKVRNREPITGNQPFGYKIETIDGVKRIVKDPETQAECEDMFETFFATGSGGATSKYINAKYGRSLAENAIPRRLKNPFYTGEYRGVPDYCPAYITKEQHARILAIFAKRTRSTKRKKVYLFAGLIKCPVCRRTMVSCTMNKKTLGYRCRHHYMNKCTFVHTITEERIESFLLENIGSMLEQYLISYKEQNKAKKKPDPRKLEDRLSRLNNIYMMGNISDSEYTKKANEITAQIAAIKCANSNDLPIPEESIKLLSDKRFATLYADLPRESRKALWMSLIDSIEVEGLYPKQVFFIGQESL

SEQ ID NO: 8968 - protein, 446 aa, Unknown
  Description of Unknown: Integrase B8969 sequence
  PTHR30461:SF3,SM00857,PS51736,PF13408,IPR025827, IPR036162,G3DSA:3.40.50.1390,IPR006119,SSF53041,PF00239, PTHR30461,mobidb-lite,Coil,cd00338
MNIAIYPRKSKKDDNSESMEQQIDDCKKYINKTYHNANILVYSGDYAITGHSTAKRKDFQRMMDDVRAGRINAVVIMRYDRIARNMRDFCNLYHDMESAGCNLISVSQQIDTSTPYGKNFMYQMANMAELEWAVISERYKDTAAYKIREGKAYTGRVPIGFKIEKIDGVKKVVHDNEEQTRAIFDYLLATKSKRSTVLWVRENLIPDFTRHKLDTMIKSDLYIGKVRENENFCEPYFTKEQMAEIRSVNQIKYAPSGHIYLFSGLFRCPICGRKMSSFYSIDRKTKKHRQYQRCWFGGNEKLHKTKLVSEAKTEKYLIENLDAALKNLEFDVKKEAGKPKRNLNKKLNDAIGERDRLNYLFEKGRIDIPEYEKKYSVLSEKINSITEELSNNKVVRIEEFKKQIPEDWKELYEQLDQKGKQEFWHRIIKEIYLNEAFEITGFIFYI

SEQ ID NO: 8969 - protein, 446 aa, Unknown
  Description of Unknown: Integrase B8970 sequence
  PTHR30461:SF3,SM00857,IPR006118,G3DSA:1.10.10.2600, IPR036162,PF13408,PS51737,G3DSA:3.40.50.1390, IPR025827,IPR006119,IPR038109,IPR011109, SSF53041,PTHR30461,PS00397,PS51736,cd00338,PF00239
MQVIRGAGYIRVSTTEQATRGLSLEAQEAEIRRYAKERGIVLVQIYVDRGITARKKLHRREAFAQMMRDVDAGLIDRIIVMRLDRWFRNVYDYHKMMNEHLIPHNVDWCAVKEDYDTTTTNGRLMINLRLAIAEQECDTDGDRIRDVQENMIQKGCWPFGQAPLGYRIVNKHLEKDPEQEECIRYFFEHMLLNGSLRAALFATNERYGTTYEYKRAQHLSRASVYYGEYGTNKSFCPAYITREEHERIRYLASKNIRVRKSPDKVAHLFSGLLICSDCGRRLSGQTIRRPSGVYVTYRCAHAYDNNGCPNTKSFSERIVENYLLHYMESELEEFIFTVEAESKTISLPIDNTEQIRAKQEKVKELFINDLIDLSEYKKRIDELESKIIVTAPKPRANTARLKKLLETNALSFYQTFTRDEKRAFWRGIIKELHIYRGTVQGPPIFL

SEQ ID NO: 8970 - protein, 446 aa, Unknown
  Description of Unknown: Integrase B8971 sequence
  PTHR30461:SF3,SM00857,IPR036162,PF13408,IPR025827, G3DSA:3.40.50.1390,mobidb-lite,IPR006119,SSF53041,PF00239, PTHR30461,PS51736,Coil,cd00338
MNIAIYPRKSKKNDNSESMEQQIDDCRKYINKTYPNANIIVYSGDYAITGHSTAKRKDFQRMMDDVRAGRINAVVIMRYDRIARNMRDFCNLYHDMESAGCNLISVSQQIDTSTPYGKNFMYQMANMAELEWAVISERYKDTAAYKIREGKAYTGRVPIGFKIEKIDGVKKVVHDNEEQTRAIFDYLLATKSKRGTVLWVRENLISDFTRHKLDSMINSDLYIGKVRENENFCEPYFTKEQMEEIRSVNQIKYAPSGHIYLFSGLFRCPICGRKMSSFYSIDRKTKKHRQYQRCWFGGNEKLHNTKLVSEAKTEKYLLENLDTALKNLEFDVKKEAGKPKRNLNKKLNDAIGERDRLNYLFEKGRIDIPEYEKKYSVLSEKINSITEELSNNKVVRIEEFKKQIPEDWKELYEQLDQKGKQEFWHRIIKEIYLNEAFEITGFIFYI

SEQ ID NO: 8971 - protein, 446 aa, Unknown
  Description of Unknown: Integrase B8972 sequence
  PTHR30461:SF3,SM00857,IPR036162,PS51736, PF13408,G3DSA:3.40.50.1390,IPR025827,IPR006119, SSF53041,PF00239,PTHR30461,mobidb-lite, Coil,cd00338
MNIAIYPRKSKKDDNSESMEQQIDDCKKYINKTYPNANIIVYSGDYAITGHSTAKRKDFQRMMDDVRAGRINAVVIMRYDRIARNMRDFCNLYHDMESAGCNLISVSQQIDTSTPYGKNFMYQMANMAELEWAVISERYKDTAAYKIREGKAYTGRVPIGFKIEKIDGVKKVVHDNEEQTRAIFDYLLATKSKRGTVLWVRENLIPDFTRHKLDTMIKSDLYIGKVRENENFCEPYFTKEQMEEIRSVNQIKYAPSGHIYLFSGLFRCPICGRKMSSFYSIDRKTKKHRQYQRCWFGGNEKLHKTKLVSEAKTEKYLLENLDAALKNLEFDVKKEAGKPKQNLNKKLNDAIGERERLNYLFEKGRIDIPEYEKKYSVLSEKINSITEELSNNKVVRIDEFKKQIPEDWKVLYEQLDQKGKQEFWHRIIKEIYLNEAFEITGFIFYI

SEQ ID NO: 8972 - protein, 446 aa, Unknown
  Description of Unknown: Integrase B8973 sequence
  PTHR30461:SF3,cd00338,SM00857,IPR036162,PS51736, PF13408,G3DSA:3.40.50.1390,IPR025827,IPR006119,SSF53041, PTHR30461,mobidb-lite,Coil,PF00239
MNIAIYPRKSKKDDNSESMEQQIDDCRKYIDKTYPNANIIVYSGDYAITGHSTAKRKDFQRMMDDVRAGRINAVVIMRYDRIARNMRDFCNLYHDMESAGCNLISVSQQIDTSTPYGKNFMYQMANMAELEWAVISERYKDTAAYKIREGKAYTGRVPIGFKIEKIDGVKKVVHDNEEQTRAIFDYLLATKSKRGTVLWVRENLIPDFTRHKLDTMIKSDLYIGKVRENENFCEPYFTKEQMEEIRSVNQIKYAPSGHIYLFSGLFRCPICGRKMSSFYSIDRKTKKHRQYQRCWFGGNEKLHKTKLVSEAKTEKYLLENLDTALKNLEFDVKKEAGKPKRNLNKKLNDAIGERERLNYLFEKGRIDIPEYEKKYSVLSEKINSITEELSNNKVVRIEEFKKRIPEDWKDIYEQLDQKGKQEFWHRIIKEFYLNEAFEITGFIFYI

SEQ ID NO: 8973 - protein, 446 aa, Unknown
  Description of Unknown: Integrase B8974 sequence
  PTHR30461:SF3,SM00857,IPR006118,G3DSA:1.10.10.2600, IPR036162,PF13408,IPR025827,PS51737, G3DSA:3.40.50.1390,IPR006119,IPR038109,SSF53041, IPR011109,PTHR30461,PS00397,PS51736,cd00338,PF00239
MCQKIVVTLPNNLRIRVALYIRVSTEEQAKHGLSLADQREALTDYAAAHNMEVVGIYEDAGISARKPYKKRPALLRLLDDCRAGKIDTILFVKLDRWFRNVAGYYAVQEVLDKNHVDWQAIREDYETRTASGRLKVNIMLSVAQDEADRTSERIKAINEGKRAKGQPTNGKTPIGICVKNRRYAIDEETADAARDMFPAFIRLQSILALRRYMATEWGIKRSYNKYKDALSNRLYLGEAFGVENALPALVDQETFDLAGKILERRSQRNASADRIYLFTGILRCRECGRNMQPETVKKVYKYYRCRTHILDPADCPHILRIREDVLEDYLLREFEGIAKKYYSKSKTAEKKPPKTAEQIKRKMQKLKELYLSDLIEIEEYKKDYTDLKQQLAAINPEPVKEFDLETLRRELKEYPDLDRQAKKEFWVRTIQRIDADNDGAFFVTPS

SEQ ID NO: 8974 - protein, 446 aa, Unknown
  Description of Unknown: Integrase B8975 sequence
  PTHR30461:SF3,SM00857,IPR006118,IPR036162,PF13408, PS51737,G3DSA:3.40.50.1390,IPR025827,IPR006119,SSF53041, IPR011109,PTHR30461,PS00397,PS51736,cd00338, PF00239
MRCALYIRVSSDEQKRKGYSLPEQRHVLTQYAEEKGYTVVDLYADEGVSSSKNPQRRHEFQRMLSDVRNGKIDIIVFLKLDRWFRNVGDYYITQEILDQNGVKWECVTEHYDTTTRTGKLNLNIKLTIAEDEAANTSERVKFVQAGKVRNREPITGNQPFGYKIATIDGVKRIIKDPETQAECEDMFNTFFATGSGGATGKYINAKYGRSLAENAIPRRLKNPAYTGEYRGIPDYYPPYITKEQHARILSIFAKRTRSTKRKKVYLFAGLIKCPVCGRTMVSCTMNKKTLGYRCRHHYTYHCTFIHTITEERIESFLLENIGSMLEQYLISYKEQNKTKKKPDPRKLEDRLSRLNNIYMMGNISDSEYTKKANEITAQIAAIKCANSNDLPIPEESIKLLSDKRFATLYADLPRESRKALWMSLIDSIEVEGLYPKQVFFIGQERL

SEQ ID NO: 8975 - protein, 446 aa, Unknown
  Description of Unknown: Integrase B8976 sequence
  PTHR30461:SF3,cd00338,SM00857,IPR036162,PS51736, PF13408,G3DSA:3.40.50.1390,IPR025827,IPR006119,SSF53041, PTHR30461,mobidb-lite,Coil,PF00239
MNIAIYPRKSKKDDNSESMEQQIDDCRKYINKTYPDANIIVYSGDYAITGHSTAKRKDFQRMMDDVRAGRINAVVIMRYDRIARNMRDFCNLYHDMESAGCNLISVSQQIDTSTPYGKNFMYQMANMAELEWAVISERYKDTAAYKIREGKAYTGRVPIGFKIEKTDGVKKVVHDNEEQTRAIFDYLLATKSKRGTVLWVRENFIPDFTRHKLDTMIKSDLYIGKVRENDHFCEPYFTKDQMEEIRSVNQIKYAPSGHIYLFSGLFRCPICGRKMSSFYSIDRKTKKHRQYQRCWFGGNEKLHKTKLVSEAKTEKYLLENLDAALKNLEFDVKKEAGKPKRNLNKKLNDAIGERDRLNYLFEKGRIDIPEYEKKYSVLSEKINSITEELSNNKVVRIEEFKKQIPEDWKELYKQLDQKGKQEFWHRIIKEIYLNEAFEITGFIFYI

SEQ ID NO: 8976 - protein, 446 aa, Unknown
  Description of Unknown: Integrase B8977 sequence
  PTHR30461:SF3,SM00857,IPR036162,PF13408, IPR025827,G3DSA:3.40.50.1390,mobidb-lite,IPR006119, SSF53041,PF00239,PTHR30461,PS51736, Coil,cd00338
MNIAIYPRKSKKDDNSESMEQQIDDCRKYINKTYPNANMIVYSGDYAITGHSTAKRKDFQRMMDDVRAGRINAVVIMRYDRIARNMRDFCNLYHDMESAGCNLISVSQQIDTSTPYGKNFMYQMANMAELEWAVISERYKDTAAYKIREGKAYTGRVPIGFKIEKIDGVKKVVHDNEEQTRAIFDYLLATKSKRGTVLWVRENLIPDFTRHKLDTMIKSDLYIGKVRENENFCEPYFTKEQMEEIRSVNQIKYAPSGHIYLFSGLFRCPICGRKMSSFYSIDRKTKKHRQYQRCWFGGNEKLHKTKLVSEAKTEKYLLENLDAALKNLEFDVKKEAGKPKRNLNKKLNDAIGERDRLNYLFEKGRIDIPEYEKKYSVLSEKINSITEELSNNKVVRIEEFKKQIPEDWKELYEQLDQKGKQEFWHRIIKEIYLNEAFEITGFIFYI

SEQ ID NO: 8977 - protein, 446 aa, Unknown
  Description of Unknown: Integrase B8978 sequence
  PTHR30461:SF3,SM00857,IPR006118,G3DSA:1.10.10.2600,IPR036162, PF13408,IPR025827,G3DSA:3.40.50.1390,PS51737,IPR006119, IPR038109,SSF53041,IPR011109,PTHR30461,PS00397, PS51736,cd00338,PF00239
MCQKIVVTLPNNLRIRVALYIRVSTEEQAKHGLSLADQRDALIAYAAAHGMEVVGIYEDAGISARKPYKKRPALMRLLDDCRAGKINTILFVKLDRWFRNVAGYYAVQEVLDKNHVDWQAIREDYETRTASGRLKVNIMLSVAQDEADRTSERIKAINEGKRAKGQPTNGKTPIGICVRNRRYDIDEETADAARDMFPAFIRLQSILALRRYMATEWGIKRSYNKYKDALRSRLYLGEAFGVENALPALVDQETFDLAGKILERRSQRNASADRIYLFTGILRCRECGRNMQPETVKKVYKYYRCRTHTLDPADCPHILRIREDVLEDYLLREFEGIAKKYYSKSKTAEKKPPKTAEQIKRKMQKLKELYLSDLIEIEEYKKDYTDLKQQLAAINPEPIKEFDLETLRRELKEYPDLDRQAKKEFWVRTIQRIDADNDGAFFVTPS

SEQ ID NO: 8978 - protein, 446 aa, Unknown
  Description of Unknown: Integrase B8979 sequence
  PTHR30461:SF3,cd00338,SM00857,IPR036162,PF13408, IPR025827,G3DSA:3.40.50.1390,PS51736,IPR006119,SSF53041, PTHR30461,mobidb-lite,Coil,PF00239
MNIAIYPRKSKKDDNSESMEQQIDDCKKYINKTYPNANIIVYSGDYAITGHSTAKRKDFQRMMDDVRAGRINAVVIMRYDRIARNMRDFCNLYHDMESAGCNLISVSQQIDTSTPYGKNFMYQMANMAELEWAVISERYKDTAAYKIREGKAYTGRVPIGFKIEKIDGVKKVVHDNEEQTRAIFDYLLATKSKRGTVLWVRENLIPDFTRHKLDSMIKSDLYIGKVRENENFCEPYFTKEQMEEIRSVNQIKYAPSGHIYLFSGLFRCPICGRKMASFYSIDRKTKKHRQYQRCWFGGNEKLHKTKLVSEAKTEKYLLENLDTALKNLEFDVKKEAGKPKRNLNKKLNDAIGERDRLNYLFEKGRIDIPEYEKKYSVLSEKINSITEELSNNKVVRIDEFKKQIPEDWKVLYEQLDQKGKQEFWHRIIKEIYLNEAFEITGFIFYI

SEQ ID NO: 8979 - protein, 446 aa, Unknown
  Description of Unknown: Integrase B8980 sequence
  PTHR30461:SF3,cd00338,SM00857,IPR036162, PF13408,IPR025827,PS51736,G3DSA:3.40.50.1390, IPR006119,SSF53041,PTHR30461,mobidb-lite, Coil,PF00239
MNIAIYPRKSKKDDNSESMEQQIDDCRKYINKTYHNANIIVYSGDYAITGHSTAKRKDFQRMMDDVRAGRINAVVIMRYDRIARNMRDFCNLYHDMESAGCNLISVSQQIDTSTPYGKNFMYQMANMAELEWAVISERYKDTAAYKIREGKAYTGRVPIGFKIEKIDGIKKVVHDNEEQTRAIFDYLLATKSKRGTVLWVRENLIPDFTRHKLDTMIKSDLYIGKVRENENFCEPYFTQKQMEEIRSVNQIKYAPSGHIYLFSGLFRCPICGRKMASFYSIDKKTKKHRQYQRCWFGGNEKLHKTKLVSEAKTEKYLLENLDAALKNLEFDVKKEAGKPKRNLNKKLNDAIGERDRLNYLFEKGRIDIPEYEKKYSILSGKINSISEELSNNKVVKIEEFKKQIPSNWEVLYEQLDQKGKQEFWHRIIKEIYLNEAFEITGFIFYI

SEQ ID NO: 8980 - protein, 446 aa, Unknown
  Description of Unknown: Integrase B8981 sequence
  PTHR30461:SF3,cd00338,SM00857,IPR036162,PF13408, IPR025827,PS51736,G3DSA:3.40.50.1390,IPR006119,SSF53041, PTHR30461,mobidb-lite,Coil,PF00239
MNIAIYPRKSKKDDNSESMEQQIDDCRKYINKTYHNANIIVYSGDYAITGHSTAKRKDFQRMMDDVRAGRINAVVIMRYDRIARNMRDFCNLYHDMESAGCNLISVSQQIDTSTPYGKNFMYQMANMAELEWAVISERYKDTAAYKIREGKAYTGRVPIGFKIEKIDGVKKVVHDNEEQTRAIFDYLLATKSKRGTVLWVRENFIPDFTRHKLDTMIKSDLYIGKVRENEYFCEPYFTKEKMEEIRSVNQIKYAPSGHIYLFSGLFRCPICGRKMASFYSIDRKTKKHRQYQRCWFGGNEKLHKTKLVSEAKTEKYLLENLDVALKNLEFDVKKEAGKPKRNLNKKLNDAIAERDRLNYLFEKGRIDIPEYEKKYSVLSEKINSITEELSNNKVVRIEEFKKQIPEDWKELYEQLDQKGKQEFWHRIIKEIYLNEAFEITGFIFYI

SEQ ID NO: 8981 - protein, 446 aa, Unknown
  Description of Unknown: Integrase B8982 sequence
  PTHR30461:SF3,SM00857,IPR006118,G3DSA:1.10.10.2600, IPR036162,PF13408,PS51737,G3DSA:3.40.50.1390, IPR025827,IPR006119,IPR038109,IPR011109, SSF53041,PTHR30461,PS00397,PS51736,cd00338,PF00239
MCQKIVVTLPNNLRIRVALYIRVSTEEQAKHGLSLADQREALTAYAAAHNMEVVGIYEDAGISARKPYKKRPALMRLLDDCSAGKVDTILFVKLDRWFRNVAGYYAVQEVLDKNHVDWQAIREDYETRTASGRLKVNIMLSVAQDEADRTSERIKAINEGKRAKGQPTNGKTPIGICVKNRHYAIDKETADAAQDMFPAFIRLQSILALRRYMATEWGIKRSYNKYKDALGNRLYLGEAFGVENALPALIDQETFDLAGKILERRSQRNASADRIYLFTGILRCRECGRNMQPETVKQVYKYYRCRTHTLDPADCPHILRIREDVLEDYLLREFEGIAKKYYSKSKTAEKKPPKTAEQIKRKMQKLKDLYLSDLIEIEEYKKDYTELKQQLAAINPEPIKEFDLETLRRELKEYPNLDRQAKKEFWVRTIQRIDADNDGAFFVTPS

SEQ ID NO: 8982 - protein, 446 aa, Unknown
  Description of Unknown: Integrase B8983 sequence
  PTHR30461:SF3,cd00338,SM00857,PS51736,IPR036162, PF13408,IPR025827,G3DSA:3.40.50.1390,IPR006119,SSF53041, PTHR30461,mobidb-lite,Coil,PF00239
MNIAIYPRKSKKDDNSESMEQQIDDCKKYINKTYPNANIIVYSGDYAITGHSTAKRKDFQRMMDDVRAGRINAVVIMRYDRIARNMRDFCNLYHDMESAGCNLISVSQQIDTSTPYGKNFMYQMANMAELEWAVISERYKDTAAYKIREGKAYTGRVPIGFKIEKIDGVKKVVHDNEEQTRAIFDYLLATKSKRGTVLWVRENFIPDFTRHKLDTMIKSDLYIGKVRENENFCEPYFTKEQMEEIRSVNQIKYAPSGHIYLFSGLFRCPICGRKMASFYSIDRKTKKHRQYQRCWFGGNEKLHKTKLVSEAKTEKYLLENLDTALKNLEFDVKKEAGKPKRNLNKKLNDAIGERDRLNYLFEKGRIDIPEYEKKYSVLSEKINSITEELSNNKVVRIEEFKKQIPEDWKELYEQLDQKGKQEFWHRIIKEIYLNEAFEITGFIFYI

SEQ ID NO: 8983 - protein, 446 aa, Unknown
  Description of Unknown: Integrase B8984 sequence
  PTHR30461:SF3,cd00338,SM00857,IPR036162,PS51736,PF13408, G3DSA:3.40.50.1390,IPR025827,IPR006119,SSF53041,PTHR30461 ,mobidb-lite,Coil,PF00239
MNIAIYPRKSKKDDNSESMEQQIDDCRKYINKTYHNANIIVYSGDYAITGHSTAKRKDFQRMMDDVRAGRINAVVIMRYDRIARNMRDFCNLYHDMESAGCNLISVSQQIDTSTPYGKNFMYQMANMAELEWAVISERYKDTAAYKIREGKAYTGRVPIGFKIEKIDGVKKVVHDNEEQTRAIFDYLLATKSKRGTVLWVRENLISDFTRHKLDSMINSDLYIGKVRENENFCEPYFTKEQMEEIRSVNQIKYAPSGHIYLFSGLFRCPICGRKMSSFYSIDRKTKKHRQYQRCWFGGNEKLHKTKLVSEAKTEKYLLENLDAALKNLEFDVKKEAGKPKRNLNKKLNDAIAERDRLNYLFEKGRIDIPEYEKKYSVLSEKINSITEELSNNKVVRIEEFKKQIPEDWKELYEQLDQKGKQEFWHRIIKEIYLNEAFEITGFIFYI

SEQ ID NO: 8984 - protein, 446 aa, Unknown
  Description of Unknown: Integrase B8985 sequence
  PTHR30461:SF3,cd00338,SM00857,IPR036162,PF13408, IPR025827,G3DSA:3.40.50.1390,PS51736,IPR006119,SSF53041, PTHR30461,mobidb-lite,Coil,PF00239
MNIAIYPRKSKKDDNSESMEQQIDDCKKYINKTYPNANIIVYSGDYAITGHSTAKRKDFQRMMDDVRAGRINAVVIMRYDRIARNMRDFCNLYHDMESAGCNLISVSQQIDTSTPYGKNFMYQMANMAELEWAVISERYKDTAAYKIREGKAYTGRVPIGFKIEKIDGVKKVVHDNEEQTRAIFDYLLATKSKRGTVLWVRENLISDFTRHKLDSMINSDLYIGKVRENENFCEPYFTKEKMEEIRSVNQIKYAPSGHIYLFSGLFRCPICGRKMSSFYSIDRKTKKHRQYQRCWFGGNEKLHKTKLVSEAKTEKYLLENLDAALKNLEFDVKKEAGKPKRNLNKKLNDAIGERDRLNYLFEKGRIDIPEYEKKYSILSGKINSISEELSNNKVVKIEEFKKQIPSDWRVLYEQLDQKGKQEFWHRIIKEIYLNEAFEITGFIFYI

SEQ ID NO: 8985 - protein, 446 aa, Unknown
  Description of Unknown: Integrase B8986 sequence
  PTHR30461:SF3,SM00857,IPR036162,PF13408, IPR025827,G3DSA:3.40.50.1390,PS51736,IPR006119, SSF53041,PF00239,PTHR30461,mobidb-lite, Coil,cd00338
MNIAIYPRKSKKDDNSESMEQQIDDCKKYIDKTYPDANIIVYSGDYAITGHSTAKRKDFQRMMDDVRAGRINAVVIMRYDRIARNMRDFCNLYHDMESAGCNLISVSQQIDTSTPYGKNFMYQMANMAELEWAVISERYKDTAAYKIREGKAYTGRVPIGFKIEKIDGVKKVVHDNEEQTRAIFDYLLATKSKRGTVLWVRENLIPDFTRHKLDTMIKSDLYIGKVRENENFCEPYFTKEQMEEIRSVNQIKYAPSGHIYLFSGLFRCPICGRKMSSFYSIDRKTKKHRQYQRCWFGGNEKLHKTKLVSEAKTEKYLLENLDAALKNLEFDVKKEAGKPKRNLNKKLNDAIGERDRLNYLFEKGRIDIPEYEKKYSVLSEKINSITEELSNNKVVRIEEFKKQIPEDWKELYEQLDQKGKQEFWHRIIKEIYLNEAFEITGFIFYI

SEQ ID NO: 8986 - protein, 446 aa, Unknown
  Description of Unknown: Integrase B8987 sequence
  PTHR30461:SF3,cd00338,SM00857,IPR036162,PF13408, IPR025827,G3DSA:3.40.50.1390,PS51736,IPR006119,SSF53041, PTHR30461,mobidb-lite,Coil,PF00239
MNIAIYPRKSKKDDNSESMEQQIDDCRKYIDKTYPNANIIVYSGDYAITGHSTAKRKDFQRMMDDVRAGRINAVVIMRYDRIARNMRDFCNLYHDMESAGCNLISVSQQIDTSTPYGKNFMYQMANMAELEWAVISERYKDTAAYKIREGKAYTGRVPIGFKIEKIDGIKKVVHDNEEQTRAIFDYLLATKSKRGTVLWVRENLIPDFTRHKLDTMIKSDLYIGKVRENENFCEPYFTQKQMEEIRSVNQIKYAPSGHIYLFSGLFRCPICGRKMASFYSIDRKTKKHRQYQRCWFGGNEKLHKTKLVSEAKTEKYLLENLDAALKNLEFDVKKEAGKPKRNLNKKLNDAIGERDRLNYLFEKGRIDIPEYEKKYSVLSEKINSITEELSNNKVVRIEEFKKQIPEDWKELYEQLDQKGKQEFWHRIIKEIYLNEAFEITGFIFYI

SEQ ID NO: 8987 - protein, 446 aa, Unknown
  Description of Unknown: Integrase B8988 sequence
  PTHR30461:SF3,SM00857,IPR036162,PF13408, IPR025827,G3DSA:3.40.50.1390,mobidb-lite,IPR006119, SSF53041,PTHR30461,PS51736,cd00338, PF00239
MNIAIYPRKSKKDDNSESMEQQIDDCRKYINKTYPNANIIVYSGDYAITGHSTAKRKDFQRMMDDVRAGRINAVVIMRYDRIARNMRDFCNLYHDMESAGCNLISVSQQIDTSTPYGKNFMYQMANMAELEWAVISERYKDTAAYKIREGKAYTGRLPIGFKIEKIDGVKKVVHDNEEQTRAIFDYLLATKSKRGTVLWVRENFIPDFTRHKLDTMIKSNLYIGKVRENDHFCEPYFTKEQMEEIRSVNQIKYAPSGHIYLFSGLFCCPICGRKMASFYSIDRKTKKHRQYQRCWFGGNEKLHKTKLVSEAKTEKYLLENLDTALKNLEFDVKKESGKPKQNLNKKLNDAIGERDRLNYLFEKGRIDIPEYEKKYSILSGKINSISEELSNNKVVRIEEFKKQIPSNWKVLYEQLDQKGKQEFWHRIIKEIYLNEAFEITGFIFYI

SEQ ID NO: 8988 - protein, 446 aa, Unknown
  Description of Unknown: Integrase B8989 sequence
  PTHR30461:SF3,SM00857,G3DSA:1.10.10.2600,IPR036162,PF13408, PS51737,G3DSA:3.40.50.1390,IPR025827,IPR006119,IPR038109, PF07508,IPR011109,SSF53041,PTHR30461,PS51736, cd00338,PF00239
MKIVTEIGAIAPIKKLKKVCAYARVSKDKDAMLQSLSSQVSHYNKLISSNPEWQFAGVYADEGISGTKEDRPEFIRMVEDAKAGKIDMIITKSISRFGRNTETVIKTVRMLKAINVDVYFESQKMHTLSEEGEFMLTVLASYYQEEARSVSENMKWRIKKDFEQGIAWGGNDNFGYKLNGRTLEIVPEQAQIVKRIFDMYINGLGVLAIAKALNEEGIKPTMGGKWIKSNVLRVITNINYIGDRVLQTTFRPDFLSKKKKINKGELKQYYVEDDHEPIIDKETFMKAQLIKEERAKRFKLDVSKRNITYPFTQKIRCSCCGSTYQHKTTKYNQYWICSTFNMKGKKFCNDSKQIPEEKLYEAINSYLGIDEFDEDLFNKKIDYIIAKPNNVLEIHLFDGKIDEIKWTDPTRKNSWTPEMKEKARIKSKEIEKNLKRGADGKWVKSE

SEQ ID NO: 8989 - protein, 446 aa, Unknown
  Description of Unknown: Integrase B8990 sequence
  PTHR30461:SF3,SM00857,PS51736,IPR036162,PF13408, G3DSA:3.40.50.1390,IPR025827,IPR006119,SSF53041,PF00239, PTHR30461,mobidb-lite,Coil,cd00338
MNIAIYPRKSKKDDNSESMEQQIDDCRKYINKTYPNANIIVYSGDYAITGHSTAKRKDFQRMMDDVRAGRINAVVIMRYDRIARNMRDFCNLYHDMESAGCNLISVSQQIDTSTPYGKNFMYQMANMAELEWAVISERYKDTAAYKIREGKAYTGRVPIGFKIEKIDGVKKVVHDNEEQTRAIFDYLLATKSKRGTVLWVRENLIPDFTRHKLDTMIKSDLYIGKVRENENFCEPYFTKEQMEEIRSVNQIKYAPSGHIYLFSGLFRCPICGRKMSSFYSIDRKTKKHRQYQRCWFGGNEKLHKTKLVSEAKTEKYLLENIDTALKNLEFDVKKEESKPKRNLNKKLNDAIGERDRLNYLFEKGRIDIPEYEKKYSILSGKINSISEELSNNKVVKIEEFKKQIPSDWRVLYEQLDQKGKQEFWHRIIKEIYLNEAFEITGFIFYI

SEQ ID NO: 8990 - protein, 446 aa, Unknown
  Description of Unknown: Integrase B8991 sequence
  PTHR30461:SF3,SM00857,IPR036162,PF13408, IPR025827,G3DSA:3.40.50.1390,PS51736,IPR006119, SSF53041,PF00239,PTHR30461,mobidb-lite, Coil,cd00338
MNIAIYPRKSKKDDNSESMEQQIDDCKKYINKTYPNANIIVYSGDYAITGHSTAKRKDFQRMMDDVRAGRINAVVIMRYDRIARNMRDFCNLYHDMESAGCNLISVSQQIDTSTPYGKNFMYQMANMAELEWAVISERYKDTAAYKIREGKAYTGRVPIGFKIEKIDGVKKVVHDNEEQTRAIFDYLLATKSKRGTVLWVRKNFIPDFTRHKLDTMIKSDLYIGKVRDNDHFCDPYFTKEQMEEIRSVNQIKYAPSGHIYLFSGLFRCPICGRKMSSFYSIDRKTKKHRQYQRCWFGGNEKLHKTKLVSEAKTEKYLLENLDAALKNLEFDVKKEAGKPKQNLNKKLNDAIGERERLNYLFEKGRIDIPEYEKKYSVLSEKINSITEELSNNKVVRIEEFKKQIPEDWKELYEQLDQKGKQEFWHRIIKEIYLNEAFEITGFIFYI

SEQ ID NO: 8991 - protein, 446 aa, Unknown
  Description of Unknown: Integrase B8992 sequence
  PTHR30461:SF3,cd00338,SM00857,IPR036162,PS51736, PF13408,IPR025827,G3DSA:3.40.50.1390,IPR006119,SSF53041, PTHR30461,mobidb-lite,Coil,PF00239
MNIAIYPRKSKKDDNSESMEQQIDDCKKYIDKTYPNANIIVYSGDYAITGHSTAKRKDFQRMMDDVRAGRINAVVIMRYDRIARNMRDFCNLYHDMESAGCNLISVSQQIDTSTPYGKNFMYQMANMAELEWAVISERYKDTAAYKIREGKAYTGRVPIGFKIEKIDGVKKVVHDNEEQTRAIFDYLLATKSKRGTVLWVRENLIPDFTRHKLDSMIKSDLYIGKVRENDHFCEPYFTKDQMEEIRSINQIKYAPSGHIYLFSGLFRCPICGRKMASFYSIDRKTKKHRQYQRCWFGGNEKLHKTKLVSETKTEKYLLENLDAALKNLEFDVKKEAGKPKQNLNKKLNDAIGERERLNYLFEKGRIDIPEYEKKYSVLSEKINSITEELSNNKVVRIEEFKKQIPEDWKVLYEQLDPKGKQEFWHRIIKEIYLNEAFEITGFIFYI

SEQ ID NO: 8992 - protein, 446 aa, Unknown
  Description of Unknown: Integrase B8993 sequence
  PTHR30461:SF3,SM00857,IPR006118,G3DSA:1.10.10.2600, IPR036162,PF13408,IPR025827,G3DSA:3.40.50.1390, PS51737,IPR006119,IPR038109,IPR011109, SSF53041,PTHR30461,PS00397,PS51736,cd00338,PF00239
MCQKIVVTLPNNLRIRVALYIRVSTEEQAKHGLSLADQREALIAYAAAHDMEVVGIYEDAGISARKPYKKRPALMRLLDDCRAGKIDTILFVKLDRWFRNVAGYYAVQEVLDKNHVDWQAIREDYETRTASGRLKVNIMLSVAQDEADRTSERIKAINEGKRAKGQPTNGKTPIGICVKNRRYDIDEETADAARDMFPAFIRLQSILALRRYMATEWGIKRSYNKYKDALRSRLYLGEAFGVENALPALVDRETFDLAGKILERRSQRNASADRIYLFTGILRCRECGRNMQPETVKQVYKYYRCRTHTLDPADCPHILRIREDVLEDYLLREFEGIAKKYYSKSKTAEKKPPKTAEQIKRKMQKLKDLYLSDLIEIEEYKKDYTELKQQLAAINPEPIKEFDLETLRRELKEYPDLDRQAKKEFWVRTIQRIDADNDGAFFVTPS

SEQ ID NO: 8993 - protein, 446 aa, Unknown
  Description of Unknown: Integrase B8994 sequence
  PTHR30461:SF3,SM00857,IPR006118,G3DSA:1.10.10.2600,IPR036162, PF13408,IPR025827,G3DSA:3.40.50.1390,PS51737,IPR006119, IPR038109,SSF53041,IPR011109,PTHR30461,PS00397, PS51736,cd00338,PF00239
MCQKIVVTLPNNLRIRVALYIRVSTEEQAKHGLSLADQREALIAYAAAHGMEVVGIYEDAGISARKPYKKRPALMRLLDDCRAGKIDTILFVKLDRWFRNVAGYYAVQEVLDKNHVDWQAIREDYETRTASGRLKVNIMLSVAQDEADRTSERIKAINEGKRAKGQPTNGKTPIGICVKNRRYDIDEETAAAARDMFPAFIRLQSILALRRYMATEWGIKRSYNKYKDALRSRLYLGEAFGVENALPALVDRETFDLAGKILERRSQRNASADRIYLFTGILRCRECGRNMQPETVKQVYKYYRCRTHTLDPADCPHILRIREDVLEDYLLREFEGIAKKYYSKSKTAEKKPPKTAEQIKRKMQKLKELYLSDLIEIEEYKKDYTDLKQQLAAINPEPIKEFDLETLRRELKEYPDLDRQAKKEFWVRTIQRIDADNDGAFFVTPS

SEQ ID NO: 8994 - protein, 446 aa, Unknown
  Description of Unknown: Integrase B8995 sequence
  PTHR30461:SF3,cd00338,SM00857,PS51736,PF13408, IPR025827,IPR036162,G3DSA:3.40.50.1390,IPR006119,SSF53041, PTHR30461,mobidb-lite,Coil,PF00239
MNIAIYPRKSKKDDNSESMEQQIDDCKKYINKTYPNANIIVYSGDYAITGHSTAKRKDFQRMMDDVRAGRINAVVIMRYDRIARNMRDFCNLYHDMESAGCNLISVSQQIDTSTPYGKNFMYQMANMAELEWAVISERYKDTAAYKIREGKAYTGRVPIGFKIEKIDGIKKVVHDNEEQTRAIFDYLLATKSKRGTVLWVRENLIPDFTRHKLDSMIKSDLYIGKVRENENFCEPYFTKEQMEEIRSVNQIKYAPSGHIYLFSGLFRCPICGRKMASFYSIDRKTKKHRQYQRCWFGGNEKLHKTKLVSEAKTEKYLLENLDAALKNLEFDVKKEAGKPKRNLNKKLNDAIGERDRLNYLFEKGRINIPEYEKKYSVLSEKINSITEELSNNKVVRIEEFKKQIPEDWKELYEQLDQKGKQEFWHRIIKEIYLNEAFEITGFIFYI

SEQ ID NO: 8995 - protein, 446 aa, Unknown
  Description of Unknown: Integrase B8996 sequence
  PTHR30461:SF3,IPR036162,PS51737,IPR011109, PTHR30461,PS00397,PF00239,G3DSA:1.10.10.2600, IPR006119,SSF53041,cd00338,SM00857,IPR025827,IPR038109 ,PS51736,IPR006118,PF13408,G3DSA:3.40.50.1390,Coil
MCQKIVVTLPNNLRIRVALYIRVSTEEQAKHGLSLADQREALIAYAAAHGMEVVGIYEDAGISARKPYKKRPALMRLLDDCSAGKIDTILFVKLDRWFRNVAGYYAVQEVLDKNHVDWQAIREDYETRTASGRLKVNIMLSVAQDEADRTSERIKAINEGKRTKGQPTNGKTPIGICVKNRRYAIDEETADAARDMFPAFIRLQSILALRRYMATEWGIKRSYNKYKDALSNRLYLGEAFGVENALPALVDQETFDLAGKILERRSQRNASADRIYLFTGILRCRECGRNMQPETVKKVYKYYRCRTHTLDPADCPHILRIREDVLENYLLREFEGIAKKYYSKSKTAEKKPPKTAEQIKRKMQKLKDLYLSDLIEIEEYKKDYTELKQQLAAINTEPIKEFDLETLRRELKEYPDLDRQAKKEFWVRTIQRIDADNDGAFFVTPS

SEQ ID NO: 8996 - protein, 445 aa, Unknown
  Description of Unknown: Integrase B8997 sequence
  SM00857,IPR006118,G3DSA:1.10.10.2600,IPR036162,PS51737, G3DSA:3.40.50.1390,Coil,IPR006119,IPR038109,SSF53041, IPR011109,PTHR30461,PS00397,PS51736,cd00338, PF00239
MKRAALYVRVSTQEQKNSGLSVDSQIDALEKYCEEQGYTVAGIYNDAGISARKKYTKRPALLRLLEDCKKHEIDIILFTRLDRWFRAVAGYYEVQNVLDACKVPWRAIWEDYETETSQGIFKVNIMLSVAQAEADRDSEKIRSVMEFKRQNKEYIGGKVPVGYRVEGKTIVKDEKTRGIIEDMFEHYFQTFSKMGTADYILNKYPDFIRTRTRIVKIMSSPAYHGEMYGVKNYCEPYITEEQAQKINEVSSQKTWTDCKRRIYIFSGLMKCPICGCRLSGCAIGKKGKKYKVYHCPHSVAQKHKTYTRSEKKLETYMLNHIEEKIQLDVLRAEGRVKAGGNDVEKRKKKLSSELGRINKMFEKGRITEEYYDERYEAISKELKELSQTAATEELETKKKIQSRFPDGWKDMYMQLGEQDKQVFWKSIVKEIKISPDTYVEDIIFF

SEQ ID NO: 8997 - protein, 445 aa, Unknown
  Description of Unknown: Integrase B8998 sequence
  SM00857,IPR006118,G3DSA:1.10.10.2600,IPR036162,PF13408, IPR025827,G3DSA:3.40.50.1390,PS51737,Coil,IPR006119, IPR038109,IPR011109,SSF53041,PTHR30461,PS00397, PS51736,cd00338,PF00239
MKRAALYVRVSTQEQKNSGLSVDSQIDALEKYCEKQGYTVAGIYNDAGISARKKYTKRPALLQLLEDCRKHEIDIILFTRLDRWFRAVAGYYEVQSVLDACKVPWRAIWEDYETETSQGIFKVNIMLSVAQAEADRDSEKIRSVMEFKRQNKEYIGGKVPVGYRVEGKKIVKDENMREIIEDMFEHYFQTFSKWGTADYILSKYPDFIRTRNRIVKIMSSPAYHGEMYGVKNYCEPYITEEQAQRIKEVSSQKSWVDCKRRIYIFSGLIRCPICGYKFSGCTMVKKEKRYKVYRCPRSAAKKHKTYTRSEPKLETYMLNHIEEKIQSDVLRAEGRVKAAGNDIGKRKKKLSSELGRINKMFEKGRITEEYYDERYEAISKELKELSQTAATEELETKKKIQSKFPDGWKCMYMQLDEQGKQVFWKSIVKEIKISPNEFVEDIIFF

SEQ ID NO: 8998 - protein, 445 aa, Unknown
  Description of Unknown: Integrase B8999 sequence
  SM00857,IPR006118,G3DSA:1.10.10.2600,IPR036162,PF13408, IPR025827,PS51737,G3DSA:3.40.50.1390,Coil,IPR006119, IPR038109,SSF53041,IPR011109,PTHR30461,PS00397, PS51736,cd00338,PF00239
MKRAALYVRVSTQEQKNSGLSVDSQIDALEKYCKEQGYTVVGIYNDAGISARKKYTKRPALLQLLEDCKKHEIDIILFTRLDRWFRAVAGYYEVQNVLDACKVPWRAIWEDYETETSQGIFKVNIMLSVAQAEADRDSEKIRSVMEFKRQNKEYIGGKVPVGYRVEGKKIVKDEKMRGIIEDMFEHYFQTFSKMETADYILSKYPDFIRTRTRIVKIMSSPAYHGEMYGVKNYCEPYITEEQAQRIKEVSSQKSWVDCKRRIYIFSGLIRCPICGYRFSGRTMAKKEKRYKVYQCPRSAAKKHKTYTRSEPKLETYMLNHIEEKIQLDVLRVEGRVKAAGSDVGKRKKKLSSELGRINKMFEKGRITEEYYDERYEAISKELKELSQTAATEELETKKKIQSRFPDGWKDMYMQLDEQGKQVFWKSIVKEIKISPNEFVEDIIFF

SEQ ID NO: 8999 - protein, 445 aa, Unknown
  Description of Unknown: Integrase B9000 sequence
  SM00857,IPR006118,G3DSA:1.10.10.2600,IPR036162,PS51737, G3DSA:3.40.50.1390,Coil,IPR006119,IPR038109,SSF53041, IPR011109,PTHR30461,PS00397,PS51736,cd00338, PF00239
MKRAALYVRVSTQEQKNSGLSVDSQIDALEKYCEEQGYTVAGIYNDAGISARKKYTKRPALLQLLEDCKKHEIDIILFTRLDRWFRAVAGYYEVQSVLDACKVPWRAIWEDYETETSQGIFKVNIMLSVAQAEVDRDSEKIRSVMEFKRNNKEYIGGKVPVGYRVEGKKIVKDEKTRGIIEDMFEHYFQTFSKAGTADYILSKYPDFVRTRTRLVKIMSSPAYRGEMYGVKNYCEPYITEEQAQKINEVSSQKTWTDCKRRIYIFSGLMKCPLCGCRLSGCAIGKKGKKYKVYHCPHSVAQKHKTYTRSEKKLETYMLDHIEEKIQLDVLRAEGRVKATGNDAEKRKKKLSSELGRINKMFEKGRITEEYYDERYEAISKELKELSQTAATEELETKKKIQSRFPDGWKDMYMQLDEQGKQVFWKSIVKEIKISPNEFVEDIIFF

SEQ ID NO: 9000 - protein, 445 aa, Unknown
  Description of Unknown: Integrase B9001 sequence
  PTHR30461:SF3,IPR036162,PS51737,IPR011109,PTHR30461, PS00397,PF00239,G3DSA:1.10.10.2600,IPR006119,SSF53041, cd00338,SM00857,IPR025827,IPR038109,PS51736, IPR006118,PF13408,G3DSA:3.40.50.1390,Coil
MNVIRGVGYIRVSTAEQATRGLSLDAQEAEIRAYAKAHGIELFNIYVDAGITARKRLDRREAFGQMMKDVDSGLIDEIIVMRLDRWFRNIYDYHKMMNEHLIPHGVNWSAVKEDYDTKTTNGRLMINLRLAIAEQECDTDGDRIRDIHDNQIANGIWIGGCAPPGYRIENKRLSIDPDMQPAVSYFFERLLSCGSVRRAMLDMNERHNLHFEYGQAIRMARSTTYCGVRRENYNYCPTYISQDEHAQIMAALEHNVRVRSADNARIHIFSGLLVCACCGRRLAANTVRKKSVTWTAYRCHRAFGDHVCDNRHLVDERKVEAWLLDYLENGLSDYIVSASVADAQPVVVDNTAAIRERQERVKELFINGFIDLQEYKRRAAELEAKIQVPEKQPPRSMEKLKSLLERGVRAIYNDLSRGERQEFWRSIIREIPVNNGAVSGDPIFL

SEQ ID NO: 9001 - protein, 445 aa, Unknown
  Description of Unknown: Integrase B9002 sequence
  SM00857,IPR006118,G3DSA:1.10.10.2600,IPR036162,PF13408, IPR025827,G3DSA:3.40.50.1390,PS51737,Coil,IPR006119, IPR038109,IPR011109,SSF53041,PTHR30461,PS00397, PS51736,cd00338,PF00239
MKRAALYVRVSTQEQKNSGLSVDSQIDALEKYCEEQGYTVAGIYNDAGISARKKYTKRPALLQLLEDCKKHEIDIILFTRLDRWFRAVAGYYEVQSVLDACKVPWRAIWEDYETETSQGIFKVNIMLSVAQAEADRDSEKIRSVMEFKRQNKEYIGGKVPVGYRVEGKKIVKDEKMRGIIEDMFEHYFQTFSKMETADYILSKYPDFIRTRTRIVKIMSSPAYHGEMYGVKNYCEPYITEEQAQRIKEVSSQKSWVDCKRRIYIFSGLIRCPICGYRFSGRTMAKKEKRYKVYQCPRSAAKKHKTYTRSEPKLETYMLNHIEEKIQLDVLRVEGRAKAAGSDVGKRKKKLSSELGRINKMFEKGRITEEYYDERYEAISKELKELSQTAATEELETKKKIQSRFPDGWKDMYMQLDEQGKQVFWKSIVKEIKISPNEFVEDIIFF

SEQ ID NO: 9002 - protein, 445 aa, Unknown
  Description of Unknown: Integrase B9003 sequence
  SM00857,IPR006118,G3DSA:1.10.10.2600,IPR036162,PS51737, G3DSA:3.40.50.1390,Coil,IPR006119,IPR038109,IPR011109, SSF53041,PTHR30461,PS00397,PS51736,cd00338, PF00239
MKRAALYVRVSTQEQKNSGLSVDSQIDALEKYCEEHGYMVAGVYNDAGISARKKYTKRPALLQLLEDCRKHEIDIILFTRLDRWFRAVAGYYEVQNVLDACKVPWRAIWEDYETETSQGIFKVNIMLSVAQAEADRDSEKIRSVMEFKRNNKEYIGGKVPVGYRIEGKKIVKDEKTRGIIEDMFEHYFQTFSKAGTADYILSKYPGFVRTRTRLVKIMSSPAYRGEMYGVKNYCEPYITEEQAQKISEVSSQKTWTDCKRRIYIFSGLMKCPLCGCRLSGCAIGKKGKKYKVYHCPHSVAQKHKTYTRSEKKLETYMLDHIEEKIQLDVLRAEGRVKATGNDAEKRKKKLSSELGRINKMFEKGRITEEYYDERYEAISKELKELSQTAATEELETKKKIQSRFPDGWKDMYMQLGEQDKQVFWKSIVKEIKISPDTYVEDIIFF

SEQ ID NO: 9003 - protein, 445 aa, Unknown
  Description of Unknown: Integrase B9004 sequence
  SM00857,IPR006118,G3DSA:1.10.10.2600,IPR036162,PS51737, G3DSA:3.40.50.1390,Coil,IPR006119,IPR038109,SSF53041, IPR011109,PTHR30461,PS00397,PS51736,cd00338, PF00239
MKRAALYVRVSTQEQKNSGLSVDSQIDALEKYCEEQGYTVAGIYNDAGISARKKYTKRPALLQLLEDCKKHEIDIILFTRLDRWFRAVAGYYEVQSVLDACKVPWRAIWEDYETETSQGIFKVNIMLSVAQAEADRDSEKIRSVMEFKRNNKEYIGGKVPVGYRIEGKKIVKDEKTRGIIEDMFEHYFQTFSKAGTADYILSKYPGFVRTRTRLVKIMSSPAYRGEMYGVKNYCEPYITEEQAQKINEVSSQKTWTDCRRRIYIFSGLMKCPICGCRLSGCAIGKKGKKYKVYHCPHSVAQKHKTYTRSEKKLETYMLNHIEEKIQLDVLRAEGRVKAGGNDAEKRKKKLSSELGRINKMFEKGRITEEYYDERYEAISKELKELSQTAATEELETKKKIQSRFPDGWKDMYIQLGEQDKQVFWKSIVKEIKISPDTYVEDIIFF

SEQ ID NO: 9004 - protein, 445 aa, Unknown
  Description of Unknown: Integrase B9005 sequence
  SM00857,IPR006118,G3DSA:1.10.10.2600,IPR036162,PF13408, IPR025827,PS51737,G3DSA:3.40.50.1390,IPR006119,IPR038109, IPR011109,SSF53041,PTHR30461,PS00397,PS51736, cd00338,PF00239
MFAVRGKGAGVMTRAALYIRVSTEEQAKHGLSMDEQESNLRDYAKAHGMKVVDCYLDAGKSARKRYTKRPEFMRLLADIESDKIDMVLFIKLDRWFRNISDYYEVQRVLDAHNVTWRATQEDYETVTASGRFKVNIMLSVAQDEADRTSERIKFVFEGKKERNEPITGKVPRGYKLDGKSVVIDPVTGPMVRSAFDMYLETGSISKVIKAYPQLELTYFSARYMFSNPAYMGQFAGISIPAIISQDEYKKADSLRGRIVRKTTQNRVYLFSGLLICPECGNRLGGFSASRVYKETHYYGCSSHRKMTGCPNNKSYNEEKIEEYMLDRIEAKVQTSIISRNEQRAVSHKSQRDAIQRKLSKLSELYISDLISLQDYKKQFRALNDELAAIPEDIPDIDIEALKSRFWGDWRQLYDDLPRDGKQSFWRKTVKKIYLSSDSVADFDLI

SEQ ID NO: 9005 - protein, 445 aa, Unknown
  Description of Unknown: Integrase B9006 sequence
  PTHR30461:SF3,cd00338,SM00857,G3DSA:1.10.10.2600,IPR036162, PF13408,PS51737,G3DSA:3.40.50.1390,IPR025827,IPR006119, IPR038109,IPR011109,SSF53041,PTHR30461,PS51736, Coil,PF00239
MKRVALYMRVSTEEQALHGYSLPAQKDALHQYAKDHNMTVVGEYVDEGISGRKSASKRPALARMLRDVEAGKIDQILFIKLDRWFRSVKEYYRVQEVLDRNNVTWRTILEDYNTESADGILKVNIMLSVAQNEAERTGERIKFVLDNKAQKKQVVGKQPYGYKIAIVEGEKKSVIDEETAPVVHDIFNTFDRTNSASLTTKYINEKHGTDFSAVFIRRLLHRSAYAGEYMGISGYRPQYISRERFDKNQEIFRGSHIKRTPTGRVYIFTGILFCAHCGHRMKGKYTTVKYYCCPRATDDYSCENHKHISELKIEKYLVSHIRRLMSEYIVAAETKESATKRSDAASEVMSLRQKIERLNDIYLEGNMDKETYRRRTEQLKQNLAQAEEQYQRSQPKNISHLKEILNTDFLADYDLLTDENKRSLWRRIITRIEMNDQQNLKVFFS

SEQ ID NO: 9006 - protein, 445 aa, Unknown
  Description of Unknown: Integrase B9007 sequence
  SM00857,IPR006118,G3DSA:1.10.10.2600,IPR036162,PS51737, G3DSA:3.40.50.1390,Coil,IPR006119,IPR038109,IPR011109, SSF53041,PTHR30461,PS00397,PS51736,cd00338, PF00239
MKRAALYVRVSTQEQKNSGLSVDSQIDALEKYCEEQGYTVAGIYNDAGISARKKYTKRPALLQLLEDCRQHKIDIILFTRLDRWFRAVAGYYEVQSVLDACKVPWRAIWEDYETETSQGIFKVNIMLSVAQAEADRDSEKIRSVMEFKRNNKEYIGGKVPVGYRIEEKKIVKDEKTRGIIEDMFEHYFQTFSKAGTADYILSKYPDFARTRTRLVKIMSSPAYRGEMYGVKNYCEPYITEEQAQKINEVSSQKTWTDCKRRIYIFSGLMKCPLCGCRLSGCAIGKKEKKYKVYHCPHSVAQKHKTYTRSEKKLETYMLNHIEEKIQLDVLRAECRVKAGGNDAEKRKKKLSSELGRINKMFEKGRITEEYYDERYEAISKELKELSQTAATEELETKKKIQSRFPEGWKDMYMQLDEQGKQVFWKSIVKEIKISPNEFVEDIIFF

SEQ ID NO: 9007 - protein, 445 aa, Unknown
  Description of Unknown: Integrase B9008 sequence
  SM00857,IPR006118,G3DSA:1.10.10.2600,IPR036162,PS51737, G3DSA:3.40.50.1390,Coil,IPR006119,IPR038109,IPR011109, SSF53041,PTHR30461,PS00397,PS51736,cd00338, PF00239
MKRAALYVRVSTQEQKNSGLSVDSQIDALEKYCEEQGYTVAGIYNDAGISARKKYTKRPALLQLLEDCKKHEIDIILFTRLDRWFRAVAGYYEVQSVLDACKVPWRAIWEDYETETSQGIFKVNIMLSVAQAEADRDSEKIRSVMEFKRNNKEYIGGKVPVGYRIEGKKIVKDEKTRGIIEDMFDHYFQTFSKAGTADYILSKYPDFVRTRTRLVKIMSSPAYRGEMYGVKNYCEPYITEEQAQKINEVSSQKTWTDCRRRIYIFSGLMKCPLCGCRLSGCAIGKKGKKYKVYHCPHSVAQKHKTYTRSEKKLETYMLDHIEEKIQLDVLRAEGRVKAGGNDAEKRKKKLSSELGRINKMFEKGRITEEYYDERYEAISKELKELSQTAATEELETKKKIQSRFPDGWKDMYMQLGEQDKQVFWKSIVKEIKISPDTYVEDIIFF

SEQ ID NO: 9008 - protein, 445 aa, Unknown
  Description of Unknown: Integrase B9009 sequence
  SM00857,IPR006118,G3DSA:1.10.10.2600,IPR036162,PS51737, G3DSA:3.40.50.1390,Coil,IPR006119,IPR038109,IPR011109, SSF53041,PTHR30461,PS00397,PS51736,cd00338, PF00239
MKRAALYVRVSTQEQKNSGLSVDSQIDALEKYCDEQGYTVAGIYNDAGISARKKYTKRPALLQLLEDCKKHEIDIILFTRLDRWFRAVAGYYEVQNVLDACKVPWRAIWEDYETETSQGIFKVNIMLSVAQAEADRDSEKIRSVMEFKRNNKEYIGGKVPVGYRIEGKKIVKDEKTRGIIEDMFEHYFQTFSKAGTADYILSKYPDFVRTRTRLVKIMSSPAYRGEMYGVKNYCEPYITEEQAQKINEVSSQKTWTDCRRRIYVFSGLMKCPICGCRLSGCAIGKKEKKYKVYHCPHSVAQKHKTYTRSEKKLETYMLNHIEEKIQLDVLRAECRVKAGGNDAEKRKKKLSSELGRINKMFEKGRITEEYYDERYEAISKELKELSQTAATEELETKKKIQSRFPEGWKDMYMQLDEQGKQVFWKSIVKEIKISPNEFVEDIIFF

SEQ ID NO: 9009 - protein, 445 aa, Unknown
  Description of Unknown: Integrase B9010 sequence
  SM00857,IPR006118,G3DSA:1.10.10.2600,IPR036162,PF13408, PS51737,G3DSA:3.40.50.1390,IPR025827,Coil,IPR006119, IPR038109,IPR011109,SSF53041,PTHR30461,PS00397, PS51736,cd00338,PF00239
MKRAALYVRVSTQEQKNSGLSVDSQIDALERYCEEQGYTVAGVYNDAGISARKKYTKRPALLQLLEDCKKHEIDIILFTRLDRWFRAVAGYYEVQSVLDACKVPWRAIWEDYETETSQGIFKVNIMLSVAQAEADRDSEKIRSVMEFKRQNKEYIGGKVPVGYRVEGKKIVKDEKMREVIEDMFEHYFQTFSKMETADYILNKYPDFIRTRTRIVKIMSSPAYHGEMYGVKNYCEPYITEEQAQRIKEVSSQKSWVDCKRRIYIFSGLIRCPICGYRFSGRTMVKKEKRYKVYQCPRSAAKKHKTYTRSEPKLEKYMLDHIEEKIQLDILRAEGRVKAAGNDVGNRKKKLSSELGRLNKMFEKGRITEEYYDERYEAISKELKELSQTAATEELETKKKIQSRFPDGWKDMYMQLDEQGKQVFWKSIVKEIKISPDTYVEDIIFF

SEQ ID NO: 9010 - protein, 445 aa, Unknown
  Description of Unknown: Integrase B9011 sequence
  PTHR30461:SF3,SM00857,IPR006118,G3DSA:1.10.10.2600,IPR036162, PF13408,IPR025827,G3DSA:3.40.50.1390,PS51737,IPR006119, IPR038109,SSF53041,IPR011109,PTHR30461,PS00397, PS51736,cd00338,PF00239
MFAVRGKGAEVMTRAALYIRVSTEEQAKHGLSMDEQESNLRDYAKAHGMKVVDCYLDAGKSARKRYTKRPEFMRLLADIESDKIDMVLFIKLDRWFRNISDYYEVQRVLDAHNVTWRATQEDYETVTASGRFKVNIMLSVAQDEADRTSERIKFVFEGKKERNEPITGKVPRGYKLDGKSVVIDPVTGPMVRAAFDMYLETGSVSKVIKAYPQLELTYFSARYMFSNPAYMGQFAGISIPAIISPDEYKKAGSLRGRIVRKTTQNRVYLFSGLLICPECGNRLGGFSASRVYKETHYYGCSSHRKMTGCPNNKSYNEEKIEEYMLDRIEAKVQTSIISRNEQRAVSHKFQRDAIQRKLSKLSELYISDLISIQDYKKQFRALNDELAAIPEDIPDIDIEALKSRFWGDWRQLYDDLPRDGKQSFWRKTVKKIYLSSDSVADFDLI

SEQ ID NO: 9011 - protein, 445 aa, Unknown
  Description of Unknown: Integrase B9012 sequence
  PTHR30461:SF3,IPR036162,PS51737,IPR011109,PTHR30461, PS00397,PF00239,G3DSA:1.10.10.2600,IPR006119,SSF53041, cd00338,SM00857,IPR025827,IPR038109,PS51736, IPR006118,PF13408,G3DSA:3.40.50.1390,Coil
MRAALYIRVSTEEQARHGLSLEDQKNNLTQFSKSHGMKIAGIYEDAGISARKPYKKRPALLRLLEDCKAGKIDLILFIKLDRWFRNVGNYYAVQEILDQYNVSWQATQEDYETTTASGRLKVNIMLSVAQDEADRTSERIKFVFEGKRARLEPLTGNIPFGYKIEGKAFKKDESKEALVNDFFKKYLASGSISKTSEFIREKYGISMRYHLIDKMLRSTTYYGKYYNMDGMCPAYITKEDHEKIQAMRRKVVRKAKNNRTYLFSGLVVCPECGNRMGARINTKQTYVFYNCNGHYTKQNGCQNRVNLGERKIEEYLLATVDNKFHEYKANFSALKNAEINKRARAEISAAKSKLNKLKDLYLNDIITLEELKADRESLLAKISDLEKAALPEQKQDFESIDRVLIENWKESYDGLNREEKREFWRIIIKEIKIYPDRHIEYSLNV

SEQ ID NO: 9012 - protein, 445 aa, Unknown
  Description of Unknown: Integrase B9013 sequence
  SM00857,IPR006118,G3DSA:1.10.10.2600,IPR036162,PS51737, G3DSA:3.40.50.1390,PS00397,IPR006119,IPR038109,IPR011109, SSF53041,PTHR30461,Coil,PS51736,cd00338, PF00239
MKRAALYVRVSTQEQKNSGLSVDSQIDALEKYCEEQGYTVAGIYNDAGISARKKYTKRPALLRLLEDCKKHEIDIILFTRLDRWFRAVAGYYEVQNVLDACKVPWRAIWEDYETETSQGIFKVNIMLSVAQAEADRDSEKIRSVMEFKRNNKEYIGGKVPVGYRIEGKKIVKDEKTRGIIEDMFEHYFQTFSKAGTADYILSKYPDFVRTRTRLVKIMSSPAYRGEMYGVKNYCEPYITEEQAQKINEVSSQKTWTDCRRRIYIFSGLMKCPLCGCRLSGCAIGKKGKKYKVYHCPHSVAQKHKTYTRSEKKLETYMLDHIEEKIQLDVLRAEGRVKAAGNDVGKRKKKLSSELGRINKMFEKGRITEEYYDERYEAISKELKELSQTAATEELETKKKIQSRFPDGWKDMYMQLGEQDKQVFWKSIVKEIKISPDTYVEDIIFF

SEQ ID NO: 9013 - protein, 445 aa, Unknown
  Description of Unknown: Integrase B9014 sequence
  SM00857,IPR006118,G3DSA:1.10.10.2600,IPR036162,PF13408, IPR025827,G3DSA:3.40.50.1390,PS51737,Coil,IPR006119, IPR038109,SSF53041,IPR011109,PTHR30461,PS00397, PS51736,cd00338,PF00239
MKRAALYVRVSTQEQKNSGLSVDSQIDALEKYCEEQGYTVAGVYNDAGISARKKYTKRPALLQLLEDCKRHEIDIILFTRLDRWFRAVAGYYEVQNVLDACKVPWRAIWEDYETETSQGVFKVNIMLSVAQAEADRDSEKIRSVMEFKRQNKEYIGGKVPVGYRVEGKKIVKDEKMRGIIEDMFEHYFQTFSKWGTADYILSKYPDFIRTRTRIVKIMSSPAYHGEMYGVKNYCEPYITEEQAQRIKEVSSQKSWVDCKRRIYIFSGLIRCPICGYRFSGRTMAKKEKRYKVYQCPRSAAKKHKTYTRSEPKLETYMLNHIEEKIQLDILRAEGRVKAAGNDVEKRKKKLSSELGRINKMFEKGRITEEYYDERYEAISKELKELSQTAATEELETKKKIQSRFPDGWKDMYMQLDEQGKQVFWKSIVKEIKISPDTYVEDIIFF

SEQ ID NO: 9014 - protein, 445 aa, Unknown
  Description of Unknown: Integrase B9015 sequence
  SM00857,IPR006118,G3DSA:1.10.10.2600,IPR036162,PS51737, G3DSA:3.40.50.1390,Coil,IPR006119,IPR038109,SSF53041, IPR011109,PTHR30461,PS00397,PS51736,cd00338, PF00239
MKRAALYVRVSTQEQKNSGLSVDSQIDALEKYCEEQGYTVAGIYNDAGISARKKYTKRPALLQLLDDCRQCKIDIILFTRLDRWFRAVAGYYEVQNVLDACKVPWRAIWEDYETETSQGIFKVNIMLSVAQAEADRDSEKIRSVMEFKRNNKEYIGGKVPVGYRIEGKKIVKDEKTRGIIEDMFEHYFQTFSKAGTADYILSKYPGFVRTRTRLVKIMSSPAYRGEMYGVKNYCEPYITEEQAQKISEVSSQKTWTDCKRRIYIFSGLMKCPLCGCRLSGCAIGKKEKKYKVYHCPHSVAQKHKTYTRSEKKLETYMLNHIEEKIQLDVLRAECRVKAGGNDAEKRKKKLSSELGRINKMFEKGRITEEYYDERYEAISKELKELSQTAATEELETKKKIQSRFPEGWKDMYMQLDEQGKQVFWKSIVKEIKISPNEFVEDIIFF

SEQ ID NO: 9015 - protein, 445 aa, Unknown
  Description of Unknown: Integrase B9016 sequence
  SM00857,IPR006118,G3DSA:1.10.10.2600,IPR036162,PS51737, G3DSA:3.40.50.1390,Coil,IPR006119,IPR038109,IPR011109, SSF53041,PTHR30461,PS00397,PS51736,cd00338, PF00239
MKRAALYVRVSTQEQKNSGLSVDSQIDALKKYCEEQGYTVAGIYNDAGISARKKYTKRPALLKLLEDCKKHEIDIILFTRLDRWFRAVAGYYEVQNVLDACKVPWRAIWEDYETETSQGIFKVNIMLSVAQAEADRDSEKIRSVMEFKRNNKEYIGGKVPVGYRIEGKKIVKDEKTRGIIEDMFEHYFQTFSKAGTADYILSKYPDFVRTRTRLVKIMSSPAYRGEMYGVKNYCEPYITEEQAQKISEVSSQKTWTDCKRRIYIFSGLMKCPLCGCRLSGCAIGKKGKKYKVYHCPHSVAQKHKTYTRSEKKLETYMLDHIEEKIQLDVLKAEGRVKASGNDAEKRKKKLSSELGRINKMFEKGRITEEYYDERYEAISKELKELSQTAATEELEAKKKIQSRFPDGWKDMYMQLDEQGKQVFWKSIVKEIKISPNEFVEDIIFF

SEQ ID NO: 9016 - protein, 445 aa, Unknown
  Description of Unknown: Integrase B9017 sequence
  SM00857,IPR006118,G3DSA:1.10.10.2600,IPR036162,PF13408, IPR025827,G3DSA:3.40.50.1390,PS51737,PS00397,IPR006119, IPR038109,IPR011109,SSF53041,PTHR30461,Coil, PS51736,cd00338,PF00239
MKRAALYVRVSTQEQKNSGLSVDSQIDALKKYCEEQGYTIAGIYNDAGISARKKYTKRPALLQLLEDCKKHEIDIILFTRLDRWFRAVAGYYEVQSVLDACKVPWRAIWEDYETETSQGIFKVNIMLSVAQAEADRDSEKIRSVMEFKRNNKEYIGGKVPVGYRVEGKKIVKDEKMRGIIEDMFEHYFQTFSKMETADYILSKYPDFIRTRTRIVKIMSSPAYHGEMYGVKNYCEPYITEEQAQRIKEVSSQKSWVDCKRRIYIFSGLIRCPICGYRFSGRTMAKKEKRYKVYQCPRSAAKKHKTYTRSEPKLEKYMLDHIEEKIQLDVLRVEGRVKAAGNDVGKRKKKLSSELGRINKMFEKGRITEEYYDERYEAISKELKELSQTAATEELETKKKIQSKFPDGWKDMYMQLDEQGKQVFWKSIVKEIKISPDKFVEDIIFF

SEQ ID NO: 9017 - protein, 445 aa, Unknown
  Description of Unknown: Integrase B9018 sequence
  SM00857,IPR006118,G3DSA:1.10.10.2600,IPR036162,PS51737, G3DSA:3.40.50.1390,Coil,IPR006119,IPR038109,SSF53041, IPR011109,PTHR30461,PS00397,PS51736,cd00338, PF00239
MKRAALYVRVSTQEQKNSGLSVDSQIDALEKYCEEQGYVVAGIYNDAGISARKKYTKRPALLQLLEDCRKHEIDIILFTRLDRWFRAVAGYYEVQSVLDACKVPWRAIWEDYETETSQGIFKVNIMLSVAQAEADRDSEKIRSVMEFKRNNKEYIGGKVPVGYRIEGKKIVKDEKTRGIIEDMFEHYFQTFSKAGTADYILSKYPDFVRTRTRLVKIMSSPAYRGEMYGVKNYCEPYITEEQAQKISEVSSQKTWTDCKRRIYIFSGLMKCPLCGCRLSGCAIGKKGKKYKVYHCPHSVAQKHKTYTRSEKKLETYMLDHIEEKIQLDVLRAEGRVKASGNDAEKRKKKLSSELGRINKMFEKGRITEEYYDERYEAISKELKELSQTAATEELETKKKIQSRFPDGWKDMYMQLGEQDKQVFWKSIVKEIKISPDTYVEDIIFF

SEQ ID NO: 9018 - protein, 445 aa, Unknown
  Description of Unknown: Integrase B9019 sequence
  SM00857,IPR006118,G3DSA:1.10.10.2600,IPR036162,PS51737, G3DSA:3.40.50.1390,Coil,IPR006119,IPR038109,SSF53041, IPR011109,PTHR30461,PS00397,PS51736,cd00338, PF00239
MKRAALYVRVSTQEQKNSGLSVDSQIDALEKYCEEQGYTVAGIYNDAGISARKKYTKRPALLQLLEDCKKHEIDIILFTRLDRWFRAVAGYYEVQSVLDACKVPWRAIWEDYETETSQGIFKVNIMLSVAQAEADRDSEKIRSVMEFKRNNKEYIGGKVPVGYRIEGKKIVKDEKTRGIIEDMFEHYFQTFSKAGTADYILSKYPDFVRTRTRLVKIMSSPAYRGEMYGVKNYCEPYITEEQAQKINEVSSQKTWTDCRRRIYIFSGLMKCPICGCRLSGCAIGKKGKKYKVYHCPHSVAQKHKTYTRSEKKLETYMLNHIEEKIQLDVLRAEGRVKAGGNDAEKRKKKLSSELGRINKMFEKGRITEEYYDERYEAISKELKELSQTAATEELETKKKIQSRFPDGWKDMYMQLGEQDKQVFWKSIVKEIKISPDTYVEDIIFF

SEQ ID NO: 9019 - protein, 445 aa, Unknown
  Description of Unknown: Integrase B9020 sequence
  SM00857,IPR006118,G3DSA:1.10.10.2600,IPR036162,PS51737, G3DSA:3.40.50.1390,Coil,IPR006119,IPR038109,IPR011109, SSF53041,PTHR30461,PS00397,PS51736,cd00338, PF00239
MKRAALYVRVSTQEQKNSGLSVDSQIDALEKYCEEQGYTVAGIYNDAGISARKKYTKRPALLQLLEDCRQHKIDIILFTRLDRWFRAVAGYYEVQSVLDACKVPWRAIWEDYETETSQGIFKVNIMLSVAQAEADRDSEKIRSVMEFKRSNKEYIGGKVPVGYRVEGKKIVKDEETRGIIEDMFEHYFQTFSKAGTADYILNKYPDFIRTRTRIVKIMSSPAYHGEMYGVKNYCEPYITEEQAQKINEVSSQKTWTDCRRRIYIFSGLMKCPICGCRLSGCAIGKKGKKYKVYHCPHSVAQKHKTYTRSEKKLETYMLNHIEEKIQLDVLRAEGRVKAGGNDAEKRKKKLSSELGRINKMFEKGRITEKYYDERYEAISKELKELSQTAATEELETKKKIQSRFPDGWKDMYMQLGEQDKQVFWKSIVKEIKISPDTYVEDIIFF

SEQ ID NO: 9020 - protein, 445 aa, Unknown
  Description of Unknown: Integrase B9021 sequence
  SM00857,IPR006118,G3DSA:1.10.10.2600,IPR036162,PF13408, IPR025827,G3DSA:3.40.50.1390,PS51737,Coil,IPR006119, IPR038109,IPR011109,SSF53041,PTHR30461,PS00397, PS51736,cd00338,PF00239
MKRAALYVRVSTQEQKNSGLSVDSQIDALEKYCEEQGYTVAGIYNDAGISARKKYTKRPALLQLLEDCKKHEIDIILFTRLDRWFRAVAGYYEVQSVLDACKVPWRAIWEDYETETSQGIFKVNIMLSVAQAEADRDSEKIRSVMEFKRQNKEYIGGKVPVGYRVEGKTIVKDEKTRAIIEDMFEHYFQTFSKMETADYILSKYPDFIRTRTRIVKIMSSPAYHGEMYGVKNYCEPYITEEQAQRIKEVSSQKSWIDCKRRIYIFSGLIRCPICGYRFSGRTMVKKEKRYKVYQCPRSAAKKHKTYTRSEPKLETYMLNHIEEKIQLDILRAEGRVKAAGNDVEKRKKKLSSELGRINKMFEKGRITEEYYDERYEAISKELKELSQTAATEELETKKKIQSRFPDGWKDMYMQLGEQDKQVFWKSIVKEIKISPDTYVEDIIFF

SEQ ID NO: 9021 - protein, 445 aa, Unknown
  Description of Unknown: Integrase B9022 sequence
  SM00857,IPR006118,G3DSA:1.10.10.2600,IPR036162,PS51737, G3DSA:3.40.50.1390,Coil,IPR006119,IPR038109,SSF53041, IPR011109,PTHR30461,PS00397,PS51736,cd00338, PF00239
MKRAALYVRVSTQEQKNSGLSVDSQIDALEKYCEEQGYVVAGIYNDAGISARKKYTKRPALLQLLEDCRQRKIDIILFTRLDRWFRAVAGYYEVQNVLDACKVPWRAIWEDYETETSQGIFKVNIMLSVAQAEADRDSEKIRSVMEFKRNNKEYIGGKVPVGYRIEGKKIVKDEKTRGIIEDMFEHYFQTFSKAGTADYILSKYPGFVRTRTRLVKIMSSPAYRGEMYGVKNYCEPYITEEQAQKISEVSSQKTWTDCKRRIYIFSGLMKCPLCGCRLSGCAIGKKGKKYKVYHCPHSVAQKHKTYTRSEKKLETYMLDHIEEKIQLDVLRAEGRVKAAGNDVGKRKKKLSSELGRINKMFEKGRITEEYYDERYEAISKELKELSQTAATEELETKKKIQSRFPDGWKDMYMQLGEQDKQVFWKSIVKEIKISPDTYVEDIIFF

SEQ ID NO: 9022 - protein, 445 aa, Unknown
  Description of Unknown: Integrase B9023 sequence
  SM00857,IPR006118,G3DSA:1.10.10.2600,IPR036162,PS51737, G3DSA:3.40.50.1390,Coil,IPR006119,IPR038109,IPR011109, SSF53041,PTHR30461,PS00397,PS51736,cd00338, PF00239
MKRAALYVRVSTQEQKNSGLSVDSQIDALEKYCEEQGYTVAGIYNDAGISARKKYTKRPALLRLLEDCKKHEIDIILFTRLDRWFRAVAGYYEVQNVLDACKVPWRAIWEDYETETSQGIFKVNIMLSVAQAEADRDSEKIRSVMEFKRSNKEYIGGKVPVGYRVEGKKIVKDEETRGIIEDMFEHYFQTFSKAGTADYILNKYPDFIRTRTRIVKIMSSPAYHGEMYGVKNYCEPYITEEQAQKINEVSSQKTWTDCRRRIYIFSGLMKCPICGCRLSGCAIGKKGKKYKVYHCPHSVAQKHKTYTRSEKKLETYMLNHIEEKIQLDVLRAEGRVKAGGNDAEKRKKKLSSELGRINKMFEKGRITEEYYDERYEAISKELKELSQTAATEELETKKKIQSRFPDGWKDMYMQLGEQDKQVFWKSIVKEIKISPDTYVEDIIFF

SEQ ID NO: 9023 - protein, 445 aa, Unknown
  Description of Unknown: Integrase B9024 sequence
  SM00857,IPR006118,G3DSA:1.10.10.2600,IPR036162,PF13408, PS51737,G3DSA:3.40.50.1390,IPR025827,Coil,IPR006119, IPR038109,IPR011109,SSF53041,PTHR30461,PS00397, PS51736,cd00338,PF00239
MKRAALYVRVSTQEQKNSGLSVDSQIDALEKYCEEQEYIVAGIYNDAGISARKKYTKRPALLRLLEDCKKHEIDIILFTRLDRWFRAVAGYYEVQNVLDACKVPWRAIWEDYETETSQGIFKVNIMLSVAQAEADRDSEKIRSVMEFKRQNKEYIGGKVPVGYRVEGKKIVKDEKMRGIIEDMFEHYFQTFSKMETADYILSKYPDFIRTRTRIVKIMSSPAYHGEMYGVKNYCEPYITEEQAQRIKEVSSQKSWVDCKRRIYIFSGLIRCPICGYRFSGRTMAKKEKRYKVYQCPRSAAKKHKTYTRSEPKLETYMLNHIEEKIQLDVLRVEGRVKAAGSDVGKRKKKLSSELGRINKMFEKGRITEEYYDERYEAISKELKELSQTAATEELETKKKIQSRFPDGWKDMYMQLDEQGKQVFWKSIVKEIKISPNEFVEDIIFF

SEQ ID NO: 9024 - protein, 445 aa, Unknown
  Description of Unknown: Integrase B9025 sequence
  SM00857,IPR006118,G3DSA:1.10.10.2600,IPR036162,PF13408, IPR025827,PS51737,G3DSA:3.40.50.1390,IPR006119,IPR038109, SSF53041,IPR011109,PTHR30461,PS00397,PS51736, cd00338,PF00239
MFAVRGKGAGVMTRAALYIRVSTEEQAKHGLSMDEQESNLRDYAKAHGMKVVDCYLDAGKSARKRYTKRPEFMRLLADIESDKIDMVLFIKLDRWFRNISDYYEVQRVLDAHNVTWRATQEDYETVTASGRFKVNIMLSVAQDEADRTSERIKFVFEGKKERNEPITGKVPRGYKLDGKSVVIDPVTGPMVRAAFDMYLETGSISKVIKAYPQLELTYFSARYMFSNPAYMGQFAGISIPAIISQDEYKKADSLRGRIVRKTTQNRVYLFSGLLICPECGNRLGGFSASRVYKETHYYGCSSHRKMTGCPNNKSYNEEKIEEYMLDRIEAKVQTSIISRNEQRAVSHKSQRDAIQRKLSKLSELYISDLISLQDYKKQFRALNDELAAIPEDIPDIDIEALKSRFWGDWRQLYDDLPRDGKQSFWRKTVKKIYLSSDSVADFDLI

SEQ ID NO: 9025 - protein, 445 aa, Unknown
  Description of Unknown: Integrase B9026 sequence
  SM00857,IPR006118,G3DSA:1.10.10.2600,IPR036162,PS51737, G3DSA:3.40.50.1390,Coil,IPR006119,IPR038109,SSF53041, IPR011109,PTHR30461,PS00397,PS51736,cd00338, PF00239
MKRAALYVRVSTQEQKNSGLSVDSQIDALEKYCEEQGYTVAGIYNDAGISARKKYTKRPALLQLLEDCKKHEIDIILFTRLDRWFRAVAGYYEVQNILDACKVPWRAIWEDYETETSQGIFKVNIMLSVAQAEADRDSEKIRSVMEFKRNNKEYIGGKVPVGYRIEGKKIVKDEKTRGIIEDMFEHYFQTFSKAGTADYILSKYPDFVRTRTRLVKIMSSPAYRGEMYGVKNYCEPYITEEQAQKINEVSSQKTWTDCRRRIYIFSGLMKCPLCGCRLSGCAIGKKGKKYKVYHCPHSVAQKHKTYTRSEKKLETYMLNHIEEKIQLDVLRAEGRVKAGGNDAEKRKKKLSSELGRINKMFEKGRITEEYYDERYEAISKELKELSQTAATEELETKKKIQSRFPDGWKDMYMQLGEQDKQVFWKSIVKEIKISPDTYVEDIIFF

SEQ ID NO: 9026 - protein, 445 aa, Unknown
  Description of Unknown: Integrase B9027 sequence
  SM00857,IPR006118,G3DSA:1.10.10.2600,IPR036162,PS51737, G3DSA:3.40.50.1390,Coil,IPR006119,IPR038109,IPR011109, SSF53041,PTHR30461,PS00397,PS51736,cd00338, PF00239
MKRAALYVRVSTQEQKNSGLSVDSQIDALEKYCEEQGYTVAGIYNDAGISARKKYTKRPALLRLLEDCKKHEIDIILFTRLDRWFRAVAGYYEVQNVLDACKVPWRAIWEDYETETSQGIFKVNIMLSVAQAEADRDSEKIRSVMEFKRNNKEYIGGKVPVGYRIEGKKIVKDEKTRGIIEDMFEHYFQTFSKAGTADYILSKYPDFVRTRTRLVKIMSSPAYRGEMYGVKNYCEPYITEEQAQKINEVSSQKTWTDCRRRIYIFSGLMKCPICGCRLSGCAIGKKGKKYKVYHCPHSVAQKHKTYTRSEKKLETYMLNHIEEKIQLDVLRAEGRVKATGNDAEKRKKKLSSELGRINKMFEKGRITEEYYDERYEAISKELKELSQTAATEELETKKKIQSRFPDGWKDMYMQLGEQDKQVFWKSIVKEIKISPDTYVEDIIFF

SEQ ID NO: 9027 - protein, 445 aa, Unknown
  Description of Unknown: Integrase B9028 sequence
  SM00857,IPR006118,G3DSA:1.10.10.2600,IPR036162,PS51737, G3DSA:3.40.50.1390,Coil,IPR006119,IPR038109,SSF53041, IPR011109,PTHR30461,PS00397,PS51736,cd00338, PF00239
MKRAALYVRVSTQEQKNSGLSVDSQIDALEKYCEEQGYTVAGIYNDAGISARKKYTKRPALLQLLEDCKQCKIDIILFTRLDRWFRAVAGYYEVQSVLDACKVPWRAIWEDYETETSQGIFKVNIMLSVAQAEADRDSEKIRSVMEFKRNNKEYIGGKVPVGYRIEGKKIVKDEKTRGIIEDMFEHYFQTFSKAGTADYILSKYPGFVRTRTRLVKIMSSPAYRGEMYGVKNYCEPYITEEQAQKINEVSSQKTWTDCRRRIYIFSGLMKCPLCGCRLSGCAIGKKGKKYKVYHCPHSVAQKHKTYTRSEKKLETYMLNHIEEKIQLDVLRAEGRVKAGGNDAEKRKKKLSSELGRINKMFEKGRITEEYYDERYEAISKELKELSQTAATEELETKKKIQSRFPDGWKDMYMQLGEQDKQVFWKSIVKEIKISPDTYVEDIIFF

SEQ ID NO: 9028 - protein, 445 aa, Unknown
  Description of Unknown: Integrase B9029 sequence
  SM00857,IPR006118,G3DSA:1.10.10.2600,IPR036162,PS51737, G3DSA:3.40.50.1390,Coil,IPR006119,IPR038109,SSF53041, IPR011109,PTHR30461,PS00397,PS51736,cd00338, PF00239
MKRAALYVRVSTQEQKNSGLSVDSQIDALEKYCEEQGYTVAGIYNDAGISARKKYTKRPALLQLLEDCKKHEIDIILFTRLDRWFRAVAGYYEVQSVLDACKVPWRAIWEDYETETSQGIFKVNIMLSVAQAEADRDSEKIRSVMEFKRNNKEYIGGKVPVGYRIEGKKIVKDEKTRGIIEDMFEHYFQTFSKAGTADYILSKYPGFVRTRTRLVKIMSSPAYRGEMYGVKNYCEPYITEEQAQKINEVSSQKTWTDCRRRIYIFSGLMKCPICGCRLSGCAIGKKGKKYKVYHCPHSVAQKHKTYTRSEKKLETYMLNHIEEKIQLDVLRAEGRVKAGGNDAEKRKKKLSSELGRINKMFEKGRITEEYYDERYEAISKELKELSQTAATEELETKKKIQSRFPDGWKDMYMQLGEQDKQVFWKSIVKEIKISPDTYVEDIIFF

SEQ ID NO: 9029 - protein, 445 aa, Unknown
  Description of Unknown: Integrase B9030 sequence
  PTHR30461:SF3,IPR036162,PS51737,IPR011109,PTHR30461, PS00397,PF00239,G3DSA:1.10.10.2600,IPR006119,SSF53041, cd00338,SM00857,IPR025827,IPR038109,PS51736, IPR006118,PF13408,G3DSA:3.40.50.1390,Coil
MNVIRGVGYIRVSTAEQATRGLSLDAQEAEIRTYAKAHGIELFNIYVDAGITARKRLDRREAFGQMMKDVDSGLIDEIIVMRLDRWFRNIYDYHKMMNEHLIPHGVNWSAVKEDYDTKTTNGRLMINLRLAIAEQECDTDGDRIRDIHDNQIANGIWIGGCAPPGYRIENKRLSIDPDMQPAVSYFFERLLSCGSVRRAMLDMNERHNLHFEYGQAIRMARSTTYCGVRRENYNYCPTYISQDEHAQIMAALEHNVRVRSADNARIHIFSGLLVCACCGRRLAANTVRKKSVTWTAYRCHRAFGDHVCDNRHLVDERKVEAWLLDYLENGLSDYIVSASVADAQPVVVDNTAAIRERQERVKELFINGFIDLQEYKRRAAELEAKIQVPEKQPPRSMEKLKSLLERGVRAIYNDLSRGERQEFWRSIIREIPVNNGAVSGDPIFL

SEQ ID NO: 9030 - protein, 445 aa, Unknown
  Description of Unknown: Integrase B9031 sequence
  SM00857,IPR006118,G3DSA:1.10.10.2600,IPR036162,PS51737, G3DSA:3.40.50.1390,Coil,IPR006119,IPR038109,IPR011109, SSF53041,PTHR30461,PS00397,PS51736,cd00338, PF00239
MKRAALYVRVSTQEQKNSGLSVDSQIDALEKYCEEQGYTVAGIYNDAGISARKKYTKRPALLQLLEDCKKHEIDIILFTRLDRWFRAVAGYYEVQNVLDACKVPWRAIWEDYETETSQGIFKVNIMLSVAQAEADRDSEKIRSVMEFKRNNKEYIGGKVPVGYRIEGKKIVKDEKTRGIIEDMFEHYFQTFSKAGTADYILNKYPDFARTRTRLVKIMSSPAYRGEMYGVKNYCEPYITEEQAQKINEVSSQKTWTDCRRRIYIFSGLMKCPICGCRLSGCAIGKKGKKYKVYHCPHSVAQKHKTYTRSEKKLETYMLNHIEEKIQLDVLRAEGRVKAGGNDAEKRKKKLSSELGRINKMFEKGRITEEYYDERYEAISKELKELSQTAATEELETKKKIQSKFPDGWKDMYMQLDEQGKQVFWKSIVKEIKISPNEFVEDIIFF

SEQ ID NO: 9031 - protein, 445 aa, Unknown
  Description of Unknown: Integrase B9032 sequence
  SM00857,IPR006118,G3DSA:1.10.10.2600,IPR036162,PS51737, G3DSA:3.40.50.1390,Coil,IPR006119,IPR038109,IPR011109, SSF53041,PTHR30461,PS00397,PS51736,cd00338, PF00239
MKRAALYVRVSTQEQKNSGLSVDSQIDALEKYCEEHGYMVAGVYNDAGISARKKYTKRPALLQLLEDCKQCKIDIILFTRLDRWFRAVAGYYEVQSVLDACKVPWRAIWEDYETETSQGIFKVNIMLSVAQAEADRDSEKIRSVMEFKRNNKEYIGGKVPVGYRIEGKKIVKDEKTRGIIEDMFEHYFQTFSKAGTADYILSKYPGFVRTRTRLVKIMSSPAYRGEMYGVKNYCEPYITEEQAQKINEVSSQKTWTDCRRRIYIFSGLMKCPICGCRLSGCAIGKKGKKYKVYHCPHSVAQKHKTYTRSEKKLETYMLNHIEEKIQLDVLRAEGRVKAGGNDAEKRKKKLSSELGRINKMFEKGRITEEYYDERYEAISKELKELSQTAATEELETKKKIQSRFPDGWKDMYMQLGEQDKQVFWKSIVKEIKISPDTYVEDIIFF

SEQ ID NO: 9032 - protein, 445 aa, Unknown
  Description of Unknown: Integrase B9033 sequence
  SM00857,IPR006118,G3DSA:1.10.10.2600,IPR036162,PS51737, G3DSA:3.40.50.1390,Coil,IPR006119,IPR038109,SSF53041, IPR011109,PTHR30461,PS00397,PS51736,cd00338, PF00239
MKRAALYVRVSTQEQKNSGLSVDSQIDALEKYCEEQGYTVAGIYNDAGISARKKYTKRPALLQLLEDCKKHEIDIILFTRLDRWFRAVAGYYEVQSVLDACKVPWRAIWEDYETETSQGIFKVNIMLSVAQAEADRDSEKIRSVMEFKRNNKEYIGGKVPVGYRIEGKKIVKDEKTRGIIEDMFEHYFQTFSKAGTADYILSKYPGFVRTRTRLVKIMSSPAYRGEMYGVKNYCEPYITEEQAQKINEVSSQKTWTDCKRRIYIFSGLMKCPLCGCRLSGCAIGKKGKKYKVYHCPHSVAQKHKTYTRSEKKLETYMLDHIEEKIQLDVLRAEGRVKATGNDAEKRKKKLSSELGRINKMFEKGRITEEYYDERYEAISKELKELSQTAATEELETKKKIQSRFPDGWKDMYMQLGEQDKQVFWKSIVKEIKISPDTYVEDIIFF

SEQ ID NO: 9033 - protein, 445 aa, Unknown
  Description of Unknown: Integrase B9034 sequence
  SM00857,IPR006118,G3DSA:1.10.10.2600,IPR036162,PS51737, G3DSA:3.40.50.1390,Coil,IPR006119,IPR038109,SSF53041, IPR011109,PTHR30461,PS00397,PS51736,cd00338, PF00239
MKRAALYVRVSTQEQKNSGLSVDSQIDALEKYCEEQGYTVAGIYNDAGISARKKYTKRPALLQLLEDCKKHEIDIILFTRLDRWFRAVAGYYEVQSVLDACKVPWRAIWEDYETETSQGIFKVNIMLSVAQAEADRDSEKIRSVMEFKRNNKEYIGGKVPVGYRVENKKIVKDEKMRGIIEDMFEHYFQTFSKMETADYILSKYPDFIRTRTRIVKIMSSPAYHGEMYGVKNYCEPYITEEQAQRIKEVSSQKSWVDCKRRIYIFSGLMKCPICGCRLSGCAIGKKGKKYKVYHCPHSVAQKHKTYTRSEKKLETYMLNHIEEKIQLDVLRAEGRVKAGGNDAEKRKKKLSSELGRINKMFEKGRITEEYYDERYEAISKELKELSQTAATEELETKKKIQSRFPDGWKDMYMQLGEQDKQVFWKSIVKEIKISPDTYVEDIIFF

SEQ ID NO: 9034 - protein, 445 aa, Unknown
  Description of Unknown: Integrase B9035 sequence
  SM00857,IPR006118,G3DSA:1.10.10.2600,IPR036162,PS51737, G3DSA:3.40.50.1390,Coil,IPR006119,IPR038109,SSF53041, IPR011109,PTHR30461,PS00397,PS51736,cd00338, PF00239
MKRAALYVRVSTQEQKNSGLSVDSQIDALEKYCEEQGYTVAGIYNDAGISARKKYTKRPALLQLLEDCKKHEIDIILFTRLDRWFRAVAGYYEVQSVLDACKVPWRAIWEDYETETSQGIFKVNIMLSVAQAEADRDSEKIRSVMEFKRNNKEYIGGKVPVGYRIEGKKIVKDEKTRGIIEDMFEHYFQTFSKAGTADYILSKYPDFVRTRTRLVKIMSSPAYRGEMYGVKNYCEPYITEEQAQKINEVSSQKTWTDCRRRIYIFSGLMKCPLCGCRLSGCAIGKKGKKYKVYHCPHSVAQKHKTYTRSEKKLETYMLDHIEEKIQLDVLRAEGRVKAGGNDAEKRKKKLSSELGRINKMFEKGRITEEYYDERYEAISKELKELSQTAATEELETKKKIQSRFPDGWKDMYMQLDEQGKQVFWKSIIKEIKISPNEFVEDIIFF

SEQ ID NO: 9035 - protein, 445 aa, Unknown
  Description of Unknown: Integrase B9036 sequence
  SM00857,IPR006118,G3DSA:1.10.10.2600,IPR036162,PS51737, G3DSA:3.40.50.1390,Coil,IPR006119,IPR038109,SSF53041, IPR011109,PTHR30461,PS00397,PS51736,cd00338, PF00239
MKRAALYVRVSTQEQKNSGLSVDSQIDALEKYCEEQGYTVAGIYNDAGISARKKYTKRPALLQLLEDCKQCKIDIILFTRLDRWFRAVAGYYEVQSVLDACKVPWRAIWEDYETETSQGIFKVNIMLSVAQAEADRDSEKIRSVMEFKRNNKEYIGGKVPVGYRIEGKKIVKDEKTRGIIEDMFEHYFQTFSKAGTADYILSKYPGFVRTRTRLVKIMSSPAYRGEMYGVKNYCEPYITEEQAQKISEVSSQKTWTDCKRRIYIFSGLMKCPLCGCRLSGCAIGKKGKKYKVYHCPHSVAQKHKTYTRSEKKLETYMLDHIEEKIQLDVLKAEGRVKASGNDVEKRKKKLSSELGRINKMFEKGRITEEYYDERYEAISKELKELSQTAATEELETKKKIQSRFPDGWKDMYMQLNEQGKQVFWKSIVKEIKISPNEFVEDIIFF

SEQ ID NO: 9036 - protein, 445 aa, Unknown
  Description of Unknown: Integrase B9037 sequence
  PTHR30461:SF3,SM00857,IPR006118,IPR036162,PF13408, IPR025827,G3DSA:3.40.50.1390,PS51737,Coil,IPR006119, IPR011109,SSF53041,PTHR30461,PS00397,PS51736, cd00338,PF00239
MEGKKRAAIYVRVSTAEQKEHGLSVDNQLDALKNYCQERGFSIAGIYNDAGISARKKYKSRPALLQLLEDCKKHKIDIILFTKLDRWFRSVADYYAVQQVLDGAKVPWRAIWEDYETETSAGVFKVNIMLSVAQAESDRTSERIKAVLEYKREHGHIIAGRMPLGYIRTSSSTIDYDPATKDAMQAFFDTYLNTYSPVAAMDAARKLGLRMSRKTAHFILDKEPYYGTYYGVDVPAYITPEQHKIIENARVHYPRTPKDDRVYIFTGVIFCASCGARMCSKLSKHIRANGETIERGYYQCCTKVRRKDICENPAFVMEHKLEDYLIEHMSELITDYEASIAQSQEKAKDAEKEISRIKGKLQRLKDVYLDGDMSRAEYVDKTSQLKANMAELESQRVPLSPIKRLPDNWEEMYWQLSKDGKRDFWHRTIRRIEIDGKKVSKVFFI

SEQ ID NO: 9037 - protein, 445 aa, Unknown
  Description of Unknown: Integrase B9038 sequence
  SM00857,IPR006118,G3DSA:1.10.10.2600,IPR036162,PF13408, PS51737,IPR025827,G3DSA:3.40.50.1390,PS00397,IPR006119, IPR038109,IPR011109,SSF53041,PTHR30461,Coil, PS51736,cd00338,PF00239
MKRAALYVRVSTQEQKNSGLSVDSQIDALEKYCEKQGYTVAGIYNDAGISARKKYTKRPALLQLLEDCRQRKIDIILFTRLDRWFRAVAGYYEVQSVLDACKVPWRAIWEDYETETSQGIFKVNIMLSVAQAEADRDSEKIRSVMEFKRSNKEYIGGKVPVGYRVEGKTIVKDEKMRGIIEDMFEHYFQTFSKMETADYILSKYPDFIRTRTRIVKIMSSPAYHGEMYGVKNYCEPYITEEQAQRIKEVSSQKSWVDCKRRIYIFSGLIRCPICGYRFSGRTMAKKEKRYKVYQCPRSAAKKHKTYTRSEPKLETYMLNHIEEKIQLDILRAEGRLKAAGNDVEKRKKKLSSELGRINKMFEKGRITEEYYDERYEAISKELKELSQTAATEELETKKKIQSKFPDGWKDMYMQLDEQGKQVFWKSIVKEIKISPNEFVEDIIFF

SEQ ID NO: 9038 - protein, 445 aa, Unknown
  Description of Unknown: Integrase B9039 sequence
  SM00857,IPR006118,G3DSA:1.10.10.2600,IPR036162,PS51737, G3DSA:3.40.50.1390,Coil,IPR006119,IPR038109,IPR011109, SSF53041,PTHR30461,PS00397,PS51736,cd00338, PF00239
MKRAALYVRVSTQEQKNSGLSVDSQIDALEKYCEEQGYTVAGIYNDAGISARKKYTKRPALLQLLEDCKQCKIDIILFTRLDRWFRAVAGYYEVQSVLDACKVPWRAIWEDYETETSQGIFKVNIMLSVAQAEADRDSEKIRSVMGFKRNNKEYIGGKVPVGYRIEGKKIVKDEKTRGIIEDMFEHYFQTFSKAGTADYILSKYPDFVRTRTRLVKIMSSPAYRGEMYGVKNYCEPYITEEQAQKINEVSSQKTWTDCRRRIYIFSGLMKCPICGCRLSGCAIGKKGKKYKVYHCPHSVAQKHKTYTRSEKKLETYMLNHIEEKIQLDVLRAEGRVKAGGNDAEKRKKKLSSELGRINKMFEKGRITEEYYDERYEAISKELKELSQTAATEELETKKKIQSRFPDGWKDMYMQLGEQDKQVFWKSIVKEIKISPDTYVEDIIFF

SEQ ID NO: 9039 - protein, 445 aa, Unknown
  Description of Unknown: Integrase B9040 sequence
  SM00857,IPR006118,G3DSA:1.10.10.2600,IPR036162,PF13408, PS51737,G3DSA:3.40.50.1390,IPR025827,Coil,IPR006119, IPR038109,IPR011109,SSF53041,PTHR30461,PS00397, PS51736,cd00338,PF00239
MKRAALYVRVSTQEQKNSGLSVDSQIDALEKYCEEQGYTVAGIYNDAGISARKKYTKRPALLQLLEDCRQRKIDIILFTRLDRWFRAVAGYYEVQNVLDACKVPWRAIWEDYETETSQGIFKVNIMLSVAQAEADRDSEKIRSVMEFKRQNKEYIGGKVPVGYRVEGKKIVKDEKMRAIIEDMFEHYFQTFSKWGTADYILNKYPDFIRTRTRIVKIMSSPAYHGEMYGVKNYCEPYITEEQAQRIKEVSSQKSWIDCKRRIYIFSGLIRCPICGYRFSGRTMAKKEKRYKVYQCPRSAAKKHKTYTRSEPKLETYMLNHIEERIQLDVLKAEGRVKAAGNDAGKKKKKLSSELGRLNKMFEKGRITEEYYDERYEAISKELKELSQTAATEELETKKKIQSKFPDGWKDMYMQLDEQGKQVFWKSIVKEIKISPNEFVEDIIFF

SEQ ID NO: 9040 - protein, 445 aa, Unknown
  Description of Unknown: Integrase B9041 sequence
  SM00857,IPR006118,G3DSA:1.10.10.2600,IPR036162,PS51737, G3DSA:3.40.50.1390,Coil,IPR006119,IPR038109,IPR011109, SSF53041,PTHR30461,PS00397,PS51736,cd00338, PF00239
MKRAALYVRVSTQEQKNSGLSVDSQIDALEKYCEEQGYTVAGIYNDAGISARKKYTKRPALLQLLEDCRQHKIDIILFTRLDRWFRAVAGYYEVQSVLDACKVPWRAIWEDYETETSQGIFKVNIMLSVAQAEADRDSEKIRSVMEFKRSNKEYIGGKVPVGYRVEGKKIVKDEETRGIIEDMFEHYFQTFSKAGTADYILNKYPDFIRTRTRIVKIMSSPAYHGEMYGVKNYCEPYITEEQAQKINEVSSQKTWTDCRRRIYIFSGLMKCPICGCRLSGCAIGKKGKKYKVYHCPHSVAQKHKTYTRSEKKLETYMLNHIEEKIQLDVLRAEGRVKAGGNDAEKRKKKLSSELGRINKMFEKGRITEEYYDERYEAISKELKELSQTAATEELETKKKIQSRFPDGWKDMYMQLGEQDKQVFWKSIVKEIKISPDTYVEDIIFF

SEQ ID NO: 9041 - protein, 445 aa, Unknown
  Description of Unknown: Integrase B9042 sequence
  SM00857,IPR006118,G3DSA:1.10.10.2600,IPR036162,PS51737, G3DSA:3.40.50.1390,Coil,IPR006119,IPR038109,SSF53041, IPR011109,PTHR30461,PS00397,PS51736,cd00338, PF00239
MKKAALYVRVSTQEQKNSGLSVDSQIDALEKYCEEQGYTVAGIYNDAGISARKKYTKRPALLQLLEDCRQCKIDIILFTRLDRWFRAVAGYYEVQNVLDACKVPWRAIWEDYETETSQGIFKVNIMLSVAQAEADRDSEKIRSVMEFKRNNKEYIGGKVPVGYRIEGKKIVKDEKTRGIIEDMFEHYFQTFSKAGTADYILSKYPGFVRTRTRLVKIMSSPAYRGEMYGVKNYCEPYITEEQAQKINEVSSQKTWTDCKRRIYIFSGLMKCPICGCRLSGCAIGKKGKKYKVYHCPHSVAQKHKTYTRSEKKLETYMLNHIEEKIQLDVLRAEGRVKATGNDAEKRKKKLSSELGRINKMFEKGRITEEYYDERYEAISKELKELSQTAATEELETKKKIQSRFPDGWKDMYMQLGEQDKQVFWKSIVKEIKISPDTYVEDIIFF

SEQ ID NO: 9042 - protein, 445 aa, Unknown
  Description of Unknown: Integrase B9043 sequence
  SM00857,IPR006118,G3DSA:1.10.10.2600,IPR036162,PS51737, G3DSA:3.40.50.1390,Coil,IPR006119,IPR038109,IPR011109, SSF53041,PTHR30461,PS00397,PS51736,cd00338, PF00239
MKRAALYVRVSTQEQKNSGLSVDSQIDALEKYCEEQGYTVAGIYNDAGISARKKYTKRPALLQLLEDCKKHEIDIILFTRLDRWFRAVAGYYEVQSVLDACKVPWRAIWEDYETETSQGIFKVNIMLSVAQAEADRDSEKIRSVMEFKRQNKEYIGGKVPVGYRVEGKTIVKDEKTRGIIEDMFEHYFQTFSKMGTADYILNKYPDFIRTRTRIVKIMSSPAYHGEMYGVKNYCEPYITEEQAQKINEVSSQKTWTDCKRRIYIFSGLMKCPICGCRLSGCAIGKKGKKYKVYHCPHSVAQKHKTYTRSEKKLETYMLNHIEEKIQLDVLRAEGRVKAGGNDVEKRKKKLSSELGRINKMFEKGRITEEYYDERYEAISKELKELSQTAATEELETKKKIQSRFPDGWKDMYMQLGEQDKQVFWKSIVKEIKISPDTYVEDIIFF

SEQ ID NO: 9043 - protein, 445 aa, Unknown
  Description of Unknown: Integrase B9044 sequence
  SM00857,IPR006118,G3DSA:1.10.10.2600,IPR036162,PS51737, G3DSA:3.40.50.1390,Coil,IPR006119,IPR038109,IPR011109, SSF53041,PTHR30461,PS00397,PS51736,cd00338, PF00239
MKRAALYVRVSTQEQKNSGLSVDSQIDALEKYCEEQGYIVAGIYNDAGISARKKYTKRPALLRLLEDCKKHEIDIILFTRLDRWFRAVAGYYEVQSVLDACKVPWRAIWEDYETETSQGIFKVNIMLSVAQAEADRDSEKIRSVMEFKRNNKEYIGGKVPVGYRIEGKKIVKDEKTRGIIEDMFEHYFQTFSKAGTADYILSKYPDFVITRTRLVKIMSSPAYRGEMYGVKNYCEPYITEEQAQKINEVSSQKTWTDCRRRIYIFSGLMKCPLCGCRLSGCAIGKKEKKYKVYHCPHSVAQKHKTYTRSEKKLETYMLNHIEEKIQLDVLRAEGRVKAGGNDAEKRKKKLSSELGRINKMFEKGRITEEYYDERYEAISKELKELSQTAATEELETKKKIQSRFPDGWKDMYMQLGEQDKQVFWKSIVKEIKISPDTYVEDIIFF

SEQ ID NO: 9044 - protein, 445 aa, Unknown
  Description of Unknown: Integrase B9045 sequence
  SM00857,IPR006118,G3DSA:1.10.10.2600,IPR036162,PS51737, G3DSA:3.40.50.1390,Coil,IPR006119,IPR038109,IPR011109, SSF53041,PTHR30461,PS00397,PS51736,cd00338, PF00239
MKRAALYVRVSTQEQKNSGLSVDSQIDALEKYCEEQGYVVAGIYNDAGISARKKYTKRPALLQLLEDCRQHKIDIILFTRLDRWFRAVAGYYEVQSVLDACKVPWRAIWEDYETETSQGIFKVNIMLSVAQAEADRDSEKIRSVMEFKRSNKEYIGGKVPVGYRVEGKKIVKDEETRGIIEDMFEHYFQTFSKAGTADYILNKYPDFIRTRTRIVKIMSSPAYHGEMYGVKNYCEPYITEEQAQKINEVSSQKTWTDCRRRIYIFSGLMKCPICGCRLSGCAIGKKGKKYKVYHCPHSVAQKHKTYTRSEKKLETYMLNHIEEKIQLDVLRAEGRVKAGGNDAEKRKKKLSSELGRINKMFEKGRITEEYYDERYEAISKELKELSQTAATEELETKKKIQSRFPDGWKDMYMQLGEQDKQVFWKSIVKEIKISPDTYVEDIIFF

SEQ ID NO: 9045 - protein, 445 aa, Unknown
  Description of Unknown: Integrase B9046 sequence
  SM00857,IPR006118,G3DSA:1.10.10.2600,IPR036162,PS51737, G3DSA:3.40.50.1390,Coil,IPR006119,IPR038109,SSF53041, IPR011109,PTHR30461,PS00397,PS51736,cd00338, PF00239
MKRAALYVRVSTQEQKNSGLSVDSQIDALEKYCEEQGYTVAGIYNDAGISARKKYTKRPALLQLLDDCRQCKIDIILFTRLDRWFRAVAGYYEVQNVLDACKVPWRAIWEDYETETSQGIFKVNIMLSVAQAEADRDSEKIRSVMEFKRNNKEYIGGKVPVGYRIEGKKIVKDEKTRGIIEDMFEHYFQTFSKAGTADYILSKYPDFVRTRTRLVKIMSSPAYRGEMYGVKNYCEPYITEEQAQKINEVSSQKTWTDCRRRIYIFSGLMKCPICGCRLSGCAIGKKGKKYKVYHCPHSVAQKHKTYTRSEKKLETYMLDHIEEKIQLDVLRAEGRVKAGGNDAEKRKKKLSSELGRINKMFEKGRITEEYYDERYEAISKELKELSQTAATEELETKKKIQSRFPDGWKDMYMQLGEQDKQVFWKSIVKEIKISPDTYVEDIIFF

SEQ ID NO: 9046 - protein, 445 aa, Unknown
  Description of Unknown: Integrase B9047 sequence
  SM00857,IPR006118,G3DSA:1.10.10.2600,IPR036162,PS51737, G3DSA:3.40.50.1390,PS00397,IPR006119,IPR038109,SSF53041, IPR011109,PTHR30461,Coil,PS51736,cd00338, PF00239
MKRAALYVRVSTQEQKNSGLSVDSQIDALEKYCEEQGYTVAGIYNDAGISARKKYTKRPALLQLLEDCKKHEIDIILFTRLDRWFRAVAGYYEVQSVLDACKVPWRAIWEDYETETSQGIFKVNIMLSVAQAEADRDSEKIRSIMGFKRNNKEYIGGKVPVGYRIEGKKIVKDEKTRGIIEDMFEHYFQTFSKAGTADYILSKYPGFVRTRTRLVKIMSSPAYRGEMYGVKNYCEPYITEEQAQKINEVSSQKTWTDCRRRIYIFSGLMKCPICGCRLSGCAIGKKGKKYKVYHCPHSVAQKHKTYTRSEKKLETYMLNHIEEKIQLDVLRAEGRVKAGGNDAEKRKKKLSSELGRINKMFEKGRITEEYYDERYEAISKELKELSQTAATEELETKKKIQSRFPDGWKDMYMQLGEQDKQVFWKSIVKEIKISPDTYVEDIIFF

SEQ ID NO: 9047 - protein, 445 aa, Unknown
  Description of Unknown: Integrase B9048 sequence
  SM00857,IPR006118,G3DSA:1.10.10.2600,IPR036162,PS51737, G3DSA:3.40.50.1390,Coil,IPR006119,IPR038109,SSF53041, IPR011109,PTHR30461,PS00397,PS51736,cd00338, PF00239
MKRAALYVRVSTQEQKNSGLSVDSQIDALEKYCEEQGYTVAGIYNDAGISARKKYTKRPALLQLLEDCKQCKIDIILFTRLDRWFRAVAGYYEVQSVLDACKVPWRAIWEDYETETSQGIFKVNIMLSVAQAEADRDSEKIRSVMEFKRNNKEYIGGKVPVGYRIEGKKIVKDEKTRGIIEDMFEHYFQTFSKAGTADYILSKYPGFVRTRTRLVKIMSSPAYRGEMYGVKNYCEPYITEEQAQKISEVSSQKTWTDCKRRIYIFSGLMKCPLCGCRLSGCAIGKKGKKYKVYHCPHSVAQKHKTYTRSEKKLETYMLDHIEEKIQLDVLRAEGRVKAGGNDAEKRKKKLSSELGRINKMFEKGRITEEYYDERYEAISKELKELSQTAATEELETKKKIQSRFPDGWKDMYMQLGEQDKQVFWKSIVKEIKISPDTYVEDIIFF

SEQ ID NO: 9048 - protein, 445 aa, Unknown
  Description of Unknown: Integrase B9049 sequence
  SM00857,IPR006118,G3DSA:1.10.10.2600,IPR036162,PS51737, G3DSA:3.40.50.1390,PS00397,IPR006119,IPR038109,SSF53041, IPR011109,PTHR30461,Coil,PS51736,cd00338, PF00239
MKRAALYVRVSTQEQKNSGLSVDSQIDALEKYCEEQGYTVAGIYNDAGISARKKYTKRPALLQLLEDCKKHEIDIILFTRLDRWFRAVAGYYEVQSVLDACKVPWRAIWEDYETETSQGIFKVNIMLSVAQAEADRDSEKIRSVMEFKRNNKEYIGGKVPVGYRIEGKKIVKDEKTRGIIEDMFEHYFQTFSKAGTADYILSKYPGFVRTRTRLVKIMSSPAYRGEMYGVKNYCEPYITEEQAQKISEVSSQKTWTDCKRRIYIFSGLMKCPLCGCRLSGCAIGKKGKKYKVYHCPHSVAQKHKTYTRSEKKLETYMLDHIEEKIQLDVLRAEGRVKATGNDAEKRKKKLSSELGRINKMFEKGRITEEYYDERYEAISKELKELSQTAATEELETKKKIQSRFPDGWKDMYMQLGEQDKQVFWKSIVKEIKISPDTYVEDIIFF

SEQ ID NO: 9049 - protein, 445 aa, Unknown
  Description of Unknown: Integrase B9050 sequence
  SM00857,IPR006118,G3DSA:1.10.10.2600,IPR036162,PS51737, G3DSA:3.40.50.1390,Coil,IPR006119,IPR038109,SSF53041, IPR011109,PTHR30461,PS00397,PS51736,cd00338, PF00239
MKRAALYVRVSTQEQKNSGLSVDSQIDALEKYCEEQGYTVAGIYNDAGISARKKYTKRPALLQLLEDCKQCKIDIILFTRLDRWFRAVAGYYEVQSVLDACKVPWRAIWEDYETETSQGIFKVNIMLSVAQAEADRDSEKIRSVMEFKRNNKEYIGGKVPVGYRIEGKKIVKDEKTRGIIEDMFEHYFQTFSKAGTADYILGKYPDFARTRTRLVKIMSSPAYRGEMYGVKNYCEPYITEEQAQKINEVSSQKTWTDCRRRIYIFSGLMKCPLCGCRLSGCAIGKKGKKYKVYHCPHSVAQKHKTYTRSEKKLETYMLNHIEEKIQLDVLRAEGRVKAGGNDAEKRKKKLSSELGRINKMFEKGRITEEYYDERYEAISKELKELSQTAATEELETKKKIQSRFPDGWKDMYMQLGEQDKQVFWKSIVKEIKISPDTYVEDIIFF

SEQ ID NO: 9050 - protein, 445 aa, Unknown
  Description of Unknown: Integrase B9051 sequence
  SM00857,IPR006118,G3DSA:1.10.10.2600,IPR036162,PF13408, PS51737,G3DSA:3.40.50.1390,IPR025827,Coil,IPR006119, IPR038109,IPR011109,SSF53041,PTHR30461,PS00397, PS51736,cd00338,PF00239
MKRAALYVRVSTQEQKNSGLSVDSQINALEKYCEEQGYAIAGIYNDAGISARKKYTKRPALLQLLEDCRQRKIDIILFTRLDRWFRAVAGYYEVQNVLDACKVPWRAIWEDYETETSQGIFKVNIMLSVAQAEADRDSEKIRSVMEFKRQNKEYIGGKVPVGYRVEGKKIVKDEKMRAIIEDMFEHYFQTFSKWGTADYILNKYPDFIRTRTRIVKIMSSPAYHGEMYGVKNYCEPYITEEQAQRIKEVSSQKSWIDCKRRIYIFSGLIRCPICGYRFSGRTMAKKEKRYKVYQCPRSAAKKHKTYTRSEPKLETYMLNHIEERIQLDVLKAECRVKAAGNDAGKKKKKLSSELGRLNKMFEKGRITEEYYDERYEAISKELKELSQTAATEELETKKKIQSKFPDGWKDMYMQLDEQGRQVFWKSIVKEIKISPNEFVEDIIFF

SEQ ID NO: 9051 - protein, 445 aa, Unknown
  Description of Unknown: Integrase B9052 sequence
  PTHR30461:SF3,SM00857,IPR036162,PF13408,PS51737, IPR025827,G3DSA:3.40.50.1390,IPR006119,IPR011109,SSF53041, PF00239,PTHR30461,PS51736,Coil,cd00338
MKRVALYMRVSTEEQALHGYSLPAQKDALHQYAKDHSMTVVGEYVDEGISGRKSASKRPALARMLRDVEAGKIDQILFIKLDRWFRSVKEYYRVQEVLDRNKVTWRTILEDYNTESADGILKVNIMLSVAQNEAERTGERIKFVLDNKVQKKQVVGKQPYGYKIAIVEGEKKSVIDEETAPVVHDIFNTFDRTNSASLTTKYINEKHGTDFSAVFIRRLLHRSAYAGEYMGISGYRPQYISRERFDKNQEIFRGSHIKRTPTGRVYIFTGILFCAHCGHRMKGKYTTVKYYCCPRATDDYSCENHKHISELKIEKYLTSHIRRLMSEYILAAETKESVTKRSDAASEVMSLRQKIERLNDIYLEGNMNKETYRRRTEQLKQNLVQAEEQYQRSQPKNVSHLKEILNTDFLSDYDLLTDENKRSLWRRIITRIEMDDQQNLKVFFS

SEQ ID NO: 9052 - protein, 445 aa, Unknown
  Description of Unknown: Integrase B9053 sequence
  cd00338,SM00857,IPR006118,G3DSA:1.10.10.2600, IPR036162,PS51737,G3DSA:3.40.50.1390,IPR006119, IPR038109,IPR011109,SSF53041,PTHR30461, PS00397,PS51736,Coil,PF00239
MKRAALYVRVSTQEQKNSGLSVDSQIDALEKYCEEQGYTVAGIYNDAGISARKKYTKRPALLQLLEDCKQCKIDIILFTRLDRWFRAVAGYYEVQSVLDACKVPWRAIWEDYETETSQGIFKVNIMLSVAQAEADRDSEKIRSVMEFKRNNKEYIGGKVPVGYRIEGKKIVKDEKTRGIIEDMFEHYFQTFSKAGTADYILSKYPGFVRTRTRLVKIMSSPAYRGEMYGVKNYCEPYITEEQAQKISEVSSQKTWTDCKRRIYIFSGLMKCPICGCRLSGCAIGKKGKKYKVYHCPHSVAQKHKTYTRSEKKLETYMLNHIEEKIQLDILRAEGRVKAAGNDVGKRKKKLSSELGRINKMFEKGRITEEYYDERYEAISKELKELSQTAATEELETKKKIQSRFPDGWKDMYMQLGEQDKQVFWKSIVKEIKISPDTYVEDIIFF

SEQ ID NO: 9053 - protein, 445 aa, Unknown
  Description of Unknown: Integrase B9054 sequence
  SM00857,IPR006118,G3DSA:1.10.10.2600,IPR036162,PF13408, IPR025827,PS51737,Coil,G3DSA:3.40.50.1390,IPR006119, IPR038109,SSF53041,IPR011109,PTHR30461,PS00397, PS51736,cd00338,PF00239
MKRAALYVRVSTQEQKNSGLSVDSQIDALEKYCEEQEYIVAGIYNDAGISARKKYTKRPALLRLLEDCKKHEIDIILFTRLDRWFRAVAGYYEVQSVLDACKVPWRAIWEDYETETSQGIFKVNIMLSVAQAEADRDSEKIRSVMEFKRQNKEYIGGKVPVGYRVEGKKIVKDENMREIIEDMFEHYFQTFSKWGTADYILSKYPDFIRTRNRIVKIMSSPAYHGEMYGVKNYCEPYITEEQAQRIKEVSSQKSWVDCKRRIYIFSGLIRCPICGYKFSGCTMVKKEKRYKVYRCPRSAAKKHKTYTRSEPKLETYMLNHIEEKIQSDVLRAEGRVKAAGNDIGKRKKKLSSELGRINKMFEKGRITEEYYDERYEAISKELKELSQTAATEELETKKKIQSRFPDGWKDMYMQLDEQGKQVFWKSIVKEIKISPNEFVEDIIFF

SEQ ID NO: 9054 - protein, 445 aa, Unknown
  Description of Unknown: Integrase B9055 sequence
  SM00857,IPR006118,G3DSA:1.10.10.2600,IPR036162,PF13408, IPR025827,PS51737,G3DSA:3.40.50.1390,Coil,IPR006119, IPR038109,IPR011109,SSF53041,PTHR30461,PS00397, PS51736,cd00338,PF00239
MKRCALYVRVSTQEQKNSGLSVDSQIAALEKYCEEQGYTVAGVYNDAGISARKKYTKRPALLQLLEDCKQRKIDIILFTRLDRWFRAVAGYYEVQSVLDACKVPWRAIWEDYETETSQGIFKVNIMLSVAQAEADRDSEKIRSVMEFKRQNKEYIGGKVPVGYRVEGKKIVKDEKMRGIIEDMFEHYFQTFSKWGTADYILSKYPDFIRTRTRIVKIMSSPAYHGEMYGVKNYCEPYITEEQAQRIKEVSSQKSWVNCKRRIYIFSGLIRCPICGYRFSGRTMAKKEKRYKVYQCPRSAAKKHKTYTRSEPKLEKYMLDHIEEKIQLDVLRAEGRVKAAGNDVGKRKKKLSSELGRINKMFEKGRITEEYYDERYEAISKELKELSQTAATEELETKEKIQSSFPDGWKDMYMQLDEQGKQVFWKSIVKEIKISPNEFVEDIIFF

SEQ ID NO: 9055 - protein, 445 aa, Unknown
  Description of Unknown: Integrase B9056 sequence
  SM00857,IPR006118,G3DSA:1.10.10.2600,IPR036162,PS51737, G3DSA:3.40.50.1390,Coil,IPR006119,IPR038109,SSF53041, IPR011109,PTHR30461,PS00397,PS51736,cd00338, PF00239
MKRAALYVRVSTQEQKNSGLSVDSQIDALEKYCEEQGYTVAGIYNDAGISARKKYTKRPALLQLLEDCKKHEIDIILFTRLDRWFRAVAGYYEVQSVLDACKVPWRAIWEDYETETSQGIFKVNIMLSVAQAEADRDSEKIRSVMEFKRNNKEYIGGKVPVGYRIEGKKIVKDEKTRGIIEDMFEHYFQTFSKAGTADYILNKYPDFIRTRTRIVKIMSSPAYHGEMYGVKNYCEPYITEEQAQKINEVSSQKTWTDCKRRIYVFSGLMKCPICGCRLSGCAIGKKEKKYKVYHCPHSVAQKHKTYTRSEKKLETYMLNHIEEKIQLDVLRAECRVKAGGNDAEKRKKKLSSELGRINKMFEKGRITEEYYDERYEAISKELKELSQTAATEELETKKKIQSRFPEGWKDMYMQLDEQGKQVFWKSIVKEIKISPNEFVEDIIFF

SEQ ID NO: 9056 - protein, 445 aa, Unknown
  Description of Unknown: Integrase B9057 sequence
  SM00857,IPR006118,G3DSA:1.10.10.2600,IPR036162,PS51737, G3DSA:3.40.50.1390,Coil,IPR006119,IPR038109,IPR011109, SSF53041,PTHR30461,PS00397,PS51736,cd00338, PF00239
MKRAALYVRVSTQEQKNSGLSVDSQIDALKKYCEEQGYTVAGIYNDAGISARKKYTKRPALLKLLEDCKKHEIDIILFTRLDRWFRAVAGYYEVQNVLDACKVPWRAIWEDYETETSQGIFKVNIMLSVAQAEADRDSEKIRSVMEFKRNNKEYIGGKVPVGYRIEGKKIVKDEKTRGIIEDMFEHYFQTFSKAGTADYILSKYPDFVRTRTRLVKIMSSPAYRGEMYGVKNYCEPYITEEQAQKISEVSSQKTWTDCKRRIYIFSGLMKCPLCGCRLSGCAIGKKGKKYKVYHCPHSVAQKHKTYTRSEKKLETYMLDHIEEKIQLDVLKAEGRVKASGNDAEKRKKKLSSELGRINKMFEKGRITEEYYDERYEAISKELKELSQTAATEELETKKKIQSRFPDGWKDMYMQLDEQGKQVFWKSIVKEIKISPNEFVEDIIFF

SEQ ID NO: 9057 - protein, 445 aa, Unknown
  Description of Unknown: Integrase B9058 sequence
  SM00857,IPR006118,G3DSA:1.10.10.2600,IPR036162,PS51737, G3DSA:3.40.50.1390,Coil,IPR006119,IPR038109,SSF53041, IPR011109,PTHR30461,PS00397,PS51736,cd00338, PF00239
MKRAALYVRVSTQEQKNSGLSVDSQIDALEKYCEEQGYTVAGIYNDAGISARKKYTKRPALLQLLEDCKKHEIDIILFTRLDRWFRAVAGYYEVQNILDACKVPWRAIWEDYETETSQGIFKVNIMLSVAQAEADRDSEKIRSVMEFKRNNKEYIGGKVPVGYRIEGKKIVKDEKTRGIIEDMFEHYFQTFSKAGTADYILSKYPDFVRTRTRLVKIMSSPAYRGEMYGVKNYCEPYITEEQAQKINEVSSQKTWTDCRRRIYIFSGLMKCPLCGCRLSGCAIGKKGKKYKVYHCPHSVAQKHKTYTRSEKKLETYMLNHIEEKIQLDVLRAEGRVKAGGNDAEKRKKKLSSELGRINKMFEKGRITEEYYDERYEAISKELKELSQTAATEELETKKKIQSRFSDGWKDMYMQLGEQDKQVFWKSIVKEIKISPDTYVEDIIFF

SEQ ID NO: 9058 - protein, 445 aa, Unknown
  Description of Unknown: Integrase B9059 sequence
  SM00857,IPR006118,G3DSA:1.10.10.2600,IPR036162,PS51737, G3DSA:3.40.50.1390,Coil,IPR006119,IPR038109,IPR011109, SSF53041,PTHR30461,PS00397,PS51736,cd00338, PF00239
MKRAALYVRVSTQEQKNSGLSVDSQIDALEKYCEEQGYTVAGIYNDAGISARKKYTKRPALLRLLEDCKKHEIDIILFTRLDRWFRAVAGYYEVQNVLDACKVPWRAIWEDYETETSQGIFKVNIMLSVAQAEADRDSEKIRSVMEFKRNNKEYIGGKVPVGYRIEGKKIVKDEKTRGIIEDMFEHYFQTFSKAGTADYILSKYPDFVRTRTRLVKIMSSPAYRGEMYGVKNYCEPYITEEQAQKINEVSSQKTWTDCRRRIYIFSGLMKCPLCGCRLSGCAIGKKGKKYKVYHCPHSVAQKHKTYTRSEKKLETYMLDHIEEKIQLDVLRAEGRVKAGGNDAEKRKKKLSSELGRINKMFEKGRITEEYYDERYEAISKELKELSQTAATEELETKKKIQSRFPDGWKDMYMQLGEQDKQVFWKSIVKEIKISPDTYVEDIIFF

SEQ ID NO: 9059 - protein, 445 aa, Unknown
  Description of Unknown: Integrase B9060 sequence
  SM00857,IPR006118,G3DSA:1.10.10.2600,IPR036162,PS51737, G3DSA:3.40.50.1390,Coil,IPR006119,IPR038109,SSF53041, IPR011109,PTHR30461,PS00397,PS51736,cd00338, PF00239
MKRAALYVRVSTQEQKNSGLSVDSQIDALKKYCEEQGYTVAGIYNDAGISARKKYTKRPALLQLLEDCKKHEIDIILFTRLDRWFRAVAGYYEVQNVLDACKVPWRAIWEDYETETSQGIFKVNIMLSVAQAEADRDSEKIRSVMEFKRQNKEYIGGKVPVGYRVEGKTIVKDEKTRGIIEDMFEHYFQTFSKMGTADYILNKYPDFIRTRTRIVKIMSSPAYHGEMYGVKNYCEPYITEEQAQRIKEVSSQKSWVDCRRRIYIFSGLMKCPICGCRLSGCAIGKKGKKYKVYHCPHSVAQKHKTYTRSEKKLETYMLNHIEEKIQLDVLRAEGRVKAGGNDAEKRKKKLSSELGRINKMFEKGRITEEYYDERYEAISKELKELSQTAATEELETKKKIQSRFPDGWKDMYMQLGEQDKQVFWKSIVKEIKISPDTYVEDIIFF

SEQ ID NO: 9060 - protein, 445 aa, Unknown
  Description of Unknown: Integrase B9061 sequence
  SM00857,IPR006118,G3DSA:1.10.10.2600,IPR036162,PS51737, G3DSA:3.40.50.1390,Coil,IPR006119,IPR038109,SSF53041, IPR011109,PTHR30461,PS00397,PS51736,cd00338, PF00239
MKRAALYVRVSTQEQKNSGLSVDSQIDALEKYCEEQGYVVAGIYNDAGISARKKYTKRPALLRLLEDCKKHEIDIILFTRLDRWFRAVAGYYEVQNILDACKVPWRAIWEDYETETSQGIFKVNIMLSVAQAEADRDSEKIRSVMEFKRNNKEYIGGKVPVGYRIEGKKIVKDEKTRGIIEDMFEHYFQTFSKAGTADYILSKYPDFVRTRTRLVKIMSSPAYRGEMYGVKNYCEPYITEEQAQKINEVSSQKTWTDCRRRIYIFSGLMKCPLCGCRLSGCAIGKKGKKYKVYHCPHSVAQKHKTYTRSEKKLETYMLNHIEEKIQLDVLRAEGRVKAGGNDAEKRKKKLSSELGRINKMFEKGRITEEYYDERYEAISKELKELSQTAATEELETKKKIQSRFPDGWKDMYMQLGEQDKQVFWKSIVKEIKISPDTYVEDIIFF

SEQ ID NO: 9061 - protein, 445 aa, Unknown
  Description of Unknown: Integrase B9062 sequence
  PTHR30461:SF3,IPR036162,PS51737,IPR011109,PTHR30461, PS00397,PF00239,G3DSA:1.10.10.2600,IPR006119,SSF53041, cd00338,SM00857,IPR025827,IPR038109,PS51736, IPR006118,PF13408,G3DSA:3.40.50.1390,Coil
MNVIRGVGYIRVSTAEQATRGLSLDAQEAEIRTYAKAHGIELFNIYVDAGITARKRLDRREAFGQMMKDVDSGLIDEIIVMRLDRWFRNIYDYHKMMNEHLIPHGVNWSAVKEDYDTKTTNGRLMINLRLAIAEQECDTDGDRIRDIHDNQIANGIWIGGCAPPGYRIENKRLSIDPDMQPAVSYFFERLLSCGSVRRAMLDMNERHNLHFEYGQAIRMARSTTYCGVRRENYNYCPTYISQDEHAQIMAALEHNVRVRSADNARIHIFSGLLVCACCGRRLAANTVRKKSVTWTAYRCHRAFGDHVCDNRHLVDERKVEAWLLDYLENGLSDYIVSASVADAQPVVVDNTAAIRERQERVKELFINGFIDLQEYKRRATELEAKIQVPEKQPPRSMEKLKSLLERGVRAIYNDLSRGERQEFWRSIIREIPVNNGAVSGDPIFL

SEQ ID NO: 9062 - protein, 445 aa, Unknown
  Description of Unknown: Integrase B9063 sequence
  SM00857,IPR006118,G3DSA:1.10.10.2600,IPR036162,PS51737, G3DSA:3.40.50.1390,Coil,IPR006119,IPR038109,SSF53041, IPR011109,PTHR30461,PS00397,PS51736,cd00338, PF00239
MKRAALYVRVSTQEQKNSGLSVDSQIDALEKYCEEQGYTVAGIYNDAGISARKKYTKRPALLRLLEDCKKHEIDIILFTRLDRWFRAVAGYYEVQNVLDACKVPWRAIWEDYETETSQVIFKVNIMLSVAQAEADRDSEKIRSVMEFKRSNKEYIGGKVPVGYRVEGKKIVKDEETRGIIEDMFEHYFQTFSKAGTADYILNKYPDFIRTRTRIVKIMSSPAYHGEMYGVKNYCEPYITEEQAQKINEVSSQKTWTDCRRRIYIFSGLMKCPICGCRLSGCAIGKKGKKYKVYHCPHSVAQKHKTYTRSEKKLETYMLNHIEEKIQLDVLRAEGRVKAGGNDAEKRKKKLSSELGRINKMFEKGRITEEYYDERYEAISKELKELSQTAATEELETKKKIQSRFPDGWKDMYMQLGEQDKQVFWKSIVKEIKISPDTYVEDIIFF

SEQ ID NO: 9063 - protein, 445 aa, Unknown
  Description of Unknown: Integrase B9064 sequence
  PTHR30461:SF3,IPR036162,PS51737,IPR011109,PTHR30461, PS00397,PF00239,G3DSA:1.10.10.2600,IPR006119,SSF53041, cd00338,SM00857,IPR025827,IPR038109,PS51736, IPR006118,PF13408,G3DSA:3.40.50.1390,PF07508,Coil
MKNKRVALYIRVSTEEQARQGLSLDAQLTDLRSYADKHKYNIVGVYTDDGASARKKPFSRRAFKQLIEDIRQNKIDRVLFIKLDRWFRSVKDYYKAQEILDMHKVDWETTQEDYNTTTTNGRLMLNIKLSIAQNESDMTSDRIHFIFAQKRARHEICSGKIPFGYSVQDKKLVPNENAKYVQPLFEHFVKTQNLTEAARWMCGHGFYYTYASISHVLKNERYIGRSHGDDNFCQPLVTEEIFYKAQKIIKSKKMIKRTPTGRIFLFTGLIRCPMCGHPYTGIGCVGKNNGKTYYYYQCPQSVSPFKACTHRGRVAEKKIEESLLDSFDEAYKDFQYSVKKKQKQQPVTTDVDKLKRKLERLKELFLNELIDLDEYKKTHAELSAAIAEVETPKIPTSTPLNYYLPGGIRPYYEKMTREQRRQFWQQTVDRIDLDEDNTPRITFLS

SEQ ID NO: 9064 - protein, 445 aa, Unknown
  Description of Unknown: Integrase B9065 sequence
  SM00857,IPR006118,G3DSA:1.10.10.2600,IPR036162,PF13408, IPR025827,G3DSA:3.40.50.1390,PS51737,Coil,IPR006119, IPR038109,IPR011109,SSF53041,PTHR30461,PS00397, PS51736,cd00338,PF00239
MKRAALYVRVSTQEQKNSGLSVDSQIDALEKYCEEQGYTVAGVYNDAGISARKKYTKRPALLQLLEDCKKHEIDIILFTRLDRWFRAVAGYYEVQSVLDACKVPWRAIWEDYETETSQGIFKVNIMLSVAQAEADRDSEKIRSVMEFKRNNKEYIGGKVPVGYRVENKKIVKDEKMQGIIEDMFEHYFQTFSKMETADYILSKYPDFIRTRTRIVKIMSSPAYHGEMYGVKNYCEPYITEEQAQRIKEVSSQKSWVDCKRRIYIFSGLIRCPICGYKFSGRTMAKKEKRYKVYQCPRSAAKKHKTYTRSEPKLETYMLNHIEEKIQSDVLRAEGRVRAAGNDAGKKKKKLSSELGRLNKMFEKGRITEEYYDERYEAISKELKELSQTAATEELETKKKIQGRFPDGWKDMYMQLDEQGKQVFWKSIVKEIKISPNEFVEDIIFF

SEQ ID NO: 9065 - protein, 445 aa, Unknown
  Description of Unknown: Integrase B9066 sequence
  SM00857,IPR006118,G3DSA:1.10.10.2600,IPR036162,PS51737, G3DSA:3.40.50.1390,Coil,IPR006119,IPR038109,IPR011109, SSF53041,PTHR30461,PS00397,PS51736,cd00338, PF00239
MKRAALYVRVSTQEQKNSGLSVDSQIDALEKYCEEQGYMVAGIYNDAGISARKKYTKRPALLRLLEDCKKHEIDIILFTRLDRWFRAVAGYYEVQSVLDACKVPWRAIWEDYETETSQGIFKVNIMLSVAQAEADRDSEKIRSVMEFKRNNKEYIGGKVPVGYRIEGKKIVKDEKTREIIEDMFEHYFQTFSKAGTADYILSKYPDFVRTRTRLVKIMSSPAYRGEMYGVKNYCEPYITEEQAQKINEVSSQKTWTDCKRRIYIFSGLMKCPICGCRLSGCAIGKKGKKYKVYHCPHSVAQKHKTYTRSEKKLETYMLNHIEEKIQLDVLRAEGRVKAGGNDVEKRKKKLSSELGRINKMFEKGRITEEYYDERYEAISKELKELSQTAATEELETKKKIQSKFPDGWKDMYMQLDEQGKQVFWKSIVKEIKISPNEFVEDIIFF

SEQ ID NO: 9066 - protein, 445 aa, Unknown
  Description of Unknown: Integrase B9067 sequence
  PTHR30461:SF3,IPR036162,PS51737,IPR011109,PTHR30461, PS00397,PF00239,G3DSA:1.10.10.2600,IPR006119,SSF53041, cd00338,SM00857,IPR025827,IPR038109,PS51736, IPR006118,PF13408,G3DSA:3.40.50.1390,PF07508,Coil
MKNNRVALYIRVSTEEQARQGLSLDAQLTDLRSYADKHKYNIVGVYTDDGASARKKPFSRRAFKQLIEDIKQNKIDRVLFIKLDRWFRSVKDYYKAQEILDSHKVDWETTQEDYNTTTTNGRLMLNIKLSIAQNESDMTSDRIHFVFAQKRARHEICSGKIPFGYSVQDKKLVPNENAKYVQPLFEHFVKTQNLTESARWMCGHGFYYTYASISHVLKNERYIGRSHGDDSFCQPLVTEDIFYRAQKIIKSKKLIKRTPTGRIFLFTGLIRCPMCGHPYTGIGCVGKNNGKTYYYYQCPQSVSPFKACTHRGRVSEKKIEEALLDSFDEAYKDFQYSVKKKQKPQPVTTDVEKLKRKLERLKELFLNELIDLDEYKKTHAELTAAIAEVETPKIPTSTPLNYYLPGGIRPYYEKMTREQRRQFWQQTVDRIDLDEDDTPRITFLS

SEQ ID NO: 9067 - protein, 445 aa, Unknown
  Description of Unknown: Integrase B9068 sequence
  SM00857,IPR006118,G3DSA:1.10.10.2600,IPR036162,PF13408, PS51737,G3DSA:3.40.50.1390,IPR025827,Coil,IPR006119, IPR038109,SSF53041,IPR011109,PTHR30461,PS00397, PS51736,cd00338,PF00239
MKRAALYVRVSTQEQKNSGLSVDSQIDALEKYCEEQGYTVTGIYNDAGISARKKYTKRPALLKLLEDCKKHEIDIILFTRLDRWFRAVAGYYEVQSVLDACKVPWRAIWEDYETETSQGIFKVNIMLSVAQAEADRDSEKIRSVMEFKRQNKEYIGGKVPVGYRVEGKKIVKDEKMRAIIEDMFEHYFQTFSKMETADYILSKYPDFIRTRTRIVKIMSSPAYHGEMYGVKNYCEPYITEEQAQRIKEVSSQKSWVDCKRRIYIFSGLIRCPICGYRFSGRTMAKKEKRYKVYQCPRSAAKKHKTYTRSEPKLETYMLNHIEEKIQLDILRAEGRVKAAGNDAGKRKKKLSSELGRINKMYEKGRITEEYYDERYEAISKELKELSQTAATEELETKKKIQSKFPDGWKDMYMQLDEQGKQVFWKSIVKEIKISPNEFVEDIIFF

SEQ ID NO: 9068 - protein, 445 aa, Unknown
  Description of Unknown: Integrase B9069 sequence
  SM00857,IPR006118,G3DSA:1.10.10.2600,IPR036162,PS51737, G3DSA:3.40.50.1390,Coil,IPR006119,IPR038109,IPR011109, SSF53041,PTHR30461,PS00397,PS51736,cd00338, PF00239
MKRAALYVRVSTQEQKNSGLSVDSQIDALKKYCEEQGYTVAGIYNDAGISARKKYTKRPALLKLLEDCKKHEIDIILFTRLDRWFRAVAGYYEVQNVLDACKVPWRAIWEDYETETSQGIFKVNIMLSVAQAEADRDSEKIRSVMEFKRNNKEYIGGKVPVGYRIEGKKIVKDEKTRGIIEDMFEHYFQTFSKAGTADYILSKYPDFVRTRTRLVKIMSSPAYRGEMYGVKNYCEPYITEEQAQKISEVSSQKTWTDCKRRIYIFSGLMKCPLCGCRLSGCAIGKKGKKYKVYHCPHSVAQKHKTYTRSEKKLETYMLDHIEEKIQLDVLKAEGRVKASGNDAEKRKKKLSSELGRINKMFEKGRITEEYYDERYEAISKELKELSQTAATEELETKKKIQSRFPDGWKDMYMQLDEQGRQVFWKSIVKEIKISPNEFVEDIIFF

SEQ ID NO: 9069 - protein, 445 aa, Unknown
  Description of Unknown: Integrase B9070 sequence
  SM00857,IPR006118,G3DSA:1.10.10.2600,IPR036162,PS51737, G3DSA:3.40.50.1390,Coil,IPR006119,IPR038109,IPR011109, SSF53041,PTHR30461,PS00397,PS51736,cd00338, PF00239
MKRAALYVRVSTQEQKNSGLSVDSQIDALEKYCEEQGYTVAGIYNDAGISARKKYTKRPALLQLLEDCKQCKIDIILFTRLDRWFRAVAGYYEVQSVLDACKVPWRAIWEDYETETSQGIFKVNIMLSVAQAEADRDSEKIRSVMGFKRNNKEYIGGKVPVGYRIEGKKIVKDEKTRGIIEDMFEHYFQTFSKAGTADYILSKYPDFVRTRTRLVKIMSSPAYRGEMYGVKNYCEPYITEEQAQKINEVSSQKTWTDCRRRIYIFSGLMKCPICGCRLSGCAIGKKGKKYKVYHCPHSVAQKHKTYTRSEKKLETYMLDHIEEKIQLDVLRAEGRVKAGGNDAEKRKKKLSSELGRINKMFEKGRITEEYYDERYEAISKELKELSQTAATEELETKKKIQSRFPDGWKDMYMQLGEQDKQVFWKSIVKEIKISPDTYVEDIIFF

SEQ ID NO: 9070 - protein, 445 aa, Unknown
  Description of Unknown: Integrase B9071 sequence
  SM00857,IPR006118,G3DSA:1.10.10.2600,IPR036162,PS51737, G3DSA:3.40.50.1390,Coil,IPR006119,IPR038109,SSF53041, IPR011109,PTHR30461,PS00397,PS51736,cd00338, PF00239
MKRAALYVRVSTQEQKNSGLSVDSQIDALEKYCEEQGYTVAGIYNDAGISARKKYTKRPALLQLLEDCKQCKIDIILFTRLDRWFRAVAGYYEVQSVLDACKVPWRAIWEDYETETSQGIFKVNIMLSVAQAEADRDSEKIRSVMEFKRNNKEYIGGKVPVGYRIEGKKIVKDEKTRGIIEDMFEHYFQTFSKAGTADYILSKYPGFVRTRTRLVKIMSSPAYRGEMYGVKNYCEPYITEEQAQKISEVSSQKTWTDCKRRIYIFSGLMKCPLCGCRLSGCAIGKKGKKYKVYHCPHSVAQKHKTYTRSEKKLETYMLDHIEEKIQLDVLRAEGRVKAAGNDVGKRKKKLSSELGRINKMFEKGRITEEYYDERYEAISKELKELSQTAATEELETKKKIQSRFPDGWKDMYMQLGEQDKQVFWKSIVKEIKISPDTYVEDIIFF

SEQ ID NO: 9071 - protein, 445 aa, Unknown
  Description of Unknown: Integrase B9072 sequence
  SM00857,IPR006118,G3DSA:1.10.10.2600,IPR036162,PF13408, IPR025827,G3DSA:3.40.50.1390,PS51737,Coil,IPR006119, IPR038109,SSF53041,IPR011109,PTHR30461,PS00397, PS51736,cd00338,PF00239
MKRAALYVRVSTQEQKNSGLSVDSQIDALEKYCEEQGYTVAGVYNDAGISARKKYTKRPALLQLLEDCKRHEIDIILFTRLDRWFRAVAGYYEVQSVLDACKVPWRAIWEDYETETSQGIFKVNIMLSVAQAEADRDSEKIRSVMEFKRQNKEYIGGKVPVGYRVEGKKIVKDEKMRGIIEDMFEHYFQTFSKMETADYILSKYPDFIRTRTRIVKIMSSPAYHGEMYGVKNYCEPYITEEQAQRIKEVSSQKSWADCKRRIYIFSGLIRCPICGYRFSGRTMAKKEKRYKVYQCPRSAAKKHKTYTRSEPKLEKYMLNHIEEKIQLDILRAEGRVKAAGNDVGKRKKKLSSELGRINKMFEKGRITEEYYDERYEAISKELKELSQTAATEELETKKKIQSKFPDGWKDMYMQLDEQGKQVFWKSIVKEIKISPNEFVEDIIFF

SEQ ID NO: 9072 - protein, 445 aa, Unknown
  Description of Unknown: Integrase B9073 sequence
  SM00857,IPR006118,G3DSA:1.10.10.2600,IPR036162,PS51737, G3DSA:3.40.50.1390,Coil,IPR006119,IPR038109,SSF53041, IPR011109,PTHR30461,PS00397,PS51736,cd00338, PF00239
MKRAALYVRVSTQEQKNSGLSVDSQIDALEKYCEEQGYTVAGIYNDAGISARKKYTKRPALLQLLEDCKKHEIDIILFTRLDRWFRAVAGYYEVQNVLDACKVPWRAIWEDYETETSQGIFKVNIMLSVAQAEADRDSEKIRSVMEFKRQNKEYIGGKVPVGYRVEGKTIVKDEKTRGIIEDMFEHYFQTFSKAGTADYILSKYPDFVRTRTRLVKIMSSPAYRGEMYGVKNYCEPYITEEQAQKINEVSSQKTWTDCRRRIYIFSGLMKCPICGCRLSGCAIGKKGKKYKVYHCPHSVAQKHKTYTRSEKKLETYMLNHIEEKIQLDVLRAEGRVKATGNDAEKRKKKLSSELGRINKMFEKGRITEEYYDERYEAISKELKELSQTAATEELETKKKIQSRFPDGWKDMYMQLGEQDKQVFWKSIVKEIKISPDTYVEDIIFF

SEQ ID NO: 9073 - protein, 445 aa, Unknown
  Description of Unknown: Integrase B9074 sequence
  SM00857,IPR006118,G3DSA:1.10.10.2600,IPR036162,PF13408, PS51737,IPR025827,G3DSA:3.40.50.1390,Coil,IPR006119, IPR038109,SSF53041,IPR011109,PTHR30461,PS00397, PS51736,cd00338,PF00239
MKRAALYVRVSTQEQKNSGLSVDSQIDALEKYCEEQGYTVAGVYNDAGISARKKYTKRPALLQLLEDCKKHEIDIILFTRLDRWFRAVAGYYEVQSVLDACKVPWRAIWEDYETETSQGIFKVNIMLSVAQAEADRDSEKIRSVMEFKRQNKEYIGGKVPVGYRVEGKKIVKDEKMRGIIEDMFEHYFQTFSKWGTADYILSKYPDFIRTRNRIVKIMSSPAYHGEMYGVKNYCEPYITEEQAQRIKEVSSQKSWVDCKRRIYIFSGLIRCPICGYKFSGRTMAKKEKRYKVYQCPRSAAKKHKTYTRSEPKLETYMLNHIEEKIQSDVLRAEGRVKAAGNDVEKRKKKLSSELGRINKMFEKGRITEEYYDERYEAISKELKELSQTAATEELETKKKIQSRFPDGWKDMYMQLDEQGKQVFWKSIVKEIKISPDTYVEDIIFF

SEQ ID NO: 9074 - protein, 445 aa, Unknown
  Description of Unknown: Integrase B9075 sequence
  SM00857,IPR006118,G3DSA:1.10.10.2600,IPR036162,PS51737, G3DSA:3.40.50.1390,Coil,IPR006119,IPR038109,IPR011109, SSF53041,PTHR30461,PS00397,PS51736,cd00338, PF00239
MKRAALYVRVSTQEQKNSGLSVDSQIDALEKYCEEQGYTVAGIYNDAGISARKKYTKRPALLQLLEDCKKQEIDIILFTRLDRWFRAVAGYYEVQSVLDACKVPWRAIWEDYETETSQGIFKVNIMLSVAQAEADRDSEKIRSVMEFKRNNKEYIGGKVPVGYRIEGKKIVKDEKTRGIIEDMFEHYFQTFSKAGTADYILSKYPGFVRTRTRLVKIMSSPAYRGEMYGVKNYCEPYITEEQAQKISEVSSQKTWTDCKRRIYIFSGLMKCPLCGCRLSGCAIGKKGKKYKVYHCPHSVAQKHKTYTRSEKKLETYMLDHIEEKIQLDVLKAEGRVKASGNDVEKRKKKLSSELGRINKMFEKGRITEEYYDERYEAISKELKELSQTAATEELETKKKIQSRFPDGWKDMYMQLNEQGKQVFWKSIVKEIKISPNEFVEDIIFF

SEQ ID NO: 9075 - protein, 445 aa, Unknown
  Description of Unknown: Integrase B9076 sequence
  SM00857,IPR006118,G3DSA:1.10.10.2600,IPR036162,PS51737, G3DSA:3.40.50.1390,Coil,IPR006119,IPR038109,IPR011109, SSF53041,PTHR30461,PS00397,PS51736,cd00338, PF00239
MKRAALYVRVSTQEQKNSGLSVDSQIDALEKYCEEQGYTVAGIYNDAGISARKKYTKRPALLRLLEDCRQCKIDIILFTRLDRWFRAVAGYYEVQSVLDACKVPWRAIWEDYETETSQGIFKVNIMLSVAQAEADRDSEKIRSVMEFKRQNKEYIGGKVPVGYRVEGKTIVKDEKTRGIIEDMFEHYFQTFSKMGTADYILNKYPDFIRTRTRIVKIMSSPAYHGEMYGVKNYCEPYITEEQAQKINEVSSQKTWTDCRRRIYIFSGLMKCPLCGCRLSGCAIGKKGKKYKVYHCPHSVAQKHKTYTRSEKKLETYMLNHIEEKIQLDVLRAEGRVKATGNDAEKRKKKLSSELGRINKMFEKGRITEEYYDERYEAISKELKELSQTAATEELETKKKIQSRFPDGWKDMYMQLGEQDKQVFWKSIVKEIKISPNEFVEDIIFF

SEQ ID NO: 9076 - protein, 445 aa, Unknown
  Description of Unknown: Integrase B9077 sequence
  SM00857,IPR006118,G3DSA:1.10.10.2600,IPR036162,PF13408, IPR025827,G3DSA:3.40.50.1390,PS51737,Coil,IPR006119, IPR038109,IPR011109,SSF53041,PTHR30461,PS00397, PS51736,cd00338,PF00239
MKRAALYVRVSTQEQKNSGLSVDSQIDALEKYCEEQGYTVAGIYNDAGISARKKYTKRPALLQLLEDCKKHEIDIILFTRLDRWFRAVAGYYEVQSVLDACKVPWRAIWEDYETETSQGIFKVNIMLSVAQAEADRDSEKIRSVMEFKRQNKEYIGGKVPVGYRVEGKKIVKDEKMRGIIEDMFEHYFQTFSKMETADYILSKYPDFIRTRTRIVKIMSSPAYHGEMYGVKNYCEPYITEEQAQRIKEVSSQKSWVDCKRRIYIFSGLIRCPICGYRFSGRTMAKKEKRYKVYQCPRSAAKKHKTYTRSEPKLETYMLNHIEEKIQLDVLRVEGRVKAAGSDVGKRKKKLSSELGRINKMFEKGRITEEYYDERYEAISKELKELSQTAATEELETKKKIQSRFPDGWKDMYMQLDEQGKQVFWKSIVKEIKISPNEFVEDIIFF

SEQ ID NO: 9077 - protein, 445 aa, Unknown
  Description of Unknown: Integrase B9078 sequence
  SM00857,IPR006118,G3DSA:1.10.10.2600,IPR036162,PS51737, G3DSA:3.40.50.1390,Coil,IPR006119,IPR038109,SSF53041, IPR011109,PTHR30461,PS00397,PS51736,cd00338, PF00239
MKRAALYVRVSTQEQKNSGLSVDSQIDALEKYCEEQGYTVAGIYNDAGISARKKYTKRPALLQLLDDCRQCKIDIILFTRLDRWFRAVAGYYEVQNVLDACKVPWRAIWEDYETETSQGIFKVNIMLSVAQAEADRDSEKIRSVMEFKRNNKEYIGGKVPVGYRIEGKKIVKDEKTRGIIEDMFEHYFQTFSKAGTADYILSKYPDFVRTRTRLVKIMSSPAYRGEMYGVKNYCEPYITEEQAQKINEVSSQKTWTDCRRRIYIFSGLMKCPLCGCRLSGCAIGKKGKKYKVYHCPHSVAQKHKTYTRSEKKLETYMLDHIEEKIQLDVLRAEGRVKAAGNDVGKRKKKLSSELGRINKMFEKGRITEEYYDERYEAISKELKELSQTAATEELETKKKIQSRFPDGWKDMYMQLGEQDKQVFWKSIVKEIKISPDTYVEDIIFF

SEQ ID NO: 9078 - protein, 445 aa, Unknown
  Description of Unknown: Integrase B9079 sequence
  SM00857,IPR006118,G3DSA:1.10.10.2600,IPR036162,PF13408, IPR025827,PS51737,G3DSA:3.40.50.1390,Coil,IPR006119, IPR038109,IPR011109,SSF53041,PTHR30461,PS00397, PS51736,cd00338,PF00239
MKRAALYVRVSTQEQKNSGLSVDSQIDALEKYCEEQGYTVAGVYNDAGISARKKYTKRPALLQLLEDCKKHEIDIILFTRLDRWFRAVAGYYEVQSVLDACKVPWRAIWEDYETETSQGVFKVNIMLSVAQAEADRDSEKIRSVMEFKRNNKEYIGGKVPVGYRVENKKIVKDEKMRGIIEDMFEHYFQTFSKWGTADYILSKYPDFIRTRTRIVKIMSSPAYHGEMYGVKNYCEPYITEEQAQRIKEVSSQKSWVDCKRRIYIFSGLIRCPICGYKFSGCTMVKKEKRYKVYRCPRSAAKKHKTYTRSEPKLETYMLNHIEEKIQLDVLRAEGRVKAAGNDVGKRKKKLSSELGRINKMFEKGRITEEYYDERYEAISKELKQLSQTAATEELETKKKIQSKFPDGWKDMYMQLDEQGKQVFWKSIVKEIKISPNEFVEDIIFF

SEQ ID NO: 9079 - protein, 445 aa, Unknown
  Description of Unknown: Integrase B9080 sequence
  SM00857,IPR006118,G3DSA:1.10.10.2600,IPR036162,PF13408, IPR025827,G3DSA:3.40.50.1390,PS51737,Coil,IPR006119, IPR038109,IPR011109,SSF53041,PTHR30461,PS00397, PS51736,cd00338,PF00239
MKRAALYVRVSTQEQKNSGLSVDSQIDALEKYCEEQGYIVAGIYNDAGISARKKYTKRPALLQLLEDCKKHEIDIILFTRLDRWFRAVAGYYEVQSVLDACKVPWRAIWEDYETETSQGIFKVNIMLSVAQAEADRDSEKIRSVMEFKRQNKEYIGGKVPVGYRVEGKKIVKDEKMRGIIEDMFEHYFQTFSKWGTADYILSKYPDFIRTRTRIVKIMSSPAYHGEMYGVKNYCEPYITEEQAQRIKEVSSQKSWVNCKRRIYIFSGLIRCPICGYRFSGRTMAKKEKRYKVYQCPRSAAKKHKTYTRSEPKLEKYMLDHIEEKIQLDVLRAEGRVKAAGNDVGKRKKKLSSELGRINKMFEKGRITEEYYDERYEAISKELKELSQTAATEELETKKKIQSKFPDGWKDIYMQLDEQGKQVFWKSIVKEIKISPNEFVEDIIFF

SEQ ID NO: 9080 - protein, 445 aa, Unknown
  Description of Unknown: Integrase B9081 sequence
  SM00857,IPR006118,G3DSA:1.10.10.2600,IPR036162,PS51737, G3DSA:3.40.50.1390,Coil,IPR006119,IPR038109,SSF53041, IPR011109,PTHR30461,PS00397,PS51736,cd00338, PF00239
MKRAALYVRVSTQEQKNSGLSVDSQIDALEKYCEEQGYTVAGIYNDAGISARKKYTKRPALLQLLEDCKQCKIDIILFTRLDRWFRAVAGYYEVQSVLDACKVPWRAIWEDYETETSQGIFKVNIMLSVAQAEADRDSEKIRSVMEFKRNNKEYIGGKVPVGYRIEGKKIVKDEKTRGIIEDMFEHYFQTFSKAGTADYILSKYPGFVRTRTRLVKIMSSPAYRGEMYGVKNYCEPYITEEQAQKINEVSSQKTWTDCRRRIYIFSGLMKCPICGCRLSGCAIGKKGKKYKVYHCPHSVAQKHKTYTRSEKKLETYMLNHIEEKIQLDVLRAEGRVKAGGNDAEKRKKKLSSELGRINKMFEKGRITEEYYDERYEAISKELKELSQTAATEELETKKKIQSRFPDGWKDMYMQLGEQDKQVFWKSIVKEIKISPDTYVEDIIFF

SEQ ID NO: 9081 - protein, 445 aa, Unknown
  Description of Unknown: Integrase B9082 sequence
  SM00857,IPR006118,G3DSA:1.10.10.2600,IPR036162,PS51737, G3DSA:3.40.50.1390,Coil,IPR006119,IPR038109,SSF53041, IPR011109,PTHR30461,PS00397,PS51736,cd00338, PF00239
MKRAALYVRVSTQEQKNSGLSVDSQIDALEKYCEEQGYTVAGIYNDAGISARKKYTKRPALLQLLEDCKQCKIDIILFTRLDRWFRAVAGYYEVQSVLDACKVPWRAIWEDYETETSQGIFKVNIMLSVAQAEADRDSEKIRSIMGFKRNNKEYIGGKVPVGYRIEGKKIVKDEKTRGIIEDMFEHYFQTFSKAGTADYILSKYPGFVRTRTRLVKIMSSPAYRGEMYGVKNYCEPYITEEQAQKINEVSSQKTWTDCRRRIYIFSGLMKCPICGCRLSGCAIGKKGKKYKVYHCPHSVAQKHKTYTRSEKKLETYMLNHIEEKIQLDVLRAEGRVKAGGNDAEKRKKKLSSELGRINKMFEKGRITEEYYDERYEAISKELKELSQTAATEELETKKKIQSRFPDGWKDMYMQLGEQDKQVFWKSIVKEIKISPDTYVEDIIFF

SEQ ID NO: 9082 - protein, 445 aa, Unknown
  Description of Unknown: Integrase B9083 sequence
  PTHR30461:SF3,IPR036162,PS51737,IPR011109,PTHR30461, PS00397,PF00239,G3DSA:1.10.10.2600,IPR006119,SSF53041, cd00338,SM00857,IPR025827,IPR038109,PS51736, IPR006118,PF13408,G3DSA:3.40.50.1390,PF07508,Coil
MKNKRVALYIRVSTEEQARQGLSLDAQLTDLRAYADKHKYNIVGVYTDDGASARKKPFSRRAFKQLIEDIKQNKIDRVLFIKLDRWFRSVKDYYKAQEILDTHKVDWETTQEDYNTTTTNGRLMLNIKLSIAQNESDMTSDRIHFVFAQKRARHEICSGKIPFGYSVQGKKLIPNENAKYVQPLFEHFVKTQNLTEAARWMCGHGFYYTYASISHVLKNERYIGRSHGDDNFCQPLVTEELFYRAQKIIKSKKLIKRTPTGRIFLFTGLIRCPMCGHPYTGIGCVGKNNGKTYYYYQCPQSVSPFKACTHRGRVTEKKIEEALLDSFDEAYKDFQYSVKKKQKQQPVTTDVDKLKRKLERLKELFLNELIELDEYKKTHAELSAAIAEVEAPKIQPSAPLNYYLPGGIRPYYEKMTREQRRQFWQQTVDRIDLDEDNTPRITFLS

SEQ ID NO: 9083 - protein, 445 aa, Unknown
  Description of Unknown: Integrase B9084 sequence
  SM00857,G3DSA:1.10.10.2600,IPR036162,PS51737,G3DSA:3.40.50.1390, IPR006119,IPR038109,PF07508,IPR011109,SSF53041, PF00239,PTHR30461,PS51736,Coil,cd00338
MNCKVAIYARESTEKQDIDTLVSMCEAEAKKLGFTHYRIYKDIGTGYSNEREEYLKLLENIKLGKIKTIIIYEQSRMTRDELEHQILYRLFREHNVKLYVMNRGWIDPNDENDSFISGLLNLLEAKEGRTIAKRVRDRMMHLKDEGNWTGGPAPLGYKLIDKKLVIVPEEAEKVKEVFRLFINGENRTTIANLFGYEPKKVFRLLKNPVYIGRLKKNQIVIKNKKAIENKKFEIVNGKHEAIIDIGTFELAQDIINGIKREVGGIAALQDLLYCRCGSKIYKHGENYYSCKNLSCKSVAIKRSEVLETVLTSLESVINDLGEVEESEEDNILSKIYLYKKELKKLEVKKEKIFNKYLEDQIGEDLFNKNNKEVSNQIEIVKSQIENLKEFQNNKLRAQETRENIKVYYDKIKNTKDDKKINRLLKIIISKIEFVNDYRFYIHLKF

SEQ ID NO: 9084 - protein, 445 aa, Unknown
  Description of Unknown: Integrase B9085 sequence
  PTHR30461:SF3,IPR036162,PS51737,IPR011109,PTHR30461, PS00397,PF00239,G3DSA:1.10.10.2600,IPR006119,SSF53041, cd00338,SM00857,IPR025827,IPR038109, PS51736,IPR006118,PF13408,G3DSA:3.40.50.1390,Coil
MNVIRGVGYIRVSTAEQATRGLSLDAQEAEIRAYAKAHGIELFNIYVDAGITARKRLDRREAFGQMMKDVDSGLIDEIIVMRLDRWFRNIYDYHKMMNEHLIPHGVNWSAVKEDYDTKTTNGRLMINLRLAIAEQECDTDGDRIRDIHDNQIANGIWIGGCAPPGYRIENKRLSIDPDMQPAVSYFFERLLSCGSVRRAMLDMNERHNLHFEYGQAIRMARSTTYCGVRRENYNYCPTYISQDEHAQIMAALEHNVRVRSADNARIHIFSGLLVCSCCGRRLAANTVRKKSVTWTAYRCHRAFGDHVCDNRHLVDERKVEAWLLDYLENGLSDYIVSASVADAQPVVVDNTAAIRERQERVKELFINGFIDLQEYKRRAAELEAKIQVPEKQQPRSMEKLKSLLERGVRAIYNDLSRGERQEFWRSIIREIPVNNGAVSGDPIFL

SEQ ID NO: 9085 - protein, 445 aa, Unknown
  Description of Unknown: Integrase B9086 sequence
  PTHR30461:SF3,SM00857,G3DSA:1.10.10.2600,IPR036162,PF13408, PS51737,G3DSA:3.40.50.1390,IPR025827,IPR006119,IPR038109, IPR011109,SSF53041,PF00239,PTHR30461,PS51736, Coil,cd00338
MKRVALYMRVSTEEQALHGYSLPAQKDALHQYAKDHNMTVVGEYVDEGISGRKSASKRPALARMLRDVEAGKIDQILFIKLDRWFRSVKEYYRVQEVLDRNKVTWRTILEDYNTESADGILKVNIMLSVAQNEAERTGERIKFVLDNKAQKKQVVGKQPYGYKIAIVEGEKKSVIDEETAPVVHDIFNTFDRTNSASLTTKYINEKHGTDFSAVFIRRLLHRSAYAGEYMGISGYRPQYISRERFDKNQEIFRGSHIKRTPTGRVYIFTGILFCAHCGHRMKGKYTTVKYYCCPRATDDYSCENHKHISELKIEKYLVSHIRRLMSEYIVAAETKESATKRSDAASEVMSLRQKIERLNDIYLEGNMDKETYRRRTEQLKQNLAQAEEQYQRSQPKNISHLKEILNTDFLADYDLLTDENKRSLWRRIITRIEMNDQQNLKVFFS

SEQ ID NO: 9086 - protein, 445 aa, Unknown
  Description of Unknown: Integrase B9087 sequence
  SM00857,IPR006118,G3DSA:1.10.10.2600,IPR036162,PS51737, G3DSA:3.40.50.1390,Coil,IPR006119,IPR038109,SSF53041, IPR011109,PTHR30461,PS00397,PS51736,cd00338, PF00239
MKRAALYVRVSTQEQKNSGLSVDSQIDALEKYCEEQGYTVAGIYNDAGISARKKYTKRPALLQLLEDCKKHEIDIILFTRLDRWFRAVAGYYEVQSVLDACKVPWRAIWEDYETETSQGIFKVNIMLSVAQAEADRDSEKIRSVMEFKRNNKEYIGGKVPVGYRIEGKKIVKDEKTRGIIEDMFEHYFQTFSKAGTADYILNKYPNFARTRTRLVKIMSSPAYRGEMYGVKNYCEPYITEEQAQKINEVSSQKTWTDCRRRIYIFSGLMKCPICGCRLSGCAIGKKGKKYKVYHCPHSVAQKHKTYTRSEKKLETYMLNHIEEKIQLDVLRAEGRVKAAGNDVGKRKKKLSSELGRINKMFEKGRITEEYYDERYEAISKELKELSQTAATEELETKKKIQSRFPDGWKDMYMQLGEQDKQVFWKSIVKEIKISPDTYVEDIIFF

SEQ ID NO: 9087 - protein, 445 aa, Unknown
  Description of Unknown: Integrase B9088 sequence
  SM00857,IPR006118,G3DSA:1.10.10.2600,IPR036162,PF13408, PS51737,G3DSA:3.40.50.1390,IPR025827,Coil,IPR006119, IPR038109,IPR011109,SSF53041,PTHR30461,PS00397, PS51736,cd00338,PF00239
MKRAALYVRVSTQEQKNSGLSVDSQIDALEKYCEEQGYTVAGIYNDAGISARKKYTKRPALLQLLEDCKKHEIDIILFTRLDRWFRAVAGYYEVQSVLDACKVPWRAIWEDYETETSQGIFKVNIMLSVAQAEADRDSEKIRSVMEFKRQNKEYIGGKVPVGYRVEGKRIVKDEKMRAIIEDMFEHYFQTFSKMETADYILSKYPDFIRTRTRIVKIMSSPAYHGEMYGVKNYCEPYITEEQAQRIKEVSSQKSWIDCKRRIYIFSGLIRCPICGYRFSGRTMAKEEKRYKVYQCPRSAAKKHKTYTRSEPKLETYMLNHIEEKIQLDVLRVEGRVKAAGSDVGKRKKKLSSELGRINKMFEKGRITEEYYDERYEAISKELKELSQTAATEELETKKKIQSRFPDGWKDMYMQLDEQGKQVFWKSIVKEIKISPNEFVEDIIFF

SEQ ID NO: 9088 - protein, 445 aa, Unknown
  Description of Unknown: Integrase B9089 sequence
  SM00857,IPR006118,G3DSA:1.10.10.2600,IPR036162,PS51737, G3DSA:3.40.50.1390,Coil,IPR006119,IPR038109,IPR011109, SSF53041,PTHR30461,PS00397,PS51736,cd00338, PF00239
MKRAALYVRVSTQEQKNSGLSVDSQIDALEKYCEEQGYTVAGIYNDAGISARKKYTKRPALLQLLEDCRQHKIDIILFTRLDRWFRAVAGYYEVQSVLDACKVPWRAIWEDYETETSQGIFKVNIMLSVAQAEADRDSEKIRSVMEFKRSNKEYIGGKVPVGYRVEGKKIVKDEETRGIIEDMFEHYFQTFSKAGTADYILNKYPDFIRTRTRIVKIMSSPAYHGEMYGVKNYCEPYITEEQAQKINEISSQKTWTDCKRRIYIFSGLMKCPLCGCRLSGCAIGKKGKKYKVYHCPHSVAQKHKTYTRSEKKLETYMLDHIEEKIQLDVLKAEGRVKAGGNDAEKRKKKLSSELGRINKMFEKGRITEEYYDERYESISKELKELSQTAATEELETKKKIQSKFPDGWKDMYMQLDEQGKQVFWKSIVKEIKISPDTYVEDIIFF

SEQ ID NO: 9089 - protein, 445 aa, Unknown
  Description of Unknown: Integrase B9090 sequence
  cd00338,SM00857,IPR006118,G3DSA:1.10.10.2600,IPR036162, PF13408,PS51737,G3DSA:3.40.50.1390,IPR025827,IPR006119, IPR038109,IPR011109,SSF53041,PTHR30461,PS00397, PS51736,Coil,PF00239
MQNVRIYARVSTAEQKKKDISIPVQIDACRRYCTDHNYNIVGTYIDNGYSASSIKKRKEFKRMIEDVRRDEYILFTRLDRFSRNILDANKIVEALDKKNVSIVSIFEDDINTSTADGRFMFNLRVSLSQREIEKDSERILDVMQAKVAKGEVLTGRLPVGYKIENKKPVIDENQVEMVKDTFSTYIDTGNWDVAARILSKKYNTYISDTKVRGIIKNRRYIGEFRGIKDYFPRIIDDETFFEANNISKNKYVKHSKNEVTYLFSGLLRCEFCGRRMASSHRKNLSNSNYYICSRRENGKTAQHFAKSERKIELALLNEFEKLLNDRILELDKAERKRNTLSEDNISKIKNLKTKMKRIKNLYIDGFISENEFKSKYSRTEKELLELEMNCSTDIEQKRERYQYILDNKILTLYKTFSREQKAIFWRTIIDHIVVHKDDSLDIFLR

SEQ ID NO: 9090 - protein, 445 aa, Unknown
  Description of Unknown: Integrase B9091 sequence
  SM00857,IPR006118,G3DSA:1.10.10.2600,IPR036162,PS51737, G3DSA:3.40.50.1390,Coil,IPR006119,IPR038109,SSF53041, IPR011109,PTHR30461,PS00397,PS51736,cd00338, PF00239
MKRAALYVRVSTQEQKNSGLSVDSQIDALEKYCEEQGYTVAGIYNDAGISARKKYTKRPALLQLLEDCKKHEIDIILFTRLDRWFRAVAGYYEVQSVLDACKVPWRAIWEDYETETSQGIFKVNIMLSVAQAEVDRDSEKIRSVMEFKRNNKEYIGGKVPVGYRIEGKKIVKDEKTRGIIEDMFEHYFQTFSKAGTADYILSKYPGFVRTRTRLVKIMSSPAYRGEMYGVKNYCEPYITEEQAQKINEVSSQKTWTDCRRRIYIFSGLMKCPICGCRLSGCAIGKKGKKYKVYHCPHSVAQKHKTYTRSEKKLETYMLNHIEEKIQLDVLRAEGRVKAGGNDAEKRKKKLSSELGRINKMFEKGRITEEYYDERYEAISKELKELSQTAATEELETKKKIQSRFPDGWKDMYMQLGEQDKQVFWKSIVKEIKISPDTYVEDIIFF

SEQ ID NO: 9091 - protein, 445 aa, Unknown
  Description of Unknown: Integrase B9092 sequence
  SM00857,IPR006118,G3DSA:1.10.10.2600,IPR036162,PS51737, G3DSA:3.40.50.1390,Coil,IPR006119,IPR038109,SSF53041, IPR011109,PTHR30461,PS00397,PS51736,cd00338, PF00239
MKRAALYVRVSTQEQKNSGLSVDSQIDALEKYCEEQGYTVAGIYNDAGISARKKYTKRPALLQLLEDCKKHEIDIILFTRLDRWFRAVAGYYEVQSVLDACKVPWRAIWEDYETETSQGIFKVNIMLSVAQAEADRDSEKIRSVMEFKRNNKEYIGGKVPVGYRIEGKKIVKDEKTRGIIEDMFEHYFQTFSKAGTADYILSKYPGFVRTRTRLVKIMSSPAYRGEMYGVKNYCEPYITEEQAQKINEVSSQKTWTDCRRRIYIFSGLMKCPICGCRLSGCAIGKKGKKYKVYHCPHSVAQKHKTYTRSEKKLETYMLNHIEEKIQLDVLRVEGRVKAGGNDAEKRKKKLSSELGRINKMFEKGRITEEYYDERYEAISKELKELSQTAATEELETKKKIQSRFPDGWKDMYMQLGEQDKQVFWKSIVKEIKISPDTYVEDIIFF

SEQ ID NO: 9092 - protein, 445 aa, Unknown
  Description of Unknown: Integrase B9093 sequence
  SM00857,IPR006118,G3DSA:1.10.10.2600,IPR036162,PS51737, G3DSA:3.40.50.1390,Coil,IPR006119,IPR038109,IPR011109, SSF53041,PTHR30461,PS00397,PS51736,cd00338, PF00239
MKRAALYVRVSTQEQKNSGLSVDSQIDALEKYCKEQGYIVAGIYNDAGISARKKYTKRPALLRLLEDCKKHEIDIILFTRLDRWFRAVAGYYEVQSVLDACKVPWRAIWEDYETETSQGIFKVNIMLSVAQAEADRDSEKIRSVMEFKRNNKEYIGGKVPVGYRIEGKKIVKDEKTRGIIEDMFEHYFQTFSKAGTADYILSKYPNLVRTRTRLVKIMSSPAYRGEMYGVKNYCEPYITEEQAQKINEVSSQKTWTDCKRRIYIFSGLMKCPLCGCRLSGCAIGKKGKKYKVYHCPHSVAQKHKTYTRSEKKLETYMLDHIEEKIQLDVLKAEGRVKASGNDVEKRKKKLSSELGRINKMFEKGRITEEYYDERYEAISKELKELSQTAATEELETKKKIQSRFPDDWKDMYMQLDEQGKQVFWKSIVKEIKISPNEFVEDIIFF

SEQ ID NO: 9093 - protein, 445 aa, Unknown
  Description of Unknown: Integrase B9094 sequence
  SM00857,IPR006118,G3DSA:1.10.10.2600,IPR036162,PF13408, PS51737,G3DSA:3.40.50.1390,IPR025827,Coil,IPR006119, IPR038109,SSF53041,IPR011109,PTHR30461,PS00397, PS51736,cd00338,PF00239
MKRAALYVRVSTQEQKNSGLSVDSQIDALKKYCEEQGYIVAGIYNDAGISARKKYTKRPALLQLLEDCKKHEIDIILFTRLDRWFRAVAGYYEVQSVLDACKVPWRAIWEDYETETSQGIFKVNIMLSVAQAEADRDSEKIRSVMEFKRQNKEYIGGKVPVGYRVEGKKIVKDEKMRGIIEDMFEHYFQTFSKMETADYILSKYPDFIRTRTRIVKIMSSPAYHGEMYGVKNYCEPYITEEQAQRIKEVSSQKSWVDCKRRIYIFSGLIRCPICGYRFSGRTMAKKEKRYKVYQCPRSAAKKHKTYTRSEPKLETYMLNHIEEKIQLDVLRVEGRVKAAGSDVGKRKKKLSSELGRINKMFEKGRITEEYYDERYEAISKELKELSQTAATEELETKKKIQSRFPDGWKDMYMQLDEQGKQVFWKSIVKEIKISPNEFVEDIIFF

SEQ ID NO: 9094 - protein, 445 aa, Unknown
  Description of Unknown: Integrase B9095 sequence
  SM00857,IPR006118,G3DSA:1.10.10.2600,IPR036162,PS51737, G3DSA:3.40.50.1390,Coil,IPR006119,IPR038109,SSF53041, IPR011109,PTHR30461,PS00397,PS51736,cd00338, PF00239
MKRAALYVRVSTQEQKNSGLSVDSQIDALEKYCEEQGYTVAGIYNDAGISARKKYTKRPALLQLLEDCKKHEIDIILFTRLDRWFRAVAGYYEVQNILDACKVPWRAIWEDYETETSQGIFKVNIMLSVAQAEADRDSEKIRSVMEFKRNNKEYIGGKVPVGYRIEGKKIVKDEKTRGIIEDMFEHYFQTFSKAGTADYILSKYPDFVRTRTRLVKIMSSPAYRGEMYGVKNYCEPYITEEQAQKINEVSSQKTWTDCRRRIYIFSGLMKCPLCGCRLSGCAIGKKGKKYKVYHCPHSVAQKHKTYTRSEKKLETYMLNHIEEKIQLDVLRAEGRVKAGGNDAEKRKKKLSSELGRINKMFEKGRITEEYYDERYEAISKELKELSQTAATEELETKKKIQSRFPDGWKDMYMQLGEQDKQVFWKSIIKEIKISPDTYVEDIIFF

SEQ ID NO: 9095 - protein, 445 aa, Unknown
  Description of Unknown: Integrase B9096 sequence
  SM00857,IPR006118,G3DSA:1.10.10.2600,IPR036162,PS51737, G3DSA:3.40.50.1390,Coil,IPR006119,IPR038109,SSF53041, IPR011109,PTHR30461,PS00397,PS51736,cd00338, PF00239
MKRAALYVRVSTQEQKNSGLSVDSQIDALEKYCEEQGYTVAGIYNDAGISARKKYTKRPALLQLLEDCRQCKIDIILFTRLDRWFRAVAGYYEVQNVLDACKVPWRAIWEDYETETSQGIFKVNIMLSVAQAEADRDSEKIRSVMEFKRNNKEYIGGKVPVGYRIEGKKIVKDEKTRGIIEDMFEHYFQTFSKAGTADYILSKYPDFVRTRTRLVKIMSSPAYRGEMYGVKNYCEPYITEEQAQKINEVSSQKTWTDCRRRIYIFSGLMKCPLCGCRLSGCAIGKKGKKYKVYHCPHSVAQKHKTYTRSEKKLETYMLDHIEEKIQLDVLKAEGRVKAGGNDAEKRKKKLSSELGRINKMFEKGRITEEYYDERYEAISKELKELSQTAATEELETKKKIQSKFPDGWKDMYMQLDEQGKQVFWKSIVKEIKISPDTYVEDIIFF

SEQ ID NO: 9096 - protein, 445 aa, Unknown
  Description of Unknown: Integrase B9097 sequence
  SM00857,IPR006118,G3DSA:1.10.10.2600,IPR036162,PS51737, G3DSA:3.40.50.1390,Coil,IPR006119,IPR038109,SSF53041, IPR011109,PTHR30461,PS00397,PS51736,cd00338, PF00239
MKRAALYVRVSTQEQKNSGLSVDSQIDALEKYCEEQGYTVAGIYNDAGISARKKYTKRPALLQLLEDCKKHEIDIILFTRLDRWFRAVAGYYEVQSVLDACKVPWRAIWEDYETETSQGIFKVNIMLSVAQAEADRDSEKIRSVMEFKRNNKEYIGGKVPVGYRIEGKKIVKDEKTRGIIEDMFEHYFQTFSKAGTADYILSKYPGFVRTRTRLVKIMSSPAYRGEMYGVKNYCEPYITEEQAQKINEVSSQKTWTDCRRRIYIFSGLMKCPICGCRLSGCAIGKKGKKYKVYHCPHSVAQKHKTYTRSEKKLETYMLNHIEEKIQLDVLRAEGRVKAGGNDVEKRKKKLSSELGRINKMFEKGRITEEYYDERYEAISKELKELSQTAATEELETKKKIQSRFPDGWKDMYMQLGEQDKQVFWKSIVKEIKISPDTYVEDIIFF

SEQ ID NO: 9097 - protein, 445 aa, Unknown
  Description of Unknown: Integrase B9098 sequence
  SM00857,IPR006118,G3DSA:1.10.10.2600,IPR036162,PS51737, G3DSA:3.40.50.1390,Coil,IPR006119,IPR038109,IPR011109, SSF53041,PTHR30461,PS00397,PS51736,cd00338, PF00239
MKRAALYVRVSTQEQKNSGLSVDSQIDALEKYCEEQGYTVAGIYNDAGISARKKYTKRPALLQLLEDCKKHEIDVILFTRLDRWFRAVAGYYEVQSVLDACKVPWRAIWEDYETETSQGIFKVNIMLSVAQAEADRDSEKIRSVMEFKRNNKEYIGGKVPVGYRIEGKKIVKDEKTRGIIEDMFEHYFQTFSKAGTADYILSKYPGFVRTRTRLVKIMSSPAYRGEMYGVKNYCEPYITEEQAQKINEVSSQKTWTDCRRRIYIFSGLMKCPICGCRLSGCAIGKKGKKYKVYHCPHSVAQKHKTYTRSEKKLETYMLNHIEEKIQLDVLRAEGRVKAGGNDAEKRKKKLSSELGRINKMFEKGRITEEYYDERYEAISKELKELSQTAATEELETKKKIQSRFPDGWKDMYMQLEEQGKQVFWKSIVKEIKISPNEFVEDIIFF

SEQ ID NO: 9098 - protein, 445 aa, Unknown
  Description of Unknown: Integrase B9099 sequence
  SM00857,IPR006118,G3DSA:1.10.10.2600,IPR036162,PF13408, IPR025827,PS51737,Coil,G3DSA:3.40.50.1390,IPR006119, IPR038109,SSF53041,IPR011109,PTHR30461,PS00397, PS51736,cd00338,PF00239
MKRAALYVRVSTQEQKNSGLSVDSQIDALEKYCEEQEYIVAGIYNDAGISARKKYTKRPALLRLLEDCKKHEIDIILFTRLDRWFRAVAGYYEVQSVLDACKVPWRAIWEDYETETSQGIFKVNIMLSVAQAEADRDSEKIRSVMEFKRQNKEYIGGKVPVGYRVEGKKIVKDENMREIIEDMFEHYFQTFSKWGTADYILSKYPDFIRTRNRIVKIMSSPAYHGEMYGVKNYCEPYITEEQAQRIKEVSSQKSWVDCKRRIYIFSGLIRCPICGYKFSGCTMVKKEKRYKVYRCPRSAAKKHKTYTRSEPKLETYMLNHIEEKIQSDVLRAEGRVKAAGNDIGKRKKKLSSELGRINKMFEKGRITEEYYDERYEAISKELKELSQTAATEELETKKKIQSKFPDGWKDMYMQLDEQGKQVFWKSIVKEIKISPNEFVEDIIFF

SEQ ID NO: 9099 - protein, 445 aa, Unknown
  Description of Unknown: Integrase B9100 sequence
  PTHR30461:SF3,IPR036162,PS51737,IPR011109,PTHR30461, PS00397,PF00239,G3DSA:1.10.10.2600,IPR006119,SSF53041, cd00338,SM00857,IPR025827,IPR038109,PS51736, IPR006118,PF13408,G3DSA:3.40.50.1390,Coil
MRAALYIRVSTEEQARHGLSLEDQKNNLTQFSKSHGMKIAGIYEDAGISARKPYKKRPALLRLLEDCKAGKIDLILFIKLDRWFRNVGNYYAVQEILDQYGVSWQATQEDYETTTASGRLKVNIMLSVAQDEADRTSERIKFVFEGKRARLEPLTGNIPFGYKIEGKSFKKDESKEALVNDFFKKYLASGSISKTSEFIREKYGVLMRYHLIDKMLRSTTYYGKYYNMDGMCPAYITKEDHEQIQAMRRKVVRKAKNNRTYLFSGLVVCPECGNRMGARINTKQTYVFYNCNGHYTKQNGCQNRVNLGERKIEEYLLATVANKFHEYKANFSALKNAEINKRSRAEISAAKSKLNKLKDLYLNDIITLEELKTDREALLAKISDLEKAALPEQKQDFESIDRVLTENWKESYDGLNREEKREFWRIIVKEIKIYPDRHIEYSLNV

SEQ ID NO: 9100 - protein, 445 aa, Unknown
  Description of Unknown: Integrase B9101 sequence
  SM00857,IPR006118,IPR036162,PF13408,PS51737, G3DSA:3.40.50.1390,Coil,IPR025827,IPR006119,IPR011109, SSF53041,PTHR30461,PS00397,PS51736,cd00338, PF00239
MEGKKRAAIYVRVSTVEQKEHGLSVDNQLDALKNYCQERGFSIAGIYNDAGISARKKYKSRPALLKLLEDCQKHKIDIILFTKLDRWFRSVADYYAVQQVLDGAKVPWRAIWEDYETETSAGVFKVNIMLSVAQAESDRTSERIKAVLEYKREHGHIIAGRMPLGYIRTSPSTIDYDPATKDAMQAFFDTYLDTYSPVAAMDAARKLGLRMSRKTAHFILDKEPYYGTYYGVDVPAYITPEQHKIIENARVHYPRTPKDDRVYIFTGLIFCASCGARMGSKLSKHIRANGEIIERGCYQCCTKVRRKDVCEKPAFVMEHKLEDYLIEHMSELITDYEASIAQSQEKAKDAEKEISRIKGKLQRLKDVYLDGDMGRAEYVEKTSQLKADMAELESQRVPLSPIKRLPDNWEEMYWQLSKGGKRDFWHRTIRRIEIDGKKVSKVFFL

SEQ ID NO: 9101 - protein, 445 aa, Unknown
  Description of Unknown: Integrase B9102 sequence
  PTHR30461:SF3,IPR036162,PS51737,IPR011109,PTHR30461, PS00397,PF00239,G3DSA:1.10.10.2600,IPR006119,SSF53041, cd00338,SM00857,IPR025827,IPR038109,PS51736, IPR006118,PF13408,G3DSA:3.40.50.1390,PF07508,Coil
MKNKRVALYIRVSTEEQARQGLSLDAQLTDLRSYADKHKYNIVGIYTDDGASARKKPFSRRAFKQLIEDIKQNKIDRVLFIKLDRWFRSVKDYYKAQEILDTHKVDWETTQEDYNTTTTNGRLMLNIKLSIAQNESDMTSDRIHFVFAQKRARHEICSGKIPFGYSVQDKKLVPNENAKYVQPLFEHFVKTQNLTEAARWMCGHGFYYTYASISHVLKNERYIGRSHGDDNFCQPLVTEDVFYKAQKIIKSKKLIKRTPTGRIFLFTGLIRCPMCGHPYTGIGCVGKNNGKTYYYYQCPQSVSPFKACTHRGRVTEKKIEEALLDSFDEAYKDFQYSVKKKQKQQPVTTDIDKLKRKLERLKELFLNELIDLDEYKKTHAELSAAIAEAETPKIQPSTPLNYYLPGGIRPYYEKMTREQRRQFWHQTVDRIDIDEDDRPRITFIS

SEQ ID NO: 9102 - protein, 445 aa, Unknown
  Description of Unknown: Integrase B9103 sequence
  SM00857,IPR006118,G3DSA:1.10.10.2600,IPR036162,PS51737, G3DSA:3.40.50.1390,Coil,IPR006119,IPR038109,IPR011109, SSF53041,PTHR30461,PS00397,PS51736,cd00338, PF00239
MKRVALYVRVSTQEQKNSGLSVDSQIDALEKYCEEQGYTVAGIYNDAGISARKKYTKRPALLQLLEDCKKHEIDIILFTRLDRWFRAVAGYYEVQSVLDACKVPWRAIWEDYETETSQGIFKVNIMLSVAQAEADRDSEKIRSVMEFKRQNKEYIGGKVPVGYRIEGKKIVKDEKTRGIIEDMFDHYFQTFSKAGTADYILSKYPDFVRTRTRLVKIMSSPAYRGEMYGVKNYCEPYITEEQAQKINEVSSQKTWTDCRRRIYIFSGLMKCPLCGCRLSGCAIGKKGKKYKVYHCPHSVAQKHKTYTRSEKKLETYMLNHIEEKIQLDVLRAEGRVKAGGNDAEKRKKKLSSELGRINKMFEKGRITEEYYDERYEAISKELKELSQTAATEELETKKKIQSRFPDGWKDMYMQLGEQDKQVFWKSIVKEIKISPDTYVEDIIFF

SEQ ID NO: 9103 - protein, 445 aa, Unknown
  Description of Unknown: Integrase B9104 sequence
  SM00857,IPR006118,G3DSA:1.10.10.2600,IPR036162,PS51737, G3DSA:3.40.50.1390,Coil,IPR006119,IPR038109,SSF53041, IPR011109,PTHR30461,PS00397,PS51736,cd00338, PF00239
MKRAALYVRVSTQEQKNSGLSVDSQIDALEKYCEEQGYVVAGIYNDAGISARKKYTKRPALLQLLEDCKKHEIDIILFTRLDRWFRAVAGYYEVQSVLDACKVPWRAIWEDYETETSQGIFKVNIMLSVAQAEADRDSEKIRSVMEFKRNNKEYIGGKVPVGYRIEGKKIVKDEKTRGIIEDMFEHYFQTFSKAGTADYILSKYPDFVITRTRLVKIMSSPAYRGEMYGVKNYCEPYITEEQAQKINEVSSQKTWTDCKRRIYIFSGLMKCPLCGCRLSGCAIGKKEKKYKVYHCPHSVAQKHKTYTRSEKKLETYMLDHIEERIQLDVLKAEGRVKASGNDVEKRKKKLSSELGRINKMFEKGRITEEYYDERYEAISKELKELSQTAATEELETKKKIQSRFPDGWKDMYMQLDEQGRQVFWKSIVKEIKISPNEFVEDIIFF

SEQ ID NO: 9104 - protein, 445 aa, Unknown
  Description of Unknown: Integrase B9105 sequence
  SM00857,IPR006118,G3DSA:1.10.10.2600,IPR036162,PF13408, IPR025827,G3DSA:3.40.50.1390,PS51737,PS00397,IPR006119, IPR038109,IPR011109,SSF53041,PTHR30461,Coil, PS51736,cd00338,PF00239
MKRAALYVRVSTQEQKNSGLSVDSQIDALEKYCEEHGYMVAGVYNDAGISARKKYTKRPALLQLLEDCRKHEIDIILFTRLDRWFRAVAGYYEVQSVLDACKVPWRAIWEDYETETSQGIFKVNIMLSVAQAEADRDSEKIRSVMEFKRQNKEYIGGKVPVGYRVEGKKIVKDENMREIIEDMFEHYFQTFSKMETADYILSKYPDFIRTRTRIVKIMSSPAYHGEMYGVKNYCEPYITEEQAQRIKEVSSQKSWADCKRRIYIFSGLIRCPICGYRFSGRTMAKKEKRYKVYQCPRSAAKKHKTYTRSEPKLEKYMLDHIEEKIQLDVLRAEGHVKAAGNDVGKRKKKLSSELGRINKMFEKGRITEEYYDERYEAISKELKELSQTAATEELETKKKIQSKFPDGWKDMYMQLDEQGKQVFWKSIVKEIKISPDEFVEDIIFF

SEQ ID NO: 9105 - protein, 445 aa, Unknown
  Description of Unknown: Integrase B9106 sequence
  SM00857,IPR006118,G3DSA:1.10.10.2600,IPR036162,PF13408, IPR025827,PS51737,Coil,G3DSA:3.40.50.1390,IPR006119, IPR038109,SSF53041,IPR011109,PTHR30461,PS00397, PS51736,cd00338,PF00239
MKRAALYVRVSTQEQKNSGLSVDSQIDALEKYCEEQEYIVAGIYNDAGISARKKYTKRPALLRLLEDCKKHEIDIILFTRLDRWFRAVAGYYEVQSVLDACKVPWRAIWEDYETETSQGIFKVNIMLSVAQAEADRDSEKIRSVMEFKRQNKEYIGGKVPVGYRVEGKKIVKDENMREIIEDMFEHYFQTFSKWGTADYILSKYPDFIRTRNRIVKIMSSPAYHGEMYGVKNYCEPYITEEQAQRIKEVSSQKSWVDCKRRIYIFSGLIRCPICGYRFSGRTMAKKEKRYKVYQCPRSAAKKHKTYTRSEPKLETYMLNHIEEKIQLDVLRVEGRVKAAGSDVGKRKKKLSSELGRINKMFEKGRITEEYYDERYEAISKELKELSQTAATEELETKKKIQSRFPDGWKDMYMQLDEQGKQVFWKSIVKEIKISPNEFVEDIIFF

SEQ ID NO: 9106 - protein, 445 aa, Unknown
  Description of Unknown: Integrase B9107 sequence
  SM00857,IPR006118,G3DSA:1.10.10.2600,IPR036162,PS51737, G3DSA:3.40.50.1390,Coil,IPR006119,IPR038109,SSF53041, IPR011109,PTHR30461,PS00397,PS51736,cd00338, PF00239
MKRAALYVRVSTQEQKNSGLSVDSQIDALEKYCEEQGYAVAGIYNDAGISARKKYTKRPALLKLLEDCKKHEIDIILFTRLDRWFRAVAGYYEVQNVLDACKVPWRAIWEDYETETSQGIFKVNIMLSVAQAEADRDSEKIRSVMEFKRNNKEYIGGKVPVGYRIEGKKIVKDEKTRGIIEDMFERYFQTFSKAGTADYILSKYPDFVITRTRLVKIMSSPAYRGEMYGVKNYCEPYITEEQAQKINEVSSQKTWTDCKRRIYIFSGLMKCPLCGCRLSGCAIGKKEKKYKVYHCPHSVAQKHKTYTRSEKKLETYMLDHIEEKIQLDVLKAEGRVKVSGNDVEKRKKKLSSELGRINKMFEKGRITEEYYDERYEAISKELKELSQTAATEELETKKKIQSRFPDGWKDMYMQLDEQGRQVFWKSIVKEIKISPNEFVEDIIFF

SEQ ID NO: 9107 - protein, 445 aa, Unknown
  Description of Unknown: Integrase B9108 sequence
  PTHR30461:SF3,IPR036162,PS51737,IPR011109,PTHR30461, PS00397,PF00239,G3DSA:1.10.10.2600,IPR006119,SSF53041, cd00338,SM00857,IPR025827,IPR038109,PS51736, IPR006118,PF13408,G3DSA:3.40.50.1390,PF07508,Coil
MKKMNVGYLRVSTENQTEKYGLDLQKNKIIEKAEKEGDKWYIDGGYSGSTLDRPDIQRLLEDSKNGYIEKVYIYKLDRVSRDTIDTLVILYRTLPKYNVKIVSATEELSFDTPMDKMKIGIDALMGQYEREIISMRTKAGMLERVKSGLWMGGGRVPFGYYYDRNDGILHPKEDEAEKVRTMYRLYNDGYSCQKISDMLGMKGERIVIQILKRKSNVGYIEYKGNIYKGKHEAIIDEETFYKTQRFMEKRANNSYICNKFLLSGLCFCGKCGARMRYKKWANRHVLECYSRDGYKEYMVKNPNCDNKRPDAKDVEKEVSDCFKRFAVNITGRREKQISKKELIEKEMKSTVDKLKKLYELYATNESETLLEVIGKSEKRVKELRRELSKETRKKSLTTPERIEKIKKISDVWDKLDVKEQNKVLKECIDKIVITDGNIDIYFNLL

SEQ ID NO: 9108 - protein, 445 aa, Unknown
  Description of Unknown: Integrase B9109 sequence
  SM00857,IPR006118,G3DSA:1.10.10.2600,IPR036162,PF13408, PS51737,IPR025827,G3DSA:3.40.50.1390,Coil,IPR006119, IPR038109,IPR011109,SSF53041,PTHR30461,PS00397, PS51736,cd00338,PF00239
MKRCALYVRVSTQEQKNSGLSVDSQIAALEKYCEEQGYTVAGVYNDAGISARKKYTKRPALLQLLEDCKQRKIDIILFTRLDRWFRAVAGYYEVQSVLDACKVPWRAIWEDYETETSQGIFKVNIMLSVAQAEADRDSEKIRSVMEFKRQNKEYIGGKVPVGYRVEGKKIVKDENMRGIIEDMFEHYFQTFSKMETADYILSKYPDFIRTRTRIVKIMSSPAYHGEMYGVKNYCEPYITEEQAQRIKEVSSQKSWVDCKRRIYIFSGLIRCPICGYRFSGRTMAKKEKRYKVYQCPRSAAKKHKTYTRSEPKLEKYMLDHIEEKIQLDVLRAEGRVKAAGNDVGKRKKKLSSELGRINKMFEKGRITEEYYDERYEAISKELKELSQTAATEELETKKKIQSRFPDGWKDMYMQLDEQGKQVFWKSIVKEIKISPNEFVEDIIFF

SEQ ID NO: 9109 - protein, 445 aa, Unknown
  Description of Unknown: Integrase B9110 sequence
  PTHR30461:SF3,IPR036162,PS51737,IPR011109,PTHR30461, PS00397,PF00239,G3DSA:1.10.10.2600,IPR006119,SSF53041, cd00338,SM00857,IPR025827,IPR038109,PS51736, IPR006118,PF13408,G3DSA:3.40.50.1390,Coil
MNVIRGVGYIRVSTAEQATRGLSLDAQEAEIRTYAKAHGIELFNIYVDAGITARKRLDRREAFGQMMKDVDSGLIDEIIVMRLDRWFRNIYDYHKMMNEHLIPHGVNWSAVKEDYDTKTTNGRLMINLRLAIAEQECDTDGDRIRDIHDNQIANGIWIGGCAPPGYRIENKRLSIDPDMQPAVSYFFERLLSCGSVRRAMLDMNERHNLHFEYGQAIRMARSTTYCGVRRENYNYCPTYISQDEHARIMAALEHNVRVRSADNARIHIFSGLLVCSCCGRRLAANTVRKKSVTWTAYRCHRAFGDHVCDNRHLVDERKVEAWLLDYLENGLSDYIVSASVADAQPVVVDNTAAIRERQERVKELFINGFIDLQEYKKRATELEAKIQVPEKQPPRSMEKLKSLLERGVRAIYNDLSRGERQEFWRSIIREIPVNNGAVSGDPIFL

SEQ ID NO: 9110 - protein, 444 aa, Unknown
  Description of Unknown: Integrase B9111 sequence
  PTHR30461:SF3,cd00338,SM00857,IPR006118,IPR036162, PF13408,PS51737,G3DSA:3.40.50.1390,IPR025827,IPR006119, SSF53041,IPR011109,PTHR30461,PS00397,PS51736, Coil,PF00239
MEGKKRAAIYVRVSTAEQRDHGLSVDSQIDALQKYCRENGLEVAGIYNDAGISARKKYKARPALLQLIQDCKDHKIDIILFTKLDRWFRSVADYYEVQSQLDAAKVPWRAIWEDYETETSAGVFKVNIMLSIAQAESDRTSERIRAVNEYRKSQGYIIVGKMPLGYIRTSASTIDFDPQTKEAMQAFFDTYLNTYSPVQAMDAAAEKGLKMSRKTAHFLLDKEPYYGTYYGVSVPGYITPAQHELIQQARQHYPRQPKADRVYIFTGLIFCASCGARMGSKCTCYTSYGKPKEKLYYQCRMRTVRRGECKNAAFIMEHNLESYMIDHLEELIVDYNASVQKLAAKAKSTEGKIEKIKGRLERLKDIYLDGDMSRAEYLEKTKELKAQLAELESLAAPALPVSQMPDNWKEIYEQLSRQGKRDFWHRVVRRIEIKRHSVDKVYFV

SEQ ID NO: 9111 - protein, 444 aa, Unknown
  Description of Unknown: Integrase B9112 sequence
  PTHR30461:SF3,IPR036162,PS51737,IPR011109,PTHR30461, PS00397,PF00239,G3DSA:1.10.10.2600,IPR006119,SSF53041, cd00338,SM00857,IPR025827,IPR038109,PS51736, IPR006118,PF13408,G3DSA:3.40.50.1390,PF07508,Coil
MRKNLRVAGYARVSTDEQKKYGYSIQAQTEEITQWCNDNGHALQHIYIDEGFSASTMKRPQLQAMLSNLKNLDAIAFTRLDRLSRNVLEANKMLELLQQNNVAMISICEDDINTSTANGLFMFNLKVNLAEHELKKGSERIKAVFEYKIAQGQPITGNVPFGYRIATENGNKRIVIDESKAPIVKDIFDSFLLHQSVHHTVEYVNQKYGLSRPYMSYMHILKNEFYAGSYRGNANYAEPYITKETYNAVQTALQANIRTGIQRHVYLFTGLLRCPECRSKLVGVSHPKGGKRYYYYRCNNAHSVHTCSHKKHYAELATEKYLLSNLDTLLKDHIATISSITSETKDTTEKELKELRKELDNLNYIFIKKRMPVSTYERLYAETEDKIKRLESFKPQSTDHLNQFLSSGWRSIYDNLTREKKRTLWRNVLDSVHVSPDGIEVFFK

SEQ ID NO: 9112 - protein, 444 aa, Unknown
  Description of Unknown: Integrase B9113 sequence
  PTHR30461:SF3,IPR036162,PS51737,IPR011109,PTHR30461, PS00397,PF00239,G3DSA:1.10.10.2600,IPR006119,SSF53041, cd00338,SM00857,IPR025827,IPR038109,PS51736, IPR006118,PF13408,G3DSA:3.40.50.1390,Coil
MKKNLRIGGYARVSTDEQKKYGYSIQAQIDEIKNWCSEHNHQLQNIYIDEGYSASNMKRPQLQAMLSNLRNLDAIAFTRLDRLSRNVLEANKMLELLQQNNVAMISICEDDINTSTANGLFMFNLKVNLAEHELKKGSERIKAVFEYKIAQGQPITGNVPFGYMIATENGNKRIVIDESKAPIVKDIFASFLLHQSVHHTVEYVNNKYGLSRPYMSYMHILKNEFYAGSYRGNSNYAEPYITKETYNDVQTALQANIRTGVQRHVYLFTGLLRCPECRSKLVGVSHPKGGKRYYYYRCNNAHSVHTCTHKKHYAELATEKYLLSNLDTLLKDHIATISSVTSETKNTTEKELKELRKELDNLNYIFIKKRMPVSTYERLYAETEDKIKRLESFKPKSTDHLNQFLNSGWRSIYDNLTRENKRTLWRNVLDSVHVSPDGIEVFFK

SEQ ID NO: 9113 - protein, 444 aa, Unknown
  Description of Unknown: Integrase B9114 sequence
  PTHR30461:SF3,IPR036162,PS51737,IPR011109,PTHR30461, PS00397,PF00239,G3DSA:1.10.10.2600,IPR006119,SSF53041, cd00338,SM00857,IPR025827,IPR038109,PS51736, IPR006118,PF13408,G3DSA:3.40.50.1390,PF07508,Coil
MRKNLRVAGYARVSTDEQKKYGYSIQAQTEEITQWCNDNGHSLQHIYIDEGYSASNMKRPQLQSMLSNLRDLDAIAFTRLDRLSRNVLEANKMLELLQQNNVAMISICEDDINTSTANGLFMFNLKVNLAEHELKKGSERIKAVFEYKIAQGQPITGNVPFGYRIATENGNKRIVIDESKAPIVKDIFDSFLLHQSVHHTVEYVNQKYGLSRPYMSYMHILKNEFYAGSYRGNSNYAEPYITRETYNAVQTALQANIRTGIQRHVYLFTGLLRCPECRSKLVGVSHPKGGKRYYYYRCNNAHSVHTCTHKKHYAELATEKYLLSNLDTLLKDHIATISSVTSEAKDTTEKELKELRKELDNLNYIFIKKRMPVSTYERLYAETEDKIKRLESFKPQSTDHLNQFLSSGWRSIYDNLTRENKRTFWRNVLDSVHVSPDGIEVFFK

SEQ ID NO: 9114 - protein, 444 aa, Unknown
  Description of Unknown: Integrase B9115 sequence
  PTHR30461:SF3,IPR036162,PS51737,IPR011109,PTHR30461, PS00397,PF00239,G3DSA:1.10.10.2600,IPR006119,SSF53041, cd00338,SM00857,IPR025827,IPR038109,PS51736, IPR006118,PF13408,G3DSA:3.40.50.1390,Coil
MRKNLRVAGYARVSTDEQKKYGYSIQAQTEEITQWCNDNGHSLQHIYIDEGFSASNMKRPQLQSMLSNLRDLDAIAFTRLDRLSRNVLEANKMLELLQQNNVAMISICEDDINTSTANGLFMFNLKVNLAEHELKKGSERIKAVFEYKVAQGQPITGNVPFGYRIATENGNKRIVIDESKAPIVKDIFDSFLLHQSVHYTVEYVNNKYGLSRPYMSYMHILKNEFYAGSYRGNSNYAEPYITRETYNAVQTALQSNIRTGIQRHVYLFTGLLRCPECRSKLVGVSHPKGGKRYYYYRCNNAHSVHTCTHKKHYAELATEKYLLSNLDNLLKDHIATISSVTSETKNTTEKELKELRKELDNLNYIFIKKRMPVSTYERLYAETEDKIKRLESFKPQSTDHLNQFLNNGWHSIYDNLTRENKRTLWRNVLDSVHVSPDKIKVFFK

SEQ ID NO: 9115 - protein, 444 aa, Unknown
  Description of Unknown: Integrase B9116 sequence
  PTHR30461:SF3,IPR036162,PS51737,IPR011109,PTHR30461, PS00397,PF00239,G3DSA:1.10.10.2600,IPR006119,SSF53041, cd00338,SM00857,IPR025827,IPR038109,PS51736, IPR006118,PF13408,G3DSA:3.40.50.1390,Coil
MRKKLRVAGYARVSTDEQKKYGYSIQAQTEEITQWCNDNDHDIIHIYIDEGFSASTMKRPQLQSMLSNLRNLDAIAFTRLDRLSRNVLEANKMLELLQQNNVAMISICEDDINTSTANGLFMFNLKVNLAEHELKKGSERIKAVFEYKIAQGQPITGNVPFGYMIVTENGNKRIVIDESKAPIVKDIFKSFLLHQSVHYTVEYVNNKYGLSRPYMSYMHILKNEFYAGSYRGNSNYAEPYITKDTYNAVQTALQANIRTGIQRHVYLFTGLLRCPECRSKLVGVSHPKGGKRYYYYRCNNAHSVHTCSHKKHYAELATEKYLLSNLDALLKNHIATISSITYETKNTTEKELKELRKELDNLNYIFIKKRMPVNTYERLYAETEDKIKRLESFKPQSTDHLNQFLNSGWRSIYESLTRENKRTLWRNVLDSVHVSPDKIEVFFK

SEQ ID NO: 9116 - protein, 444 aa, Unknown
  Description of Unknown: Integrase B9117 sequence
  PTHR30461:SF3,IPR036162,PS51737,IPR011109,PTHR30461, PS00397,PF00239,G3DSA:1.10.10.2600,IPR006119,SSF53041, cd00338,SM00857,IPR025827,IPR038109,PS51736, IPR006118,PF13408,G3DSA:3.40.50.1390,Coil
MKKNLRIGGYARVSTDEQKKYGYSIQAQIDEIKNWCSEHNHQLQNIYIDEGYSASNMKRPQLQAMLSNLRNLDAIAFTRLDRLSRNVLEANKMLELLQQNNVAMISICEDDINTSTANGLFMFNLKVNLAEHELKKGSERIKAVFEYKIAQGQPITGNVPFGYRIATENGNKRIVIDESKAPIVKDIFASFLLHQSVHYTVEYVNNKYGLSRPYMSYMHILKNEFYAGSYRGNSNYAEPYITKETYNAVQTALQSNIRTGIQRHVYLFTGLLRCPECRSKLVGVSHPKGGKRYYYYRCNNAHSVHTCTHKKHYAELSTEKYLLSNLDTLLKDHIATISSITSETKNTTEKELKELRKELDNLNYIFIKKRMPVSTYERLYAETEDKIKRLESFKPQSTDHLNQFLSSGWRSIYDNLTRENKRTLWRNVLDSVHVSPDKIEVFFK

SEQ ID NO: 9117 - protein, 444 aa, Unknown
  Description of Unknown: Integrase B9118 sequence
  PTHR30461:SF3,IPR036162,PS51737,IPR011109,PTHR30461, PS00397,PF00239,G3DSA:1.10.10.2600,IPR006119,SSF53041, cd00338,SM00857,IPR025827,IPR038109,PS51736, IPR006118,PF13408,G3DSA:3.40.50.1390,Coil
MRKNLRVAGYARVSTDEQKKYGYSIQAQTEEITQWCNDNDHALQHIYIDEGFSASTMKRPQLQAMLSNLKNLDAIAFTRLDRLSRNVLEANKMLELLQQNNVAMISICEDDINTSTANGLFMFNLKVNLAEHELKKGSERIKAVFEYKIAQGQPITGNVPFGYRIATENGNKRIAIDESKAPIVKDIFDSFLLHQSVHYTVEYVNNKYGLSRPYMSYMHILKNEFYAGSYRGNSNYAEPYITKETYNAVQTALQSNIRTGIQRHVYLFTGLLRCPECRSKLVGVSHPKGGKRYYYYRCNNAHSVHTCSHKKHYAELATEKYLLSNLDTLLKDHIATISSVTSETKNTTEKELKELRKELDNLNYIFIKKRMPVSTYERLYAETEDKIKRLESFKPKSTDHLNQFLNSGWRSIYDNLTRENKRTLWRNVLDSVHVSPDGIEIFFK

SEQ ID NO: 9118 - protein, 444 aa, Unknown
  Description of Unknown: Integrase B9119 sequence
  SM00857,IPR006118,G3DSA:1.10.10.2600,IPR036162,PS51737, G3DSA:3.40.50.1390,IPR006119,IPR038109,SSF53041,IPR011109, PF00239,PTHR30461,PS00397,PS51736,Coil, cd00338
MKRAALYVRVSTQEQKNSGLSVDSQIDALEKYCEEQGYTVAGIYNDAGISARKKYTKRPALLQLLEDCKQCKIDIILFTRLDRWFRAVAGYYEVQSVLDACKVPWRAIWEDYETETSQGIFKVNIMLSVAQAEADRDSEKIRSVMEFKRNNKEYIGGKVPVGYRIEGKKIVKDEKTRGIIEDMFEHYFQTFSKAGTADYILSKYPGFVRTRTRLVKIMSSPAYRGEMYGVKNYCEPYITEEQAQKISEVSSQKTWTDCKRRIYIFSGLMKCPLCGCRLSGCAIGKKGKKYKVYHCPHSVAQKHKTYTRSEKKLETYMLDHIEEKIQLDVLRAEGRVKAAGNDVGNRKKKLSSELGRLNKMFEKGRITEEYYDERYEAISKELKELSQNVTEELENKKKIQSRFPDGWKDMYMQLDEQGKQVFWKSIIKEIKISPNEFVEDIIFF

SEQ ID NO: 9119 - protein, 444 aa, Unknown
  Description of Unknown: Integrase B9120 sequence
  SM00857,IPR006118,G3DSA:1.10.10.2600,IPR036162,PS51737, G3DSA:3.40.50.1390,Coil,IPR006119,IPR038109,IPR011109, SSF53041,PTHR30461,PS00397,PS51736,cd00338, PF00239
MKRAALYVRVSTQEQKNSGLSVDSQIDALEKYCEEQGYTVAGIYNDAGISARKKYTKRPALLQLLEDCKQCKIDIILFTRLDRWFRAVAGYYEVQSVLDACKVPWRAIWEDYETETSQGIFKVNIMLSVAQAEADRDSEKIRSVMEFKRNNKEYIGGKVPVGYRIEGKKIVKDEKTRGIIEDMFEHYFQAFSKAGTADYILSKYPGFVRTRTRLVKIMSSPAYRGEMYGVKNYCEPYITEEQAQKISEVSSQKTWTDCKRRIYIFSGLMKCPLCGCRLSGCAIGKKGKKYKVYHCPHSVAQKHKTYTRSEKKLETYMLDHIEEKIQLDVLRAEGRVKAAGNDVGNRKKKLSSELGRLNKMFEKGRITEEYYDERYEAISKELKELSQNVTEELENKKKIQSRFPDGWKDMYMQLDEQGKQVFWKSIIKEIKISPNEFVEDIIFF

SEQ ID NO: 9120 - protein, 444 aa, Unknown
  Description of Unknown: Integrase B9121 sequence
  PTHR30461:SF3,IPR036162,PS51737,IPR011109,PTHR30461, PS00397,PF00239,G3DSA:1.10.10.2600,IPR006119,SSF53041, cd00338,SM00857,IPR025827,IPR038109,PS51736, IPR006118,PF13408,G3DSA:3.40.50.1390,PF07508,Coil
MKKKLRVAGYARVSTDEQKKYGYSIQAQTEEITQWCNDNGHALQHIYIDEGYSASTMKRPQLQSMLSNLKNLDAIAFTRLDRLSRNVLEANKMLELLQQNNVAMISICEDDINTSTANGLFMFNLKVNLAEHELKKGSERIKAVFEYKVAQGQPITGNVPFGYRIATENGNKRIAIDESKAPIVKDIFESFLLHQSVHHTVEYVNKKYGLSRPYMSYMHILKNEFYAGSYRGNSNYAEPYITRETYNAVQTALQANIRTGIQRHVYLFTGLLRCPECRSKLVGVSHPKGGKRYYYYRCNNAHSVHTCTHKKHYAELSTEKYLLSNLDTLLKDHIATISSITSETKNTTEKELKELRKELDNLNYIFIKKRMPVSTYERLYAETEDKIKRLESFKPQSTDHLKQFLNSGWRSIYENLTRENKRTLWRNVLDSVNVSPDGIEVFFK

SEQ ID NO: 9121 - protein, 444 aa, Unknown
  Description of Unknown: Integrase B9122 sequence
  PTHR30461:SF3,IPR036162,PS51737,IPR011109,PTHR30461, PS00397,PF00239,G3DSA:1.10.10.2600,IPR006119,SSF53041, cd00338,SM00857,IPR025827,IPR038109,PS51736, IPR006118,PF13408,G3DSA:3.40.50.1390,Coil
MRKNLRVAGYARVSTDEQKKYGYSIQAQTEEITQWCNDNDHDLQHIYIDEGFSASTMKRPQLQSMLSNLKNLDAIAFTRLDRLSRNVLEANKMLELLQQNNVAMISICEDDINTSTANGLFMFNLKVNLAEHELKKGSERIKAVFEYKIAQGQPITGNVPFGYRIATENGNKRIVIDESKAPIVKDIFASFLLHQSVHYTVEYVNQKYGLSRPYMSYMHILKNEFYAGSYRGNANYAEPYITKETYNAVQTALQANIRTGIQRHVYLFTGLLRCPECRSKLVGVSHPKGGKRYYYYRCNNAHSVHTCSHKKHYAELATEKYLLSNLDTLLKDHIATISSITSETKDTTEKELKELRKELDNLNYIFIKKRMPVSTYERLYAETEDKIKRLESFKPQSTDHLNQFLSSGWRSIYDNLTRENKRTLWRNVLDSVHVSPDGIEVFFK

SEQ ID NO: 9122 - protein, 444 aa, Unknown
  Description of Unknown: Integrase B9123 sequence
  PTHR30461:SF3,SM00857,IPR006118,IPR036162,PF13408, PS51737,IPR025827,G3DSA:3.40.50.1390,IPR006119,IPR011109, SSF53041,PF00239,PTHR30461,PS00397,PS51736, Coil,cd00338
MEGKKRAAIYVRVSTAEQRDHGLSVDSQIDALQKYCRENSLEVAGIYNDAGISARKKYKARPALLQLIQDCKDHKIDIILFTKLDRWFRSVADYYEVQSQLDAAKVPWRAIWEDYETETSAGVFKVNIMLSIAQAESDRTSERIRAVNEYRKSQGYIIVGKMPLGYIRTSASTIDFDPKTKDAMQTFFDTYLNTCSPVQAMDAAAEKGLKMSRKTAHFLLDKEPYYGTYYGVSVPGYITPAQHELIQQARQHYPRQPKADRVYIFTGLIFCASCGARMGSKCTCYTSYGKPKEKLYYQCRMRTVRRGECKNAAFIMEHNLESYMIDHLEELIIDYNASVQKLAAKAKSTEGKIEKIKGRLERLKDIYLDGDMSRAEYLEKTKELKAQLAELESLAAPALPVSQMPDNWREIYEQLSRQGKRDFWHRVVRKIEIKRHSVDKVYFV

SEQ ID NO: 9123 - protein, 444 aa, Unknown
  Description of Unknown: Integrase B9124 sequence
  PTHR30461:SF3,IPR036162,PS51737,IPR011109,PTHR30461, PS00397,PF00239,G3DSA:1.10.10.2600,IPR006119,SSF53041, cd00338,SM00857,IPR025827,IPR038109,PS51736, IPR006118,PF13408,G3DSA:3.40.50.1390,Coil
MRKNLRVAGYARVSTDEQKKYGYSIQAQTEEITQWCNDNDHNLIHIYIDEGFSASTMKRPQLQAMLSNLKNLDAIAFTRLDRLSRNVLEANKMLELLQQNNVAMISICEDDINTSTANGLFMFNLKVNLAEHELKKGSERIKAVFEYKVAQGQPITGNVPFGYKIITESGNKRIAIDESKAPIVKDIFDSFLLHQSVHHTVEYVNNKYGLSRPYMSYMHILKNEFYAGSYRGNANYAEPYITKETYNAVQTALQANIRTGVQRHVYLFTGLLRCPECRSKLVGVSHPKGGKRYYYYRCNNAHSVHTCSHKKHYAELATEKYLLSNLDTLLKDHIATISSITSETKSTTEKELKELRKELDNLNYIFIKKRMPVSTYERLYVETEDKIKRLESFKPKSTDHLNQFLNSGWRSIYDNLTRENKRTLWRNVLDSVNVSPDGIEVFFK

SEQ ID NO: 9124 - protein, 444 aa, Unknown
  Description of Unknown: Integrase B9125 sequence
  PTHR30461:SF3,IPR036162,PS51737,IPR011109,PTHR30461, PS00397,PF00239,G3DSA:1.10.10.2600,IPR006119,SSF53041, cd00338,SM00857,IPR025827,IPR038109,PS51736, IPR006118,PF13408,G3DSA:3.40.50.1390,Coil
MRKKLRVAGYARVSTDEQKKYGYSIQAQTEEITQWCNDNDHILQHIYVDEGYSASTMKRPQLQSMLSNLRNLDAIAFTRLDRLSRNVLEANKMLELLQQNNVAMISICEDDINTSTANGLFMFNLKVNLAEHELKKGSERIKAVFEYKIAQGQPITGNVPFGYRIVTENGNKRIVIDNSKAPIVKDIFESFLLHQSVHYTVEYVNQKYGLSRPYMSYMHILKNEFYAGSYRGNSNYAEPYITKDTYNAVQTALQANIRTGIQRHTYLFTGLLRCPECRSKLVGVSHPKGGKRYYYYRCNNAHSVHTCSHKKHYAELATEKYLLSNLDNLLKDHIATISSVTSETKNTTEKELKELRKELDNLNYIFIKKRMPVSTYERLYAETEDKIKRLESFKPQSTDHLNQFLNSGWRSIYENLTRENKRTLWRNVLDSVHVSPDKIEVFFK

SEQ ID NO: 9125 - protein, 444 aa, Unknown
  Description of Unknown: Integrase B9126 sequence
  PTHR30461:SF3,IPR036162,PS51737,IPR011109,PTHR30461, PS00397,PF00239,G3DSA:1.10.10.2600,IPR006119,SSF53041, cd00338,SM00857,IPR025827,IPR038109,PS51736, IPR006118,PF13408,G3DSA:3.40.50.1390,Coil
MRKNLRVAGYARVSTDEQKKYGYSIQAQTEEITQWCNDNGHSLQHIYIDEGYSASNMKRPQLQSMLSNLRDLDAIAFTRLDRLSRNVLEANKMLELLQQNNVAMISICEDDINTSTANGLFMFNLKVNLAEHELKKGSERIKAVFEYKIAQGQPITGNVPFGYRIATESGNKRIAIDESKAPIVKDIFDSFLLHQSVHYTVEYVNNKYGLSRPYMSYMHILKNEFYAGSYRGNSNYAEPYITKETYNAVQTALQSNIRTGIQRHVYLFTGLLRCPECRSKLVGVSHTKGGKRYYYYRCNNAHSVHTCTHKKHYAELATEKYLLSNLDTLLKDHIATISSVTSETKNTTEKELKELRKELDNLNYIFIKKRMPVSTYERLYAETEDKIKRLESFKPKSTDHLNQFLNSGWRSIYDNLTRENKRTLWRNVLDSVHVSPDGIEVFFK

SEQ ID NO: 9126 - protein, 444 aa, Unknown
  Description of Unknown: Integrase B9127 sequence
  PTHR30461:SF3,IPR036162,PS51737,IPR011109,PTHR30461, PS00397,PF00239,G3DSA:1.10.10.2600,IPR006119,SSF53041, cd00338,SM00857,IPR025827,IPR038109,PS51736, IPR006118,PF13408,G3DSA:3.40.50.1390,Coil
MRKKLRVAGYARVSTDEQKKYGYSIQAQTEEITQWCNDNEHALQHIYIDEGYSASTMKRPQLQSMLSNLKNLDAIAFTRLDRLSRNVLEANKMLELLQQNNVAMISICEDDINTSTANGLFMFNLKVNLAEHELKKGSERIKAVFEYKIAQGQPITGNVPFGYRIATENGNKRIVIDESKAPIVKDIFSSFLLHQSVHYTVEYVNNKYGLSRPYMSYMHILKNEFYAGSYRGNSNYAEPYITKDTYNAVQTALQANIRTGIQRHTYLFTGLLRCPECRSKLVGVSHPKGGKRYYYYRCNNAHSVHTCSHKKHYAELATEKFLLSNLDDLLKNHIATISSITSETKDTTEKELKELRKELDNLNYIFIKKRMPVSTYERLYAETEDKIKRLESFKPQSTDHLNQFLNSGWRSIYDNLTRENKRTLWRNVLESVHVSPDKIEVFFK

SEQ ID NO: 9127 - protein, 444 aa, Unknown
  Description of Unknown: Integrase B9128 sequence
  PTHR30461:SF3,cd00338,SM00857,IPR006118,IPR036162, PF13408,PS51737,G3DSA:3.40.50.1390,IPR025827,IPR006119, SSF53041,IPR011109,PTHR30461,PS00397,PS51736, Coil,PF00239
MEGKKRAAIYVRVSTAEQRDHGLSVDSQIDALQKYCRENGLEVAGIYNDAGISARKKYKARPALLQLIQDCKDHKIDIILFTKLDRWFRSVADYYEVQSQLDAAKVPWRAIWEDYETETSAGVFKVNIMLSIAQAESDRTSERIRAVNEYRKSQGYIIVGKMPLGYIRTSASTIDFDPKTKDAMQTFFDTYLNTYSPVQAMDAAAEKGLKMSRKTAHFLLDKEPYYGTYYGVSVPGYITPAQHELIQQARQHYPRQPKADRVYIFTGLIFCASCGARMGSKCTCYTSYGKPSEKLYYQCRMRTVRRGECKNAAFVMEHNLESYMIDHLEELIVDYNASVQKLAAKAKSTEGKIEKIKGRLERLKDIYLDGDMSRAEYLEKTKELKAQLAELESLAAPALPVSQMPDNWKEIYEQLSRQGKRDFWHRVVRRIEIKRHSVDKVYFV

SEQ ID NO: 9128 - protein, 444 aa, Unknown
  Description of Unknown: Integrase B9129 sequence
  SM00857,IPR006118,G3DSA:1.10.10.2600,IPR036162,PF13408, PS51737,IPR025827,G3DSA:3.40.50.1390,IPR006119,IPR038109, IPR011109,SSF53041,PTHR30461,PS00397,PS51736, cd00338,PF00239
MLRCAIYIRVSTEEQKINGLSIEAQSAALTEYAVRNNLLITDYYIDAGLTARKKLQHRKELLRLLEDISNNKIDIIIFTKLDRWFRNIADYYKVQEILDLHKVNWKTIFEDYDTSTANGRLHINIMLSIAQDEADRTSERIKIVFENKRAKGEVPGWKAPLGYKIKDSKLLLDDDTKRIAIDIFEHYDLHHSIMGCVRMAKERYDYKIYDYSIRRMLENKTYIGEFRGYKNFCEALITSDLFYRIKNYREVKEYKNQRKAGRVYLFSSLILCKDCNHSMTCCFTKQHQKAGVKEYHYYRCKEAILGCCIHKKRLREDNLEEYLLQNICAGLGNYIIQINRSEKQEKTPILNIEKLSKKLEKLKDLYLDDLIDKESYRKEYDALQKHIKLSSIKPNKIKVEQMPLQYNLKELYYSLSIEERKIFWLGILDCITVDSQNRIQIFYR

SEQ ID NO: 9129 - protein, 444 aa, Unknown
  Description of Unknown: Integrase B9130 sequence
  PTHR30461:SF3,IPR036162,PS51737,IPR011109,PTHR30461, PS00397,PF00239,G3DSA:1.10.10.2600,IPR006119,SSF53041, cd00338,SM00857,IPR025827,IPR038109,PS51736, IPR006118,PF13408,G3DSA:3.40.50.1390,Coil
MRKKLRVAGYARVSTDEQKKYGYSIQAQIDEIKNWCSEHNHQLQHIYIDEGFSASTMKRPQLQAMLSSLRGLDAIAFTRLDRLSRNVLEANKMLELLQQNNVAMISICEDDINTSTANGLFMFNLKVNLAEHELKKGSERIKAVFEYKVAQGQPITGNVPFGYRIATENGNKRIVIDESKAPIVKDIFSSFLLHQSVHHTVEYVNNKYGLSRPYMSYMHILKNEFYAGSYRGNSNYAEPYITKDTYNAVQTALQSNIRTGIQRHVYLFTGLLRCPECRSKLVGVSHPKGGKRYYYYRCNNAHSVHTCTHKKHYAELATEKYLLSNLDALLKDHIATISSITSETKNTTEKELKELRKELDNLNYIFIKKRMPVNTYERLYAETEDKIKRLESFKPQSTDHLNQFLNSGWRSIYDNLTRENKRTLWRNVLDSVHVSPDKIEVFFK

SEQ ID NO: 9130 - protein, 444 aa, Unknown
  Description of Unknown: Integrase B9131 sequence
  SM00857,IPR006118,G3DSA:1.10.10.2600,IPR036162,PS51737, G3DSA:3.40.50.1390,IPR006119,IPR038109,IPR011109,SSF53041, PF00239,PTHR30461,PS00397,PS51736,Coil, cd00338
MKRAALYVRVSTQEQKNSGLSVDSQIDALEKYCEEQGYTVAGIYNDAGISARKKYTKRPALLQLLEDCKKQEIDIILFTRLDRWFRAVAGYYEVQSVLDACKVPWRAIWEDYETETSQGIFKVNIMLSVAQAEADRDSEKIRSVMEFKRSNKEYIGGKVPVGYRVENKKIVKDEKMRGIIEDMFEHYFQTFSKMETADYILSKYPDFVRTRTRLVKIMSSPAYRGEMYGVKNYCEPYITEEQAQKINEVSSQKTWTDCKRRIYIFSGLMKCPICGCRLSGCAIGKKEKKYKVYHCPHSVAQKHKTYTRSEKKLETYMLDHIEEKIQLDVLKAEGRVKAAGNDVGNRKKKLSSELGRLNKMFEKGRITEEYYDERYEAISKELKELSQNVTEELENKKKIQSRFPDGWKDMYMQLDEQGKQVFWKSIIKEIKISPNEFVEDIIFF

SEQ ID NO: 9131 - protein, 444 aa, Unknown
  Description of Unknown: Integrase B9132 sequence
  PTHR30461:SF3,IPR036162,PS51737,IPR011109,PTHR30461, PS00397,PF00239,G3DSA:1.10.10.2600,IPR006119,SSF53041, cd00338,SM00857,IPR025827,IPR038109,PS51736, IPR006118,PF13408,G3DSA:3.40.50.1390,Coil
MRKKLRVAGYARVSTDEQKKYGYSIQAQTEEITQWCNDNGHDLQHIYIDEGYSASTMKRPQLQSMLSNLKNLDAIAFTRLDRLSRNVLEANKMLELLQQNDVAMISICEDDINTSTANGLFMFNLKVNLAEHELKKGSERIKAVFEYKIAQGQPITGNVPFGYMIVTENGNKRIAIDESKAPIVKDIFDSFLLHQSVHHTVEYVNNKYGLSRPYMSYMHILKNEFYAGSYRGNSNYTEPYITRETYNAVQTALQANIRTGIQRHVYLFTGLLRCPECRSKLVGVSHPKGGKRYYYYRCNNAHSVHTCTHKKHYAELSTEKYLLSNLDDLLKNHIAKISSVTSETKNTTEKELKELRKELDNLNYIFIKKRMPVNTYERLYAETEDKIKRLESFKPQSTDHLKQFLNSGWRSIYDNLTRENKRTLWRNILDSVHVSPDGIEVFFK

SEQ ID NO: 9132 - protein, 444 aa, Unknown
  Description of Unknown: Integrase B9133 sequence
  PTHR30461:SF3,IPR036162,PS51737,IPR011109,PTHR30461, PS00397,PF00239,G3DSA:1.10.10.2600,IPR006119,SSF53041, cd00338,SM00857,IPR025827,IPR038109,PS51736, IPR006118,PF13408,G3DSA:3.40.50.1390,PF07508
MRVALYARVSTEEQAVHGLSIGVQQDTLRSWADGNNYTIVGMYTDAGISARKAASKRPALQQMLDDVRAGKIDMVAFTKLDRWFRNVAEYYKVQAVLDAYNVSWKALEEDYETATSAGRFKVNIMLSVAESEADRTAERIKVVNKNKREKGMCHNGHPTLGIKVKDGKIVEDPETADIVRDIFDYYVRTQSITQTSRYLLDKYKIVRAYRNMKSLLKNRRYVGYADNGQLLYAPIVDPTTFELAQEIMAQRSARHSGDFTQKHTYIFSSITVCGECGRRLTYRMNRRHNKSGTTEYVYGRCPRHASGTCGNATSVREDILEAYMLDHLIIECEKYNAIVAQQNATPKPSVDKNAIKRKMQKLKDLYLSDLIDREVYESDYTELRKALEAPEPEDQREIDIGQLRSALALYDDLEPSDKHEFWRRTLKKISIEDDGEINFTVSVP

SEQ ID NO: 9133 - protein, 444 aa, Unknown
  Description of Unknown: Integrase B9134 sequence
  PTHR30461:SF3,IPR036162,PS51737,IPR011109,PTHR30461, PS00397,PF00239,G3DSA:1.10.10.2600,IPR006119,SSF53041, cd00338,SM00857,IPR025827,IPR038109,PS51736, IPR006118,PF13408,G3DSA:3.40.50.1390,Coil
MRKKLRVAGYARVSTDEQKKYGYSIQAQIDEITQWCNDNDHDLLNIYIDEGFSASTMKRPQLQLMLSNLKNLDAIAFTRLDRLSRNVLEANKMLELLQQNNVAMISICEDDINTSTANGLFMFNLKVNLAEHELKKGSERIKAVFEYKVAQGQPITGNVPFGYRIATENGNKRIVIDESKAPIVKDIFSSFLLHQSVHHTVEYVNNKYGLSRPYMSYMHILKNEFYAGSYRGNSNYAEPYITKDTYNAVQTALQANIRTGIQRHVYLFTGLLRCPECRSKLVGVSHPKGGKRYYYYRCNNAHSVHTCTHKKHYAELATEKYLLSNLDELLKNHIATISSITSETKDTTEKELKELRKELDNLNYIFIKKRMPVSTYERLYAETEDKIKRLESFKPQSTDHLNQFLNSGWRSIYDNLTRENKRTLWRNVLDSVHVSPDKIEVFFK

SEQ ID NO: 9134 - protein, 444 aa, Unknown
  Description of Unknown: Integrase B9135 sequence
  PTHR30461:SF3,IPR036162,PS51737,IPR011109,PTHR30461, PS00397,PF00239,G3DSA:1.10.10.2600,IPR006119,SSF53041, cd00338,SM00857,IPR025827,IPR038109,PS51736, IPR006118,PF13408,G3DSA:3.40.50.1390,PF07508,Coil
MRKNLRVAGYARVSTDEQKKYGYSIQAQTEEITQWCNDNDHNLIHIYIDEGYSASNMKRPQLQSMLSNLRDLDAIAFTRLDRLSRNVLEANKMLELLQQNDVAMISICEDDINTSTANGLFMFNLKVNLAEHELKKGSERIKAVFEYKIAQGQPITGNVPFGYRIATENGNKRIVIDESKAPIVKDIFESFLLHQSVHYTVEYVNNKYGLSRPYMSYMHILKNEFYAGSYRGNHNYAEPYITKETYNAVQTALQANIRTGIQRHVYLFTGLLRCPECRSKLVGVSHPKGGKRYYYYRCNNAHSVHTCTHKKHYAELATEKYLLSNLDALLKDHIATISSITSETKNTTEKELKELRKELDNLNYIFIKKRMPVSTYERLYAETEDKIKRLESFKPKSTDHLNQFLSSGWRSIYDNLTRENKRTLWRNVLDSVHVSPDGIEIFFK

SEQ ID NO: 9135 - protein, 444 aa, Unknown
  Description of Unknown: Integrase B9136 sequence
  PTHR30461:SF3,IPR036162,PS51737,IPR011109,PTHR30461, PS00397,PF00239,G3DSA:1.10.10.2600,IPR006119,SSF53041, cd00338,SM00857,IPR025827,IPR038109,PS51736, IPR006118,PF13408,G3DSA:3.40.50.1390,PF07508,Coil
MRKNLRVAGYARVSTDEQKKYGYSIQAQTEEITQWCNDNDHNLIHIYIDEGYSASNMKRPQLQSMLSNLRDLDAIAFTRLDRLSRNVLEANKMLELLQQNDVAMISICEDDINTSTANGLFMFNLKVNLAEHELKKGSERIKAVFEYKIAQGQPITGNVPFGYRIATENGNKRIVIDESKAPIVKDIFESFLLHQSVHYTVEYVNNKYGLSRPYMSYMHILKNEFYAGSYRGNANYAEPYITKETYNAVQTALQANIRTGVQRHVYLFTGLLRCPECRSKLVGVSHPKGGKRYYYYRCNNAHSVHTCSHKKHYAELATEKYLLSNLDTLLKDHIATISSITSETKSTTEKELKELRKELDNLNYIFIKKRMPVSTYERLYVETEDKIKRLESFKPKSTDHLNQFLNSGWRSIYDNLTRENKRTLWRNVLDSVNVSPDGIEVFFK

SEQ ID NO: 9136 - protein, 444 aa, Unknown
  Description of Unknown: Integrase B9137 sequence
  PTHR30461:SF3,cd00338,SM00857,IPR006118,IPR036162, PF13408,PS51737,G3DSA:3.40.50.1390,IPR025827,IPR006119, SSF53041,IPR011109,PTHR30461,PS00397,PS51736, Coil,PF00239
MEGKKRAAIYVRVSTAEQRDHGLSVDSQIDALQKYCRENGLEVAGIYNDAGISARKKYKARPALLQLIQDCKDHKIDIILFTKLDRWFRSVADYYEVQSQLDAAKVPWRAIWEDYETETSAGVFKVNIMLSIAQAESDRTSERIRAVNEYRKSQGYIIVGKMPLGYIRTSASTIDFDPQTKEAMQTFFDTYLNTYSPVQAMDAAAEKGLKMSRKTAHFLLDKEPYYGTYYGVSVPGYITPAQHELIQQARQHYPRQPKADRVYIFTGLIFCASCGARMGSKCTCYTSYGKPSEKLYYQCRMRTVRRGECKNAAFIMEHNLESYMIDHLEELIIDYNASVQKLAAKAKSTEGKIEKIKGRLERLKDIYLDGDMSRAEYLEKTKELKAQLAELESLAAPALPVSQMPDNWKEIYEQLSRQGKRDFWHRVVRRIEIKRHSVDKVYFV

SEQ ID NO: 9137 - protein, 444 aa, Unknown
  Description of Unknown: Integrase B9138 sequence
  PTHR30461:SF3,IPR036162,PS51737,IPR011109,PTHR30461, PS00397,PF00239,G3DSA:1.10.10.2600,IPR006119,SSF53041, cd00338,SM00857,IPR025827,IPR038109,PS51736, IPR006118,PF13408,G3DSA:3.40.50.1390,PF07508,Coil
MRKNLRVAGYARVSTDEQKKYGYSIQAQTEEITQWCNDNGHVLQHIYIDEGYSASNMKRPQLQSMLSNLRDLDAIAFTRLDRLSRNVLEANKMLELLQQNNVAMISICEDDINTSTANGLFMFNLKVNLAEHELKKGSERIKAVFEYKIAQGQPITGNVPFGYRIATENGNKRIVIDESKAPIVKDIFDSFLLHQSVHHTVEYVNQKYGLSRPYMSYMHILKNEFYAGSYRGNANYAEPYITKETYNAVQTALQSNIRTGIQRHVYLFTGLLRCPECRSKLVGVSHPKGGKRYYYYRCNNAHSVHTCTHKKHYAELATEKYLLSNLDNLLKDHIATISSITSETKNTTEKELKELRKELDNLNYIFIKKRMPVSTYERLYAETEDKIKRLESFKPQSTDHLNQFLSSGWRSIYDNLTRENKRTLWRNVLDSVHVSPDGIEVFFK

SEQ ID NO: 9138 - protein, 444 aa, Unknown
  Description of Unknown: Integrase B9139 sequence
  PTHR30461:SF3,IPR036162,PS51737,IPR011109,PTHR30461, PS00397,PF00239,G3DSA:1.10.10.2600,IPR006119,SSF53041, cd00338,SM00857,IPR025827,IPR038109,PS51736, IPR006118,PF13408,G3DSA:3.40.50.1390,PF07508,Coil
MRKNLRVAGYARVSTDEQKKYGYSIQAQTEEITQWCNDNDHALQHIYIDEGYSASNMKRPQLQAMLSNLRDLDAIAFTRLDRLSRNVLEANKMLELLQQNNVAMISICEDDINTSTANGLFMFNLKVNLAEHELKKGSERIKAVFEYKIAQGQPITGNVPFGYKITTENGNKRIVIDNSKAPIVKDIFESFLLHQSVHHTVEYVNNKYGLSRPYMSYMHILKNEFYAGSYRGNSNYAEPYITRETYNAVQTALQANIRTGIQRHVYLFTGLLRCPECRSKLVGVSHPKGGKRYYYYRCNNAHSVHTCTHKKHYAELSTERYLLSNLDDLLKNHIATISSITSETKDTTEKELKELRKELDNLNYIFIKKRMPVNTYERLYAETEDKIKRLESFKPQSTDHLNQFLNSGWRSIYDNLTRENKRTLWRNVLDSVHVSPDGIEVFFK

SEQ ID NO: 9139 - protein, 444 aa, Unknown
  Description of Unknown: Integrase B9140 sequence
  SM00857,G3DSA:1.10.10.2600,IPR036162,PS51737,G3DSA:3.40.50.1390, IPR006119,IPR038109,PF07508,IPR011109,SSF53041, PTHR30461,Coil,PS51736,cd00338,PF00239
MKRAVIYIRESTKFQDPDTQEKECRAYCKENDFQIVKTYRDIASGKKNDRKGFLQMLDDLDEDRFDVLVLWELSRSTRDFITYKTLLDTLIQNNKELHSLQEGILTQDDIDVEFSNDIRALINAHERKRVGRRIKFRKNFKTREGYWTNGQAPFGYKLDNGVLIPDEEEAPVVKEIFELFIAGATIREIGEKFNIPWRRISRVLTNVVYLGKLKVNETEMINDKRVRNKEVEIIEGKHAAIINEDTFSLANSLKRKKPNKYKNGKFILPNVYCWTGERMYPFTSLKQEYYSTKFSRHYVDREFLEKIVLDNILNFNFDTLNENMEVVDYTERREFYKKEVEKLKNNEKKLLKKYLDNVIGEDVFDNFMQENKKNIIEFEKKISEIEKLILNSSKKEDNAKLLKEYLKALKNTKDRVQLQQILNILISEIRLVNNFRCVVITTIF

SEQ ID NO: 9140 - protein, 444 aa, Unknown
  Description of Unknown: Integrase B9141 sequence
  PTHR30461:SF3,IPR036162,PS51737,IPR011109,PTHR30461, PS00397,PF00239,G3DSA:1.10.10.2600,IPR006119,SSF53041, cd00338,SM00857,IPR025827,IPR038109, PS51736,IPR006118,PF13408,G3DSA:3.40.50.1390,Coil
MRKNLRVAGYARVSTDEQKKYGYSIQAQTEEITQWCNDNGHALQHIYIDEGYSASNMKRPQLQAMLSNLRDLDAIAFTRLDRLSRNVLEANKMLELLQQNNVAMISICEDDINTSTANGLFMFNLKVNLAEHELKKGSERIKAVFEYKIAQGQPITGNVPFGYRIATENGNKRIVIDESKAPIVKDIFASFLLHQSVHYTVEYVNQKYGLSRPYMSYMHILKNEFYAGSYRGNPNYAEPYITKETYNAVQTALQANIRTGIQRHVYLFTGLLRCPECRSKLVGVSHPKGGKRYYYYRCNNAHSVHTCSHKKHYAELATEKYLLSNLDTLLKDHIATISSITSETKDTTEKELKELRKELDNLNYIFIKKRMPVSTYERLYAETEDKIKRLESFKPQSTDHLNQFLSSGWRSIYENLTRENKRTLWRNVLDSVHVSPDGIEVFFK

SEQ ID NO: 9141 - protein, 444 aa, Unknown
  Description of Unknown: Integrase B9142 sequence
  PTHR30461:SF3,IPR036162,PS51737,IPR011109,PTHR30461, PS00397,PF00239,G3DSA:1.10.10.2600,IPR006119,SSF53041, cd00338,SM00857,IPR025827,IPR038109,PS51736, IPR006118,PF13408,G3DSA:3.40.50.1390,Coil
MRKNLRVAGYARVSTDEQKKYGYSIQAQTEEITQWCNDNGHSLQHIYIDEGYSASNMKRPQLQSMLSNLRDLDAIAFTRLDRLSRNVLEANKMLELLQQNNVAMISICEDDINTSTANGLFMFNLKVNLAEHELKKGSERIKAVFEYKIAQGQPITGNVPFGYKIATENGNKRIVIDESKAPIVKDIFASFLLHQSVHHTVEYVNNKYGLSRPYMSYMHILKNEFYAGSYRGNPNYAEPYITKETYNAVQTALQSNIRTGIQRHVYLFTGLLRCPECRSKLVGVSHPKGGKRYYYYRCNNAHSVHTCTHKKHYAELATEKYLLSNLDALLKDHIATISSITSETKNTTEKELKELRKELDNLNYIFIKKRMPVSTYERLYAETEDKIKRLESFKPQSTDHLNQFLNSGWRSIYDNLTRENKRTLWRNVLDSVHVSPDGIEVFFK

SEQ ID NO: 9142 - protein, 444 aa, Unknown
  Description of Unknown: Integrase B9143 sequence
  PTHR30461:SF3,cd00338,SM00857,IPR006118,IPR036162, PF13408,IPR025827,G3DSA:3.40.50.1390,PS51737,IPR006119, SSF53041,IPR011109,PTHR30461,PS00397,PS51736, Coil,PF00239
MEGKKRAAIYVRVSTAEQRDHGLSVDSQIDALQKYCRENSLEVAGIYNDAGISARKKYKARPALLQLIQDCKDHKIDIILFTKLDRWFRSVADYYEVQSQLDAAKVPWRAIWEDYETETSAGVFKVNIMLSIAQAESDRTSERIRAVNEYRKSQGYIIVGKMPLGYIRTSASTIDFDPQTKEAMQAFFDTYLNTYSPVQAMDAAAEKGLKMSRKTAHFLLDKEPYYGTYYGVSVPGYITPAQHELIQQARQHYPRQPKADRVYIFTGLIFCASCGARMGSKCTCYTSYGKPSEKLYYQCRMRTVRRGECKNAAFIMEHNLESYMIDHLEELIVDYNASVQKLAAKAKSTEGKIEKIKGRLERLKDIYLDGDMSRAEYLEKTKELKAQLAELESLAAPALPVSQMPDNWKEIYEQLSRQGKRDFWHRVVRRIEIKRHSVDKVYFV

SEQ ID NO: 9143 - protein, 444 aa, Unknown
  Description of Unknown: Integrase B9144 sequence
  PTHR30461:SF3,IPR036162,PS51737,IPR011109,PTHR30461, PS00397,PF00239,G3DSA:1.10.10.2600,IPR006119,SSF53041, cd00338,SM00857,IPR025827,IPR038109,PS51736, IPR006118,PF13408,G3DSA:3.40.50.1390,Coil
MKKNLRIGGYARVSTDEQKKYGYSIQAQIDEIKNWCSEHNHQLQNIYIDEGYSASNMKRPQLQLMLSNLKNLDAIAFTRLDRLSRNVLEANKMLELLQQNNVAMISICEDDINTSTANGLFMFNLKVNLAEHELKKGSERIKAVFEYKIAQGQPITGNVPFGYRIATENGNKRIIIDESKAPIVKDIFASFLLHQSVHYTVEYVNNKYGLSRPYMSYMHILKNEFYAGSYRGNSNYAEPYITRDTYNAVQNALQANIRTGIQRHTYLFTGLLRCPECRSKLVGVSHPKGGKRYYYYRCNNAHSVHTCSHKKHYAELATEKYLLSNLDSLLKDHIATISSITSETKDTTEKELKELRKELDNLNYIFIKKRMPVSTYERLYAETEDKIKRLESFKPQSTDHLNQFLNSGWRSIYDNLTRENKRTLWRNVLESVHVSPDGIEVFFK

SEQ ID NO: 9144 - protein, 444 aa, Unknown
  Description of Unknown: Integrase B9145 sequence
  PTHR30461:SF3,IPR036162,PS51737,IPR011109,PTHR30461, PS00397,PF00239,G3DSA:1.10.10.2600,IPR006119,SSF53041, cd00338,SM00857,IPR025827,IPR038109,PS51736, IPR006118,PF13408,G3DSA:3.40.50.1390,PF07508,Coil
MRKNLRVAGYARVSTDEQKKYGYSIQAQTEEITQWCNDNGHALQHIYIDEGYSASNMKRPQLQSMLSNLRDLDAIAFTRLDRLSRNVLEANKMLELLQQNNVAMISICEDDINTSTANGLFMFNLKVNLAEHELKKGSERIKAVFEYKIAQGQPITGNVPFGYRIATENGNKRIVIDKSKAPIVKDIFDSFLLHQSVHHTVEYVNKKYGLSRPYMSYMHILKNEFYAGSYRGNSNYAEPYITKETYNAVQTALQANIRTGVQRHVYLFTGLLRCPECRSKLVGVSHPKGGKRYYYYRCNNAHSVHTCTHKKHYAELATEKYLLSNLDDLLKDHIATISSITSETKNTTEKELKELRKELDNLNYIFIKKRMPVSTYERLYAETEDKIKRLESFKPKSTDHLQQFLNSGWRSIYDNLTRENKRTLWRNILDSVHVSPDGIEVFFK

SEQ ID NO: 9145 - protein, 444 aa, Unknown
  Description of Unknown: Integrase B9146 sequence
  PTHR30461:SF3,IPR036162,PS51737,IPR011109,PTHR30461, PS00397,PF00239,G3DSA:1.10.10.2600,IPR006119,SSF53041, cd00338,SM00857,IPR025827,IPR038109,PS51736, IPR006118,PF13408,G3DSA:3.40.50.1390,Coil
MRKKLRVAGYARVSTDEQKKYGYSIQAQTEEITQWCNDNDHDLQHIYVDEGYSASTMKRPQLQSMLSNLKNLDAIAFTRLDRLSRNVLEANKMLELLQQNNVAMISICEDDINTSTANGLFMFNLKVNLAEHELKKGSERIKAVFEYKIAQGQPITGNVPFGYRIATENGNKRIVIDESKAPIVKDIFDSFLLHQSVHYTVEYVNNKYGLSRPYMSYMHILKNEFYAGSYRGNSNYAEPYITKDTYNAVQTALQANIRTGIQRHTYLFTGLLRCPECRSKLVGVSHPKGGKRYYYYRCNNAHSVHTCTHKKHYAELSTEKYLLSNLDTLLKDHIATISSITSETKNTTEKELKELRKELDNLNYIFIKKRMPVSTYEHLYAETEDKIKRLESFKPQSTDHLKQFLNSGWRSIYDNLTRENKRTLWRNVLDSVNVSPDGIEVFFK

SEQ ID NO: 9146 - protein, 444 aa, Unknown
  Description of Unknown: Integrase B9147 sequence
  PTHR30461:SF3,SM00857,G3DSA:1.10.10.2600,IPR036162,PF13408, IPR025827,G3DSA:3.40.50.1390,PS51737,IPR006119,IPR038109, PF07508,IPR011109,SSF53041,PTHR30461,PS51736, cd00338,PF00239
MVSEGGVITKRLIQKIEPTIPIQPRLLRVAAYARVSSGKDAMLHSLSAQVSYYNELIQGNPEWLFCGIYADEALTGTKSNRAEFQKMLTACRNGEIDLIITKSISRFARNTVTLLETVRELKDIGVDVYFEEQNIHTMSADGELMLTILSSYAQEESFSASENKKWQIRKDFELGKVSNLQMLGLQRNADGVLEIIPEEAVIVRKIFSDYLGGKGKLAIANELNELHIPTKLGCEWTPRAILRILRNEKYCGDLLLQKSFREDHITKRKIRNDGQLPQYYVEEAHEPIIDKETFQLVQQRLDEMKRFNLGKISNAVYPFSGRLHCPHCGKNYRRKTTATGIVWICSTYNTKGKKYCPTAKQIPEEKLYAACCDALGISDFDEDIFQSEIQQIIVPAPNRLEFIFHNGTTKTVEWQDRSRSESWTAEKRKQAGQISKERRWHRCP

SEQ ID NO: 9147 - protein, 444 aa, Unknown
  Description of Unknown: Integrase B9148 sequence
  PTHR30461:SF3,IPR036162,PS51737,IPR011109,PTHR30461, PS00397,PF00239,G3DSA:1.10.10.2600,IPR006119,SSF53041, cd00338,SM00857,IPR025827,IPR038109,PS51736, IPR006118,PF13408,G3DSA:3.40.50.1390,Coil
MRKKLRVAGYARVSTDEQKKYGYSIQAQTEEITQWCNDNDHELIHIYIDEGFSASTMKRPQLQVMLSNLKNLDAIAFTRLDRLSRNVLEANKMLELLQQNNVAMISICEDDINTSTANGLFMFNLKVNLAEHELKKGSERIKAVFEYKVAQGQPITGNVPFGYRIVTENGNKRIVIDESKAPIVKDIFESFLLHQSVHHTVEYVNKKYGLSRPYMSYMHILKNEFYSGSYRGNSNYAEPYITKETYNAVQTALQANIRTGIQRHVYLFTGLLRCPECRSKLIGVSHPKGGKRYYYYRCNNAHSVHTCTHKKHYAELATEKYLLSNLDDLLKNHIATISSITSETKDTTEKELKELRKELDNLNYIFIKKRMPVSTYERLYAETEDKIKRLESFKPQSTDHLNQFLNSGWRSIYDNLTRENKRTLWRNVLDSVHVSPDGIEVFFK

SEQ ID NO: 9148 - protein, 444 aa, Unknown
  Description of Unknown: Integrase B9149 sequence
  PTHR30461:SF3,IPR036162,PS51737,IPR011109,PTHR30461, PS00397,PF00239,G3DSA:1.10.10.2600,IPR006119,SSF53041, cd00338,SM00857,IPR025827,IPR038109,PS51736, IPR006118,PF13408,G3DSA:3.40.50.1390,Coil
MRKKLRVAGYARVSTDEQKKYGYSIQAQIDEIKNWCSEHNHQLQSIYIDEGYSASNMKRPQLQAMLSNLKNIDAIAFTRLDRLSRNVLEANKMLELLQQNNVAMISICEDDINTSTANGLFMFNLKVNLAEHELKKGSERIKAVFEYKVAQGQPITGNVPFGYRIATENGNKRIAIDESKAPIVKDIFASFLLHQSVHYTVEYVNKKYGLSRPYMSYMHILKNEFYAGSYRGNSNYAEPYITKETYNAVQTALQANIRTGIQRHVYLFTGLLRCPECRSKLVGVSHPKGGKRYYYYRCNNAHSVHTCTHKKHYAELATEKYLLSNLDALLKDHIATISSITSETKNTTEKELKELRKELDNLNYIFIKKRMPVNTYERLYAETEDKIKRLESFKPQSTDHLNQFLNSGWRSIYDNLTRENKRTLWRNVLDSVHVSPDGIEVFFK

SEQ ID NO: 9149 - protein, 444 aa, Unknown
  Description of Unknown: Integrase B9150 sequence
  PTHR30461:SF3,IPR036162,PS51737,IPR011109,PTHR30461, PS00397,PF00239,G3DSA:1.10.10.2600,IPR006119,SSF53041, cd00338,SM00857,IPR025827,IPR038109,PS51736, IPR006118,PF13408,G3DSA:3.40.50.1390,Coil
MRKKLRVAGYARVSTDEQKKYGYSIQAQAEEITQWCNDNDHALQHIYVDEGYSASTMKRPQLQSMLSNLKNFDAIAFTRLDRLSRNVLEANKMLELLQQNNVAMISICEDDINTSTANGLFMFNLKVNLAEHELKKGSERIKAVFEYKVAQGQPITGNVPFGYMIVTENGNKRIAIDESKAPIVKDIFESFLLHQSVHYTVEYVNKKYGLSRPYMSYMHILKNEFYAGSYRGNSNYAEPYITKDTYNAVQTALQANIRTGIQRHTYLFTGLLRCPECRSKLVGVSHPKGGKRYYYYRCNNAHSVHTCSHKKHYAELSTEKYLLSNLDTLLKDHIATISSVTSETKNTTEKELKELRKELDNLNYIFIKKRMPVNTYERLYTETEDKIKRLESFKPQSTDHLNQFLNSGWRSIYDNLTRENKRTLWRNVLDSVHVSPDGIEVFFK

SEQ ID NO: 9150 - protein, 444 aa, Unknown
  Description of Unknown: Integrase B9151 sequence
  PTHR30461:SF3,IPR036162,PS51737,IPR011109,PTHR30461, PS00397,PF00239,G3DSA:1.10.10.2600,IPR006119,SSF53041, cd00338,SM00857,IPR025827,IPR038109,PS51736, IPR006118,PF13408,G3DSA:3.40.50.1390,PF07508,Coil
MRKKLRVAGYARVSTDEQKKYGYSIQAQTEEITQWCNENGHDLQHIYIDEGFSASTMKRPQLQLMLSNLKNLDAIAFTRLDRLSRNVLEANKMLELLQQNNVAMISICEDDINTSTANGLFMFNLKVNLAEHELKKGSERIKAVFEYKIAQGQPITGNVPFGYKIATENGNKRIVIDESKAPIVKDIFESFLLHQSVHHTVEYVNNKYGLSRPYMSYMHILKNEFYAGSYRGNFNYVEPYITKETYNAVQTALKANIRTGIQRHTYLFTGLLRCPECRSKLVGVSHPKGGKRYYYYRCNNAHSVHTCTHKKHYAELATEKYLLSNLDKLLKDHIATISSITSEAKDTTEKELKELRKELDNLNYIFIKKRMPVSTYERLYAETEDKIKRLESFKPQSTDHLNQFLNSGWRSIYDNLTRENKRTLWRNVLDSVHVFPDKIEVFFK

SEQ ID NO: 9151 - protein, 444 aa, Unknown
  Description of Unknown: Integrase B9152 sequence
  PTHR30461:SF3,IPR036162,PS51737,IPR011109,PTHR30461, PS00397,PF00239,G3DSA:1.10.10.2600,IPR006119,SSF53041, cd00338,SM00857,IPR025827,IPR038109,PS51736, IPR006118,PF13408,G3DSA:3.40.50.1390,PF07508,Coil
MRKKLRVAGYARVSTDEQKKYGYSIQAQIDEITQWCNDNGHALQHIYIDEGFSASTMKRPQLQSMLSNLKNLDAIAFTRLDRLSRNVLEANKMLELLQQNNVAMISICEDDINTSTANGLFMFNLKVNLAEHELKKGSERIKAVFEYKVAQGQPITGNVPFGYRIATENGNKRIAIDESKAPIVKDIFESFLLHQSVHHTVEYVNQKYGLSRPYMSYMHILKNEFYAGSYRGNSNYAEPYITRDTYNAVQNALQANIRTGIQRHTYLFTGLLRCPECRSKLVGVSHPKGGKRYYYYRCNNAHSVHTCSHKKHYAELATEKYLLSNLDTLLKDHIATISSITSETKDTTEKELKELRKELDNLNYIFIKKRMPVSTYERLYAETEDKIKRLESFKPQSTDHLNQFLNSGWRSIYENLTRENKRTLWRNVLDSVHVSPDGIEVFFK

SEQ ID NO: 9152 - protein, 444 aa, Unknown
  Description of Unknown: Integrase B9153 sequence
  PTHR30461:SF3,IPR036162,PS51737,IPR011109,PTHR30461, PS00397,PF00239,G3DSA:1.10.10.2600,IPR006119,SSF53041, cd00338,SM00857,IPR025827,IPR038109,PS51736, IPR006118,PF13408,G3DSA:3.40.50.1390,PF07508,Coil
MRKKLRVAGYARVSTDEQKKYGYSIQAQTEEITQWCNDNDHDLIHIYIDEGFSASTMKRPQLQSMLSNLKNIDAIAFTRLDRLSRNVLEANKMLELLQQNNVAMISICEDDINTSTANGLFMFNLKVNLAEHELKKGSERIKAVFEYKVAQGQPITGNVPFGYRIATENGNKRIVIDESKAPIVKDIFESFLLHQSVHYTVEYVNQKYGLSRPYMSYMHILKNEFYAGSYRGNSNYTEPYITKETYNAVQTALQANIRTGIQRHVYLFTGLLRCPECRSKLVGVSHPKGGKRYYYYRCNNAHSVHTCTHKKHYAELATEKYLLSNLDALLKDHIATISSITSETKDTTEKELKELRKELDNLNYIFIKKRMPVSTYERLYAETEDKIKRLESFKPQSTDHLQQFLNSGWRSIYDNLTRENKRTLWRNVLDSVHVSPDKIEVFFK

SEQ ID NO: 9153 - protein, 444 aa, Unknown
  Description of Unknown: Integrase B9154 sequence
  PTHR30461:SF3,IPR036162,PS51737,IPR011109,PTHR30461, PS00397,PF00239,G3DSA:1.10.10.2600,IPR006119,SSF53041, cd00338,SM00857,IPR025827,IPR038109,PS51736, IPR006118,PF13408,G3DSA:3.40.50.1390,Coil
MRKNLRVAGYARVSTDEQKKYGYSIQAQTEEITQWCNDNGHALQHIYIDEGYSASNMKRPQLQSMLSNLRDLDAIAFTRLDRLSRNVLEANKMLELLQQNNVAMISICEDDINTSTANGLFMFNLKVNLAEHELKKGSERIKAVFEYKIAQGQPITGNVPFGYKITTENGNKRIVIDESKAPIVKDIFGSFLLHQSVHHTVEYVNNKYGLSRPYMSYMHILKNEFYAGSYRGNSNYAEPYITKETYNAVQTALQSNIRTGIQRHVYLFTGLLRCPECRSKLVGVSHPKGGKRYYYYRCNNAHSVHTCTHKKHYAELATEKYLLSNLDNLLKDHIATISSITSETKNTTEKELKELRKELDNLNYIFIKKRMPVSTYERLYAETEDKIKRLESFKPKNTDHLNQFLNSGWLSIYGNLTRENKRTLWRNILDSVHVSPDGIEVFFK

SEQ ID NO: 9154 - protein, 444 aa, Unknown
  Description of Unknown: Integrase B9155 sequence
  PTHR30461:SF3,IPR036162,PS51737,IPR011109,PTHR30461, PS00397,PF00239,G3DSA:1.10.10.2600,IPR006119,SSF53041, cd00338,SM00857,IPR025827,IPR038109,PS51736, IPR006118,PF13408,G3DSA:3.40.50.1390,PF07508,Coil
MRKNLRVAGYARVSTDEQKKYGYSIQAQTEEITQWCNDNDHALQHIYIDEGYSASTMKRPQLQTMLSNLRDLDAIAFTRLDRLSRNVLEANKMLELLQQNDVAMISICEDDINTSTANGLFMFNLKVNLAEHELKKGSERIKAVFEYKVAQGQPITGNVPFGYRIATENGNKRIAIDESKAPIVKDIFESFLLHQSVHHTVEYVNKKYGLSRPYMSYMHILKNEFYAGSYRGNPNYAEPYITKETYNAVQTALQANIRTGVQRHVYLFTGLLRCPECRSKLVGVSHPKGGKRYYYYRCNNAHSVHTCTHKKHYAELATEKYLLSNLDALLKDHIATISSITSETKNTTEKELKELRKELDNLNYIFIKKRMPVNTYERLYAETEDKIKRLESFKPQSTDHLNQFLNSGWRSIYDNLTRENKRTLWRNVLDSVHVSPDGIEVFFK

SEQ ID NO: 9155 - protein, 444 aa, Unknown
  Description of Unknown: Integrase B9156 sequence
  PTHR30461:SF3,IPR036162,PS51737,IPR011109,PTHR30461, PS00397,PF00239,G3DSA:1.10.10.2600,IPR006119,SSF53041, cd00338,SM00857,IPR025827,IPR038109,PS51736, IPR006118,PF13408,G3DSA:3.40.50.1390,Coil
MRKNLRVAGYARVSTDEQKKYGYSIQAQTEEITQWCNDNGHALQHIYIDEGYSASNMKRPQLQAMLSNLRDLDAIAFTRLDRLSRNVLEANKMLELLQQNDVAMISICEDDINTSTANGLFMFNLKVNLAEHELKKGSERIKAVFEYKIAQGQPITGNVPFGYRIVTENGNKRIAIDESKAPIVKDIFESFLLHQSVHYTVEYVNKKYGLSRPYMSYMHILKNEFYSGSYRGNSNYAEPYITKETYNAVQTALQANIRTGIQRHVYLFTGLLRCPECRSKLVGVSHPKGGKRYYYYRCNNAHSVHTCTHKKHYAELATEKYLLSNLDNLLKDHIATISSVTSETKNTTEKELKELRKELDNLNYIFIKKRMPVSTYERLYAETEDKIKRLESFKPQSTDHLKQFLNSGWRSIYDNLTRENKRTLWRNVLDSVHVSPDKIEVFFK

SEQ ID NO: 9156 - protein, 444 aa, Unknown
  Description of Unknown: Integrase B9157 sequence
  PTHR30461:SF3,IPR036162,PS51737,IPR011109,PTHR30461, PS00397,PF00239,G3DSA:1.10.10.2600,IPR006119,SSF53041, cd00338,SM00857,IPR025827,IPR038109,PS51736, IPR006118,PF13408,G3DSA:3.40.50.1390,PF07508,Coil
MRKNLRVAGYARVSTDEQKKYGYSIQAQTEEITQWCNDNGHALQHIYIDEGYSASNMKRPQLQSMLSNLRDLDAIAFTRLDRLSRNVLEANKMLELLQQNNVAMISICEDDINTSTANGLFMFNLKVNLAEHELKKGSERIKAVFEYKIAQGQPITGNVPFGYRIATENGNKRIVIDESKAPIVKDIFESFLLHQSVHHTVEYVNKKYGLTRPYMSYMHILKNEFYTGSYRGNSNYAEPYITKETYNAVQTALQSNIRTGIQRHVYLFTGLLRCPECRSKLVGVSHPKGGKRYYYYRCNNAHSVHTCTHKKHYAELATEKYLLSNLDALLKDHIATISSITSETKNTTEKELKELKKELDNLNYIFIKKRMPVNTYERLYAETEDKIKRLESFKPKSTDHLNQFLNSGWRSIYENLTRENKRTLWRNILDSVHVSPDGIEVFFK

SEQ ID NO: 9157 - protein, 444 aa, Unknown
  Description of Unknown: Integrase B9158 sequence
  PTHR30461:SF3,IPR036162,PS51737,IPR011109,PTHR30461, PS00397,PF00239,G3DSA:1.10.10.2600,IPR006119,SSF53041, cd00338,SM00857,IPR025827,IPR038109,PS51736, IPR006118,PF13408,G3DSA:3.40.50.1390,Coil
MRKKLRVAGYARVSTDEQKKYGYSIQAQIDEITQWCNDNDHDLLNIYIDEGFSASTMKRPQLQLMLSNLKNLDAIAFTRLDRLSRNVLEANKMLELLQQNNVAMISICEDDINTSTANGLFMFNLKVNLAEHELKKGSERIKAVFEYKVAQGQPITGNVPFGYRIATENGNKRIVIDESKAPIVKDIFESFLLHQSVHYTVEYVNKKYGLSRPYMSYMHILKNEFYAGSYRGNSNYAEPYITKDTYNAVQTTLQANIRTGIQRHVYLFTGLLRCPECRSKLVGVSHPKGGKRYYYYRCNNAHSVHTCSHKKHYAELATEKYLLSNLDNLLKDHIATISSITSETKNTTEKELKELRKELDNLNYIFIKKRMPVNTYERLYAETEDKIKRLESVKPQSTVHLNQFLNSGWRSIYENLTRENKRTLWRNVLESVHVSPDGIEVFFK

SEQ ID NO: 9158 - protein, 444 aa, Unknown
  Description of Unknown: Integrase B9159 sequence
  PTHR30461:SF3,IPR036162,PS51737,IPR011109,PTHR30461, PS00397,PF00239,G3DSA:1.10.10.2600,IPR006119,SSF53041, cd00338,SM00857,IPR025827,IPR038109,PS51736, IPR006118,PF13408,G3DSA:3.40.50.1390,PF07508,Coil
MRKKLRVAGYARVSTDEQKKYGYSIQAQTEEITQWCNDNDHILQHIYVDEGYSASTMKRPQLQSMLSNLKNLDAIAFTRLDRLSRNVLEANKMLELLQQNNVAMISICEDDINTSTANGLFMFNLKVNLAEHELKKGSERIKAVFEYKIAQGQPITGNVPFGYRIATENGNKRIIIDESKAPIVKDIFESFLLHQSVHHTVEYVNNKYGLSRPYMSYMHILKNEFYAGSYRGNSNYAEPYITKETYNAVQTALQANIRTGIQRHVYLFTGLLRCPECRSKLVGVSHPKGGKRYYYYRCNNAHSVHTCTHKKHYAELATEKYLLSNLDELLKNHIATISSITSETKDTTEKELKELRKELDNLNYIFIKKRMPVNTYERLYAETEDKIKRLESFKPQSTDHLNQFLNSGWRSIYDNLTRENKRTLWRNVLDSVHVSPDKIEVFFK

SEQ ID NO: 9159 - protein, 444 aa, Unknown
  Description of Unknown: Integrase B9160 sequence
  PTHR30461:SF3,IPR036162,PS51737,IPR011109,PTHR30461, PS00397,PF00239,G3DSA:1.10.10.2600,IPR006119,SSF53041, cd00338,SM00857,IPR025827,IPR038109,PS51736, IPR006118,PF13408,G3DSA:3.40.50.1390,Coil
MRKNLRVAGYARVSTDEQKKYGYSIQAQTEEITQWCNDNDHDLIHIYIDEGFSASTMKRPQLQSMLSNLKNLDAIAFTRLDRLSRNVLEANKMLELLQQNNVAMISICEDDINTSTANGLFMFNLKVNLAEHELKKGSERIKAVFEYKIAQGQPITGNVPFGYRIVTENGNKCIAIDESKAPIVKDIFESFLLHQSVHYTVEYVNKKYGLSRPYMSYMHILKNEFYAGSYRGNSNYAEPYITRDTYNAVQTALQANIRTGIQRHTYLFTGLLRCPECRSKLVGVSHPKGGKRYYYYRCNNAHSVHTCSHKKHYAELATEKYLLSNLDALLKNHIATISSITSETKNTTEKELKELRKELDNLNYIFIKKRMPVNTYERLYAETEDKIKRLESFKPQSTDHLNQFLNSGWRSIYESLTRENKRTLWRNVLDSVHVSPDKIEVFFK

SEQ ID NO: 9160 - protein, 444 aa, Unknown
  Description of Unknown: Integrase B9161 sequence
  PTHR30461:SF3,SM00857,G3DSA:1.10.10.2600,IPR036162,PF13408, PS51737,G3DSA:3.40.50.1390,IPR025827,IPR006119,IPR038109, PF07508,IPR011109,SSF53041,PTHR30461,PS51736, cd00338,PF00239
MAETIKINSLPTLPTLLKVAAYARVSNGKDAMLHSLSEQVSYYNRYIQEHDGWQFAGIYADEAISGTKENRDEFQRMLMDAYEGKIDLIITKSISRFARNTMTLLETIKKLKKHNVNVFFEEQNLYSMSGECEMILTMLASFAQEEARSVSENMKWKIRKDFEEGLLWGGNNAYGYRIENRRYVIVPEEASLVKNIFNLYLEGMGITAIALKLNKMNIPAYFGGKWNFSSVQNILKNETYTGDLILQKTFRTDYISKKRKMNRGEKDKFLISNDHEAIISKSDFNKVQEMIKSKSKRYNVPDNCYSHRYPFSGMIECSECHKTYIHRKKHGIDKWGCQSAEQYGRAYCKTSDAISNSTLEEVTAKVLNLDKFDEKVFKSEIFKIISKPNHLLTFIFKDGSERDITWSNPSRSKSWTPEMKEVARQRSLKLYKKRGEDGRWLKEK

SEQ ID NO: 9161 - protein, 444 aa, Unknown
  Description of Unknown: Integrase B9162 sequence
  PTHR30461:SF3,IPR036162,PS51737,IPR011109,PTHR30461, PS00397,PF00239,G3DSA:1.10.10.2600,IPR006119,SSF53041, cd00338,SM00857,IPR025827,IPR038109,PS51736, IPR006118,PF13408,G3DSA:3.40.50.1390,PF07508,Coil
MRKKLQVAGYARVSTDEQKKYGYSIQAQTEEITQWCNDNDHDLIHIYIDEGFSASTMKRPQLQSMLSNLKNLDAIAFTRLDRLSRNVLEANKMLELLQQNDVAMISICEDDINTSTANGLFMFNLKVNLAEHELKKGSERIKAVFEYKIAQGQPITGNVPFGYRIVTENGNKRIAIDESKAPIVKDIFESFLLHQSVHHTVEYVNKKYGLSRPYMSYMHILKNEFYAGSYRGNANYAEPYITKETYNAVQTALQSNIRTGVQRHVYLFTGLLRCPECRSKLVGVSHPKGGKRYYYYRCNNAHSVHTCTHKKHYAELATEKYLLSNLDTLLKDHIATISSITSETKNTTEKELKELRKELDNLNYIFIKKRMPVSTYERLYAETEDKIKRLESFKPQSTDHLNQFLSSGWRSIYDNLTRENKRTLWRNVLDSVHVSPDGIEVFFK

SEQ ID NO: 9162 - protein, 444 aa, Unknown
  Description of Unknown: Integrase B9163 sequence
  PTHR30461:SF3,SM00857,IPR006118,IPR036162,PF13408, IPR025827,PS51737,G3DSA:3.40.50.1390,IPR006119,IPR011109, SSF53041,PF00239,PTHR30461,PS00397,PS51736, Coil,cd00338
MEGKKRAAIYVRVSTAEQRDHGLSVDSQIDALQKYCRENGLEVAGIYNDAGISARKKYKARPALLQLIEDCQNKKVDIILFTKLDRWFRSVADYYEVQSQLDAAKVPWRAIWEDYETETSAGVFKVNIMLSIAQAESDRTSERIRAVNEYRKSQGYIIVGKMPLGYIRTSASTIDFDPQTKEAMQVFFDTYLNTYSPVQAMDAAAERGLKMSRKTAHFLLDKEPYYGTYYGVSVPGYITPAQHELIQQARQHYPRQPKADRVYIFTGLIFCASCGARMGSKCTCYTSYGKPSEKLYYQCRMRTVRRGECKNAAFVMEHNLESYMIDHLEELIVDYNASVQKLAAKAKSTEGKIEKIKGRLERLKDIYLDGDMSRAEYLEKTKELKAQLAELESLTAPALPVSQMPDNWKEIYEQLSRQGKRDFWHRVVRRIEIKRHSVDKVYFV

SEQ ID NO: 9163 - protein, 444 aa, Unknown
  Description of Unknown: Integrase B9164 sequence
  cd00338,SM00857,IPR006118,IPR036162,PF13408, PS51737,G3DSA:3.40.50.1390,IPR025827,IPR006119,SSF53041, IPR011109,PTHR30461,PS00397,PS51736,Coil, PF00239
MEGKKRAAIYVRVSTAEQRDHGLSVDSQIDALQKYCRENGLEVAGIYNDAGISARKKYKARPALLQLIEDCQNKKVDIILFTKLDRWFRSVADYYEVQSQLDAAKVPWRAIWEDYETETSAGVFKVNIMLSIAQAESDRTSERIRAVNEYRKSQGYIIVGKMPLGYIRTSASTIDFDPQTKEAMQAFFDTYLNTYSPVQAMDAAAEKGLKMSRKTAHFLLDKEPYYGTYYGVSVPGYITPAQHELIQQARQHYPRQPKADRVYIFTGLIFCASCGARMGSKCTCYTSYGKPSEKLYYQCRMRTVRRGECKNAAFIMEHNLESYMIDHLEELIVDYNASVQKLAAKAKSTEGKIEKIKGRLERLKDIYLDGDMSRAEYLEKTKELKAQLAELESLATPALPVSQMPDNWKEIYEQLSRQGKRDFWHRVVRRIEIKRHSVDKVYFV

SEQ ID NO: 9164 - protein, 444 aa, Unknown
  Description of Unknown: Integrase B9165 sequence
  PTHR30461:SF3,IPR036162,PS51737,IPR011109,PTHR30461, PS00397,PF00239,G3DSA:1.10.10.2600,IPR006119,SSF53041, cd00338,SM00857,IPR025827,IPR038109,PS51736, IPR006118,PF13408,G3DSA:3.40.50.1390,Coil
MRKNLRVAGYARVSTDEQKKYGYSIQAQTEEITQWCNDNGHSLQHIYIDEGYSASNMKRPQLQAMLSNLRDLDAIAFTRLDRLSRNVLEANKMLELLQQNNVAMISICEDDINTSTANGLFMFNLKVNLAEHELKKGSERIKAIFEYKIAQGQPITGNVPFGYKITTENGNKRIVIDESKAPIVKDIFASFLLHQSVHHTVEYVNNKYGLSRPYMSYMHILKNEFYTGSYRGNSNYAEPYITRETYNAVQTALQSNIRTGIQRHVYLFTGLLRCPECRSKLVGVSHPKGGKRYYYYRCNNAHSVHTCTHKKHYAELATEKYLLSNLDNLLKDHIATISSVTSETKNTTEKELKELRKELDNLNYIFIKKRMPVNTYERLYAETEDKIKRLESFKPKSTDHLQQFLNSGWRSIYDNLTRENKRTLWRNVLDSVHVSPDGIEVFFK

SEQ ID NO: 9165 - protein, 444 aa, Unknown
  Description of Unknown: Integrase B9166 sequence
  PTHR30461:SF3,IPR036162,PS51737,IPR011109,PTHR30461, PS00397,PF00239,G3DSA:1.10.10.2600,IPR006119,SSF53041, cd00338,SM00857,IPR025827,IPR038109,PS51736, IPR006118,PF13408,G3DSA:3.40.50.1390,Coil
MRKNLRVAGYARVSTDEQKKYGYSIQAQTEEITQWCNDNGHSLQHIYIDEGFSASNMKRPQLQSMLSNLRDLDAIAFTRLDRLSRNVLEANKMLELLQQNNVAMISICEDDINTSTANGLFMFNLKVNLAEHELKKGSERIKAVFEYKIAQGQPITGNVPFGYRIATENGNKRIVIDESKAPIVKDIFASFLLHQSVHYTVEYVNNKYGLSRPYMSYMHILKNEFYAGSYRGNSNYAEPYITRETYNAVQTALQSNIRTGIQRHVYLFTGLLRCPECRSKLVGVSHPKGGKRYYYYRCNNAHSVHTCTHKKHYAELATEKYLLSNLDALLKDHIATISSITSETKNTTEKELKELRKELDNLNYIFIKKRMPVNTYERLYAETEDKIKRLESFKPKSTDHLNQFLNSGWRSIYDNLTRENKRTLWRNVLDSVHVSPDGIEVFFK

SEQ ID NO: 9166 - protein, 444 aa, Unknown
  Description of Unknown: Integrase B9167 sequence
  PTHR30461:SF3,cd00338,SM00857,IPR006118,IPR036162, PF13408,PS51737,G3DSA:3.40.50.1390,IPR025827,IPR006119, SSF53041,IPR011109,PTHR30461,PS00397,PS51736, Coil,PF00239
MEGKKRAAIYVRVSTAEQRDHGLSVDSQIDALQKYCRENGLEVAGIYNDAGISARKKYKARPALLQLIQDCKDHKIDIILFTKLDRWFRSVADYYEVQSQLDAAKVPWRAIWEDYETETSAGVFKVNIMLSIAQAESDRTSERIRAVNEYRKSQGYIIVGKMPLGYIRTSASTIDFDPKTKDAMQTFFDTYLNTYSPVQAMDAAAEKGLKMSRKTAHFLLDKEPYYGTYYGVSVPGYITPAQHELIQQARLHYPRQPKADRVYIFTGLIFCANCGARMGSKCACYTSYGKPSEKLYYQCRMRTVRRGECKNAAFIMEHNLESYMIDHLEELIVDYNASVQKLAAKAKSTEGKIEKIKGRLERLKDIYLDGDMSRAEYLENVKELKAQLAELESLAAPALPVSQMPDNWKEVYKQLSKEGKRDFWHRVVRRIEIKRHSVDKVYFV

SEQ ID NO: 9167 - protein, 444 aa, Unknown
  Description of Unknown: Integrase B9168 sequence
  PTHR30461:SF3,IPR036162,PS51737,IPR011109,PTHR30461, PS00397,PF00239,G3DSA:1.10.10.2600,IPR006119,SSF53041, cd00338,SM00857,IPR025827,IPR038109,PS51736, IPR006118,PF13408,G3DSA:3.40.50.1390,PF07508,Coil
MRKNLRVAGYARVSTDEQKKYGYSIQAQTEEITQWCNDNGHSLQHIYIDEGYSASNMKRPQLQSMLSNLRDLDAIAFTRLDRLSRNVLEANKMLELLQQNNVAMISICEDDINTSTANGLFMFNLKVNLAEHELKKGSERIKAVFEYKIAQGQPITGNVPFGYKITTENGNKRIVIDESKAPIVKDIFNSFLLHQSVHHTVEYVNNKYGLSRPYMSYMHILKNEFYAGSYRGNHNYAEPYITKETYNAVQTTLQANIRTGIQRHVYLFTGLLRCPECRSKLVGVSHPKGGKRYYYYRCNNAHSVHTCTHKKHYAELATEKYLLSNLDDLLKNHIATISSVTSETKDTTEKELKELRKELDNLNYIFIKKRMPVSTYERLYAETEDKIKRLESFKPKSTDHLNQFLNSGWRSIYDNLTRENKRTLWRNVLDSVHVSPDGIEVFFK

SEQ ID NO: 9168 - protein, 444 aa, Unknown
  Description of Unknown: Integrase B9169 sequence
  PTHR30461:SF3,cd00338,SM00857,IPR006118,IPR036162, PF13408,IPR025827,G3DSA:3.40.50.1390,PS51737,IPR006119, IPR011109,SSF53041,PTHR30461,PS00397,PS51736, Coil,PF00239
MEGKKRAAIYVRVSTAEQRDHGLSVDSQIDALQKYCRENSLDVAGIYNDAGISARKKYKARPALLQLIQDCKDHKIDIILFTKLDRWFRSVADYYEVQSQLDAAKVPWRAIWEDYETETSAGVFKVNIMLSIAQAESDRTSERIRAVNEYRKSQGYIIVGKMPLGYIRTSASTIDFDPKTKDAMQTFFDTYLNTYSPVQAMDAAAEKGLKMSRKTAHFLLDKEPYYGTYYGVSVPGYITPAQHELIQQARQHYPRQPKADRVYIFTGLIFCASCGARMGSKCTCYTSYGKPSEKLYYQCRMRTVRRGECKNAAFIMEHNLESYMIDHLEELIVDYNASVQKLAAKAKSTEGKIEKIKGRLERLKDIYLDGDMSRAEYLEKTKELKAQLAELESLAAPALPVSQMPDNWREVYEQLSRQGKRDFWHRVVRRIEIKRHSVDKVYFV

SEQ ID NO: 9169 - protein, 444 aa, Unknown
  Description of Unknown: Integrase B9170 sequence
  PTHR30461:SF3,cd00338,SM00857,IPR006118,IPR036162, PF13408,IPR025827,G3DSA:3.40.50.1390,PS51737,IPR006119, SSF53041,IPR011109,PTHR30461,PS00397,PS51736, Coil,PF00239
MEGKKRAAIYVRVSTAEQRDHGLSVDSQIDALQKYCRENGLEVAGIYNDAGISARKKYKARPALLQLIQDCKDHKIDIILFTKLDRWFRSVADYYEVQSQLDTAKVPWRAIWEDYETETSAGVFKVNIMLSIAQAESDRTSERIRAVNEYRKSQGYIIVGKMPLGYIRTSASTIDFDPQTKEAMQAFFDTYLNTYSPVQAMDAAAEKGLKMSRKTAHFLLDKEPYYGTYYGVSVPGYITPAQHELIQQARQHYPRQPKADRVYIFTGLIFCASCGARMGSKCTCYTSYGKPSEKLYYQCRMRTVRRGECKNAAFIMEHNLESYMIDHLEELIIDYNASVQKLAAKAKSTEGKIEKIKGRLERLKDIYLDGDMSRAEYLEKTKELKAQLAELESLATPALPVSQMPDNWKEIYEQLSRQGKRDFWHRVVRRIEIKRHSVDKVYFV

SEQ ID NO: 9170 - protein, 444 aa, Unknown
  Description of Unknown: Integrase B9171 sequence
  PTHR30461:SF3,IPR036162,PS51737,IPR011109,PTHR30461, PS00397,PF00239,G3DSA:1.10.10.2600,IPR006119,SSF53041, cd00338,SM00857,IPR025827,IPR038109,PS51736, IPR006118,PF13408,G3DSA:3.40.50.1390,Coil
MRKNLRVAGYARVSTDEQKKYGYSIQAQTEEITQWCNDNGHALQHIYIDEGYSASTMKRPQLQSMLSNLKNLDAIAFTRLDRLSRNVLEANKMLELLQQNNVAMISICEDDINTSTANGLFMFNLKVNLAEHELKKGSERIKAVFEYKVAQGQPITGNVPFGYRIVTENGNKRIVIDESKAPIVKDIFDSFLLHQSVHYTVEYVNNKYGLSRPYMSYMHILKNEFYAGSYRGNSNYAEPYITRETYNAVQTALQANIRTGIQRHVYLFTGLLRCPECRSKLVGVSHPKGGKRYYYYRCNNAHSVHTCTHKKHYAELATEKYLLSNLDALLKDHIATISSITSETKNTTEKELKELRKELDNLNYIFIKKRMPVSTYERLYAETEDKIKRLESFKPQSTDHLKQFLNSGWRSIYENLTRENKRTLWRNVLDSVHVSPDGIEVFFK

SEQ ID NO: 9171 - protein, 444 aa, Unknown
  Description of Unknown: Integrase B9172 sequence
  PTHR30461:SF3,IPR036162,PS51737,IPR011109,PTHR30461, PS00397,PF00239,G3DSA:1.10.10.2600,IPR006119,SSF53041, cd00338,SM00857,IPR025827,IPR038109,PS51736, IPR006118,PF13408,G3DSA:3.40.50.1390,Coil
MRKNLRVAGYARVSTDEQKKYGYSIQAQTEEITQWCNDNDHNLIHIYIDEGYSASNMKRPQLQSMLSNLRDLDAIAFTRLDRLSRNVLEANKMLELLQQNDVAMISICEDDINTSTANGLFMFNLKVNLAEHELKKGSERIKAVFEYKIAQGQPITGNVPFGYRIATENGNKRIVIDESKAPIVKDIFESFLLHQSVHYTVEYVNNKYGLSRPYMSYMHILKNEFYAGSYRGNSNYAEPYITKETYNDVQTALQANIRTGVQRHVYLFTGLLRCPECRSKLVGVSHPKGGKRYYYYRCNNAHSVHTCTHKKHYAELATEKYLLSNLDTLLKDHIATISSITSETKNTTEKELKELRKELDNLNYIFIKKRMPVSTYERLYAETEDKIKRLESFKPKSTDHLNQFLSSGWRSIYDNLTRENKRTLWRNVLDSVHVSPDGIEIFFK

SEQ ID NO: 9172 - protein, 444 aa, Unknown
  Description of Unknown: Integrase B9173 sequence
  PTHR30461:SF3,IPR036162,PS51737,IPR011109,PTHR30461, PS00397,PF00239,G3DSA:1.10.10.2600,IPR006119,SSF53041, cd00338,SM00857,IPR025827,IPR038109,PS51736, IPR006118,PF13408,G3DSA:3.40.50.1390,Coil
MRKKLRVAGYARVSTDEQKKYGYSIQAQTEEITQWCNDNDHALQHIYIDEGYSASTMKRPQLQAMLSNLKNLDAIAFTRLDRLSRNVLEANKMLELLQQNNVAMISICEDDINTSTANGLFMFNLKVNLAEHELKKGSERIKAVFEYKIAQGQPITGNVPFGYRIATENGNKRIIIDESKAPIVKDIFSSFLLHQSVHHTVEYVNNKYGLSRPYMSYMHILKNEFYAGSYRGNSNYAEPYITKDTYNAVQTALQANIRTGIQQHVYLFTGLLRCPECRSKLVGVSHPKGGKRYYYYRCNNAHSVHTCTHKKHYAELATEKYLLPNLDDLLKDHIATISSITSETKDTTEKELKELRKELDNLNYIFIKKRMPVSTYERLYAETEDKIKRLESFKPQSTDHLNQFLNSGWRSIYDNLTRENKRTLWRNVLDSVHVSPDKIEVFFK

SEQ ID NO: 9173 - protein, 444 aa, Unknown
  Description of Unknown: Integrase B9174 sequence
  PTHR30461:SF3,cd00338,SM00857,IPR006118,IPR036162, PF13408,PS51737,G3DSA:3.40.50.1390,IPR025827,IPR006119, SSF53041,IPR011109,PTHR30461,PS00397,PS51736, Coil,PF00239
MEGKKRAAIYVRVSTAEQRDHGLSVDSQIDALQKYCRENGLEVAGIYNDAGISARKKYKARPALLQLIQDCKDHKIDIILFTKLDRWFRSVADYYEVQSQLDAAKVPWRAIWEDYETETSAGVFKVNIMLSIAQAESDRTSERIRAVNEYRKSQGYIIVGKMPLGYIRTSASTIDFDPKTKDAMQTFFDTYLNTYSPVQAMDAAAEKGLKMSRKTAHFLLDKEPYYGTYYGVSVPGYITPAQHELIQQARQHYPRQPKADRVYIFTGLIFCASCGARMGSKCTCYTSYGKPSEKLYYQCRMRTVRRGECKNAAFIMEHNLESYMIDHLEELIVDYNASVQKLAAKAKSTEGKIEKIKGRLERLKDIYLDGDMSRAEYLEKTKELKAQLAELESLATPALPVSQMPDNWKEIYEQLSRQGKRDFWHRVVRRIEIKRHSVDKVYFV

SEQ ID NO: 9174 - protein, 444 aa, Unknown
  Description of Unknown: Integrase B9175 sequence
  PTHR30461:SF3,IPR036162,PS51737,IPR011109,PTHR30461, PS00397,PF00239,G3DSA:1.10.10.2600,IPR006119,SSF53041, cd00338,SM00857,IPR025827,IPR038109,PS51736, IPR006118,PF13408,G3DSA:3.40.50.1390,PF07508,Coil
MKKNLRIGGYARVSTDEQKKYGYSIQAQIDEIKNWCSEHNHQLQNIYIDEGYSASNMKRPQLQSMLSNLKNLDAIAFTRLDRLSRNVLEANKMLELLQQNNVAMISICEDDINTSTANGLFMFNLKVNLAEHELKKGSERIKAVFEYKIAQGQPITGNVPFGYRIATENGNKRIVIDESKAPIVKDIFESFLLHQSVHHTVEYVNQKYGLSRPYMAYMHILKNEFYAGSYRGNSNYAEPYITKETYNAVQTALQANIRTGIQRHTYLFTGLLRCPECRSKLVGVSHPKGGKRYYYYRCNNAHSVHTCTHKKHYAELATEKYLLSNLDDLLKNHIATISSITSETKDTTEKELKELRKELDNLNYIFIKKRMPVSTYERLYAETEDKIKRLESFKPQSTDHLNQFLNSGWRSIYDNLTRENKRTLWRNVLDSVHVSPDGIEVFFK

SEQ ID NO: 9175 - protein, 444 aa, Unknown
  Description of Unknown: Integrase B9176 sequence
  PTHR30461:SF3,IPR036162,PS51737,IPR011109,PTHR30461, PS00397,PF00239,G3DSA:1.10.10.2600,IPR006119,SSF53041, cd00338,SM00857,IPR025827,IPR038109,PS51736, IPR006118,PF13408,G3DSA:3.40.50.1390,PF07508,Coil
MRKKLRVAGYARVSTDEQKKYGYSIQAQAEEITQWCSDNDHDLIHIYIDEGFSASTMKRPQLQSMLSNLKNLDAIAFTRLDRLSRNVLEANKMLELLQQNDVAMISICEDDINTSTANGLFMFNLKVNLAEHELKKGSERIKAVFEYKIAQGQPITGNVPFGYRIATENGNKRIAIDESKAPIVKDIFESFLLHQSVHYTVEYVNKKYGLSRPYMSYMHILKNEFYAGSYRGNSNYAEPYITKETYNAVQTALQANIRTGIQRHTYLFTGLLRCPECRSKLVGVSHPKGGKRYYYYRCNNAHSVHTCTHKKHYAELATEKYLLSNLDTLLKDHIVTISNATSETHNTTEKELKELRKELDNLNYIFIKKRMPVSTYERLYAETEDKIKRLESFKPKSTDHLNQFLNSGWRSIYDNLTRENKRTLWRNVLDSVHVSPDGIEVFFK

SEQ ID NO: 9176 - protein, 444 aa, Unknown
  Description of Unknown: Integrase B9177 sequence
  PTHR30461:SF3,IPR036162,PS51737,IPR011109,PTHR30461, PS00397,PF00239,G3DSA:1.10.10.2600,IPR006119,SSF53041, cd00338,SM00857,IPR025827,IPR038109,PS51736, IPR006118,PF13408,G3DSA:3.40.50.1390,Coil
MRKNLRVAGYARVSTDEQKKYGYSIQAQTEEITQWCNDNGHDLIHIYIDEGFSASTMKRPQLQAMLSNLRDLDAIAFTRLDRLSRNVLEANKMLELLQQNNVAMISICEDDINTSTANGLFMFNLKVNLAEHELKKGSERIKAVFEYKIAQGQPITGNVPFGYRIATENGNKRIVIDESKAPIVKDIFASFLLHQSVHHTVEYVNKKYGLSRPYMSYMHILKNEFYAGSYRGNSNYAEPYITKETYNAVQTALQSNIRTGIQRHVYLFTGLLRCPECRSKLVGVSHPKGGKRYYYYHCNNAHSVHTCTHKKHYAELATEKYLLSNLDNLLKDHIATISSITSETKNTTDKELKELRKELDNLNYIFIKKRMPVSTYERLYAETEDKIKRLESFKPKSTDHLNQFLNSGWRSIYDNLTRENKRTLWRNVLDSVHVSPDGIEVFFK

SEQ ID NO: 9177 - protein, 443 aa, Unknown
  Description of Unknown: Integrase B9178 sequence
  PTHR30461:SF3,SM00857,G3DSA:1.10.10.2600,IPR036162,G3DSA:3.40.50 .1390,IPR006119,IPR038109,SSF53041,PTHR30461,PS51736, cd00338,PF00239
MIRCALYDRVSTDLQAEYGRSLETQIAALTEYARQHGYQIVGVYTDEALTARKNMKNRHALLRLLDDVRRDKIDLILVTKLDRWFRNVKDYHNTQSILEAHGCNWKTIFEDYDTSTPDGQLKINIMLAVAQNECDRTSARIKDVFRHKIANGEWLGGKPPFGYMCDETHHLIKNPQTAPMVEDMFSYYFTVYSKNQAVEYALHKYGDSVPAGSNLQKMFSREIYTGYRNGVQICEPFLSKEQFNTISRISESRINIVKDDPFLFSSMIICPHCHQKLCGRRAKKVKPSGKVYKYKTYNCCSKYVPDHRRPLIYESTVERYLMEHIVTDLEAQIEFTEHEGHDITPIQDVKKLKAELTRLNTMYQKGRVTDVYYDSEYERITQLINSQDATSSSLLEHMDYFKGNWIDLYNSLSRPNKKAFWKKYIEAIYLDEHTHKISGIKFL

SEQ ID NO: 9178 - protein, 443 aa, Unknown
  Description of Unknown: Integrase B9179 sequence
  cd00338,SM00857,G3DSA:1.10.10.2600,IPR036162, PS51737,G3DSA:3.40.50.1390,IPR006119,IPR038109, PF07508,SSF53041,IPR011109,PTHR30461, Coil,PF00239
MYAMYLRKSRADDKDIPLEKVLKNHYNMLTELADKLKIQIEEENVFREIETGDSISIRPKMQDLLEKVSEGLYEGVFCTELSRLCRGSKIDQEIVSSTFTAAECKIITPSKTYDLANNEFDEEMVDFGLFMSRREYKTITKRMQRGREQSVKQGKYIGSILPYGYNKEKLEGENGFKLTINEEEAHIVKLIFKWFLEDNIGASIIAKRLNQGGYPTRSGRVWSYNSVKNILTSNVVAGYLKHGERKYKKYIDAKGNVKKSRPVNKDVEYYKGLHEAIIPLHKFEKVQDILNSRKQHKSNFDLPLSNPLAGLIRCSECNRIMVKRRCSQGDFLYCSTTGCKNIGSYLNRVEEHILQALSNMLSDYEYYVDNYEQETIKEKRNVDNDLKRIEKEIEKLNKQFEKCCTFLEQDVYTIEVYKDRTSKIKDKIKILCLLYTSPSPRDA

SEQ ID NO: 9179 - protein, 443 aa, Unknown
  Description of Unknown: Integrase B9180 sequence
  PTHR30461:SF3,SM00857,G3DSA:1.10.10.2600,IPR036162,PF13408, PS51737,G3DSA:3.40.50.1390,IPR025827,IPR006119,IPR038109, PF07508,IPR011109,SSF53041,PF00239,PTHR30461, PS51736,Coil,cd00338
MRAFIYGRFSSHKQQELSIEAQIDICREYAEKHNITVVGEYVDRARSARTENRADFRRLIRDACTGVVDCVLVWRYDRFFRDRAESALYRKQLEAAGVHLISVTEFIPDGSAGVITQGMIETVAEYFSAKLSEDVTRGMNKAAQHCQITGGAPLGYRPGPNKRWQIDPVGAELVKRCFEWYDSGKSMGELADHFNKEGHKTAKGNSFNKSSFTTILRNKKYIGIYEYDGTVSIAGGVPRIIEDDLFFRVQRKLDANRHRPGAYKAEVPYLLSGKLFCGKCGSPMTGTAGTGKSGVRHYYYICNNRRAKKCDKKNVRLDLIEEAVLQSALDVLTDDNISYISAEVERRCSENSGNKALVASLRVQLTEVEKQLKNIGNAIAQGIITETTKQMLMDAEADRAALRQQIDRATVQASLEVKAEAVACWLDGFRHGDRKSPELDGCS

SEQ ID NO: 9180 - protein, 443 aa, Unknown
  Description of Unknown: Integrase B9181 sequence
  PTHR30461:SF3,IPR036162,PS51737,IPR011109,PTHR30461, PS00397,PF00239,G3DSA:1.10.10.2600,IPR006119,SSF53041, cd00338,SM00857,IPR025827,IPR038109,PS51736, IPR006118,PF13408,G3DSA:3.40.50.1390,Coil
MKQIAIYIRVSTDTQAKKGDSLGEQLETLKKYIDDHDNMILYDTYIDDGVSGQKLDRGEFKRLMDDVKAGYINLIIFTKLDRWFRSLRHYLNTQAVLEKHDVEWTAVAQPFYDTTTPQGRAFVAQSMTFAELEAQNDSVRIKDVFDYKYKHGEVLSGKTPLGYSIKDKHLVPNEDAGKAVEVFEYYDRTNSLNATTLFLEHEFGIIMSTDNLKKSILSNTKYIGVFRDNKSFCPAIIDRDLFDRVQVNLKRNIKSSVKRDYVFSGLIKCANCGKTMSGRTVKTKRKNRVYEYPVYICRQAYPLRRCENRKNISESIIEKYMLANIRAEAGKYIREYETKEKPVRDRQKKKASIEHKIERLKELFVNEVITLDELKKDREKLLQQLTEVPEEKPKDISKLKEFLNSDFETIYNTFNKKERRRFWRSVIKEIQVDKERNFHIIFL

SEQ ID NO: 9181 - protein, 443 aa, Unknown
  Description of Unknown: Integrase B9182 sequence
  PTHR30461:SF3,cd00338,SM00857,G3DSA:1.10.10.2600,IPR036162, PF13408,IPR025827,G3DSA:3.40.50.1390,PS51737,IPR006119, IPR038109,SSF53041,IPR011109,PTHR30461,PS51736, Coil,PF00239
MHGKSLEAQKEYLASYAKDHGMIPVGIYADEGKTARKELKKRKAIHALLEDVKAGKIDVILFWRLDRWFRNMSDFYKVQDILDEYGVYWISASEPGLNMETRDGRLQLNVVLSIGQNEVDTTSERIKFVNEASIRQGKVIFGDGNMPRGYKVGIVDGKKCMVKNPDEEEMVNAFFDYFERHQSKQGTLRYMQRNYDPAFSYSVLRTMLSSEFYKGTYRGIPYCPAYLSEERWMRLQKINGRNVKHTPSGRVYLFSGLIRCPVCSQKLSGTGCSSIINRKTKEKRTYCYYRCNHALLDRICTNTHRVSQNLIEAYLLDNLEAEYEKFHIRCEKIEEQKAKIRETRTPEKLQKELERLNLLFQKGRIEWDYYSEEYDRIENELHELQQIRPEPQRDFSYLEELLQADFRTIYAQLTPENRRSFWRSTIKEIHLNEDFSVKSVDFL

SEQ ID NO: 9182 - protein, 442 aa, Unknown
  Description of Unknown: Integrase B9183 sequence
  PTHR30461:SF3,IPR036162,PS51737,IPR011109,PTHR30461, PS00397,PF00239,G3DSA:1.10.10.2600,IPR006119,SSF53041, cd00338,SM00857,IPR025827,IPR038109,PS51736, IPR006118,PF13408,G3DSA:3.40.50.1390,Coil
MIAALMRVALIRVALYIRVSSEEQARHGLSLQEQRDALIRYAKANKMTVVGIYEDAGISARKPYNKRPALLRLLGDCKDGKIDMILFVKLDRWFRNVAGYYDVQTQLDQYGVTWQATEEDYETRTASGRLKVNIMLSVAQDEADRTSERIKFINDGKRAKGQPAGSKAPLGYAIKDRQYQIDNGTADAARDMFAAFIRLKSVLAVKRYMLDTWGIDRAYSKYVNYFRNRLYIGEVYGIENTCPALVSKQDFDLVNDIIRQRSQRCAGVDTDRVYLFSGILHCKECGKTMQSETVKKTYTYYRCRTRMLDNTSCPHTKRIREDVLEDYLLHELAGIAERNNRYYKKAEKKPTQSADSIRKKMSKLKTLYLNDLIELDDYKAEYSILKRSLETVEEKPKTDIDALRNGLGEYGTYSREEKKEFWTRFIKRIDADNDGAFFVTPR

SEQ ID NO: 9183 - protein, 442 aa, Unknown
  Description of Unknown: Integrase B9184 sequence
  PTHR30461:SF3,SM00857,G3DSA:1.10.10.2600,IPR036162,PF13408, PS51737,G3DSA:3.40.50.1390,IPR025827,IPR006119,IPR038109, IPR011109,SSF53041,PTHR30461,Coil,PS51736, cd00338,PF00239
MIAALMREALIKAALYIRVTSEEQARHGLSLQEQRDALIRYAKANKMTVVGIYEDAGISARKPYKKRPALLRLLDDCKAGKVDTILFIKLDRWFRNVAGYYDVQTQLDKYGVTWQATEEDYETRTASGRLKVNIMLSVAQDEADRASERVKFINDGKRAKGQPAGSKAPLGYIVKDRQYQIDNDTADAARDMFAAYVRLQSVLGVKRYMLETWKIDRAYTKYVNYFRNRLYIGEVYGIENACPALVSKQDFDLVNDIIRHRSQRCAGVETDRVYLFSGLLHCKECGKTMQSETAKQIYTYYRCRTRMLDNSACPHKKRIREDALEDYLLHELEGIAERNNRYYKKAEKKPTHSADSIRKKMSKLKTLYLNDLIELGDYKAEYASLKRAMETVEEKPETDLDALKDGLGEYDTYSRNEKKEFWTRFIRRIDADNDGAFFVTPR

SEQ ID NO: 9184 - protein, 442 aa, Unknown
  Description of Unknown: Integrase B9185 sequence
  PTHR30461:SF3,IPR036162,PS51737,IPR011109,PTHR30461, PS00397,PF00239,G3DSA:1.10.10.2600,IPR006119,SSF53041, cd00338,SM00857,IPR025827,IPR038109,PS51736, IPR006118,PF13408,G3DSA:3.40.50.1390,Coil
MIAALMRVALIRVALYIRVSSEEQARHGLSLQEQRDALMRYAKEHKMTVVGIYEDAGISARKPYKKRPALLRLLGDCKDGQIDMILFVKLDRWFRNVAGYYDVQTQLDQYGVTWQATEEDYETRTASGRLKVNIMLSVAQDEADRTSERIKFINDGKRAKGQPAGSKAPLGYAIKDRQYQIDNGTADAARDMFAAFIRLKSVLAVKRYMLDTWGIDRAYSKYVNYFRNRLYIGEVYGIENACPALVSKQDFDLVNDIIRQRSQRCAGVDTDRVYLFSGILHCKECGKTMQSETVKKTYTYYRCRTRMLDNTSCPHTKRIREDVLEDYLLHELAGIAERNNRYYKKAEKKPTQSADSIRKKMSKLKTLYLNDLIELDDYKAEYSILKRSLETLEEKPKTDLDALRNGLGEYGTYSREEKKEFWTRFITRIDADNDGAFFVTPR

SEQ ID NO: 9185 - protein, 442 aa, Unknown
  Description of Unknown: Integrase B9186 sequence
  PTHR30461:SF3,IPR036162,PS51737,IPR011109,PTHR30461, PS00397,PF00239,G3DSA:1.10.10.2600,IPR006119,SSF53041, cd00338,SM00857,IPR025827,IPR038109,PS51736, IPR006118,PF13408,G3DSA:3.40.50.1390,Coil
MIAALMRVALIRVALYIRVSSEEQARHGLSLQEQRDALIRYAKANKMTVVGIYEDAGISARKPYKKRPALLRLLGDCKDGKIDMILFVKLDRWFRNVAGYYDVQTQLDQYGVTWQATEEDYETRTASGRLKVNIMLSVAQDEADRTSERIKFINDGKRAKGQPAGSKAPLGYVITDRQYQIDNGTVDAARDMFAAFIRLKSVLAVKRYMLDTWGIDRAYSKYVNYFRNRLYIGEVYGIENACPALVSKQDFDIVNDIIRQRSQRCAGVDTDRVYLFSGILHCKECGKTMQSETVKKTYTYYRCRTRMLDNTSCPHTKRIREDVLEDYLLHELAGIAERNNRYYKKAEKKPTQSADSIRKKMSKLKTLYLNDLIELDDYKAEYSILKRSLETVEEKPKTDLDALRNGLGEYGTYSREEKKEFWTRFIKRIDADNDGAFFVTPR

SEQ ID NO: 9186 - protein, 442 aa, Unknown
  Description of Unknown: Integrase B9187 sequence
  PTHR30461:SF3,IPR036162,PS51737,IPR011109,PTHR30461, PS00397,PF00239,G3DSA:1.10.10.2600,IPR006119,SSF53041, cd00338,SM00857,IPR025827,IPR038109,PS51736, IPR006118,PF13408,G3DSA:3.40.50.1390,Coil
MIAALMRVALIRVALYIRVSSEEQARHGLSLQEQRDALIRYAKANKMTVVGIYEDAGISARKPYKKRPALLRLLGDCKDGKIDMILFVKLDRWFRNVAGYYDVQTQLDQYGVTWQATEEDYETRTASGRLKVNIMLSVAQDEADRTSERIKFINDGKRAKGQPAGSKAPLGYAIKDRQYQIDNGTADAARDMFAAFIRLKSVLAVKRYMLDTWGIDRAYSKYVNYFRNRLYIGEVYGIENACPALVSKQDFDLVNDIIRQRSQRCAGVDTDRVYLFSGILHCKECGKTMQSETVKKTYTYYRCRTRMLDNTSCPHTKRIREDVLEDYLLHELAGIAERNNRYYKKAKKRPTQSADSIRKKMSKLKTLYLNDLIELDDYKAEYSILKRSLETVEEKPKTDLDALRNGLGEYGTYSREEKKEFWTRFIKRIDADNDGAFFVTPR

SEQ ID NO: 9187 - protein, 442 aa, Unknown
  Description of Unknown: Integrase B9188 sequence
  SM00857,IPR006118,G3DSA:1.10.10.2600,IPR036162,PS51737, G3DSA:3.40.50.1390,IPR006119,IPR038109,IPR011109,SSF53041, PTHR30461,PS00397,PS51736,cd00338,PF00239
MKRAALYVRVSTQEQKNSGLSVDSQIDALEKYCEEQGYTVAGIYNDAGISARKKYTKRPALLQLLEDCRQHKIDIILFTRLDRWFRAVAGYYEVQSVLDACKVPWRAIWEDYETETSQGIFKVNIMLSVAQAEADRDSEKIRSVMEFKRSNKEYIGGKVPVGYRVEGKKIVKDEETRGIIEDMFEHYFQTFSKAGTADYILNKYPDFIRTRTRIVKIMSSPAYHGEMYGVKNYCESYITEEQAQKINEVSSQKTWTDCRRRIYIFSGLMKCPICGCRLSGCAIGKKGKKYKVYHCPHSVAQKHKTYTRSEKKLETYMLDHIEEKIQLDVLRAEGRVKATGNDAEKRKKKLSSELGRINKMFEKGRITEEYYDERYEAISKELSQTAATEELETKKKIQSRFPDGWKDMYMQLDEQGKQVFWKSIVKEIKISPNEFVEDIIFF

SEQ ID NO: 9188 - protein, 442 aa, Unknown
  Description of Unknown: Integrase B9189 sequence
  PTHR30461:SF3,IPR036162,PS51737,IPR011109,PTHR30461, PS00397,PF00239,G3DSA:1.10.10.2600,IPR006119,SSF53041, cd00338,SM00857,IPR025827,IPR038109, PS51736,IPR006118,PF13408,G3DSA:3.40.50.1390,Coil
MIAALMRVALIRVALYIRVSSEEQARHGLSLQEQRDALMRYAKANKMTVVGIYEDAGISARKPYKKRPELLRLLDDCEAGKIDMILFIKLDRWFRNVAGYYDVQTQLDKYGVTWQATEEDYETRTASGRLKVNIMLSVAQDEADRTSERIKFINDGKRAKGQPAGSKAPLGYVIKDRQYQIDNDTADAARDMFAAYIRLQSVLGVKRYMLETWGIDRAYNKYVNYFHNRLYIGEVYGIENACPALISKQDFDIVNDILRQRSQRCAGVETDRVYLFSGLLHCKECGKTMQSETAKQIYTYYRCRTRMLDNSACQHKKRIREDALEDYLLHELEGIAERNNRYYKKAEKKPTQSADAIRKKMDKLKTLYLNDLIELDEYKKEYTALKKSLEAVEEKPKTNLDALRNGLAEYGTYSREEKKEFWTRFIRRIDTDDDGAFFVTPR

SEQ ID NO: 9189 - protein, 442 aa, Unknown
  Description of Unknown: Integrase B9190 sequence
  PTHR30461:SF3,IPR036162,PS51737,IPR011109,PTHR30461, PS00397,PF00239,G3DSA:1.10.10.2600,IPR006119,SSF53041, cd00338,SM00857,IPR025827,IPR038109,PS51736, IPR006118,PF13408,G3DSA:3.40.50.1390,Coil
MIAALMRVALIRVALYIRVSSEEQARHGLSLQEQRDALIRYAKANKMTVVGIYEDAGISARKPYKKRPALLRLLGDCKDGKIDMILFVKLDRWFRNVAGYYDVQTQLDQYGVTWQATEEDYETRTASGRLKVNIMLSVAQDEADRTSERIKFINDGKRAKGQPAGSKAPLGYVITDRQYQIDNGTVDAARDMFAAFIRLKSVLAVKRYMLDTWGIDRAYSKYVNYFRNRLYIGEVYGIENACPALVSKQDFDIVNDIIRQRSQRCAGVDTDRVYLFSGILHCKECGKTMQSETVKKTYTYYRCRTRMLDNTSCPHTKRIREDVLEDYLLHELAGIAERNNRYYKKAEKKPTQSADSIRKKMSKLKTLYLNDLIELDDYKAEYSILKRSLETVEEKPKTDIDALRNGLGEYGTYSREEKKEFWTRFIKRIDADNDGAFFVTPR

SEQ ID NO: 9190 - protein, 442 aa, Unknown
  Description of Unknown: Integrase B9191 sequence
  PTHR30461:SF3,IPR036162,PS51737,IPR011109,PTHR30461, PS00397,PF00239,G3DSA:1.10.10.2600,IPR006119,SSF53041, cd00338,SM00857,IPR025827,IPR038109,PS51736, IPR006118,PF13408,G3DSA:3.40.50.1390,Coil
MIAALMRVALIRAALYIRVSSEEQARHGLSMQEQRDALMRYAKANKMTVVGIYEDAGISARKPYKKRPALMRLLDDCKAGKIDMILFIKLDRWFRNVAGYYDVQTQLDKCGVTWQATEEDYETRTASGRLKVNIMLSVAQDEADRTSERIKFINDGKRAKGQPAGSKAPLGYIVKDRQYQIDNDTADAARDMFAAYIRLQSVLGVKKYMLETWGIDRAYNKYVNYFHNRLYIGEVYGIENACPALVSKQDFDIVNDILRQRSQRCAGVETDRVYLFSGLLHCKECGKTMQSETIKQTYTYYRCRTQMLDNSACQHKKRIREDALEDYLLHELEGIAARNNRYYKKAEKKPTQSTDAIRKKMDKLKTLYLNDLIELDEYKKEYTALKKSLETVEEKPKTDLDALRNGLGEYDTYSREEKKEFWTRFIRRIDADNDGAFFVTPR

SEQ ID NO: 9191 - protein, 442 aa, Unknown
  Description of Unknown: Integrase B9192 sequence
  PTHR30461:SF3,SM00857,G3DSA:1.10.10.2600,IPR036162,PF13408, PS51737,G3DSA:3.40.50.1390,IPR025827,IPR006119,IPR038109, IPR011109,SSF53041,PTHR30461,Coil,PS51736, cd00338,PF00239
MIAALMREALIRAALYIRVTSEEQARHGLSLQEQRDALTRYAKANKMTVVGIYEDAGISARKPYKKRPALLRLLDDCKAGKVDTILFIKLDRWFRNVAGYYDVQTQLDKYGVTWQATEEDYETRTASGRLKVNIMLSVAQDEADRASERVKFINDGKRAKGQPAGSKAPLGYIVKDRQYQIDNDTADAARDMFAAYIKLQSVLGVKKYMLEVWGIDRAYTKYVNYFRNRLYIGEVYGIESACPALISKQDFDIVNDILRQRSQRCAGVETDRVYLFSGLLHCKECGKTMQSETAKQIYTYYRCRTRMLDNSACRHKKRIREDALEDYLLHELEGIAERNNRYYKKAEKKPTQSADAIRKKMSKLKTLYLNDLIELDEYKREYASLKKSLEAVEEKPKTNLDALRNGLAEYDTYSREEKKEFWTRFIRRIDADDDGAFFVTPR

SEQ ID NO: 9192 - protein, 442 aa, Unknown
  Description of Unknown: Integrase B9193 sequence
  PTHR30461:SF3,IPR036162,PS51737,IPR011109,PTHR30461, PS00397,PF00239,G3DSA:1.10.10.2600,IPR006119,SSF53041, cd00338,SM00857,IPR025827,IPR038109,PS51736, IPR006118,PF13408,G3DSA:3.40.50.1390,Coil
MIAALMRVALIRVALYIRVSSEEQARHGLSLQEQRDALMRYAKANKMTVVGIYEDAGISARKPYKKRPELLRLLDDCEAGKIDMILFIKLDRWFRNVAGYYDVQTQLDKYGVTWQATEEDYETRTASGRLKVNIMLSVAQDEADRTSERIKFINDGKRAKGQPAGSKAPLGYVIKDRQYQIDNDTADAARDMFAAYIRLQSVLGVKRYMLETWGIDRAYNKYVNYFHNRLYIGEVYGIENACPALISKQDFDIVNDILRQRSQRCAGVETDRVYLFSGLLHCKECGKTMQSETIKQTYIYYRCRTRMLDNSACQHKKRIREDALEDYLLHELEGIAERNNRYYKKAEKKPTQSADAIRKKMDKLKTLYLNDLIELDEYKKEYTALKKSLEAVEEKPKTNLDALRNGLAEYGTYSREEKKEFWTRFIRRIDTDDDGAFFVTPR

SEQ ID NO: 9193 - protein, 442 aa, Unknown
  Description of Unknown: Integrase B9194 sequence
  PTHR30461:SF3,SM00857,G3DSA:1.10.10.2600,IPR036162,PF13408, PS51737,IPR025827,G3DSA:3.40.50.1390,IPR006119,IPR038109, IPR011109,SSF53041,PTHR30461,Coil,PS51736, cd00338,PF00239
MIAALMREALIRAALYIRVTSEEQARHGLSLQEQRDALIRYAKANKMTVVGIYEDAGISARKPYKKRPALLRLLDDCKAGKIDTILFIKLDRWFRNVAGYYDVQTQLDQYGVTWQATEEDYETRTASGRLKVNIMLSVAQDEADRTSERVKFINDGKRAKGQPAGSKAPLGYIIKDRQYQIDNDTADAARDMFAAYVRLQSVLGVKRYMLETWGIDRAYTKYVNYFRNRLYIGEVYGIENACPALISKQDFDIVNDILRQRSQRCAGVETDRVYLFSGLLHCKECGKTMQSETAKQIYTYYRCRTRMLDNSACQHKKRIREDALEDYLLHELEGIAERNNRYYKKAEKKPTQSADAIRKKMSKLKTLYLNDLIELDEYKREYASLKKTLEAVEEKPETNLDALRNGLAEYDTYSREEKKEFWTRFIRRIDADDDGAFFVTPR

SEQ ID NO: 9194 - protein, 442 aa, Unknown
  Description of Unknown: Integrase B9195 sequence
  PTHR30461:SF3,SM00857,G3DSA:1.10.10.2600,IPR036162,PF13408, IPR025827,PS51737,G3DSA:3.40.50.1390,IPR006119,IPR038109, SSF53041,IPR011109,PTHR30461,Coil,PS51736, cd00338,PF00239
MIAALMREALIKAALYIRVTSEEQARHGLSLQEQRDALIRYAKANKMTVVGIYEDAGISARKPYKKRPALLRLLDDCKAGKVDTILFIKLDRWFRNVAGYYDVQTQLDKYGVTWQATEEDYETRTASGRLKVNIMLSVAQDEADRASERVKFITDGKRAKGQPAGSKAPLGYIIKNRQYQIDNDTVDAARDMFAAYIRLQSVLGVKKYMLERWGIDRAYTKYVNYFRNRLYIGEVYGIENACPALVSKQDFDIVNDILRQRSQRCAGVETDRVYLFSGLLHCKECGKTMQSETAKQIYTYYRCRTRMLDNSACQHKKRIREDALEDYLLHELEGIAERNNRYYKKAAKKPTQSADAIRKKMSKLKTLYLNDLIELDEYKREYASLKKSLEAVEEKPKTNLDALRNGLAEYDTYSREEKKEFWTRFIRRIDADDDGAFFVTPR

SEQ ID NO: 9195 - protein, 442 aa, Unknown
  Description of Unknown: Integrase B9196 sequence
  PTHR30461:SF3,IPR036162,PS51737,IPR011109,PTHR30461, PS00397,PF00239,G3DSA:1.10.10.2600,IPR006119,SSF53041, cd00338,SM00857,IPR025827,IPR038109,PS51736, IPR006118,PF13408,G3DSA:3.40.50.1390,Coil
MIAALMRVALIRVALYIRVSSEEQARHGLSLQEQRDALIRYAKEHKMTVVGIYEDAGISARKPYKKRPALLRLLGDCKDGQIDMILFVKLDRWFRNVAGYYDVQTQLDQYGVTWQATEEDYETRTASGRLKVNIMLSVAQDEADRTSERIKFINDGKRAKGQPAGSKAPLGYAIKDRQYQIDNGTADAARDMFAAFIRLKSVLAVKRYMLDTWGIDRTYSKYVNYFRNRLYIGEVYGIENACPALVSKQDFDIVNDIIRQRSQRCAGVDTDRVYLFSGILHCKECGKTMQSETVKKTYTYYRCRTRMLDNTSCPHTKRIREDVLEDYLLHELAGIAERNNRYYKKAEKKPTQSADSIRKKMSKLKTLYLNDLIELDDYKAEYSILKRSLETVEEKPKTDLDALRNGLGEYGTYSREEKKEFWTRFIKRIDADNDGAFFVTPR

SEQ ID NO: 9196 - protein, 442 aa, Unknown
  Description of Unknown: Integrase B9197 sequence
  PTHR30461:SF3,IPR036162,PS51737,IPR011109,PTHR30461, PS00397,PF00239,G3DSA:1.10.10.2600,IPR006119,SSF53041, cd00338,SM00857,IPR025827,IPR038109,PS51736, IPR006118,PF13408,G3DSA:3.40.50.1390,Coil
MIAALMRVALIRVALYIRVSSEEQARHGLSLQEQRDALMRYAKANKMTVVGIYEDAGISARKPYKKRPELLRLLDDCEAGKIDMILFIKLDRWFRNVAGYYDVQTQLDKYGVTWQATEEDYETRTASGRLKVNIMLSVAQDEADRTSERIKFINDGKRAKGQPAGSKAPLGYVIKDRQYQIDNDTADAARDMFAAYIRLQSVLGVKRYMLETWGIDRAYNKYVNYFHNRLYIGEVYGIENACPALISKQDFDIVNDILRQRSQRCAGVETDRVYLFSGLLHCKECGKTMQSETAKQIYTYYRCRTRMLDNSACQHKKRIREDALEDYLLHELEGIAERNNRYYKKAEKKPTQSADAIRKKMSKLKTLYLNDLIELDEYKKEYTTLKKSLEAVEENPKTNLDALRNGLAEYDTYSREEKKEFWTRFIRRIDADDDGAFFVTPR

SEQ ID NO: 9197 - protein, 442 aa, Unknown
  Description of Unknown: Integrase B9198 sequence
  PTHR30461:SF3,IPR036162,PS51737,IPR011109,PTHR30461, PS00397,PF00239,G3DSA:1.10.10.2600,IPR006119,SSF53041, cd00338,SM00857,IPR025827,IPR038109,PS51736, IPR006118,PF13408,G3DSA:3.40.50.1390,Coil
MIAALMRVALIRVALYIRVSSEEQARHGLSLQEQRDALIRYAKANKMTVVGIYEDAGISARKPYKKRPALLRLLGDCKDGKIDMILFVKLDRWFRNVAGYYDVQTQLDQYGVTWQATEEDYETRTASGRLKVNIMLSVAQDEADRTSERIKFINDGKRAKGQPAGSKAPLGYVITDRQYQIDNGTVDAARDMFAAFIRLKSVLAVKRYMLDTWGIDRAYSKYVNYFRNRLYIGEVYGIENACPALVSKQDFDIVNDIIRQRSQRCAGVDTDRVYLFSGILHCKECGKTMQSETVKKTYTYYRCRTRMLDNTSCPHTKRIREDVLEDYLLHELAGIAERNNRYYKKAEKKPTQSADSIRKKMSKLKTLYLNDLIELDDYKAEYSILKRSLETVEEKPKTDLDALRTGLGEYGTYSREEKKEFWTRFIKRIDADNDGAFFVTPR

SEQ ID NO: 9198 - protein, 442 aa, Unknown
  Description of Unknown: Integrase B9199 sequence
  PTHR30461:SF3,IPR036162,PS51737,IPR011109,PTHR30461, PS00397,PF00239,G3DSA:1.10.10.2600,IPR006119,SSF53041, cd00338,SM00857,IPR025827,IPR038109,PS51736, IPR006118,PF13408,G3DSA:3.40.50.1390,Coil
MIAALMRVALIRVALYIRVSSEEQARHGLSLQEQRDALIRYAKANKMTVVGIYEDAGISARKPYKKRPALLRLLGDCKDGKIDMILFVKLDRWFRNVAGYYDVQTQLDQYGVTWQATEEDYETRTASGRLKVNIMLSVAQDEADRTSERIKFINDGKRAKGQPAGSKAPLGYVITDRQYQIDNGTVDAARDMFAAFIRLKSVLAVKRYMLDTWGIDRAYSKYVNYFRNRLYIGEVYGIENACPALVSKQDFDIVNDIIRQRSQRCAGVDTDRVYLFSGILHCKECGKTMQSETVKKTYTYYRCRTRMLDNTSCPHTKRIREDVLEDYLLHELAGIAERNNRYYKKAEKKPTQSADSIRKKMSKLKTLYLNDLIELDDYKAEYSILKRSLETVEETPKTDLDALRNGLGEYGTYSREEKKEFWTRFIKRIDADNDGAFFVTPR

SEQ ID NO: 9199 - protein, 442 aa, Unknown
  Description of Unknown: Integrase B9200 sequence
  PTHR30461:SF3,IPR036162,PS51737,IPR011109,PTHR30461, PS00397,PF00239,G3DSA:1.10.10.2600,IPR006119,SSF53041, cd00338,SM00857,IPR025827,IPR038109,PS51736, IPR006118,PF13408,G3DSA:3.40.50.1390,Coil
MIAALMRAALIRVALYIRVSSEEQARHGLSLQEQRDALIRYAKANKMTVVGIYEDAGISARKPYKKRPALLRLLGDCKDGKIDMILFVKLDRWFRNVAGYYDVQTQLDQYGVTWQATEEDYETRTASGRLKVNIMLSVAQDEADRTSERIKFINDGKRAKGQPAGSKAPLGYAIKDRQYQIDNGTADAARDMFAAFIRLKSVLAVKRYMLDTWGIDRAYSKYVNYFRNRLYIGEVYGIENACPALVSKQDFDIVNDIIRQRSQRCAGVDTDRVYLFSGILHCKECGKTMQSETVKKTYTYYRCRTRMLDNTSCPHTKRIREDVLEDYLLHELAGIAERNNRYYKKAEKKPTQSADSIRKKMSKLKTLYLNDLIELDDYKAEYSILKRSLETVEEKPKTDLDALRNGLGEYGTYSREEKKEFWTRFIKRIDADNDGAFFVTPR

SEQ ID NO: 9200 - protein, 442 aa, Unknown
  Description of Unknown: Integrase B9201 sequence
  PTHR30461:SF3,SM00857,G3DSA:1.10.10.2600,IPR036162,PF13408, PS51737,IPR025827,G3DSA:3.40.50.1390,IPR006119,IPR038109, PF07508,IPR011109,SSF53041,PTHR30461,PS51736, cd00338,PF00239
MKNVRLYIRVSHEEQVKFGYSIDAQINALKTYCKENKLIVKGRYVDEGISAYSIKKRHALQKMINESENGDIILFTKLDRFSRNVLDANIILKNLNDKGVSIKAINEDDIDTSTADGKFIFDLKLSLAERERNKTSERINDVFKYKAQKGESISGKVPRGYKVVNKKYVPSDLAPVIKEIFSYYDTYSNISKTMRYIKETHNLNWSFEVVKQILKNKIYIGVHKYNDEFCTPLIDKGLFDRVQNKLERNNKKPRTYIYLFSKLIKCPCCGSVLVGNSNVSTKEPSYYYRCNTYYRNHGALKCSSNKTFSEKKLENYLVNNIHELLEVYIADIDKKNKPMPNNNNKISALKRKIARLKDLYVEELIDIDTYKKDYNKYKEELKRLTPTIENKASDAIMQLMNVNIPELYKKLTREDKQAFWQSIIKEIHIIDQNNENYEIFFN

SEQ ID NO: 9201 - protein, 442 aa, Unknown
  Description of Unknown: Integrase B9202 sequence
  PTHR30461:SF3,IPR036162,PS51737,IPR011109,PTHR30461, PS00397,PF00239,G3DSA:1.10.10.2600,IPR006119,SSF53041, cd00338,SM00857,IPR025827,IPR038109,PS51736, IPR006118,PF13408,G3DSA:3.40.50.1390,Coil
MRAALMRVALIRVALYIRVSSEEQARHGLSLQEQRDALMRYAKEHKMTVVGIYEDAGISARKPYKKRPALLRLLGDCKDGQIDMILFVKLDRWFRNVAGYYDVQTQLDQYGVTWQATEEDYETRTASGRLKVNIMLSVAQDEADRTSERIKFINDGKRAKGQPAGSKAPLGYAIKDRQYQIDNGTADAARDMFAAFIRLKSVLAVKRYMLDTWGIDRAYSKYVNYFRNRLYIGEVYGIENACPALVSKQDFDLVNDIIRQRSQRCAGVDTDRVYLFSGILHCKECGKTMQSETVKETYTYYRCRTRMLDNSACPHTKRIREDVLEDYLLHELAGIAERNNRYYKKAEKKPTQSADLIRKKMSKLKTLYLNDLIELDDYKAEYASLKRTLETVEEKPETDLDALRNGLSEYDTYSREEKKEFWTRFIRRIDADNDGAFFVTPR

SEQ ID NO: 9202 - protein, 442 aa, Unknown
  Description of Unknown: Integrase B9203 sequence
  PTHR30461:SF3,IPR036162,PS51737,IPR011109,PTHR30461, PS00397,PF00239,G3DSA:1.10.10.2600,IPR006119,SSF53041, cd00338,SM00857,IPR025827,IPR038109,PS51736, IPR006118,PF13408,G3DSA:3.40.50.1390,Coil
MIAALMRVALIRVALYIRVSSEEQARHGLSLQEQRDALIRYAKANKMTVVGIYEDAGISARKPYNKRPALLRLLGDCKDGKIDMILFVKLDRWFRNVAGYYDVQTQLDQYGVTWQATEEDYETRTASGRLKVNIMLSVAQDEADRTSERIKFINDGKRAKGQPAGSKAPLGYAIKDRQYQIDNGTADAARDMFAAFIRLKSVLAVKRYMLDTWGIDRAYSKYVNYFRNRLYIGEVYGIENTCPALVSKQDFDLVNDIIRQRSQRCAGVDTDRVYLFSGILHCKECGKTMQSETVKKTYTYYRCRTRMLDNTSCPHTKRIREDVLEDYLLHELAGIAERNNRYYKKAEKKPTQSADSIRKKMSKLKTLYLNDLIELDDYKAEYSILKRSLETVEEKPKTDLDALRNGLGEYGTYSREEKKEFWTRCIKRIDADNDGAFFVTPR

SEQ ID NO: 9203 - protein, 442 aa, Unknown
  Description of Unknown: Integrase B9204 sequence
  PTHR30461:SF3,IPR036162,PS51737,IPR011109,PTHR30461, PS00397,PF00239,G3DSA:1.10.10.2600,IPR006119,SSF53041, cd00338,SM00857,IPR025827,IPR038109,PS51736, IPR006118,PF13408,G3DSA:3.40.50.1390,Coil
MIAALMRVALIRVALYIRVSSEEQARHGLSLQEQRDALIRYAKANKMTVVGIYEDAGISARKPYKKRPALLRLLGDCKDGKIDMILFVKLDRWFRNVAGYYDVQTQLDQYGVTWQATEEDYETRTASGRLKVNIMLSVAQDEADRTSERIKFINDGKRAKGQPAGSKAPLGYVITDRQYQIDNGTVDAARDMFAAFIRLKSVLAVKRYMLDTWGIDRAYSKYVNYFRNRLYIGEVYGIENACPALVSKQDFDIVNDIIRQRSQRCAGVDTDRVYLFSGILHCKECGKTMQSETVKKTYTYYRCRTRMLDNTSCPHTKRIREDVLEDYLLHELAGIAEWNNRYYKKAEKKPTQSADSIRKKMSKLKTLYLNDLIELDDYKAEYSILKRSLETVEEKPKTDLDALRNGLGEYGTYSREEKKEFWTRFIKRIDADNDGAFFVTPR

SEQ ID NO: 9204 - protein, 442 aa, Unknown
  Description of Unknown: Integrase B9205 sequence
  PTHR30461:SF3,IPR036162,PS51737,IPR011109,PTHR30461, PF00239,G3DSA:1.10.10.2600,IPR006119,SSF53041,PF09851, SM00857,IPR025827,IPR038109,PS51736,cd03768, PF13408,IPR018649,G3DSA:3.40.50.1390,PF07508,Coil
MEALLYTRVSKEDQVKFGMSLDAQLESLKQYCSENNLKIRNIYSDEGISGGSITKRKAFQNMIEEAKPGDIILFTKLDRFSRNLLDANIVIKELTKKDVSIKAINEDDIDTSTADGKFIFNLKLSLAQREREKVSERINDVFEYKIKQGEVCTGKVPVGYMIKDKHLVLDPVKSVWIREMFDYFLKHQSIVGTCKWWNAKHPEQTMEYSTIKGSRLTSTFYCGKHPSGLNDHYCEPIISEEEFDKIQKLLKKNVKSNRTNHVYLFTGLLTCSHCGRRMGGFYKKWKDISITNYYRCQAYCGYRTCDMSHSISERKVEAYLLEDMVKKCDEMLSASLKHENTDEVKLQNKKANTEAKISRLKDLYVDGVLTKEEFDTKYKQLQDEIEAIKQEIKPKSNKLLELHDIDVKELYSKLNPENKRAFWRKYVDRIYFDGHDLKVVYY

SEQ ID NO: 9205 - protein, 442 aa, Unknown
  Description of Unknown: Integrase B9206 sequence
  PTHR30461:SF3,IPR036162,PS51737,IPR011109,PTHR30461, PS00397,PF00239,G3DSA:1.10.10.2600,IPR006119,SSF53041, cd00338,SM00857,IPR025827,IPR038109,PS51736, IPR006118,PF13408,G3DSA:3.40.50.1390,Coil
MIAALMRVALIRVALYIRVSSEEQARHGLSLQEQRDALMRYAKEHKMTVVGIYEDAGISARKPYKKRPALLRLLDDCKAGKIDMILFIKLDRWFRNVAGYYDVQTQLDKYGVTWQATEEDYETRTASGRLKVNIMLSVAQDEADRTSERIKFINDGKRAKGQPAGSKAPLGYIIKDRQYQIDNGTTDAARDMFAAYIKLQSVLGVKRYMLETWGIDRSYNKYINYFRNRLYIGEVYGIENACPALISKQDFDIVNDILRQRSQRCAGVETDRVYLFSGLLHCKECGKTMQSETIKQTYTYYRCRTRMLDNSACPHKKRIREDALEDYLLHELEGIAERNNRYYKKAEKKPTQSADAIRKKMDKLKTLYLNDLIELDEYKKEYTALKKSLETVEEKPRTNLDALRNGLAEYDTYSREEKKEFWTRFIRRIDADDDGAFFVTPR

SEQ ID NO: 9206 - protein, 442 aa, Unknown
  Description of Unknown: Integrase B9207 sequence
  PTHR30461:SF3,cd00338,SM00857,G3DSA:1.10.10.2600,IPR036162, PF13408,PS51737,G3DSA:3.40.50.1390,IPR025827,IPR006119, IPR038109,IPR011109,SSF53041,PTHR30461,PS51736, Coil,PF00239
MIAALMREALIKAALYIRVTSEEQARHGLSLQEQRDALIRYAKANKMTVVGIYEDAGISARKPYKKRPALLRLLDDCKAGKVDTILFIKLDRWFRNVAGYYDVQTQLDKYGVTWQATEEDYETRTASGRLKVNIMLSVAQDEADRASERVKFINDGKRAKGQPAGSKAPLGYIVKDRQYQIDNDTADAARDMFAAYVRLQSVLGVKRYMLETWKIDRAYTKYVNYFRNRLYIGEVYGIENACPALVSKQDFDLVNDIIRHRSQRCAGVETDRVYLFSGLLHCKECGKTMQSETAKQIYTYYRCRTRMLDNSACPHKKRIREDALEDYLLNELEGIAERNNRYYKKAEKKPTHSADSIRKKMSKLKTLYLNDLIELGDYKAEYASLKRAMETVEEKPETDLDALKDGLGEYDTYSRNEKKEFWTRFIRRIDADNDGAFFVTPR

SEQ ID NO: 9207 - protein, 442 aa, Unknown
  Description of Unknown: Integrase B9208 sequence
  PTHR30461:SF3,IPR036162,PS51737,IPR011109,PTHR30461, PS00397,PF00239,G3DSA:1.10.10.2600,IPR006119,SSF53041, cd00338,SM00857,IPR025827,IPR038109,PS51736, IPR006118,PF13408,G3DSA:3.40.50.1390,Coil
MRCAIYIRVSSAEQRREGYSLPEQKRVLTEYAEEQGYKIVDIYADEGISASKKPHLRHDFQRMMKDVEAGLIDIIIFIKLDRWFRNVGDYYRTQSILDAHNVKWKSVLEDYDTTTRTGRLNLNIKLTIAEDEAANTSERVKFVLDAKVRNGEPNTGTQPFGYKIEKIDGIKRIIKNPATQAECEDMFRRFFETKSGYETTRYINQKYGRNHADNTITRRLKNLAYTGEYRGIYDYRPAYITHEQHAEILRILGKSTRKAKGRKVYLFAGMVECPECERTLASCTSNKLTLAYRCRYHGVSNCDYKHIVKEKDIEEYLLNNIRNELENYKTNIKSKLRKKAPENPAVYENQLERLNNVYIMGNISNEEYNRKAAELKAKIADLKAGNNQADTIPQDTMKLLSDSSFPTLYNRLNRKERRALWASIIDKIKIEGTKPSSIKFLE

SEQ ID NO: 9208 - protein, 442 aa, Unknown
  Description of Unknown: Integrase B9209 sequence
  PTHR30461:SF3,IPR036162,PS51737,IPR011109,PTHR30461, PS00397,PF00239,G3DSA:1.10.10.2600,IPR006119,SSF53041, cd00338,SM00857,IPR025827,IPR038109,PS51736, IPR006118,PF13408,G3DSA:3.40.50.1390,Coil
MRCAIYIRVSSAEQRREGYSLPEQKRVLTEYAEEQGYKIVDIYADEGISASKKPHLRHDFQRMMKDVEGGLIDIIIFIKLDRWFRNVGDYYRTQSILDAHNVKWKSVLEDYDTTTRTGRLNLNIKLTIAEDEAANTSERVKFVLDAKVRNGEPNTGTQPFGYKIEKIDGIKRIIKNPDTQAECEDMFRRFFETKSGYETTRYINQKYGRNHADNTITRRLKNLAYTGEYRGIYDYRPAYITHEQHAEILRILGKSTRKAKGRKVYLFAGMVECPECERTLASCTSNKLTLAYRCRYHGVSNCDYKHIVKEKDIEEYLLNNIRNELENYKTNIKSKLRKKAPENPAVYENQLERLNNVYIMGNISNEEYNRKAAELKAKIADLKAGNNQADTIPQDTMKLLSDSSFPTLYNRLNRKERRALWASIIDKIKIEGTKPSSIKFLE

SEQ ID NO: 9209 - protein, 442 aa, Unknown
  Description of Unknown: Integrase B9210 sequence
  PTHR30461:SF3,IPR036162,PS51737,IPR011109,PTHR30461, PS00397,PF00239,G3DSA:1.10.10.2600,IPR006119,SSF53041, cd00338,SM00857,IPR025827,IPR038109,PS51736, IPR006118,PF13408,G3DSA:3.40.50.1390,Coil
MIAALMRVALIRVALYIRVSSEEQARHGLSLQEQRDALMRYAKEHKMTVVGIYEDAGISARKPYKKRPALLRLLGDCKDGKIDMILFVKLDRWFRNVAGYYDVQTQLDQYGVTWQATEEDYETRTASGRLKVNIMLSVAQDEADRTSERIKFINDGKRAKGQPAGSKAPLGYVITDRQYQIDNGTVDAARDMFAAFIRLKSVLAVKRYMLDTWGIDRAYSKYVNYFRNRLYIGEVYGIENACPALVSKQDFDIVNDIIRQRSQRCAGVDTDRVYLFSGILHCKECGKTMQSETVKKTYTYYRCRTRMLDNTSCPHTKRIREDVLEDYLLHELAGIAERNNRYYKKAEKKPTQSADSIRKKMSKLKTLYLNDLIELDDYKAEYSILKRSLETVEEKPKTDLDALRNGLGEYGTYSREEKKEFWTRFIKRIDADNDGAFFVTPR

SEQ ID NO: 9210 - protein, 442 aa, Unknown
  Description of Unknown: Integrase B9211 sequence
  SM00857,G3DSA:1.10.10.2600,IPR036162,PF13408,PS51737, G3DSA:3.40.50.1390,IPR025827,IPR006119,IPR038109,PF07508, IPR011109,SSF53041,PTHR30461,PS51736,cd00338, PF00239
MKNVRLYIRVSHEEQVKFGYSIDAQINALKTYCKENKLIVKGRYVDEGISAYSIKKRHALQKMINESENGDIILFTKLDRFSRNVLDANIILKNLNDKGVSIKAINEDDIDTSTADGKFIFDLKLSLAERERNKTSERINDVFKYKAQKGESISGKVPRGYKVVNKKYVPSDLAPVIKEIFSYYDTYSNISKTMRYIKETHNLNWSFEVVKQILKNKIYIGVHKYNDEFCTPLIDKGLFDRVQNKLERNNKKPRTYIYLFSKLIKCPYCGSVLVGNSNVSTKEPSYYYRCNTYYRNHGALKCSSNKTFSEKKLENYLVNNIHELLEVYIADIDKKNKPTPNNNNKISALKRKIARLKDLYVEELIDIDTYKKDYNKYKEELKRLTPTIENKASDAIMQLMNVNIPELYKKLTREDKQAFWQSIIKEIHIIDQNNENYEIFFN

SEQ ID NO: 9211 - protein, 442 aa, Unknown
  Description of Unknown: Integrase B9212 sequence
  PTHR30461:SF3,IPR036162,PS51737,IPR011109,PTHR30461, PS00397,PF00239,G3DSA:1.10.10.2600,IPR006119,SSF53041, cd00338,SM00857,IPR025827,IPR038109,PS51736, IPR006118,PF13408,G3DSA:3.40.50.1390,Coil
MIAALMRVALIRVALYIRVSSEEQARHGLSLQEQRDALIRYAKANKMTVVGIYEDAGISARKPYKKRPALLRLLGDCKDGKIDMILFVKLDRWFRNVAGYYDVQTQLDQYGVTWQATEEDYETRTASGRLKVNIMLSVAQDEADRTSERIKFINDGKRAKGQPAGSKAPLGYAIKDRQYQIDNGTADAARDMFAAFIRLKSVLAVKRYMLDTWGIDRAYSKYVNYFRNRLYIGEVYGIENACPALVSKQDFDLVNDIIRQRSQRCAGVDTDRVYLFSGILHCKECGKTMQSETVKKTYTYYRCRTRMLDNTSCPHTKRIREDVLEDYLLHELAGIAERNNRYYKKAEKKPTQSADSIRKKMSKLKTLYLNDLIELDDYKAEYSILKRSLETVEEKPKTDLDALRNGLGEYGTYSREEKKEFWTRFIKRIDADNDGAFFVTPR

SEQ ID NO: 9212 - protein, 442 aa, Unknown
  Description of Unknown: Integrase B9213 sequence
  PTHR30461:SF3,IPR036162,PS51737,IPR011109,PTHR30461, PS00397,PF00239,G3DSA:1.10.10.2600,IPR006119,SSF53041, cd00338,SM00857,IPR025827,IPR038109,PS51736, IPR006118,PF13408,G3DSA:3.40.50.1390,Coil
MIAALMRVALIRVALYIRVSSEEQARHGLSLQEQRDALMRYAKEHKMTVVGIYEDAGISARKPYKKRPALLRLLDDCKAGKIDMILFIKLDRWFRNVAGYYDVQTQLDKYGVTWQATEEDYETRTASGRLKVNIMLSVAQDEADRTSERIKFINDGKRAKGQPAGSKAPLGYIIKDRQYQIDNDTADAARDMFAAYIRLQSVLGVKRYMLETWGIDRAYNKYVNYFHNRLYIGEVYGIENACPAIISKQDFDIVNDILRQRSQRCAGVETDRVYLFSGLLHCKECGKTMQSETIKQVYTYYRCRTRMLDNSACQHKKRIREDALEDYLLHELEGIAERNNRYYKKAEKKPTQSADAIRKKMGKLKTLYLNDLIELDEYKKEYASLKKSLETVEEKPKTNLDALRNGLAEYDTYSREEKKEFWTRFIRRIDADDDGAFFVTPR

SEQ ID NO: 9213 - protein, 442 aa, Unknown
  Description of Unknown: Integrase B9214 sequence
  PTHR30461:SF3,IPR036162,PS51737,IPR011109,PTHR30461, PS00397,PF00239,G3DSA:1.10.10.2600,IPR006119,SSF53041, cd00338,SM00857,IPR025827,IPR038109,PS51736, IPR006118,PF13408,G3DSA:3.40.50.1390,Coil
MIAALMRVALIRVALYIRVSSEEQARHGLSLQEQRDALMRYAKEHKMTVVGIYEDAGISARKPYKKRPALLRLLGDCKDGQIDMILFVKLDRWFRNVAGYYDVQTQLDQYGVTWQATEEDYETRTASGRLKVNIMLSVAQDEADRTSERIKFINDGKRAKGQPAGSKAPLGYAIKDRQYQIDNGTADAARDMFAAFIRLKSVLAVKRYMLDTWGIDRAYSKYVNYFRNRLYIGEVYGIENACPALVSKQDFDLVNDIIRQRSQRCAGVDTDRVYLFSGILHCKECGKTMQSETVKKTYTYYRCRTRMLDNTSCPHTKRIREDVLEDYLLHELAGIAERNNRYYKKAEKKPTQSADSIRKKMSKLKTLYLNDLIELDDYKAEYSILKRSLETVEEKPKTDLDALRNGLGEYGTYSREEKKEFWTRFIKRIDADNDGAFFVTPR

SEQ ID NO: 9214 - protein, 442 aa, Unknown
  Description of Unknown: Integrase B9215 sequence
  PTHR30461:SF3,IPR036162,PS51737,IPR011109,PTHR30461, PS00397,PF00239,G3DSA:1.10.10.2600,IPR006119,SSF53041, cd00338,SM00857,IPR025827,IPR038109,PS51736, IPR006118,PF13408,G3DSA:3.40.50.1390,Coil
MIAALMRVALIRVALYIRVSSEEQARHGLSLQEQRDALIRYAKANKMTVVGIYEDAGISARKPYKKRPALLRLLGDCKDGKIDMILFVKLDRWFRNVAGYYDVQTQLDQYGVTWQATEEDYETRTASGRLKVNIMLSVAQDEADRTSERIKFINDGKRAKGQPAGSKAPLGYVITDRQYQIDNGTVDAARDMFAAFIRLKSVLAVKRYMLDTWGIDRAYSKYVNYFRNRLYIGEVYGIENACPALVSKQDFDIVNDIIRQRSQRCAGVDTDRVYLFSGILHCKECGKTMQSETVKKTYTYYRCRTRMLDNTSCPHTKRIREDVLEDYLLHELAGIAERNNRYYKKAEKKPTQSADSIRKKMSKLKTLYLNDLIELDDYKAEYSILKRSLETVEEKPKTDLDALRNGLGEYGTYSREEKKEFWTRFLKRIDADNDGAFFVTPR

SEQ ID NO: 9215 - protein, 441 aa, Unknown
  Description of Unknown: Integrase B9216 sequence
  SM00857,IPR006118,G3DSA:1.10.10.2600,IPR036162,PF13408, PS51737,G3DSA:3.40.50.1390,IPR025827,PS00397,IPR006119, IPR038109,IPR011109,SSF53041,PTHR30461,Coil, PS51736,cd00338,PF00239
MKRAAIYVRVSTKEQKEKGLSVDSQLLALREYCSNNGYVIAGEYNDAGISARKKYINRPALLQLINDCKEGKIDIILFTKLDRWFRSVADYYQVQTLLDSYKVPWRAIWEDYETETSTGLFKVNIMLSVSQNEADKTSERTKEAVKYRRLRGDFVGGRCPCGYRRENKKLVFDEETYDAINAMFRTYLSCFSIAKATEAVAEYGLHIATSQICRMLKSPAYAGNASGSECPAYITWDEHLLILTNSTKRNRTPKRSDRVYLFSGLCRCGYCGGRMVARVNRWVKNGQQLYYPFYSCAAHNDKRNLDCPGVNLAETKIEAYLMEHLEAELKMCQSEFELEQENKATCENKIKTLEQKLKRIGVRYEDGDIPFEEYKDKRFAIKKEIAGYKDKIDNARSVPSLPDNWKDLYNSLTPDNKRGFWLNILKEIDITKEAINIVFPV

SEQ ID NO: 9216 - protein, 441 aa, Unknown
  Description of Unknown: Integrase B9217 sequence
  SM00857,IPR036162,PF13408,PS51737,G3DSA:3.40.50.1390, IPR025827,IPR006119,SSF53041,IPR011109,PF00239, PTHR30461,PS51736,Coil,cd00338
MNVLRAALYPRVSTEEQAKFGLSIHDQQNDLEEYAKANGMKVVGIYPDAGFSARKKIEKRPAMMELLAAVQRNEIDIILVTKLDRWFRNIGEYYKMQDILEAHNVCWKTIYEDYDTSTAAGRLKINIMLAVAQDEADRTGERIKKVLDAKKSRNEVCTGHLPKGYKIDGKFAVIHREAEPDIKTFFSVFLETGSIHNAISAVPNLKLQYRTASKMLDNRGYVGEWHGLTIPPYLTAEEFARIQTLRRRLQRKVAQNRTYIFSGLLVCGDCGRRIGGRPRKLVNGESYVYSCDGAYQYKGCPNHANIMEATIEQYLLETIDAKIEIFANTKDEPKQDSKEIEEKAKSLQKKLAKLSDLYLDDLISKSEYAKRYADLTAQLESAEALLRKPPAKSAKDLSEAFFSGWQDIYKELSRENKKVFWKLKLKEIRLYQDRRIDFDFL

SEQ ID NO: 9217 - protein, 441 aa, Unknown
  Description of Unknown: Integrase B9218 sequence
  PTHR30461:SF3,SM00857,G3DSA:1.10.10.2600,IPR036162, PF13408,IPR025827,PS51737,G3DSA:3.40.50.1390, IPR006119,IPR038109,PF07508,SSF53041, IPR011109,PTHR30461,PS51736,cd00338,PF00239
MIVNEIVPQELANKRLRVCAYARVSADNEDMMHSLSAQVSHYNDMIASNPKWIFAGIYADGGLSGTKTNRPEFQRMIQDCKNGKIDLIVTKSISRFSRNTIVMLETIRMLDEMGIDVYFEEQQMNIKSGKGELMLTIIGSFAQEEARQVSENMKWRIKKDFEKGILWGGNNPYGYIIDRKEKRLVINPEQAKVVRLIFEEYLDGKGASLIAKKLNKMGFKTMMNSEWNNNVVMAILKNEVYTGDLLLQKTYRENYLTKKTLKNKGELQQYYVEDDHEPIITHEMFEETQRIRNERIKKFKNKISYSNKAYPFTGIIKCSCCGSTFNHKTTKYNKLWICKTFNMKGKEYCQESKQIDESKLYEAINKYFGWDCFKENDFKTKVEYLIAKPNNEIEMHFKDGNVAIIKWEDRSRSESWTSEMKEKARQKKIEQYKKRGGGLNG

SEQ ID NO: 9218 - protein, 441 aa, Unknown
  Description of Unknown: Integrase B9219 sequence
  SM00857,IPR006118,G3DSA:1.10.10.2600,IPR036162,PF13408, PS51737,G3DSA:3.40.50.1390,IPR025827,IPR006119,IPR038109, IPR011109,SSF53041,PF00239,PTHR30461,PS00397, PS51736,Coil,cd00338
MKKRVALYVRVSTQEQKKHGLSVDSQIAALEEYCAEKKYTVVDVYNDAGISARKKYTKRPGLLRLLNDCEQKKIDLILFTKLDRWFRSVADYYEVQSILEKSKVPWQAIWEDYETITSQGIFKVNIMLSVAQAEADRTSERIRAVMEFKRKNREYLGGPVPLGYMVKDKKLVKNPETEHIVNDMFDYYFSTFSKYKTADYILQKYPEAAEMNTRGNMQLLISNPIYAGAAYGIDGYCDAYITQEQRRKMQENSNEKVYLSGVKRTYIFSGLLRCSVCGARMSGTMNHGSKSYRCFNRKMKHYTLVRSEKKLEKYLLENLETILSNKIYVLEQAKEDTQNYKIEKKKLLAERDRVNLMFEKGRITEEYYDSRYDEISIRLKELEKKDDAQSEKSEKLKKYLSGNWKELYKQLDEQGKQAFWKNIIEIIIISRETFIEDIIFF

SEQ ID NO: 9219 - protein, 441 aa, Unknown
  Description of Unknown: Integrase B9220 sequence
  SM00857,IPR006118,G3DSA:1.10.10.2600,IPR036162,PF13408, PS51737,IPR025827,G3DSA:3.40.50.1390,IPR006119,IPR038109, IPR011109,SSF53041,PF00239,PTHR30461,PS00397, PS51736,Coil,cd00338
MKKRVALYVRVSTQEQKKHGLSVDSQIAALEEYCAEKKYTVVDVYNDAGISARKKYTKRPGLLRLLNDCEQKKIDLILFTKLDRWFRSVADYYEVQSILEKSKVPWQAIWEDYETITSQGIFKVNIMLSVAQAEADRTSERIRAVMEFKRKNREYLGGPVPLGYMVKDKKLVKNPETEHIVNDMFDYYFSTFSKYKTADYILQKYPEATEMNTRGNMQLLISNPIYAGAAYGIDGYCDAYITQEQRRKMQENSNEKVYLSGVKRTYIFSGLLRCSVCGARMGGTMNHGSKSYRCFNRKMKHYTLVRSEKKLEKYLLENLETILSNKIYVLEQAKEDTQNYKIEKKKLLAERDRVNLMFEKGRITEEYYDSRYDEISIRLKELEKKDDAQSEKSEKLKKYLSGNWKELYKQLDEQGKQAFWKNIIEIIIISRETFIEDIIFF

SEQ ID NO: 9220 - protein, 441 aa, Unknown
  Description of Unknown: Integrase B9221 sequence
  SM00857,IPR006118,G3DSA:1.10.10.2600,IPR036162,PF13408, IPR025827,G3DSA:3.40.50.1390,Coil,PS51737,IPR006119, IPR038109,SSF53041,IPR011109,PTHR30461,PS00397, PS51736,cd00338,PF00239
MKRAAIYVRVSTKEQKEKGLSVDSQLLALREYCSNNGYVIAGEYNDAGISARKKYINRPALLQLIDDCKEGKIDIILFTKLDRWFRSVADYYQVQTLLDSYKVPWRAIWEDYETETSTGLFKVNIMLSVSQNEADKTSERTKEAVKYRRLRGDFVGGKCPRGYRRENKKLVFDEKTYDAINAMFRTYLSCFSIAKATEAVAEYGLHIATSQICRMLKSPAYAGNASGSECPAYITWDEHLLILTNSTKRNRTPKRSDRVYLFSGLCRCGYCGGRMVARVNRWVKNGQQLYYPFYSCAAHNDKRNLDCPGVNLAETKIEAYLMEHLEAELKMCQSEFELEQENKATYENKIKALEQKLKRIGVRYEDGDIPFEEYKDKRFAIKKEIAGYKDKIDNARSVPSLPDNWKDLYNSLTPDNKRGFWLNILKEIDITKEAINIVFPV

SEQ ID NO: 9221 - protein, 441 aa, Unknown
  Description of Unknown: Integrase B9222 sequence
  SM00857,IPR036162,PF13408,IPR025827,G3DSA:3.40.50.1390, PS51737,IPR006119,IPR011109,SSF53041,PF00239, PTHR30461,PS51736,Coil,cd00338
MNVLRAALYPRVSTEEQAKFGLSIHDQQNDLEEYAKANGMIVVGIYPDAGFSARKKIEKRPAMMELLAAVQRDEIDIILVTKLDRWFRNIGEYYKVQEILEAHNVCWKTIYEDYDTSSAAGRLKINIMLAVAQDEADRTGERIKKVLDAKKSRNEVCTGHLPKGYKIDGKFAVIDREAEPDVKTFFSVFLETGSIHNAISAVPNLKLQYRTASKMLDNRGYVGEWHGLSIPPYLTAEEFDRVQTLRRRLQRKVAQNRTYIFSGLLVCGDCGRRIGGRPRKLVNGESYVYSCDGAYQYKGCPNHANIMEATIEQYLLETIDAKIEIFANTKDEPKQNSKEIEEKAKSLRKKLAKLSDLYLDDLIAKDEYAKRYADLTAQLESAESLLRKPPAKSAKDLSEAFFSGWQDIYKELSRENKKVFWKLKLKEIRLYQDRRIDFDFL

SEQ ID NO: 9222 - protein, 441 aa, Unknown
  Description of Unknown: Integrase B9223 sequence
  PTHR30461:SF3,IPR036162,PS51737,IPR011109, PTHR30461,PS00397,PF00239,G3DSA:1.10.10.2600, IPR006119,SSF53041,cd00338,SM00857,IPR025827,IPR038109 ,PS51736,IPR006118,PF13408,G3DSA:3.40.50.1390,PF07508,Coil
MRVALYARVSTEEQAIHGLSIGVQQENLKKWANENHHTIVGVYVDAGVSARKPASKRPDLQRLLNDVRAGKIEMIVFTKLDRWFRNVKEYYKVQDVLDEHRVCWKTIEEEYETETSAGRFKVNIMLSVAESEADRTSERIKTINKNKRENGLCHHGTQPLGLKIVKGKLTEDPETAPVVRDVFRHFIATQSVTSTGRYLLSEYGITRSYKNTKQMLKNKRYIGVADNGEQLYPPIVPPQDFALAQSIMAERSTRHSGDFTQKHIYLFTGIVFCAECGRRLSVTMSHVHGGEYVYYKCPSYAGRSCVHRRREREKDLEQYMVDHIISGCINYNVEIAQQNASNQQTVDKAAIKRKMKKLKDLYLSDLIERDVYAKDYTSLRKQLEAPEPEEKEQIDVDALKSTMDVYGSLEPSERREFWRRTVKKISVSNDGEINFELAGYI

SEQ ID NO: 9223 - protein, 441 aa, Unknown
  Description of Unknown: Integrase B9224 sequence
  PTHR30461:SF3,IPR036162,PS51737,IPR011109,PTHR30461, PS00397,PF00239,G3DSA:1.10.10.2600,IPR006119,SSF53041, cd00338,SM00857,IPR025827,IPR038109,PS51736, IPR006118,PF13408,G3DSA:3.40.50.1390,Coil
MRCAIYIRVSSDEQRRKGFSLPEQKKTLIEYAKNKDYKIIDIYADEGISASKKPHLRHDFQRMISDVKAGKIDVIVFIKLDRWFRNVGDYYRTQEILDKHNVKWECALEDYDTTTRTGRLNLNIKLTIAEDEAANTSERVKFVLNGKLNNKEPVTGNQPFGYKIEKIDGVKRIIKDPETEAETNDMFETFFTTLSGYAVTKHINTKYGRNLSDTTITRRLKNPAYTGEHKGISDYRPAYITPEQHAQILRIFSKNTRTAQNNKIYLFSGMLICPECGHIMASCTQNKTTLGYRCRYHFTQNCNYSHVVKETDVEKFLLSNIRPNLEKYNLKMKSLQQKKKKVTPQKFEEQLERLNNVYIMGNISTDEYKKTSADLKAKIANLKAANNDSQSIPQNMLNLLSDEKFPSIYKDLSRVDKRSLWKSIIDIIIIEGVTPVELKFV

SEQ ID NO: 9224 - protein, 441 aa, Unknown
  Description of Unknown: Integrase B9225 sequence
  PTHR30461:SF3,SM00857,IPR006118,G3DSA:1.10.10.2600,IPR036162, PF13408,IPR025827,G3DSA:3.40.50.1390,PS51737,IPR006119, IPR038109,SSF53041,IPR011109,PTHR30461,PS00397, PS51736,cd00338,PF00239
MRVALYVRVSTEEQAVHGLSVDDQKESLKKWAEENKHKVVDYYVDAGVSGRKSVSKRPELQRLLSDVEAGKIDLVAFTKLDRWFRNIGEFYKAQEVLDAHGVVWQATYEDYETATAAGRLKVNIMLSVAQDEADRTSERVKRIMQHKRELGLCPAGKTPIGLKAVESRLCIDEETAHIARRMFEDYIATGSVNHVKKMLISEFGIMRANHHIKGALSNERYIGLNNGIKVCDALIPPEDFALVQRMLTARSIRNNGSKHTWLFSGLVWCAECGHRLVTHSTQQRGTDYFYYRCKNYEMGICRHKKRINEATLEKYLLAKLPIEVQAHNAKLKAGKTKPPVDTAAIKRKMDKLTDLYLADLINREKYEIEYTALKEKLNVPPEPKPINEELVVSLLDAYDKLPPSGKKEVWNRFIRRIVISENGDIFFELVWLQRTLTPVNV

SEQ ID NO: 9225 - protein, 441 aa, Unknown
  Description of Unknown: Integrase B9226 sequence
  PTHR30461:SF3,SM00857,IPR006118,G3DSA:1.10.10.2600,IPR036162, PF13408,IPR025827,G3DSA:3.40.50.1390,PS51737,IPR006119, IPR038109,SSF53041,IPR011109,PTHR30461,PS00397, PS51736,cd00338,PF00239
MEMKNARLYARVSTDEQRKKEQSVPDQLEALKEYCEEHNYNIKGIYHDDGISAATIDKRKDFCRMLDDLQQNEVILFTKLDRFSRDLLDGNLLLKRFAPLNVSFKAILEPDIDVTTADGKFRFDLMVSLAERERKIDSERILFSFERKVARGEFLGGRLPIGYIKDNKRAVIDPEKAAFVKDIFETMEIEQNTFRVMKAMNHKYGLNKDKKYYYRKLIDQRYTGVYRGKTNVFPQIISPNQYDNVQSILQGRYIKRGPSRRDYIFSGLLLCSQCGRKLAGSATSGKYKIYKCSNLQKGEKMHCCFAEKKLEKKILPKIMPLLQKYLLDLEASEAKVSQNRDIIQISKQKINRLQDLYIDGKIDKDTFDRKYADLNEIISAEEQKSNIVSIQEAKQRYTQLLDMDIENIYSTLNDNEKRKLWHSFIDRIVIKSYDEIDIFLL

SEQ ID NO: 9226 - protein, 441 aa, Unknown
  Description of Unknown: Integrase B9227 sequence
  SM00857,IPR036162,PF13408,PS51737,IPR025827, G3DSA:3.40.50.1390,IPR006119,IPR011109,SSF53041,PF00239, PTHR30461,PS51736,Coil,cd00338
MNVLRAALYPRVSTEEQAKFGLSIHDQQNDLEEYAKANGMKVVGIYPDAGFSARKKIEKRPAMMELLAAVQRNEIDIVLVTKLDRWFRNIGEYYKVQEILEAHNVCWKTIYEDYDTSTAAGRLKINIMLAVAQDEADRTGERIKKVLDAKKSRNEVCTGHLPKGYKIDGKFAVIDREAEPDVKTFFSVFLETGSIHNAISAVPNLKLQYRTASKMLDNRGYVGEWHGLSIPPYLTAEEFDRIQTLRRRLQRKVAQNRTYIFSGLLVCGDCGRRIGGRPRKLVNGESYVYSCDGAYQYKGCPNHANIMEATIEQYLLETIDAKIEIFANTKDEPKQNSKEIEEKAKSLQKKLAKLSDLYLDDLIAKDEYAKRYADLTAQLESAESLLRKPPAKSAKDLSEAFFSGWQDIYKELSRENKKVFWKLKLKEIRLYQDRRIDFDFL

SEQ ID NO: 9227 - protein, 441 aa, Unknown
  Description of Unknown: Integrase B9228 sequence
  SM00857,IPR036162,PF13408,PS51737, IPR025827,G3DSA:3.40.50.1390,IPR006119,SSF53041, IPR011109,PF00239,PTHR30461,PS51736, Coil,cd00338
MNVLRAALYPRVSTEEQAKFGLSIHDQQNDLEEYAKANGMKVVGIYPDAGFSARKKIEKRPAMMELLAAVQRNEIDIILVTKLDRWFRNIGEYYKVQEILEAHNVCWKTIYEDYDTSTAAGRLKINIMLAVAQDEADRTGERIKKVLDAKKSRNEVCTGHLPKGYKIDGKFAVIDRAAEPDVKTFFSVFLETGSIHNAISAVPNLKLQYRTASKMLDNRGYVGEWHGLSIPPYLTAEEFDRVQTLRRRLQRKVAQNRTYIFSGLLVCGDCGRRIGGRPRKLVNGESYVYSCDGAYQYKGCPNHANIMEATIEQYLLETIDAKIEIFANTKDEPKQNSKEIEEKAKSLQKKLAKLSDLYLDDLIAKDEYAKRYADLTAQLESAESLLRKPPAKSAKDLSEAFFSGWQDIYKELSRENKKVFWKLKLKEIRLYQDRRIDFDFL

SEQ ID NO: 9228 - protein, 441 aa, Unknown
  Description of Unknown: Integrase B9229 sequence
  SM00857,IPR006118,G3DSA:1.10.10.2600,IPR036162,PF13408, IPR025827,G3DSA:3.40.50.1390,PS51737,Coil,IPR006119, IPR038109,IPR011109,SSF53041,PTHR30461,PS00397, PS51736,cd00338,PF00239
MKRAAIYVRVSTKEQKEKGLSVDSQLLALREYCSNNGYVIAGEYNDAGISARKKYINRPALLQLIDDCKEGKIDIILFTKLDRWFRSVADYYQVQTLLDSYKVPWRAIWEDYETETSTGLFKVNIMLSVSQNEADKTSERTKEAVKYRRLRGDFVGGKCPRGYRRENKKLVFDEKTYDAISAMFRTYLSCFSIAKATEAVAEYGLHIATSQICRMLKSPAYAGNASGSECPAYITWDEHLLILTNSTKRNRTPKRSDRVYLFSGLCRCGYCGGRMVARVNRWVKNGQQLYYPFYSCAAHNDKRNLDCPGVNLAETKIEAYLMEHLEAELKMCQSEFELEQENKATYENKIKALEQKLKRIGVRYEDGDIPFEEYKDKRFAIKKEIAGYKDKIDNARSVPSLPDNWKDLYNSLTPDNKRGFWLNILKEIDITKEAINIVFPV

SEQ ID NO: 9229 - protein, 441 aa, Unknown
  Description of Unknown: Integrase B9230 sequence
  SM00857,IPR006118,G3DSA:1.10.10.2600,IPR036162,PF13408, PS51737,G3DSA:3.40.50.1390,PS00397,IPR025827,IPR006119, IPR038109,SSF53041,IPR011109,PTHR30461,Coil, PS51736,cd00338,PF00239
MKKRVALYVRVSTQEQKKHGLSVDSQIAALEEYCAEKKYTVVDVYNDAGISARKKYTKRPGLLRLLNDCEQKKIDLIIFTKLDRWFRSVADYYEVQSILEKSKVPWQAIWEDYETITSQGIFKVNIMLSVAQAEADRTSERIRAVMEFKRKNREYLGGPVPLGYMVKDKKLVKNPETEHIVNDMFDYYFSTFSKYKTADYILQKYPKVAEMNTRGNMQLLISNPIYAGVAYGIDGYCDAYITQEQRRKMQENSNEKVYLSGVKRTYIFSGLLRCSVCGARMGGTMNHGNKSYRCFNRKMKHYTLVRSEKKLEKYLLENLETILSNKIYVLEQAKKDTQNYKIEKKKLLAERDRVNLMFEKGRITEEYYDSRYDEISERLKELEKKDDVQSEKSEKLKKYFSGNWKELYKQLDEQGKQAFWKNIIEIIIISRETFIEDIIFF

SEQ ID NO: 9230 - protein, 441 aa, Unknown
  Description of Unknown: Integrase B9231 sequence
  SM00857,IPR006118,G3DSA:1.10.10.2600,IPR036162,PF13408, IPR025827,G3DSA:3.40.50.1390,PS00397,PS51737,IPR006119, IPR038109,SSF53041,IPR011109,PTHR30461,Coil, PS51736,cd00338,PF00239
MKRAAIYVRVSTKEQKEKGLSVDSQLLALREYCSNNGYVIAGEYNDAGISARKKYINRPALLQLISDCKEGKIDIILFTKLDRWFRSVADYYQVQTLLDSYKVPWRAIWEDYETETSTGLFKVNIMLSVSQNEADKTSERTKEAVKYRRLRGDFVGGRCPRGYRRENKKLVFDEETYDAINAMFRTYLSCFSIAKATEAVAEYGLHIATSQICRMLKSPAYAGNASGSECPAYITWDEHLLILTNSTKRNRTPKRSDRVYLFSGLCRCGYCGGRMVARVNRWVKNGQQLYYPFYSCAAHNDKRNLDCPGVNLAETKIEAYLMEHLEAELKMCQSEFELEQENKAIYENKIKALEQKLKRIGVRYEDGDIPFEEYKDKRFAIKKEIAGYKDKIDNARSVPSLPDNWKDLYNSLTPDNKRGFWLNILKEIDITKEAINIVFPV

SEQ ID NO: 9231 - protein, 441 aa, Unknown
  Description of Unknown: Integrase B9232 sequence
  SM00857,IPR006118,G3DSA:1.10.10.2600,IPR036162,PF13408, IPR025827,G3DSA:3.40.50.1390,PS00397,PS51737,IPR006119, IPR038109,SSF53041,IPR011109,PTHR30461,Coil, PS51736,cd00338,PF00239
MKRAAIYVRVSTKEQKEKGLSVDSQLLALREYCSNNGYVIAGEYNDAGISARKKYINRPALLQLINDCKEGKIDIILFTKLDRWFRSVADYYQVQTLLDSYKVPWRAIWEDYETETSTGLFKVNIMLSVSQNEADKTSERTKEAVKYRRLRGDFVGGKCPRGYRRENKKLVFDEKTYDAINAMFRTYLSCFSIAKATEAVAEYGLHIATSQICRMLKSPAYAGNASGSECPAYITWDEHLLILTNSTKRNRTPKRSDRVYLFSGLCRCGYCGGRMVARVNRWVKNGQQLYYPFYSCAAHNDKRNLDCPGVNLAETKIEAYLMEHLEAELKMCQSEFELEQENKATYENKIKTLEQKLKRIGVRYEDGDIPFEEYKDKRFAIKKEIAGYKDKIDNARSVPSLPDNWKDLYNSLTPDNKRGFWLNILKEIDITKEAINIVFPV

SEQ ID NO: 9232 - protein, 441 aa, Unknown
  Description of Unknown: Integrase B9233 sequence
  PTHR30461:SF3,IPR036162,PS51737,IPR011109,PTHR30461, PF00239,G3DSA:1.10.10.2600,IPR006119,SSF53041,cd00338, PF09851,SM00857,IPR025827,IPR038109,PS51736, PF13408,IPR018649,G3DSA:3.40.50.1390,PF07508,Coil
MEALLYTRVSKEDQVKFGMSLDAQLESLKKYCSENNLKIRNIYSDEGISGGSITKRKAFQNMIEESKPGDIILFTKLDRFSRNLLDANIVVKELTKKDVSIKAINEDDIDTSTADGKFIFNLKLSLAQREREKVSERINDVFEYKIKQGEVCTGNVPVGYMIKDKHLVLDPVKSVWIREMFDYFLKHQSVVGTCKWWNLKHPEYTMEYKAIKMSRLKNTFYCGKHPSGLNDNYCEPIISEEEFDKIQEILKRNVKSNRTNNVYIFTGLLTCSHCGRRMGGFYRNWKGNKTNYYRCYQYCSFRKCDMSHTVSERKIEEFVLQNMIEKCNEIVSASLKPENTDEVKLQNKKANTESKISRLKDLYVDGVLTKEEFDTKYKQLQDEIKAIKQEMKPKSNKLLELHDVDVKELYSKLNPENKRAFWRKYIDRIYFDGHDFKVVYQ

SEQ ID NO: 9233 - protein, 441 aa, Unknown
  Description of Unknown: Integrase B9234 sequence
  PTHR30461:SF3,SM00857,G3DSA:1.10.10.2600,IPR036162,PF13408, PS51737,IPR025827,G3DSA:3.40.50.1390,mobidb-lite,IPR006119, IPR038109,PF07508,IPR011109,SSF53041,PTHR30461, PS51736,cd00338,PF00239
MEMKITKISTLPQLDRKKRVAAYARVSTGKDAMLHSLSAQVSYYNNLIQNNNEWEFAGIYADEAMSGTKDNREEFNRMVDDCKAGKIDLIITKAISRFARNTATLLSTIRELSSVGVDVFFEEQNLHSISGDGEMILTLLASCAQEEARSASENVKWRVKKDFKQGILNGGNDCYGYKLIDKKFVLVPEEAEIVKMIFAWYICGEGVVAISKKLDDMGIKPVRAKYWLPNTIMRMLKDRCYVGDLILQKTYVTDYVSKKKKRNHGEFDKYFVENDHEPIIDIETFKKANALMVERAKRFKAQDRTALRYPLSGKIVCGECGSRFGHKVYMHSSPGWICSAFDRKGKKACQSRKVPEYAMDEAVDAVIGGYDNIKVLDFIEVFNNNRLLFHLKNKEIKEFIWEERSRSQSWTDEMREEAKKRTIINNKNKKRGANGKWQKSE

SEQ ID NO: 9234 - protein, 441 aa, Unknown
  Description of Unknown: Integrase B9235 sequence
  PTHR30461:SF3,SM00857,G3DSA:1.10.10.2600,IPR036162,PF13408, PS51737,IPR025827,G3DSA:3.40.50.1390,IPR006119,IPR038109, IPR011109,SSF53041,PTHR30461,Coil,PS51736, cd00338,PF00239
MKSNVLRAALYPRVSTEEQAKFGLSIHDQQADLEKYAKDNGMKIVGVFADAGFSARKKIEKRPAMLALLEAVKRDEIDIVLVTKLDRWFRNIGEYYKVQEILEAHGVSWRTIYEDYDTSTAAGRLKINIMLAVAQDEADRTSERIKRVLDGKKERNEVCTGHVPKGYKIEGKSVVIDTEKEPYIRKFFATFMETGSMHDTIAAVPELHLFYRTASDMLKNRGYIGDWHGLSIPPYLTAQEFEHIASLRRRIVRKSPQDRIYIFSGILSCGECGRRLNGRPRKTKVGESYVYSCGGVYEYKDCDNHVNIVETKIEQFLLDTIDEKIRLMVKYKNTPQQTDYAEQERAIRKKLSKLSDLYVDDMIDKQDYAARYKTLTAQLEKILAEKAKLQPKSTKALETEFFAGWKEIYQNLSRENKKAFWKLKIKEIRVYKDRRIDFDFI

SEQ ID NO: 9235 - protein, 441 aa, Unknown
  Description of Unknown: Integrase B9236 sequence
  PTHR30461:SF3,IPR036162,PS51737,IPR011109,PTHR30461, PS00397,PF00239,G3DSA:1.10.10.2600,IPR006119,SSF53041, cd00338,SM00857,IPR025827,IPR038109,PS51736, IPR006118,PF13408,G3DSA:3.40.50.1390,PF07508
MRVALYARVSTEEQAIHGLSIGVQQESLKKWASENHHTIVDMYVDAGISARKPASKRPSLQRLLDDVRAGKIDMIVFTKLDRWFRNVKEYYKVQEVLEQHDVSWRALEENYETETSNGVFTVNIMLSVAQSEADRTSERIKVVTKNKRDKGLCHQGKKPLGLNIVKGELVEDPETAPIIRDIFRYFIATQSVTATRRYLLSQYSITRSYKNTKLILKNTRYIGVADNGQRLYHPIVPPEDFALAQSIMAERSTRHSGDFTQKHVYLFTGIVFCAECGRRLSGTMSHLHNREYVYYKCPSYVGRSCTHLRREREEALEQYMVEHILSGCIDYNAAIAQQSAVKSPTIDRAAVKRKMEKLKDLYLSDLIDREMYEADYLVLKKQLEAPEPAKREPIDIDVLKSAIGAYDDLEPLERREFWRRIVKRISVDQDGGINFELVGHI

SEQ ID NO: 9236 - protein, 440 aa, Unknown
  Description of Unknown: Integrase B9237 sequence
  SM00857,G3DSA:1.10.10.2600,IPR036162,PF13408,PS51737, IPR025827,G3DSA:3.40.50.1390,IPR006119,IPR038109,IPR011109, SSF53041,PF00239,PTHR30461,PS51736,Coil, cd00338
MSVVLRAALYPRVSTEEQKKFGLSIHDQQNDLEEYAKAHNMKVVGVFQDAGFSARKKIEKRPAMLQLLEAVKHDEIDIILVTKLDRWFRNIGEYYKVQEILEAHNVSWKTIYEDYDTSTAAGRLKINIMLSVAQDEADRASERIKKVLDAKKDRNEVCTGHLPKGYKREGKFAVIDKEAEPIMRRFFSTFFETGAITKAMDAVPELNLNYKTASAILNNTAYMGKWNGLTLPPYLTQQEFQRVQELRRRVTRKSPYNRIYLFSGLTVCGECGRRMTGHPTTLKDGTCVYKYLCQGAKQRRGCDNGLVVREQDIENYFMFSIDEQIQIKLKAKAQHAPKINTDAQIKAIQKKLAKLSELYIDDMISKPDYSKKYAELTKQVEALKQTQVQSRAPEEVADLFAPGWQDIYKDLTRENKRAFWKLKIKEIRLYKDSRIEFDFL

SEQ ID NO: 9237 - protein, 440 aa, Unknown
  Description of Unknown: Integrase B9238 sequence
  cd00338,SM00857,G3DSA:1.10.10.2600,IPR036162,PF13408, PS51737,IPR025827,G3DSA:3.40.50.1390,IPR006119,IPR038109, IPR011109,SSF53041,PTHR30461,PS51736,Coil, PF00239
MNVVLRAALYPRVSTEEQKKFGLSIHDQQNDLEEYAKAHNMKVVGVFQDAGFSARKKIEKRPAMLQLLEAVKHDEVDIILVTKLDRWFRNIGEYYKVQEILEAHNVSWKTIYEDYDTSTAAGRLKINIMLSVAQDEADRASERIKKVLDAKKDRNEVCTGHLPKGYKIEGKFAVIDKETEPVIRRYFSTFLETGSITKAMDAVPELKLKYQTASQMLDNPGYMGDWHGIKLPPYLTPQEFQRVQGLRTRVTRKSPYNRTYIFSGLIVCGECGRRMTGHPSPRPSGACSYSYYCQGSAQRKGCNNGNFTVEWKIEDYLLSTIDEQIQIKLQAKPRQEPKANQDVQLKALQKKLSKLSELYIDDMISKADYSKKYAELTSQMDELTQVKSQSRAPEEIATLFSAGWQEIYKQLNKENKQAFWKLKIKEIRLYKDRRIEFDFL

SEQ ID NO: 9238 - protein, 440 aa, Unknown
  Description of Unknown: Integrase B9239 sequence
  cd00338,SM00857,G3DSA:1.10.10.2600,IPR036162,PF13408, PS51737,IPR025827,G3DSA:3.40.50.1390,IPR006119,IPR038109, IPR011109,SSF53041,PTHR30461,PS51736,Coil, PF00239
MSVVLRAALYPRVSTEEQKKFGLSIHDQQNDLEKYAKAHNMKVVGVFQDAGFSARKKIEKRPAMLQLLEAVKRDEVDIILVTKLDRWFRNIGEYYKVQEILEAHNVSWKTIYEDYDTSTAAGRLKINIMLSVAQDEADRASERIKKVLDAKKDRNEVCTGHLPKGYKIEGKFAVIDKEAEPVIRRYFSTFLETGSITKAMDAVPELKLKYQTASQMLDNTGYMGDWHGIKLPPYLTPQEFQRVQDLRTRVTRKSPYNRTYIFSGLIVCGECGRRMTGHPSPRPSGACSYSYYCQGSAHRKGCNNGNFTVEWKIEDYLLSTIDEQIQIKLQAKPRQEPKANQDVQLKALQKKLSKLSELYIDDMISKADYSKKYAELTSQMDEITQVKSQSRAPEEIATLFSAGWQEIYKQLTRENKQAFWKLKIKEIRLYKDRRIEFDFL

SEQ ID NO: 9239 - protein, 440 aa, Unknown
  Description of Unknown: Integrase B9240 sequence
  PTHR30461:SF3,cd00338,SM00857,G3DSA:1.10.10.2600,IPR036162, PF13408,PS51737,G3DSA:3.40.50.1390,IPR025827,IPR006119, IPR038109,IPR011109,SSF53041,PTHR30461,PS51736, Coil,PF00239
MNVVLRAALYPRVSTEEQKKFGLSIHDQQNDLEEYAKAHNMKVVGVFQDAGFSARKKIEKRPAMLQLLEAVKRDEVDIILVTKLDRWFRNIGEYYKVQEILEAHNVSWKTIYEDYDTSTAAGRLKINIMLSVAQDEADRASERIKKVLDAKKDRNEVCTGHLPKGYKIEGKFAVIDKEAEPVIRRYFSTFLETGSITKAMDAVPELKLKYQTASQMLDNTGYMGDWHGIKLPPYLTPQEFQRVQDLRTRVTRKSPCNRTYIFSGLIICGECGRRMTGHPTPRASGKCSYSYYCQGSAQRKGCNNGNFTVEWKIEDYLLSTIDEQIQVKLQAKPRQEPKANQDVQLKALQKKLSKLSELYIDDMISKADYSKKYAELTSQMDELTQVKSQSRAPEEIATLFSAGWQEIYKQLNKENKQAFWKLKIKEIRLYKDRRIEFDFL

SEQ ID NO: 9240 - protein, 440 aa, Unknown
  Description of Unknown: Integrase B9241 sequence
  SM00857,G3DSA:1.10.10.2600,IPR036162,PF13408,PS51737, G3DSA:3.40.50.1390,IPR025827,IPR006119,IPR038109,SSF53041, IPR011109,PF00239,PTHR30461,PS51736,Coil, cd00338
MSVVLRAALYPRVSTEEQKKFGLSIHDQQNDLEKYAKAHNMKVVGVFQDAGFSARKKIEKRPAMLQLLEAVKHDEVDIILVTKLDRWFRNIGEYYKVQEILEAHNVSWKTIYEDYDTSTAAGRLKINIMLAVAQDEADRASERIKKVLDAKKDRNEVCTGHLPKGYKIEGKFAVIDKEAEPVIRRYFSTFLETGSITKAMDAVPELKLKYQTASQMLDNTGYMGDWHGIKLPPYLTPQEFQRVQDLRTRVTRKSPYNRTYIFSGLIVCGECGRRMTGHPSPRPSGACSYSYYCQGSAQRKGCNNGNFTVEWKIEDYLLSTIDEQIQIKLQAKPRQEPKVNQDVQLKTLQKKLSKLSELYIDDMISKSDYSKKYAELTSQMDEITQVKSQSRAPEEIATLFSAGWQEIYKQLNKENKQAFWKLKIKEIRLYKDRRIEFDFL

SEQ ID NO: 9241 - protein, 440 aa, Unknown
  Description of Unknown: Integrase B9242 sequence
  PTHR30461:SF3,IPR036162,PS51737,IPR011109,PTHR30461, PS00397,PF00239,G3DSA:1.10.10.2600,IPR006119,SSF53041, cd00338,SM00857,IPR025827,IPR038109,PS51736, IPR006118,PF13408,G3DSA:3.40.50.1390,PF07508
MNTNKRAALYIRVSTEEQARHGLSLSAQLENLQQYAKNKGYKIVGIYTDDGASARKSPFSRKAFRQLMEDVQWNRIDHILFIKLDRWFRSVRDYYKAQDILDAHGVDWETTQEQYNTTTTNGRLMLNIKLSVAQNESDMTSDRIRFVFEQKRAKHEVLSGFAPLGYKIENKHLVPDENAPIIANAFNQFIAYPNLQQLTNWFHSQGIHYNVTSIRKLLRNERYVGRNKGDLEYCPPIVSDQQFYTVQDMLDKNLTVKRTASGLVYLFTGLLRCPICGHKLTSSCAYSGTHKYKRYRCSRHWRNEDCSFNRGIAESKLEKQLLAHFDDLYEHFNSAVQEEQKNNTRIDTQVIKKKQERLKELFLNELITLDEYKKDYAKYAAMLPSEPRPSIQSSLYKGMKAADIEQLYKTLPDRQKQAFLRQIIDYIDFDADLKPIIHFK

SEQ ID NO: 9242 - protein, 440 aa, Unknown
  Description of Unknown: Integrase B9243 sequence
  PTHR30461:SF3,SM00857,G3DSA:1.10.10.2600,IPR036162,PF13408, PS51737,IPR025827,G3DSA:3.40.50.1390,PS51736,IPR006119, IPR038109,PF07508,IPR011109,SSF53041,PTHR30461, mobidb-lite,cd00338,PF00239
MIQKKITTIDAAPRLERLINVAAYARVSSGKDAMLHSLAAQITYYQNLITSHQGWKFAGVYADEAFTGTKDNRHEFQRLIQDCKDGKIDMVIVKAISRFARNTVTLLKTVRILKSINVDVYFEEQNLHTLSAEGEMVLTFLASFAQEESRSVSENMKWRIKKDFEQGLIWGSKPQLGYRIVDRRLVVVPEEAEMVRRIFSLYLDGYGFQGIANLLNAEGQTSTLGNKWSKTAIEAIINNYNYTGDLILQKTFRVDHLTKHKKLNRGEKAQYLVEDAHEPIITKEQYMMAQTLKKQRAQHFNLLDMTKQINLFTGIVWCGACGKHYRRKKQERRMWWTCSTFNTVGKEFCDSKSVPEEVLIEITKKVLGVKEITAEIIKSKVDHIDVLKGNRLVFHLKNGSTIEETWKSLSRKDNWTPEMKEKARQRAIAQYRRKEGKHNG

SEQ ID NO: 9243 - protein, 440 aa, Unknown
  Description of Unknown: Integrase B9244 sequence
  SM00857,G3DSA:1.10.10.2600,IPR036162,PF13408,IPR025827, G3DSA:3.40.50.1390,PS51737,IPR006119,IPR038109,SSF53041, IPR011109,PF00239,PTHR30461,PS51736,Coil, cd00338
MSVVLRAALYPRVSTEEQAKFGLSIHDQRNDLEEYAKANNMKVVGVFPDAGFSARKKIEKRPAMLQLLEAVKRNEVDIILVTKLDRWFRNIGEYYKVQEILEAHNVSWKTIYEDYDTSTAAGRLKINIMLAVAQDEADRASERIKKVLDAKKDRNEVCTGHLHKGYKKEGKFAVIDKEAEPIMRRFFSTFLETGAITKTMDAVPELNLNYKTASAILNNTAYMGKWNGLTLPPYLTQQEFQRVQELRRRVTRKSPYNRIYLFSGLTVCGECGRRMTGHPTTLKDGTCVYKYLCQGAKQRRGCDNGLVVREQDIENYFMSSIDEQIQIKLKAKAQHAPKINTDAQIKAIQKKLAKLSELYIDDMISKPDYSKKYAELTEQVEALKQTQVQSRAPEEVADLFAPGWQDIYKNLTRENKRAFWKLKIKEIRLYKDSRIEFDFL

SEQ ID NO: 9244 - protein, 440 aa, Unknown
  Description of Unknown: Integrase B9245 sequence
  PTHR30461:SF3,SM00857,G3DSA:1.10.10.2600,IPR036162,PF13408, IPR025827,G3DSA:3.40.50.1390,PS51737,IPR006119,IPR038109, SSF53041,IPR011109,PF00239,PTHR30461,PS51736, Coil,cd00338
MSVVLRAALYPRVSTEEQKKFGLSIHDQQNDLEKYAKAHNMKVVGVFQDAGFSARKKIEKRPAMLQLLEAVKHDEVDIILVTKLDRWFRNIGEYYKVQEILEAHNVSWKTIYEDYDTSTAAGRLKINIMLAVAQDEADRASERIKKVLDAKKDRNEVCTGHLPKGYKIEGKFAVIDKEAEPVIRRYFSTFLETGSITKAMDAVPELKLKYQTASQMLDNTGYMGDWHGIKLPPYLTPQEFQRVQDLRTRVTRKSPYNRTYIFSGVIVCGECGRRMTGHPSPRPSGACSYSYYCQGSAQRKGCNNGNFTVEWKIEDYLLSTIDEQIQIKLQAKPRQEPKVNQDVQLKTLQKKLSKLSELYIDDMISKSDYSKKYAELTSQMDEITQVKSQSRAPEEIATLFSAGWQEIYKQLNKENKQAFWKLKIKEIRLYKDRRIEFDFL

SEQ ID NO: 9245 - protein, 440 aa, Unknown
  Description of Unknown: Integrase B9246 sequence
  cd00338,SM00857,G3DSA:1.10.10.2600,IPR036162,PF13408, PS51737,G3DSA:3.40.50.1390,IPR025827,IPR006119,IPR038109, SSF53041,IPR011109,PTHR30461,PS51736,Coil, PF00239
MSVVLRAALYPRVSTEEQAKFGLSIHDQQNDLEEYAKANNMKVVGIFPDAGFSARKKIEKRPAMLQLLEAVKRNEVDIILVTKLDRWFRNIGEYYKVQEILEAHNVSWKTIYEDYDTSTAAGRLKINIMLSVAQDEADRASERIKKVLDAKKDRNEVCTGHLPKGYKREGKFAVIDKEAEPIMRRFFSTFFETGAITKAMDAVPELNLNYKTASAILNNTAYMGKWNGLTLPPYLTQQEFQRVQELRRRVTRKSPYNRIYLFSGLTVCGECGRRMTGHPTTLKDGTCVYKYLCQGAKQRRGCDNGLVVREQDIENYFMFSIDEQIQIKLKAKAQHAPKINTDAQIKAIQKKLAKLSELYIDDMISKPDYSKKYAELTKQVEALKQTQVQSRAPEEVADLFAPGWQDIYKNLTRENKRAFWKLKIKEIRLYKDSRIEFDFL

SEQ ID NO: 9246 - protein, 440 aa, Unknown
  Description of Unknown: Integrase B9247 sequence
  cd00338,SM00857,G3DSA:1.10.10.2600,IPR036162,PF13408, PS51737,IPR025827,G3DSA:3.40.50.1390,IPR006119,IPR038109, IPR011109,SSF53041,PTHR30461,PS51736,Coil, PF00239
MSVVLRAALYPRVSTEEQKKFGLSIHDQQNDLEEYAKAHNMKVVGVFQDAGFSARKKIEKRPAMLQLLEAVKRDEVDIILVTKLDRWFRNIGEYYKVQEILEAHNVSWKTIYEDYDTSTAAGRLKINIMLSVAQDEADRASERIKKVLDAKKDRNEVCTGHLPKGYKIEGKFAVIDKEAEPGIRRYFSTFLETGSITKAMDAVPELKLKYQTASQMLDNTGYMGDWHGIKLPPYLTPQEFQRVQALRTRVTRKSPYNRTYIFSGLIVCGECGRRMTGHPSPRPSGACSYSYYCQGSAHRKGCNNGNFTVEWKIEDYLLSTIDEQIQIKLQAKPRQETKVNQDVQLKALQKKLSKLSELYIDDMISKADYSKKYAELTSQMDEITQVKSQSRAPEEIATLFSAGWQEIYKQLNKENKQAFWKLKIKEIRLYKDRRIEFDFL

SEQ ID NO: 9247 - protein, 440 aa, Unknown
  Description of Unknown: Integrase B9248 sequence
  SM00857,G3DSA:1.10.10.2600,IPR036162,PF13408,IPR025827, G3DSA:3.40.50.1390,PS51737,IPR006119,IPR038109,SSF53041, IPR011109,PF00239,PTHR30461,PS51736,Coil, cd00338
MNVVLRAALYPRVSTEEQKKFGLSIHDQQNDLEEYAKAHSMKVVGVFQDAGFSARKKIEKRPAMLQLLEAVKHDEVDIILVTKLDRWFRNIGEYYKVQEILEAHNVSWKTIYEDYDTSTAAGRLKINIMLSVAQDEADRASERIKKVLDAKKDRNEVCTGHLPKGYKIEGKFAVIDKEAEPVIRRYFSTFLETGSITKAMDAVPELKLKYQTASQMLDNPGYMGDWHGIKLPPYLTPQEFQRVQDLRIRVTRKSPYNRTYIFSGLIVCGECGRRMTGHPSPRPSGACSYSYYCQGSAQRKGCNNGNFTVEWKIEDYLLSTIDEQIQIKLQAKPRQEPKVNQDVQLKALQKKLSKLSELYIDDMISKADYSKKYAELTSQMDEITRVNPQSRAPEEIATLFSAGWQEIYKQLTRENKQAFWKLKIKVIRLYKDRRIEFDFL

SEQ ID NO: 9248 - protein, 440 aa, Unknown
  Description of Unknown: Integrase B9249 sequence
  cd03768,PTHR30461:SF3,SM00857,G3DSA:1.10.10.2600,IPR036162, PF13408,IPR025827,G3DSA:3.40.50.1390,PS51737,IPR006119, IPR038109,PF07508,SSF53041,IPR011109,PTHR30461, PS51736,Coil,PF00239
MEALLYTRVSKEDQVKFGMSLDAQLESLKQYCSENNLKIRNIYSDEGISGGSITKRKAFQNMIEEAKPGDIILFTKLDRFSRNLLDANIVVKELTKKDVSIKAINEDDIDTSTADGKFIFNLKLSLAQREREKVSERINDVFAYKIKQGEIVSGQIPYGYMKKNKHLVLDPVKSVWMREMFEHYLKYQSLVGTCKWWNEQHPDETIGYTAFKNSRISNPIYCGKHPSGLNDNFCDPIISVEQFDKVQELLSRNIKSIRTNHVYLFTGLMTCSHCGRRMAGFYRKWKDNKLNYYRCYNHTQNGICDNKHCISERKIEEFVLQDMIKKCNEIASASLKPENTDEVKLQNKKANTESKISRLKDLYVDGVLTKEEFDTKYKQLQDEIEAIKQEMKPKSNKLLELHDVDVKELYSKLNPENKRAFWRKYIERIYFDGHNFKVVY

SEQ ID NO: 9249 - protein, 440 aa, Unknown
  Description of Unknown: Integrase B9250 sequence
  cd00338,SM00857,G3DSA:1.10.10.2600,IPR036162,PF13408, PS51737,IPR025827,G3DSA:3.40.50.1390,IPR006119,IPR038109, IPR011109,SSF53041,PTHR30461,PS51736,Coil, PF00239
MNVVLRAALYPRVSTEEQKKFGLSIHDQQNDLEEYAKAHNMKVVGVFQDAGFSARKKIEKRPAMLQLLEAVKHDEVDIILVTKLDRWFRNIGEYYKVQEILEAHNVSWKTIYEDYDTSTAAGRLKINIMLSVAQDEADRASERIKKVLDAKKDRNEVCTGHLPKGYKIEGKFAVIDKEAEPVIRRYFSTFLETGSITKAMDAVPELKLKYQTASQMLDNTGYMGDWHGIKLPPYLTPKEFQRVQDLRTRVTRKSPYNRTYIFSGLIVCGECGRRMTGHPSPRPSGACSYSYYCQGSAHRKGCNNGNFTVEWKIEDYLLSTIDEQIQIKLQAKPRQEPKANQDMQLKALQKKLSKLSELYIDDMISKADYSKKYAELTSQMDEITQVKSQSRAPEEIATLFSAGWQEIYKQLTRENKQAFWKLKIKEIRLYKDRRIEFDFL

SEQ ID NO: 9250 - protein, 440 aa, Unknown
  Description of Unknown: Integrase B9251 sequence
  cd00338,SM00857,G3DSA:1.10.10.2600,IPR036162,PF13408, IPR025827,G3DSA:3.40.50.1390,PS51737,IPR006119,IPR038109, SSF53041,IPR011109,PTHR30461,PS51736,Coil, PF00239
MSVVLRAALYPRVSTEEQKKFGLSIHDQQNDLEKYAKAHNMKVVGVFQDAGFSARKKIEKRPAMLQLLEAVKHDEVDIILVTKLDRWFRNIGEYYKVQEILEAHNVSWKTIYEDYDTSTAAGRLKINIMLAVAQDEADRASERIKKVLDAKKDRNEVCTGHLPKGYKIEGKFAVIDKEAEPVIRRYFSTFLETGSITKAMDAVPELKLKYQTASQMLDNTGYMGDWHGIKLPPYLTPQEFQRVQDLRTRVMRKSPYNRTYIFSGLIVCGECGRRMTGHPSPRPSGACSYSYYCQGSAQRKGCNNGNFTVEWKIEDYLLSTIDEQIQIKLQAKPRQEPKANQDVQLKALQKKLSKLSELYIDDMISKADYSKKYAELTSQMDEITQVKSQSRAPEEIATLFSAGWQEIYKQLNKENKQAFWKLKIKEIRLYKDRRIEFDFL

SEQ ID NO: 9251 - protein, 440 aa, Unknown
  Description of Unknown: Integrase B9252 sequence
  PTHR30461:SF3,IPR036162,PS51737,IPR011109,PTHR30461, PS00397,PF00239,G3DSA:1.10.10.2600,IPR006119,SSF53041, cd00338,SM00857,IPR025827,IPR038109,PS51736, IPR006118,PF13408,G3DSA:3.40.50.1390,PF07508
MNTNKRAALYIRVSTEEQARHGLSLSAQLENLQQYAKNKGYDIVGIYTDDGASARKSPFSRKAFRQLMEDVQWNRIDRILFIKLDRWFRSVRDYYKAQDILDAHGVDWETTQEQYNTTTTNGRLMLNIKLSVAQNESDMTSDRIRFVFEQKRVKHEVLSGFAPLGYKIKNKHLVPDENASIIANAFNQFIAYPNLQQLTNWFHSQGIHYNVTSIRKLLRNERYVGRNKGDLEYCPPIVSDQQFYTVQDMLDKNLTVKRTASGLVYIFTGLLRCPICGHKLTSSCAYSGTHKYKRYRCSRHWRNEDCSFNRGIAESKLEKQLLAHFDDLYEHFNSAVQEEQKNNTSIDTQVIKKKQERLKELFLNELITLDDYKKDYAKYAAMLPSEPRPSIQPSLYKGMKAADIEQLYKTLPDRQKQAFLRQIIDYIDFDADLKPIIHFK

SEQ ID NO: 9252 - protein, 440 aa, Unknown
  Description of Unknown: Integrase B9253 sequence
  SM00857,G3DSA:1.10.10.2600,IPR036162,PF13408,PS51737, G3DSA:3.40.50.1390,IPR025827,IPR006119,IPR038109,SSF53041, IPR011109,PF00239,PTHR30461,PS51736,Coil, cd00338
MSVVLRAALYPRVSTEEQKKFGLSIHDQQNDLEKYAKAHNMKVVGVFQDAGFSARKKIEKRPAMLQLLEAVKHDEVDIILVTKLDRWFRNIGEYYKVQEILEAHNVSWKTIYEDYDTSTAAGRLKINIMLAVAQDEADRASERIKKVLDAKKDRNEVCTGHLPKGYKIEGKFAVIDKEAEPVIRRYFSTFLETGSITKAMDAVPELKLKYQTASQMLDNTGYMGDWHGIKLPPYLTPQEFQRVQDLRTRVTRKSPYNRTYIFSGLIVCGECGRRMTGHPSPRPSGACSYSYYCQGSAQRKGCNNGNFTVEWKIEDYLLSTIDEQIQIKLQAKPRQEPKVNQDVQLKTLQKKLSKLSELYIDDKISKSDYSKKYAELTSQMDEITQVKSQSRAPEEIATLFSAGWQEIYKQLNKENKQAFWKLKIKEIRLYKDRRIEFDFL

SEQ ID NO: 9253 - protein, 440 aa, Unknown
  Description of Unknown: Integrase B9254 sequence
  PTHR30461:SF3,cd00338,SM00857,G3DSA:1.10.10.2600,IPR036162, PF13408,PS51737,IPR025827,G3DSA:3.40.50.1390,IPR006119, IPR038109,SSF53041,IPR011109,PTHR30461,PS51736, Coil,PF00239
MIAVLRAALYPRVSTEEQKKFGLSIHDQQNDLEKYAKAHNMKVVGIFPDAGFSARKKIEKRPAMLQLLEAVKRDEVDIILVTKLDRWFRNIGEYYKVQEILEAHNVSWKTIYEDYDTSTAAGRLKINIMLAVAQDEADRASERIKRVLDAKKERNEVCTGHLPKGYKIEGKFAVIDKETEPIIRRFFSAFLETGSTTKAMDAAPELNLKYQTASQMLDNPGYMGDWHGIKLPPYLKPQEFQRVQDLRTRITRKSPYNRTYIFSGLIVCGECGRRMTGHPSSRASGACSYSYYCQGSAQRKGCSNGSFTVEWKIEDYLLSTIDEQIQVKLQAKPRQEPKANQDAQLRALQKKLSKLSELYIDDMISKADYSKKYAELTSQMDEITKVKSQSRAPEEIATLFSAGWQEIYKQLNRENKQAFWKLKIKEIRLYKDRRIEFDFL

SEQ ID NO: 9254 - protein, 440 aa, Unknown
  Description of Unknown: Integrase B9255 sequence
  SM00857,G3DSA:1.10.10.2600,IPR036162,PF13408,IPR025827, G3DSA:3.40.50.1390,PS51737,IPR006119,IPR038109,IPR011109, SSF53041,PF00239,PTHR30461,PS51736,Coil, cd00338
MIAVLRAALYPRVSTEEQAKFGLSIHDQQNDLEEYAKANNMKVVGVFPDAGFSARKKIEKRPAMLQLLEAVKRDEIDIILVTKLDRWFRNIGEYYKVQEILEAHNVSWKTIYEDYDTSTAAGRLKINIMLAVAQDEADRASERIKRVLDAKKERNEVCTGHLPKGYKREGKFAVIDKEAEPIMRRFFSTFLETGAITKTMDAVPELNLNYKTASAILNNTAYMGKWNGLTLPPYLTQQEFQRVQELRRRVTRKSPYNRIYLFSGLTVCGECGRRMTGHPTTLKDGTCVYKYLCQGAKQRRRCDNGLVVREQDIENYFMSSIDEQIQIKLKAKAQHAPKINTDAQIKAIQKKLAKLSELYIDDMISKPDYSKKYAELTEQVEALKQTQVQSRAPEEVADLFAPGWQDIYKNLTRENKRAFWKLKIKEIRLYKDSRIEFDFL

SEQ ID NO: 9255 - protein, 440 aa, Unknown
  Description of Unknown: Integrase B9256 sequence
  PTHR30461:SF3,SM00857,G3DSA:1.10.10.2600,IPR036162,PF13408, IPR025827,G3DSA:3.40.50.1390,PS51737,IPR006119,IPR038109, PF07508,SSF53041,IPR011109,PF00239,PTHR30461, PS51736,Coil,cd00338
MEALLYTRVSKEDQVKFGMSLDAQLESLKQYCSENNLKIRNIYSDEGISGGSITKRKAFQSMIEEAKPGDIILFTKLDRFSRNLLDANIVVKELTKKDVSIKAINEDDIDTSTADGKFIFNLKLSLAQREREKVSERINDVFAYKIKQGEIVSGQIPYGYMKKNKHLVLDPVKSVWMREMFEHYLKYQSLVGTCKWWNERHPDETIGYTAFKNSRISNPIYCGKHPSGLNDNFCDPIISVEQFDKVQELLSRNIKSIRTNHVYLFTGLMTCSHCGRRMAGFYRKWKDNKLNYYRCYNHTQNGICDNKHCISERKIEEFVLQDMIKKCNEIASASLKPENTDEVKLQNKKANTESKISRLKDLYVDGVLTKEEFDTKYKQLQDEIETIKQEMKPKSNKLLELHDVDVKELYSKLNPENKRAFWRKYIDRIYFDGHNFKVVY

SEQ ID NO: 9256 - protein, 440 aa, Unknown
  Description of Unknown: Integrase B9257 sequence
  cd00338,SM00857,G3DSA:1.10.10.2600,IPR036162,PF13408, PS51737,G3DSA:3.40.50.1390,IPR025827,IPR006119,IPR038109, IPR011109,SSF53041,PTHR30461,PS51736,Coil, PF00239
MNVVLRAALYPRVSTEEQKKFGLSIHDQQNDLEEYAKAHNMKVVGVFQDAGFSARKKIEKRPAMLQLLEAVKHDEVDIILVTKLDRWFRNIGEYYKVQEILEAHNVSWKTIYEDYDTSTAAGRLKINIMLSVAQDEADRASERIKKVLDAKKDRNEVCTGHLPKGYKIEGKFAVIDKEAEPIIRRYFSTFLETGSITKAMDAVPELKLKYQTASQMLDNTGYTGDWHGIKLPPYLTPQEFQRVQDLRTRVTRKSPYNRTYIFSGLIVCGECGRRMTGHPSPRPSGACSYSYYCQGYAQRKGCNNGNFTVEWKIEDYLLSTIDEQIQIKLQAKPRQEPKANKDVQLKALQKKLSKLSELYIDDMISKADYSKKYAELTSQMDEITQVKSQSRAPEEIATLFSAGWQEIYKQLNKENKQAFWKLKIKEIRLYKDRRIEFDFL

SEQ ID NO: 9257 - protein, 440 aa, Unknown
  Description of Unknown: Integrase B9258 sequence
  cd00338,SM00857,G3DSA:1.10.10.2600,IPR036162,PF13408, PS51737,G3DSA:3.40.50.1390,IPR025827,IPR006119,IPR038109, IPR011109,SSF53041,PTHR30461,PS51736,Coil, PF00239
MNVVLRAALYPRVSTEEQKKFGLSIHDQQNDLEEYAKAHNMKVVGVFQDAGFSARKKIEKRPAMLQLLEAVKHDEIDIILVTKLDRWFRNIGEYYKVQEILEAHNVSWKTIYEDYDTSTAAGRLKINIMLSVAQDEADRASERIKKVLDAKKDRNEVCTGHLPKGYKREDKFAVIDKEAEPIMRRFFSTFLETGAITKAMDAVPELNLNYKTASAILNSTAYMGKWNGLTLPPYLTQQEFQRVQELRRRVTRKSPYNRIYLFSGLTVCGECGRRMTGHPTTLKDGTCVYKYLCQGAKQRRGCDNGLVVREQDIENYFMFSIDEQIQIKLKAKAQHAPKINTDAQIKAIQKKLAKLSELYIDDMISKPDYSKKYAELTEQVEALKQTQVQSRAPEEVADLFAPGWQDIYKNLTRENKRAFWKLKIKEIRLYKDSRIEFDFL

SEQ ID NO: 9258 - protein, 440 aa, Unknown
  Description of Unknown: Integrase B9259 sequence
  PTHR30461:SF3,SM00857,G3DSA:1.10.10.2600,IPR036162,PF13408, IPR025827,PS51737,G3DSA:3.40.50.1390,IPR006119,IPR038109, IPR011109,SSF53041,PF00239,PTHR30461,PS51736, Coil,cd00338
MSVVLRAALYPRVSTEEQAKFGLSIHDQQNDLEEYAKANNMKVVGVFPDAGFSARKKIEKRPAMLQLLEAVKRDEIDIILVTKLDRWFRNIGEYYKVQEILEAHNVSWKTIYEDYDTSTAAGRLKINIMLAVAQDEADRASERIKRVLDAKKERNEVCTGHLPKGYKIEGKFAVIDKETEPIIRRYFSTFLENGSITKAMDAVPELKLKYLTASQMLDNPGYMGDWHGIKLPPYLTPQEFQRVQGLRTRVTRKSPYNRTYIFSGLIVCGECGRRMTGHPSPRASGKCSYSYYCQGSAQRKGCNNGNFTVEWKIEDYLLSTIDEQIQIKLQAKPRQEPKANQDAQLKALQKKLSKLSELYIDDMISKADYSKKYAELTSQMDEITQVKSQSRAPEEIATLFSAGWQEIYKQLNRENKQAFWKLKIKEIRLYKDRRIEFDFL

SEQ ID NO: 9259 - protein, 440 aa, Unknown
  Description of Unknown: Integrase B9260 sequence
  SM00857,G3DSA:1.10.10.2600,IPR036162,PF13408,IPR025827, PS51737,G3DSA:3.40.50.1390,IPR006119,IPR038109,SSF53041, IPR011109,PTHR30461,Coil,PS51736,cd00338, PF00239
MNVVLRAALYPRVSTEEQKKFGLSIHDQQNDLEEYAKAHNMKVVGVFQDAGFSARKKIEKRPAMLQLLEAVKHDEVDIILVTKLDRWFRNIGEYYKVQEILEAHNVSWKTIYEDYDTSTAAGRLKINIMLSVAQDEADRASERIKKVLDAKKDRNEVCTGHLPKGYKIEGKFAVIDKEAEPVIRRYFSTFLETGSITKAMDAVPELKLKYQTASQMLDNTGYMGDWHGIKLPPYLTPQEFQRVQDLRTRVTRKSHYNRTYIFSGLIVCGECGRRMTGHPSPRPNGACSYSYYCQGSSQRKGCSNGNFTVEWKIENYLMSTIDEQIQIKLQAKPRKEPKIKADVQLKTIQKKLAKLSELYIEDMISKADYSKKYADLTGQIEAITSAELPTRAPEEIATLFAPGWQDIYKNLTRENKQAFWKLKIKEIRLYKDRRIEFDFL

SEQ ID NO: 9260 - protein, 440 aa, Unknown
  Description of Unknown: Integrase B9261 sequence
  cd00338,SM00857,G3DSA:1.10.10.2600,IPR036162,PF13408, IPR025827,G3DSA:3.40.50.1390,PS51737,IPR006119,IPR038109, SSF53041,IPR011109,PTHR30461,PS51736,Coil, PF00239
MSVVLRAALYPRVSTEEQKKFGLSIHDQQNDLEEYAKAHNMKVVGVFQDAGFSARKKIEKRPAMLQLLEAVKHDEIDIILVTKLDRWFRNIGEYYKVQEILEAHNVSWKTIYEDYDTSTAAGRLKINIMLSVAQDEADRASERIKKVLDAKKDRNEVCTGHLPKGYKREGKFAVIDKEAEPIMRRFFSTFLETGAITKAMDAVPELNLNYKTASAILNNTAYMGKWNGLTLPPYLTQQEFQRVQELRRRVTRKSPYNRIYLFSGLTVCGECGRRMTGHPTTLKDGTCVYKYLCQGAKQRRGCDNGLVVREQDIENYFMSSIDEQIQIKLKAKAQHALKINTDAQIKAIQKKLAKLSELYIDDMISKPDYSKKYAELTEQVEALKQTQVQSRAPEEVADLFAPGWQDIYKDLTRENKRAFWKLKIKEIRLYKDSRIEFDFL

SEQ ID NO: 9261 - protein, 440 aa, Unknown
  Description of Unknown: Integrase B9262 sequence
  PTHR30461:SF3,cd00338,SM00857,G3DSA:1.10.10.2600,IPR036162, PF13408,IPR025827,PS51737,G3DSA:3.40.50.1390,IPR006119, IPR038109,IPR011109,SSF53041,PTHR30461,PS51736, Coil,PF00239
MSVVLRAALYPRVSTEEQAKFGLSIHDQQNDLEEYAKANNMKVVGVFPDAGFSARKKIEKRPAMLQLLEAVKRDEVDIILVTKLDRWFRNIGEYYKVQEILEAHNVSWKTIYEDYDTSTAAGRLKINIMLAVAQDEADRASERIKKVLDAKKDRNEVCTGHLPKGYKIEGKFAVIDKEAEPVIRRYFSTFLETGSITKAMDAVPELKLKYQTASQMLDNTGYMGDWHGIKLPPYLTPQEFQRVQGLRTRVTRKSPYNRTYIFSGLIVCGECGRRMTGHPSPRPSGACSYSYYCQGSAQRKGCNNGNFTVEWKIEDYLLSTIDEQIQIKLQAKPRQEPKANQDVQLKALQKKLSKLSELYIDDMISKADYSKKYAELTSQMDELTQVKSQSRAPEEIATLFSAGWQEIYKQLNKENKQAFWKLKIKEIRLYKDRRIEFDFL

SEQ ID NO: 9262 - protein, 440 aa, Unknown
  Description of Unknown: Integrase B9263 sequence
  cd00338,SM00857,G3DSA:1.10.10.2600,IPR036162,PF13408, IPR025827,PS51737,G3DSA:3.40.50.1390,IPR006119,IPR038109, SSF53041,IPR011109,PTHR30461,PS51736,Coil, PF00239
MIAVLRAALYPRVSTEEQKKFGLSIHDQQNDLEEYAKAHNMKVVGVFQDAGFSARKKIEKRPAMLQLLEAVKHDEVDIILVTKLDRWFRNIGEYYKVQEILEAHNVSWKTIYEDYDTSTAAGRLKINIMLSVAQDEADRASERIKKVLDAKKDRNEVCTGHLPKGYKIEGKFAVIDKEAEPVIRRYFSTFLETGSITKAMDAVPELKLKYQTASQMLDNPGYMGDWHGIKLPPYLTPQEFQRVQDLRIRITRKSPCNRTYIFSGLIVCGECGRRMTGHPSPRPSGACSYSYYCQGSAQRKGCNNGNFTVEWKIEDYLLSTIDEQIQVKLQAKPRQEPKVNQDVQLKALQKKLSKLSELYIDDMISKADYSKKYAELTSQMDELTQVKSQSRAPEEIATLFSAGWQEIYKQLNKENKQAFWKLKIKEIRLYKDRRIEFDFL

SEQ ID NO: 9263 - protein, 440 aa, Unknown
  Description of Unknown: Integrase B9264 sequence
  cd00338,SM00857,G3DSA:1.10.10.2600,IPR036162,PF13408, PS51737,G3DSA:3.40.50.1390,IPR025827,IPR006119,IPR038109, IPR011109,SSF53041,PTHR30461,PS51736,Coil, PF00239
MSVVLRAALYPRVSTEEQAKFGLSIHDQQNDLEEYAKANNMKVVGVFPDAGFSARKKIEKRPAMLQLLEAVKRDEVDIILVTKLDRWFRNIGEYYKVQEILEAHNVSWKTIYEDYDTSTAAGRLKINIMLAVAQDEADRASERIKKVLDAKKDRNEVCTGHLPKGYKIEGKFAVIDKEAEPVIRRYFSTFLETGSITKAMDAVPELKLKYQTASQMLDNPGYMGDWHGIKLPPYLTPQEFQRVQDLRTRVTRKSPYNRTYIFSGLIVCGECGRRMTGHPSPRPSGACSYSYYCQGSAQRKGCNNGNFTVEWKIEDYLLSTIDEQIQIKLQAKPRQEPKANQDVQLKVLQKKLSKLSELYIDDMISKADYSKKYVELTSQMDEITQVKSQSRAPEEIATLFSAGWQEIYKQLNKENKQTFWKLKIKEIRLYKDRRIEFDFL

SEQ ID NO: 9264 - protein, 440 aa, Unknown
  Description of Unknown: Integrase B9265 sequence
  cd00338,SM00857,G3DSA:1.10.10.2600,IPR036162,PF13408, IPR025827,PS51737,G3DSA:3.40.50.1390,IPR006119,IPR038109, SSF53041,IPR011109,PTHR30461,PS51736,Coil, PF00239
MNVVLRAALYPRVSTEEQKKFGLSIHDQQNDLEEYAKAHNMKVVGVFQDAGFSARKKIEKRPAMLQLLEAVKHDEVDIILVTKLDRWFRNIGEYYKVQEILEAHNVSWKTIYEDYDTSTAAGRLKINIMLAVAQDEADRASERIKKVLDAKKDRNEVCTGHLPKGYKIEGKFAVIDKEAEPVIRRYFSTFLETGSITKAMDAVPELKLKYQTASQMLDNPGYMGDWHGIKLPPYLTPQEFQRVQDLRTRITRKSPYNRTYIFSGLIVCGECGRRMTGHPTPRASGKCSYSYYCQGSAQRKGCSNGNFTVEWKIEDYLLSKIDEQIQIKLQAKPRREPKANQDVQLKALQKKLSKLSELYIDDMISKADYSKKYAELTSQMDEITQAKSQSRPPEEIATLFSAGWQEIYKQLNKENKQAFWKLKIKEIRLYKDRRIEFDFL

SEQ ID NO: 9265 - protein, 440 aa, Unknown
  Description of Unknown: Integrase B9266 sequence
  PTHR30461:SF3,cd00338,SM00857,G3DSA:1.10.10.2600,IPR036162, PF13408,PS51737,G3DSA:3.40.50.1390,IPR025827,IPR006119, IPR038109,SSF53041,IPR011109,PTHR30461,PS51736, Coil,PF00239
MSVVLRAALYPRVSTEEQKKFGLSIHDQQNDLEKYAKAHNMKVVGVFQDAGFSARKKIEKRPAMLQLLEAVKHDEVDIILVTKLDRWFRNIGEYYKVQEILEAHNVSWKTIYEDYDTSTAAGRLKINIMLSVAQDEADRASERIKKVLDAKKDRNEVCTGHLPKGYKIEGKFAVIDKEAEPVIRRYFSTFLETGSITKAMDAVPELKLKYQTASQMLDNTGYMGDWHGIKLPPYLTPQEFQRVQDLRTRVTRKSPYNRTYIFSGLIVCGECGRRMTGHPSPRPSGACSYSYYCQGSAHRKGCNNGNFTVEWKIEDYLLSTIDEQIQIKLQAKPRQEPKANQDVQLKALQKKLSKLSELYIDDMISKADYSKKYAELTSQMDEITQVKSQSRAPEEIATLFSAGWQEIYKQLNKENKQAFWKLKIKEIRLYKDRRIEFDFL

SEQ ID NO: 9266 - protein, 440 aa, Unknown
  Description of Unknown: Integrase B9267 sequence
  cd00338,SM00857,G3DSA:1.10.10.2600,IPR036162,PF13408, PS51737,IPR025827,G3DSA:3.40.50.1390,IPR006119,IPR038109, SSF53041,IPR011109,PTHR30461,PS51736,Coil, PF00239
MNVVLRAALYPRVSTEEQKKFGLSIHDQQNDLEEYAKAHNMKVVGVFQDAGFSARKKIEKRPAMLQLLEAVKHDEVDIILVTKLDRWFRNIGEYYKVQEILEAHNVSWKTIYEDYDTSTAAGRLKINIMLSVAQDEADRASERIKKVLDAKKDRNEVCTGHLPKGYKIEGKFAVIDKEAEPVIRRYFSTFLETGSITKAMDAVPELKLKYQTASQMLDNTGYMGDWHGIKLPPYLTPQEFQRVQDLRTRVTRKSPYNRTYIFSGLIVCGECGRRMTGHPSPRPSGACSYSYYCQGSAQRKGCNNGNFTVEWKIEDYLLSTIDEQIQIKLQAKPRQEPKVNQDVQLKALQKKLSKLSELYIDDMISKTDYSKKYAELTSQMDEITQVKSQSRAPEEIATLFSAGWQEIYKQLNKENKQAFWKLKIKEIRLYKDRRIEFDFL

SEQ ID NO: 9267 - protein, 440 aa, Unknown
  Description of Unknown: Integrase B9268 sequence
  PTHR30461:SF3,cd00338,SM00857,G3DSA:1.10.10.2600,IPR036162, PF13408,PS51737,G3DSA:3.40.50.1390,IPR025827,IPR006119, IPR038109,IPR011109,SSF53041,PTHR30461,PS51736, Coil,PF00239
MSVVLRAALYPRVSTEEQKKFGLSIHDQQNDLEEYAKAHNMKVVGVFQDAGFSARKKIEKRPAMLQLLEAVKHDEIDIILVTKLDRWFRNIGEYYKVQEILEAHNVSWKTIYEDYDTSTAAGRLKINIMLSVAQDEADRASERIKKVLDAKKDRNEVCTGHLPKGYKIEGKFAVIDKEAEPVIRRYFSTFLETGSITKAMDAVPELKLKYQTASQMLDNTGYMGDWHGIKLPPYLTPQEFQRVQDLRTRVTRKSPYNRTYIFSGLIVCGECGRRMTGHPSPRPSGACSYSYYCQGSAQRKGCNNGNFTVEWKIEDYLLSTIDEQIQIKLQAKPRQEPKVNQDVQLKALQKKLSKLSELYIDDMISKADYSKKYAELTSQMDELTQVKSQSRAPEEIATLFSAGWQEIYKQLNKENKQAFWKLKIKEIRLYKDRRIEFDFL

SEQ ID NO: 9268 - protein, 440 aa, Unknown
  Description of Unknown: Integrase B9269 sequence
  PTHR30461:SF3,cd00338,SM00857,G3DSA:1.10.10.2600,IPR036162, PF13408,PS51737,IPR025827,G3DSA:3.40.50.1390,IPR006119, IPR038109,PF07508,IPR011109,SSF53041,PTHR30461, PS51736,Coil,PF00239
MIADALAGKVDLIITKSVSRFARNTVDSLSTIRKLKEHNIECYFEKENIWTFDSKGELLLTIMSSLAQEESRSISENATWGHRKRFADGKVSFAYSRFLGYEKGPDGTIVVVPEQAKTVRLIYKLFLDGMTIHTIAGELTKRGIKTPGGKDKWNQSTVRSILTNEKYKGDALLQKSYTVDFLTKKTKTNEGEVPQYYVENNHEAIIDSQIFELVQAEIAKRNKGKEHYSGVSIFSTKVQCAECGGWYGSKVWHSNDKYRRIIYQCNNKFRNKTGCSTPHLTEYEIKEYFIKALNRLITEKDEIIANTEMIQKMLCDNSELEAKRDVLQEEIAVTVELTQNAVAENARVAQDQDNYNKRYNALVERYDRLKAQYDEVSTAISDNEARYEQMGRFITVLKDQEGVITEFDDALWSSLVEKIVVKSKEDVTVVFKDGTEMKAE

SEQ ID NO: 9269 - protein, 440 aa, Unknown
  Description of Unknown: Integrase B9270 sequence
  cd00338,SM00857,G3DSA:1.10.10.2600,IPR036162,PF13408, PS51737,G3DSA:3.40.50.1390,IPR025827,IPR006119,IPR038109, IPR011109,SSF53041,PTHR30461,PS51736,Coil, PF00239
MSVVLRAALYPRVSTEEQKKFGLSIHDQQNDLEEYAKAHNMKVVGVFQDAGFSARKKIEKRPAMLQLLEAVKHDEVDIILVTKLDRWFRNIGEYYKVQEILEAHNVSWKTIYEDYDTSTAAGRLKINIMLSVAQDEADRASERIKKVLDAKKDRNEVCTGHLPKGYKIEGKFAVIDKEAEPVIRRYFSTFLETGSITKAMDAVPELKLKYQTASQMLDNPGYMGDWHGIKLPPYLTPQEFQRVQGLRTRVTRKSPYNRTYIFSGLIVCGECGRRMTGHPSPRPSGACSYSYYCQGSAQRKGCNNGNFTVEWKIEDYLLSTIDEQIQIKLQAKPRQEPKANQDVQLKALQKKLSKLSELYIDDMISKADYSKKYAELTSQMDELTQVKSQSRAPEEIATLFSAGWQEIYKQLNKENKQAFWKLKIKEIRLYKDRRIEFDFL

SEQ ID NO: 9270 - protein, 440 aa, Unknown
  Description of Unknown: Integrase B9271 sequence
  PTHR30461:SF3,cd00338,SM00857,G3DSA:1.10.10.2600,IPR036162, PF13408,PS51737,IPR025827,G3DSA:3.40.50.1390,IPR006119, IPR038109,PF07508,IPR011109,SSF53041,PTHR30461, PS51736,Coil,PF00239
MIADALAGKVDLIITKSVSRFARNTVDSLSTIRKLKEHNIECYFEKENIWTFDSKGELLLTIMSSLAQEESRSISENATWGHRKRFADGKVSFAYSRFLGYEKGPDGTIVVVPEQAKTVRLIYKLFLDGMTIHTIAGELTKRGIKTPGGKDKWNQSTVRSILTNEKYKGDALLQKSYTVDFLTKKTKTNEGEVPQYYVENNHEAIIDSQIFELVQAEIAKRNKGKEHYSGVSIFSTKVQCAECGGWYGSKVWHSNDKYRRIIYQCNNKFRNKTGCSTPHLTEYEIKEYFIKALNRLITEKDEIIANTEMIQKMLCDNSELEAKRDVLQEEIAVTVELTQNAVAENARVAQDQDNYNKRYNALVERYDRLKAQYDEVSTAISDNDARYEQMGRFITVLKDQEGVITEFDDALWSSLVEKIVVKSKEDVTVVFKDGTEMKAE

SEQ ID NO: 9271 - protein, 440 aa, Unknown
  Description of Unknown: Integrase B9272 sequence
  SM00857,G3DSA:1.10.10.2600,IPR036162,PF13408,IPR025827, G3DSA:3.40.50.1390,PS51737,IPR006119,IPR038109,SSF53041, IPR011109,PF00239,PTHR30461,PS51736,Coil, cd00338
MSVVLRAALYPRVSTEEQKKFGLSIHDQQNELEEYAKAHNMKVVGVFQDAGFSARKKIEKRPAMLQLLEAVKHDEIDIILVTKLDRWFRNIGEYYKVQEILEAHNVSWKTIYEDYDTSTATGRLKINIMLAVAQDEADRASERIKKVLDAKKDRNEVCTGNLPKGYKREGKFAVIDKEAEPIMRRFFSTFLETGAITKAMDAVPELNLNYKTASAILNNAAYMGKWNGLTLPPYLTQQEFQRVQELRRRVTRKSPYNRIYLFSGLTVCGECGRRMTGHPTTLKDGTCVYKYLCQGAKQRRGCDNGLVVREQDIENYFMSSIDEQIQIKLKAKAQHAPKINTDAQIKAIQKKLTKLSELYIDDMISKPDYSKKYAELTEQVEALKQTQVQSRAPEEVADLFAPGWQDIYKNLTRENKRAFWKLKIKEIRLYKDSRIEFDFL

SEQ ID NO: 9272 - protein, 440 aa, Unknown
  Description of Unknown: Integrase B9273 sequence
  cd00338,SM00857,G3DSA:1.10.10.2600,IPR036162,PF13408, PS51737,G3DSA:3.40.50.1390,IPR025827,IPR006119,IPR038109, IPR011109,SSF53041,PTHR30461,PS51736,Coil, PF00239
MNVVLRAALYPRVSTEEQKKFGLSIHDQQNDLEEYAKAHNMKVVGVFQDAGFSARKKIEKRPAMLQLLEAVKHDEVDIILVTKLDRWFRNIGEYYKVQEILEAHNVSWKTIYEDYDTSTAAGRLKINIMLSVAQDEADRASERIKKVLDAKKDRNEVCTGHLPKGYKIEGKFAVIDKEAEPVIRRYFSTFLETGSITKAMDAVPELKLKYQTASQMLDNTGYMGDWHGIKLPPYLTPQEFQRVQDLRTRVTRKSPYNRTYIFSGLIVCGECGRRMTGHPSPRPSGACSYSYYCQGSAQRKGCNNGNFTVEWKIEDYLLSTIDEQIQIKLQAKPRQEPKANQDVQLKALQKKLSKLSELYIDDMISKADYSKKYAELTSQMDEITRVNPQSRAPEEIATLFSAGWQEIYKQLTRENKQAFWKLKIKVIRLYKDRRIEFDFL

SEQ ID NO: 9273 - protein, 440 aa, Unknown
  Description of Unknown: Integrase B9274 sequence
  PTHR30461:SF3,cd00338,SM00857,G3DSA:1.10.10.2600,IPR036162, PF13408,PS51737,G3DSA:3.40.50.1390,IPR025827,IPR006119, IPR038109,IPR011109,SSF53041,PTHR30461,PS51736, Coil,PF00239
MSVVLRAALYPRVSTEEQKKFGLSIHDQQNDLEEYAKANNMKVVGVFSDAGFSARKKIEKRPAMLQLLEAVKRDEVDIILVTKLDRWFRNIGEYYKVQEILEAHNVSWKTIYEDYDTSTAAGRLKINIMLSVAQDEADRTSERIKKVLDAKKERNEVCAGHLPKGYKREGKFAVIDEKKEPIMRRFFSTFLETGAITKAMDAAPELKLQYKTASAILYNPAYMGKWNGLTLPPYLTQQEFQRIQELRRRVTRKSPYNRVYLFSGLTVCGECGRRMTGHPTTLKSGACVYKYLCQGATQRRGCDNSLFVREQDIEDYLMASIDEQIQIKLKAKANHAPKINTEAQIKAIQKKLAKLSELYIDDMISKPDYSKKYAELTEQVEALKQTKVQSRDPEEVADLFAPGWQDIYKNLTRENKQAFWKLKIKEIRLYKDSRIEFDFL

SEQ ID NO: 9274 - protein, 440 aa, Unknown
  Description of Unknown: Integrase B9275 sequence
  PTHR30461:SF3,cd00338,SM00857,G3DSA:1.10.10.2600,IPR036162, PF13408,IPR025827,G3DSA:3.40.50.1390,PS51737,IPR006119, IPR038109,SSF53041,IPR011109,PTHR30461,PS51736, Coil,PF00239
MNVVLRAALYPRVSTEEQKKFGLSIHDQQNDLEEYAKAHNMKVVGVFQDAGFSARKKIEKRPAMLQLLEAVKRDEVDIILVTKLDRWFRNIGEYYKVQEILEAHNVSWKTIYEDYDTSTAAGRLKINIMLSVAQDEADRASERIKKVLDAKKDRNEVCTGHLPKGYKIEGKFAVIDKEAEPVIRRYFSTFLETGSITKAMDTVPELKLKYQTASQMLDNTGYMGDWHGIKLPPYLTPQEFQRVQDLRTRVTRKSPYNRTYIFSGLIVCGECGRRMTGHPSPRPSGACSYSYYCQGSAHRKGCNNGNFTVEWKIEDYLLSTIDEQIQIKLQAKPRQEPKANQDVQLKALQKKLSKLSELYIDDMISKADYSKKYAELTSQMDELTQVKSQSRAPEEIATLFSAGWQEIYKQLNKVNKQAFWKLKIKEIRLYKDRRIEFDFL

SEQ ID NO: 9275 - protein, 440 aa, Unknown
  Description of Unknown: Integrase B9276 sequence
  IPR036162,PS51737,IPR011109,PTHR30461,PS00397, PF00239,G3DSA:1.10.10.2600,IPR006119,SSF53041,cd00338, SM00857,IPR025827,IPR038109,PS51736,IPR006118, PF13408,G3DSA:3.40.50.1390,PF07508,Coil
MKKARLYARVSTAEQKRKNISIPVQIAALNDFCSNNQYTVVGTYIDNGVSASSLTKRKQFLKMIEESEQGDYILFTRLDRFSRNVLDANKIVKELNKKKIYIISIFEDDINTSTADGMFMFNLRVSLSQREIEKDSERILDVFESKLKKGEVLTGQMPLGYVVRSKKPCINEFDAEIVRFIFDTYIQCGNLNETVREVIAKYSKPMCPSTVQQIIANEKYIGKYRGINNYFPPIIDVDTFYEANKVYKERYVKNNKKNVTYLFSGLLRCEVCGHRMSSYYRIRKNINYYYTCQKKVMGGTIQHFCKSEKKIEKELLKNIKTVIKNNIVSVSEKDLAENHEEEIKKLKQKLERVKELYIDGYISREEFDDKSYDINSRLVQIDADGSAAVIRRNEKLNVLLESDISSIYEKFDRKQKAIFWRNLIDHIVVHKDNSLDIYLL

SEQ ID NO: 9276 - protein, 440 aa, Unknown
  Description of Unknown: Integrase B9277 sequence
  cd00338,SM00857,G3DSA:1.10.10.2600,IPR036162,PF13408, PS51737,IPR025827,G3DSA:3.40.50.1390,IPR006119,IPR038109, IPR011109,SSF53041,PTHR30461,PS51736,Coil, PF00239
MSVVLRAALYPRVSTEEQKKFGLSIHDQQNDLEEYAKAHNMKVVGVFQDAGFSARKKIEKRPAMLQLLEAVKHDEIDIILVTKLDRWFRNIGEYYKVQEILEAHNVSWKTIYEDYDTSTAAGRLKINIMLSVAQDEADRASERIKKVLDAKKERNEVCTGHLPKGYKIEGKFAVIDKETEPIIRRYFSTFLETGSITKAMDAVPELNLNYKTASAILNNTAYMGKWNGLTLPPYLTQQEFQRVQELRRRVTRKSPYNRIYLFSGLTVCGECGRRMTGHPTTLKDGTCVYKYLCQGAKQRRGCDNGLVVREQDIENYFMSSIDEQIQIKLKAKAQHALKINTDAQIKAIQKKLAKLSELYIDDMISKPDYSKKYAELTEQVEALKQTQVQSRAPEEVADLFAPGWQDIYKDLTRENKRAFWKLKIKEIRLYKDSRIEFDFL

SEQ ID NO: 9277 - protein, 440 aa, Unknown
  Description of Unknown: Integrase B9278 sequence
  cd03768,PTHR30461:SF3,SM00857,G3DSA:1.10.10.2600,IPR036162, PF13408,IPR025827,G3DSA:3.40.50.1390,PS51737,IPR006119, IPR038109,PF07508,SSF53041,IPR011109,PTHR30461, PS51736,Coil,PF00239
MEALLYTRVSKEDQVKFGMSLDAQLESLKQYCSENNLKIRNIYSDEGISGGSITKRKAFQSMIEEAKPGDIILFTKLDRFSRNLLDANIVVKELTKKDVSIKAINEDDIDTSTADGKFIFNLKLSLAQREREKVSERINDVFAYKIKQGEIVSGQIPYGYMKKNKHLVLDPVKSVWMREMFEHYLKYQSLVGTCKWWNEQHPDETIGYTAFKNSRISNPIYCGKHPSGLNDNFCDPIISVEQFDKVQELLSRNIKSIRTNHVYLFTGLMTCSHCGRRMAGFYRKWKDNKLNYYRCYNHTQNGICDNKHCISERKIEEFVLQDMIKKCNEIASASLKPENTDEVKLQNKKANTESKISRLKDLYVDGVLTKEEFDTKYKQLQDEIEAIKQEMKPKSNKLLELHDVDVKELYSKLNPENKRAFWRKYIERIYFDGHNFKVVY

SEQ ID NO: 9278 - protein, 440 aa, Unknown
  Description of Unknown: Integrase B9279 sequence
  PTHR30461:SF3,IPR036162,PS51737,IPR011109,PTHR30461, PS00397,PF00239,G3DSA:1.10.10.2600,IPR006119,SSF53041, cd00338,SM00857,IPR025827,IPR038109,PS51736, IPR006118,PF13408,G3DSA:3.40.50.1390,PF07508
MNTNKRAALYIRVSTEEQARHGLSLSAQLENLQQYAKNKGYDIVGIYTDDGASARKSPFSRKAFKQLMEDVQWNRIDRILFIKLDRWFRSVRDYYKAQDILDAHGVDWETTQEQYNTTTTNGRLMLNIKLSVAQNESDMTSDRIRFVFEQKRVKHEVLSGFAPLGYKIKNKHLVPDENASIIANAFNQFIAYPNLQQLTNWFHSQGIHYNVTSIRKLLRNERYVGRNKGDLEYCPPIVSDQQFYTVQDMLDKNLTVKRTASGLVYIFTGLLRCPICGHKLTSSCAYSGTHKYKRYRCSRHWRNEDCSFNRGIAESKLEKQLLAHFDDLYEHFNSAVQEEQKNNARIDTQVIKKKQERLKELFLNELITLDEYKKDYAKYAAMLPSEPRPSIQPSLYKGMKAADIEQLYKALPDRQKQAFLRQIIDYIDFDADLKPIIHFK

SEQ ID NO: 9279 - protein, 440 aa, Unknown
  Description of Unknown: Integrase B9280 sequence
  PTHR30461:SF3,cd00338,SM00857,G3DSA:1.10.10.2600,IPR036162, PF13408,IPR025827,PS51737,G3DSA:3.40.50.1390,IPR006119, IPR038109,SSF53041,IPR011109,PTHR30461,PS51736, Coil,PF00239
MIAVLRAALYPRVSTEEQKKFGLSIHDQQNDLEEYAKAHNMKVVGVFQDAGFSARKKIEKRPAMLQLLEAVKHDEIDIILVTKLDRWFRNIGEYYKVQEILEAHNVSWKTIYEDYDTSTAAGRLKINIMLSVAQDEADRASERIKKVLDAKKDRNEVCTGHLPKGYKIEGKFAVIDKEAEPVIRRYFSTFLETGSITKAMDAAPELNLKYQTASQMLDNTGYMGDWHGIKLPPYLTPQEFQRVQDLRTRVTRKSPYNRTYIFSGLIVCGECGRRMTGHPSPRPSGACSYSYYCQGSAHRKGCNNGNFTVEWKIEDYLLSTIDEQIQIKLQAKPRQEPKANQDVQLKALQKKLSKLSELYIDDMISKADYSKKYAELTSQMDEITQVKSQSRAPEEIATLFSAGWQEIYKQLNKENKQAFWKLKIKEIRLYKDRRIEFDFL

SEQ ID NO: 9280 - protein, 440 aa, Unknown
  Description of Unknown: Integrase B9281 sequence
  cd00338,SM00857,G3DSA:1.10.10.2600,IPR036162,PF13408, PS51737,IPR025827,G3DSA:3.40.50.1390,IPR006119,IPR038109, IPR011109,SSF53041,PTHR30461,PS51736,Coil, PF00239
MNVVLRAALYPRVSTEEQKKFGLSIHDQQNDLEEYAKAHNMKVVGVFQDAGFSARKKIEKRPAMLQLLEAVKRDEVDIILVTKLDRWFRNIGEYYKVQEILEAHNVSWKTIYEDYDTSTAAGRLKINIMLSVAQDEADRASERIKKVLDAKKDRNEVCTGHLPKGYKIEKKFAVIDKETEPVIRRYFSTFLETGSITKAMDAVPELKLKYQTASQMLDNPGYMGDWHGIKLPPYLTPQEFQRVQGLRTRVTRKSPYNRTYIFSGLIVCGECGRRMTGHPSPRPSGACSYSYYCQGSAQRKGCNNGNFTVEWKIEDYLLSTIDEQIQIKLQAKPRQEPKANQDVQLKALQKKLSKLSELYIDDMISKADYSKKYAELTSQMDELTQVKSQSRAPEEIATLFSAGWQEIYKQLNKENKQAFWKLKIKEIRLYKDRRIEFDFL

SEQ ID NO: 9281 - protein, 440 aa, Unknown
  Description of Unknown: Integrase B9282 sequence
  cd00338,SM00857,G3DSA:1.10.10.2600,IPR036162,PF13408, IPR025827,PS51737,G3DSA:3.40.50.1390,IPR006119,IPR038109, IPR011109,SSF53041,PTHR30461,PS51736,Coil, PF00239
MSVVLRAALYPRVSTEEQKKFGLSIHDQQNDLEEYAKAHNMKVVGVFQDAGFSARKKIEKRPAMLQLLEAVKHDEIDIILVTKLDRWFRNIGEYYKVQEILEAHNVSWKTIYEDYDTSTAAGRLKINIMLSVAQDEADRASERIKKVLDAKKERNEVCTGHLPKGYKIEGKFAVIDKETEPIIRRYFSTFLETGSITKAMDAVPELKLKYLTASQMLDNPGYMGDWHGIKLPPYLTPQEFQRVQGLRTRVTRKSPYNRTYIFSGLIVCGECGRRMTGHPSPRASGKCSYSYYCQGSTQRKGCDNGNFTIEWKIEDYLLSTIDEQIQVKLQAKPRQEPKANQDAQLKALQKKLSKLSELYIDDMISKTDYSKKYAELTSRMDEITQVKSQSRAPEEIATLFSAGWQEIYKQLNRENKQAFWKLKIKEIRLYKDRRIEFDFL

SEQ ID NO: 9282 - protein, 440 aa, Unknown
  Description of Unknown: Integrase B9283 sequence
  cd03768,PTHR30461:SF3,SM00857,G3DSA:1.10.10.2600,IPR036162, PF13408,IPR025827,G3DSA:3.40.50.1390,PS51737,IPR006119, IPR038109,PF07508,SSF53041,IPR011109,PTHR30461, PS51736,Coil,PF00239
MEALLYTRVSKEDQVKFGMSLDAQLESLKQYCSENNLKIRNIYSDEGISGGSITKRKAFQNMIEEAKPGDIILFTKLDRFSRNLLDANIVVKELTKKDVSIKAINEDDIDTSTADGKFIFNLKLSLAQREREKVSERINDVFAYKIKQGEIVSGQIPYGYMKKNKHLVLDPVKSVWMREMFEHYLKYQSLVGTCKWWNEQHPDETIGYTAFKKSRISNPIYCGKHPSGLNDNFCDPIISVEQFDKVQELLSRNIKSIRTNHVYLFTGLMTCSHCGRRMAGFYRKWKDNKLNYYRCYNHTQNGICDNKHCISERKIEEFVLQDMIKKCNEIASASLKPENTDEVKLQNKKANTEAKISRLKDLYVDGLIDREKFDTKYKQLQDEIEAIKQEMKPKSNKLLELHDVDVKELYSKLTPENKRAFWRKYIERIYFDGHNFKVVY

SEQ ID NO: 9283 - protein, 440 aa, Unknown
  Description of Unknown: Integrase B9284 sequence
  cd00338,SM00857,G3DSA:1.10.10.2600,IPR036162,PF13408, PS51737,IPR025827,G3DSA:3.40.50.1390,IPR006119,IPR038109, SSF53041,IPR011109,PTHR30461,PS51736,Coil, PF00239
MSVVLRAALYPRVSTEEQKKFGLSIHDQQNDLEEYAKAHNMKVVGVFQDAGFSARKKIEKRPAMLQLLEAVKRDEVDIILVTKLDRWFRNIGEYYKVQEILEAHNVSWKTIYEDYDTSTAAGRLKINIMLSVAQDEADRASERIKKVLDAKKDRNEVCTGHLPKGYKIEGKFAVIDKETEPVIRRYFSTFLETGSITKAMDAVPELKLKYQTASQMLDNTGYMGDWHGIKLPPYLTPQEFQRVQGLRTRVTRKSPYNRTYIFSGLIVCGECGRRMTGHPSPRPSGACSYSYYCQGSAHRKGCNNGNFTVEWKIEDYLLSTIDEQIQIKLQAKPRQEPKANQDVQLKALQKKLSKLSELYIDDMISKADYSKKYAELTSQMDEITQVKSQSRAPEEIATLFSAGWQEIYKQLNKENKQAFWKLKIKEIRLYKDRRIEFDFL

SEQ ID NO: 9284 - protein, 440 aa, Unknown
  Description of Unknown: Integrase B9285 sequence
  cd00338,SM00857,G3DSA:1.10.10.2600,IPR036162,PF13408, PS51737,G3DSA:3.40.50.1390,IPR025827,IPR006119,IPR038109, IPR011109,SSF53041,PTHR30461,PS51736,Coil, PF00239
MNVVLRAALYPRVSTEEQKKFGLSIHDQQNDLEEYAKAHNMKVVGVFQDAGFSARKKIEKRPAMLQLLEAVKHDEVDIILVTKLDRWFRNIGEYYKVQEILEAHNVSWKTIYEDYDTSTAAGRLKINIMLSVAQDEADRASERIKKVLDAKKDRNEVCTGHLPKGYKIEGKFAVIDKETEPVIRRYFSTFLETGSITKAMDAVPELKLKYQTASQMLDNTGYMGDWHGIKLPPYLTPQEFQRVQDLRTRVTRKSPYNRTYIFSGLIVCGECGRRMTGHPSPRPSGACSYSYYCQGSAQRKGCNNGNFTVEWKIEDYLLSTIDEQIQVKLQAKPRQEPKANQDVQLKALQKKLSKLSELYIDDMISKADYSKKYAELTSQMDEITQVKSQSRAPEEIATLFSAGWQEIYKQLNKENKQAFWKLKIKEIRLYKDRRIEFDFL

SEQ ID NO: 9285 - protein, 440 aa, Unknown
  Description of Unknown: Integrase B9286 sequence
  PTHR30461:SF3,SM00857,G3DSA:1.10.10.2600,IPR036162,PF13408, PS51737,IPR025827,G3DSA:3.40.50.1390,IPR006119,IPR038109, SSF53041,IPR011109,PF00239,PTHR30461,PS51736, Coil,cd00338
MNVVLRAALYPRVSTEEQAKFGLSIHDQQNDLEEYAKANNMKVVGVFPDAGFSARKKIEKRPAMLQLLEAVKRDEVDIILVTKLDRWFRNIGEYYKVQEILEAHNVSWKTIYEDYDTSTAAGRLKINIMLSVAQDEADRTSERIKKVLDAKKDRNEVCTGHLPKGYKIEGKFAVIDKEAEPVIRRYFSTFLETGSITKAMDAVPELKLKYQTASQMLDNTGYMGDWHGIKLPPYLTPQEFQRVQDLRTRVTRKSPYNRTYIFSGLIVCGECGRRMTGHPSPRPSGACSYSYYCQGSAQRKGCNNGNFTVEWKIEDYLLSTIDEQIQIKLQAKPRQEPKVNQDVQLKALQKKLSKLSELYIDDMISKADYSKKYAELTSQMDELTQVKSQSRAPEEIATLFSAGWQEIYKQLNKENKQAFWKLKIKEIRLYKDRRIEFDFL

SEQ ID NO: 9286 - protein, 439 aa, Unknown
  Description of Unknown: Integrase B9287 sequence
  cd00338,SM00857,IPR036162,PF13408,PS51737, G3DSA:3.40.50.1390,IPR025827,IPR006119,SSF53041,IPR011109, PTHR30461,PS51736,Coil,PF00239
MNVVLRAALYPRVSTEEQKKFGLSIHDQQNDLEEYAKAHNMKVVGVFQDAGFSARKKIEKRPAMLQLLEAVKHDEVDIILVTKLDRWFRNIGEYYKVQEILEAHNVSWKTIYEDYDTSTAAGRLKINIMLSVAQDEADRTSERIKRILDAKRERNEVCSGNLPRGYKIENKHAVIDETTEPFMKKFFSVFIETGSVKKARTSVPELRLSYGAASRILACTAYVGNWRGISVPPYLSHQEFDRIESLRKRTTRKPKTTTYLFSGLIMCGTCGNRMAGRPRELANGNFSHHYLCVKYERTPNCTNSVHISEAIIENYLLSHIDEEISVKLKAKPKEIDHQNTQAQIQSAKAKLSKLSDLYIDDMISKSDYAKRYKELTATLDELQKEIAPAKTAKDLSEMFAQGWQDIYFKLSRENKAAFWKLKIKEIRLYEDRRIEFDFL

SEQ ID NO: 9287 - protein, 439 aa, Unknown
  Description of Unknown: Integrase B9288 sequence
  PTHR30461:SF3,cd00338,SM00857,G3DSA:1.10.10.2600, IPR036162,PF13408,IPR025827,G3DSA:3.40.50.1390, PS51737,IPR006119,IPR038109,PF07508, IPR011109,SSF53041,PTHR30461,PS51736,Coil,PF00239
MVADALAGKIDLIVTKSISRFARNTVDSLVTVRKLKEHGTEVYFEKENIFTFDSKGELLITIMSSLAQEESRSISENVTWGQRKRFADGKVSLPYKQFLGYRRGEDDLPEIVPEEAEIVRKIYGLFIQGKTTHGIAKQLTEENIPTSAGKEKWQASTVESILTNEKYKGDALLQKGFTVDFLTKKTKKNEGEVPQYYVENSHPAIIRPHEWQLVQREFSRRKTLRRKYSGNSIFSTRLVCGDCGNYYGPKTWHPKKPYQKIVWQCTHKYKGENSCETVTLEETEIQQKFIQAINGLFSIKGPVLENCRIMQEALTDCTGIETELATLTQELELLGQMIKDTIKTNALEAQNQEEYTARYNALAERYETTHRQIVALQEKRQARENEAEAIGGFMFALREMGTEAQEFDPKLWLSTIDRGTVNRDGSITLRFVSGAEITV

SEQ ID NO: 9288 - protein, 439 aa, Unknown
  Description of Unknown: Integrase B9289 sequence
  PTHR30461:SF3,IPR036162,PS51737,IPR011109,PTHR30461, PS00397,PF00239,G3DSA:1.10.10.2600,IPR006119,SSF53041, cd00338,SM00857,IPR025827,IPR038109,PS51736, IPR006118,PF13408,G3DSA:3.40.50.1390,PF07508,Coil
MTRVALYIRVSTEDQKIHGLSVEDQISSLSAWAEKEAVIVAGVYNDAGISARKPASKRPELQRLLDDVRARKIDLIVFTKLDRWFRNIGEYYKVQEVLETYGVGWKTIYEDYDTTTASGRLKINIMLSVAQDEADRTGERIKAIHESKLLRNEPISGKVPFGYKIEKKQLVIVPEDAEKVRDIFEHYIALRSVRALRPYVLETHGLVYTQTGLAQLLRNERYIGHAHGKPDFCPAILSEEVFFKAQNILKVRAERLNFSRTNRVYLFTGIVFCAECGNRLSAHVVGQKYVYYRCTRYEKTHLCSHKKRTSERTLENWLLHNLPAKIEEYNVTLQAQEKANKAGKDIAKINHKLNKLKELYLNDLISIDDYKSDYSALKEDLIKAYSSQTEHKKPIDVRKITELLSKYPDLSSAGKKEFWSRILKKIVITQNDDFLIEPY

SEQ ID NO: 9289 - protein, 439 aa, Unknown
  Description of Unknown: Integrase B9290 sequence
  SM00857,IPR036162,PF13408,IPR025827,G3DSA:3.40.50.1390, PS51737,IPR006119,SSF53041,IPR011109,PF00239, PTHR30461,PS51736,Coil,cd00338
MSVVLRAALYPRVSTEEQAKFGLSIHDQQNDLEEYAKANNMKVVGVFPDAGFSARKKIEKRPAMLQLLEAVKRDEVDIILVTKLDRWFRNIGEYYKVQEILEAHNVSWKTIYEDYDTSTAAGRLKINIMLAVAQDEADRTSERIKRILDAKRERNEVCSGNLPRGYKIENKHAVIDETTEPFMKKFFSVFIETGSVKKARTSVPELRLSYGAASRILACTAYVGNWRGISVPPYLSHQEFDRIESLRKRTTRKPKTTTYLFSGLIMCGTCGNRMAGRPRELANGNFSHHYLCVKYERTPNCTNSVHISEAIIENYLLSHIDEEISVKLKAKPKEIDHQNTQAQIQSAKAKLSKLSDLYIDDMISKSDYAKRYKELTATLDELQKEIAPAKTAKDLSEMFAQGWQDIYFKLSRENKAAFWKLKIKEIRLYEDRRIEFDFL

SEQ ID NO: 9290 - protein, 439 aa, Unknown
  Description of Unknown: Integrase B9291 sequence
  PTHR30461:SF3,IPR036162,PS51737,IPR011109, PTHR30461,PS00397,PF00239,G3DSA:1.10.10.2600, IPR006119,SSF53041,cd00338,SM00857,IPR025827,IPR038109 ,PS51736,IPR006118,PF13408,G3DSA:3.40.50.1390,PF07508
MDKIKRAALYIRVSTEEQARHGYSLAAQLEDLKAYATKKKYKIVDAYIDEGVSARKKPFNRKEFKRLLEDVKENKIDTILFIKLDRWFRSVSDYYKAQEILDAHKVEWETTQESYNTTTTNGRLMLNIKLSVAQNESDMTSDRIKFVFAQKRALKQVTCGSVLLGFKIENKHLVHSDKAPIAKAIFEYYLLHQSFSSTIKWLKQEYQITMYPASLKRLLRSELYIGKKGDDDEFTDRIIDNETFYAVQDIIKRNVKRAPSGRIYLFTGLIRCPSCGSSMSVSVTEQKNHTYIYYLCPRRYNTFDCNDKIRISESKLEASLLNTLAKQLEGYFLSITAKQEKPIKHNNAAIKKKLERLKDLYLNELIDLDTYKKDYKALQKELIPVIIKPDPIRITKKKEQIYDAIQAYSSLSKELKRSFWRSLIDHIDVSGDMPVIFFK

SEQ ID NO: 9291 - protein, 438 aa, Unknown
  Description of Unknown: Integrase B9292 sequence
  PTHR30461:SF3,SM00857,IPR006118,G3DSA:1.10.10.2600,IPR036162, PF13408,IPR025827,G3DSA:3.40.50.1390,Coil,IPR006119, IPR038109,SSF53041,PTHR30461,PS00397,PS51736, cd00338,PF00239
MPKQIRAALYVRVSSEEQARHGYSLAEQKARLLAYAKAHGLEVVGIYEDAGISARKPYKKRPALLRLLEDCEAGKIDTIYFIKLDRWFRNVADYYAVQPVLEKAGVTWCATEENYETQTAAGRLKVNIMLSVAQDEADRTSERIRFVNDGRRAKGVPISSKAPIGLMVKDGDYVQTKDAPAVQAMFTHYIQTRSVNATRRYMMDQWGIDAVYNTFNRALRNRLYIGEVHGIPNRIHALVSKEDFDLAQEIIAKQAQRCSGVETPHIYLFSGLIYCRECGRSMQSETVKKVYTYYRCRSHMLDITACPHTKRVRESELEIYLLEELEHIVKTAYSATKKGRERKSRIAPAKILRKLDRLKELYLAEMIDMPTYRADYDKLQEQLHAAQVETPDPPDIASLHEAIAQYPVLSRIEKKEFWTRTIKRIDADNNGAFFVTTR

SEQ ID NO: 9292 - protein, 438 aa, Unknown
  Description of Unknown: Integrase B9293 sequence
  PTHR30461:SF3,SM00857,IPR006118,G3DSA:1.10.10.2600,IPR036162, PF13408,IPR025827,G3DSA:3.40.50.1390,PS00397,IPR006119, IPR038109,SSF53041,PTHR30461,Coil,PS51736, cd00338,PF00239
MPKQIRAALYVRVSSEEQARHGYSLAEQKARLLAYAKAHGLEVVGIYEDAGISARKPYKKRPALLRLLEDCEAGKIDTIYFIKLDRWFRNVADYYAVQPVLEKAGVTWCATEENYETQTAAGRLKVNIMLSVAQDEADRTSERIRFVNDGRRAKGVPISSKAPIGLMVKDGDYVQTKDAPAVQAMFTHYIQTRSVNATRRYMMDQWGIDAVYNTFNRALRNRLYIGEVHGIPNRIPALVSKEDFDLAQEIIAKQAQRCSGVETPHIYLFSGLIYCRECGRSMQSETVKKVYTYYRCRSHMLDTTACPHTKRVRESELEIYLLEELEHIVKTAYSSAKKGRERKSRIAPAKIVRKLDRLKELYLAEMIDMPTYRADYDKLQEQLHAAQAETPGPPDIASLHEAIAQYPKLSRIEKKEFWTRTIKRIDADNNGAFFVTTR

SEQ ID NO: 9293 - protein, 438 aa, Unknown
  Description of Unknown: Integrase B9294 sequence
  PTHR30461:SF3,IPR036162,PS51737,IPR011109,PTHR30461, PS00397,PF00239,G3DSA:1.10.10.2600,IPR006119,SSF53041, cd00338,SM00857,IPR025827,IPR038109,PS51736, IPR006118,PF13408,G3DSA:3.40.50.1390,PF07508,Coil
MQRAALYIRVSSEEQAIHGLSIAAQTETLDAWAQENKIYVFDHYIDAGISARKKASKRPELQRLLEDVKSGQINLIVFTKLDRWFRNIAEYYKVQEVLETYHVDWKTVQEDYDTSTASGRLKINIMLSVAQDEADRTGERIKAVFESKTLRNEPISGKVPLGYKIENKHIVINEETAPIAIDLFNKYIAIRSISSLRKYLMDTYGIAHSHTAIRVMLKNERYIGRAHDQENYCPALISQKTFDHVQEILNIRAQRSSLERTGRVYLFTGIVYCAECGNRLSGHVVAQKYIYYRCTRYEKLHLCQHKKRTSELVLEKWLLENLLTEFMKYNERLEAEVQRAKPLVDTARIRRKMEKLKDLYLNDLIERDIYEKDYTALSAELNVATKKPVIGKPVNIDKLSDSLATYSTLSREGQKEFWSRTVRRIDITNEDVFSVTPI

SEQ ID NO: 9294 - protein, 438 aa, Unknown
  Description of Unknown: Integrase B9295 sequence
  PTHR30461:SF3,IPR036162,PS51737,IPR011109,PTHR30461, PS00397,PF00239,G3DSA:1.10.10.2600,IPR006119,SSF53041, cd00338,SM00857,IPR025827,IPR038109,PS51736, IPR006118,PF13408,G3DSA:3.40.50.1390,PF07508,Coil
MQRAALYIRVSSEEQAIHGLSIAAQTETLDAWAQENKIYVFDHYIDAGISARKKASKRPELQRLLEDVKSGQINLIVFTKLDRWFRNIAEYYKVQEILETYHVDWKTVQEDYDTSTASGRLKINIMLSVAQDEADRTGERIKAVFESKTLRNEPISGKVPLGYKIENKHIVINEETAPIAIDLFNKYIAIRSISSLRKYLMDTYGIAHSHTAIRVMLKNERYIGRAHDQENYCPALISQKTFDHVQEILNIRAQRSSLERTGRVYLFTGIVYCAECGNRLSGHVVAQKYIYYRCTRYEKLHLCQHKKRTSELVLEKWLLENLLTEFMKYNERLEAEAQRAKPLVDTARIRRKMEKLKDLYLNDLIERDIYEKDYTALSAELNAATKKPVIGKPVNIDKLSDSLATYSTLSREGQKEFWSRTVRRIDITNEDVFSVTPI

SEQ ID NO: 9295 - protein, 438 aa, Unknown
  Description of Unknown: Integrase B9296 sequence
  SM00857,IPR006118,G3DSA:1.10.10.2600,IPR036162,PF13408, IPR025827,PS51737,G3DSA:3.40.50.1390,IPR006119,IPR038109, IPR011109,SSF53041,PTHR30461,PS00397,PS51736, cd00338,PF00239
MKRAALYVRVSTQEQKNSGLSVDSQIDALEKYCEEQGYTVAGIYNDAGISARKKYTKRPALLQLLEDCKKHEIDIILFTRLDRWFRAVAGYYEVQSVLDACKVPWRAIWEDYETETSQGIFKVNIMLSVAQAEADRDSEKIRSVMEFKRQNKEYIGGKVPVGYRVEGKKIVKDEKMRGIIEDMFEHYFQTFSKMETADYILSKYPDFIRTRTRIVKIMSSPAYHGEMYGVKNYCEPYITEEQAQRIKEVSSQKSWVDCKRRIYIFSGLIRCPICGYRFSGRTMAKKEKRYKVYQCPRSAAKKHKTYTRSEPKLETYMLNHIEEKIQLDVLISTHTSRVGCDMPLIASGFYFRISTHTSRVGCDVGCCYGARFWIKFLLTHPVWDVTMCIIPGDHGYTISTHTSRVGCDLFSLKLPRQHQISTHTSRVGCDSYHLKQIR

SEQ ID NO: 9296 - protein, 438 aa, Unknown
  Description of Unknown: Integrase B9297 sequence
  SM00857,IPR006118,G3DSA:1.10.10.2600,IPR036162,PF13408, IPR025827,PS51737,Coil,G3DSA:3.40.50.1390,IPR006119, IPR038109,IPR011109,SSF53041,PTHR30461,PS00397, PS51736,cd00338,PF00239
MKRAALYVRVSSAEQRDHGLSVDSQISALTKYCADNRLQIAGIYNDAGISARKKYKARPALLQLMQDCKDKKVDIILFTKLDRWFRSVSDYYEVQRVLDAAKVPWRAIWEDYETETSAGIFKVNIMLSVAQAESDRTSERIKAVNEYKRQRGDLVVHKMPIGYVRTGPGEIAFDPDTRDAVSAIFSTYLQTYSCQEARTAAAEKGVTMSRANVTRILRKEPYYGTYLGKRVPAYITQEQHDTILRNQQVYIRTPKSPSRVYIFSGLVFCALCGARMTAKCSWNSNGGEVKYYRCSGADKKDAENCTFSKSEKKVEAALVSSLNDCIARYNADAKKQNRGLRNVQLDIEKLKARLQRLKDVYIDGDIERDKYVMQADQIKAKITELEVKTSKIRIIAPMPPEWQTMYWQLSESGKRQFWRGIIKKIIVSKNGVENVVFI

SEQ ID NO: 9297 - protein, 438 aa, Unknown
  Description of Unknown: Integrase B9298 sequence
  PTHR30461:SF3,SM00857,IPR006118,G3DSA:1.10.10.2600,IPR036162, PF13408,IPR025827,G3DSA:3.40.50.1390,Coil,IPR006119, IPR038109,SSF53041,PTHR30461,PS00397,PS51736, cd00338,PF00239
MPKQIRAALYVRVSSEEQARHGYSLAEQRARLLAYAKAHGLKVVGVYEDAGISARKSYRKRPALLRLLEDCKAGKIDTIYFIKLDRWFRNVADYYAVQPTLEKAGVTWCATEESYETQTAAGRLKVNIMLSVAQDEADRTSERIRFINDGRRANGIPIGTKAPLGLMIKNGAYIQTKDAPAVQAMFKYYIQTRSVNATKKYMLKQWGIDGVYNTFNRALRNRLYIGEVYGVPDRIPALIQKADFDLVQGMLAKQSQRCSGVEDSRIYLYSGLIYCRECGKTMQAETVKGTYTYYRCRTHNLDTTACPHTKRVRESELEIYLLEELEHIVKTAYSSAKKGRERKSRIAPAKILRKLDRLKELYLAEMIDMPTYRADYDKLQEQLNAAQAETPDPPDIASLHEAIAQYPKLSRIEKKEFWTRTIKRIDADNNGAFFVTTR

SEQ ID NO: 9298 - protein, 438 aa, Unknown
  Description of Unknown: Integrase B9299 sequence
  PTHR30461:SF3,SM00857,IPR006118,G3DSA:1.10.10.2600,IPR036162, PF13408,IPR025827,G3DSA:3.40.50.1390,Coil,IPR006119, IPR038109,SSF53041,PTHR30461,PS00397,PS51736, cd00338,PF00239
MPNQIRAALYVRVSSEEQARHGYSLAEQRARLLAYAKAHGLKVVGVYEDAGISARKSYRKRPALLRLLEDCKTGKIDTIYFIKLDRWFRNVADYYAVQPTLEKAGVTWCATEESYETQTAAGRLKVNIMLSVAQDEADRTSERIRFINDGRRANGIPIGTKAPLGLMIKNGAYIQTKDAPAVQAMFKYYIQTRSVNATKKYMLKQWGIDGVYNTFNRALRNRLYIGEVYGVPNRIPALIQKADFDLVQGMLAKQSQRCSGVEDSRIYLYSGLIYCRECGKTMQAETVKGTYTYYRCRTHNLDTTACPHTKRVRESELEIYLLEELEHIVKTAYSATKKGRERKSRIAPAKILRKLDRLKELYLAEMIDMPTYRADYDKLQEQLNAAQAETPDPPDIASLHEAIAQYPKLSRIEKKEFWTRTIKRIDADNNGAFFVTTR

SEQ ID NO: 9299 - protein, 438 aa, Unknown
  Description of Unknown: Integrase B9300 sequence
  PTHR30461:SF3,SM00857,IPR006118,G3DSA:1.10.10.2600,IPR036162, PF13408,IPR025827,G3DSA:3.40.50.1390,Coil,IPR006119, IPR038109,SSF53041,PTHR30461,PS00397,PS51736, cd00338,PF00239
MPNQIRAALYVRVSSEEQARHGYSLAEQRARLLAYAKAHGLKVVGVYEDAGISARKSYRKRPALLRLLEDCKTGKIDTIYFIKLDRWFRNVADYYAVQPTLEKAGVTWCATEESYETQTAAGRLKVNIMLSVAQDEADRTSERIRFINDGRRANGIPIGTKAPLGLMIKNGAYTQTKDAPAVQAMFKYYIQTRSVNATKKYMLKQWGIDGVYNTFNRALRNRLYIGEVYGVPNRIPALIQKADFDLVQGMLAKQSQRCSGVENSRIYLYSGLIYCRECGKTMQAETVKGTYTYYRCRTHNLDTTACPHTKRVRESELEIYLLEELEHIVKTAYSSAKKGRERKSRIAPAKILRKLDRLKELYLAEMIDMPTYRADYDKLQEQLHAAQVETPNPPDIASLHEAIAQYPVLSRIEKKEFWTRTIKRIDADNNGAFFVTTR

SEQ ID NO: 9300 - protein, 438 aa, Unknown
  Description of Unknown: Integrase B9301 sequence
  PTHR30461:SF3,SM00857,IPR006118,G3DSA:1.10.10.2600,IPR036162, PF13408,IPR025827,G3DSA:3.40.50.1390,Coil,IPR006119, IPR038109,SSF53041,PTHR30461,PS00397,PS51736, cd00338,PF00239
MPNQIRAALYVRVSSEEQARHGYSLAEQRARLLAYAKAHGLKVVGVYEDAGISARKSYRKRPALLRLLEDCKTGKIDTIYFIKLDRWFRNVADYYAVQPTLEKAGVTWCATEESYETQTAAGRLKVNIMLSVAQDEADRTSERIRFINDGRRANGIPIGTKAPLGLMIKNGAYTQTKDAPAVQAMFKYYIQTRSVNATKKYMLKQWGIDGVYNTFNRALRNRLYIGEVYGVPNRIPALIQKADFDLVQGMLAKQSQRCSGVENSRIYLYSGLIYCRECGKTMQAETVKGTYTYYRCRTHNLDTTACPHTKRVRESELEIYLLEELEHIVKTAYSSTKKGRERKSRIAPAKILRKLDRLKELYLAEMIDMPTYRADYDKLQEQLHAAQVETPNPPDIASLHEAIAQYPVLSRIEKKEFWTRTIKRIDADNNGAFFVTTR

SEQ ID NO: 9301 - protein, 438 aa, Unknown
  Description of Unknown: Integrase B9302 sequence
  PTHR30461:SF3,IPR036162,PS51737,IPR011109,PTHR30461, PS00397,PF00239,G3DSA:1.10.10.2600,IPR006119,SSF53041, cd00338,SM00857,IPR025827,IPR038109,PS51736, IPR006118,PF13408,G3DSA:3.40.50.1390,PF07508,Coil
MAGYARVSTDEQKKYGYSIQAQTEEITQWCNDNDHDLIHIYIDEGFSASTMKRPQLQSMLSSLKNLDAIAFTRLDRLSRNVLEANKMLELLQQNNVAMISICEDDINTSTVNGLFMFNLKVNLAEHELKKGSERIKAVFEYKIAQGQPITGNVPFGYRIATENGNKRIIIDESKAPIVKDIFESFLLHQSVHYIVEYVNNKYGLSRPYMSYMHILKNEFYAGSYRGNSNYAEPYITKDTYNAVQNALQANIRTGIQRHVYLFTGLLRCPECRSKLVGVSHPKGGKRYYYYRCNNAHSVHTCTHKKHYAELATEKYLLSNLDDLLKNHIATISSITSEIKNTTEKELKELRKELDNLNYIFIKKRMPVSTYERLYAETEDKIKRLESFKPQSTDHLNQFLNSGWRSIYDNLTRENKHTLWRNALDSVHVSPDEIEVFFK

SEQ ID NO: 9302 - protein, 438 aa, Unknown
  Description of Unknown: Integrase B9303 sequence
  PTHR30461:SF3,SM00857,IPR006118,G3DSA:1.10.10.2600,IPR036162, PF13408,IPR025827,G3DSA:3.40.50.1390,PS51737,IPR006119, IPR038109,SSF53041,IPR011109,PTHR30461,PS00397, PS51736,cd00338,PF00239
MLRVALYIRVSTEEQALHGDSIEAQKQALIEYAQKNQYKIIDYYIDDGFTATSLKRPSLQRLLKDVREDKIDLIIFTKIDRWSRGVRNYYKIQDVLDNHKVNWKTIFENYDTSTAAGQLHINIMLSVAENEAAVTSERIKVVFKNKIKNKEVITGKVPKGYKIENKKLVIDKETVNIVESIFSHFEIHQSKRSTMNFIRDELGVNLSYKTISNILSNSLYKGEYRGIVNYCPAIIDKKRFDKIQTVLKRNISTNTSNRIYLFSSLLVCSHCNHNLGGFNTKHNDKFFFNYRCNYNFYRKLCDNNRCISEKKIEKKIIEQFKIQLHEYIVDYEVKKKNKPKKSNKTEIENKIKKLNDLYINDFISLEEYKEKHEFYKSKIIEDECPQDEFNIESYKEMLNIDFKETYMNLDREDKRAFWRSFIKEIKIDHECNVKLKFH

SEQ ID NO: 9303 - protein, 437 aa, Unknown
  Description of Unknown: Integrase B9304 sequence
  PTHR30461:SF3,SM00857,G3DSA:1.10.10.2600,IPR036162,PF13408, PS51737,G3DSA:3.40.50.1390,mobidb-lite,IPR025827,IPR006119, IPR038109,PF07508,IPR011109,SSF53041,PTHR30461, PS51736,cd00338,PF00239
MAENITKIAARPSLISKKRVCAYARVSSGKDAMLHSLSAQISYYSKYIQSHTDWIYSGVYADEALSGTKDERPNFQRMLADAKDGKIDIIIVKSVSRFARNTVTLLEATRELKEYGVDVYFEEQKIHTLSSEGELMLSLLAGFAQEEARSVSENMKWRIKKDLSEGIMWGGKSHLGYELIDKKLVLIPEEAKIVKRVFQLFIEGCGIQKIANSFNKEGIQPKYSDHWNKSSVRHILSNVNYTGDLLLQKTYRESYLTKKKRINKGEQDQFLVENDHEAIIDKDTFNLAQQLLAERGVLPKSNYIKGNKSIFTSRIKCGLCGASYRHKTTRYKKIWICHTYDSEGKENCSAKQIPEDNLIKAINQYLGIDSFSEDAFNKKIDYITVFPGNVLRIKRVDGNEDDITWNDPKRSEGWTPEMREKARQRAKAHYKKEGADE

SEQ ID NO: 9304 - protein, 437 aa, Unknown
  Description of Unknown: Integrase B9305 sequence
  PTHR30461:SF3,IPR036162,PS51737,IPR011109,PTHR30461, PS00397,PF00239,G3DSA:1.10.10.2600,IPR006119,SSF53041, cd00338,SM00857,IPR025827,IPR038109,PS51736, IPR006118,PF13408,G3DSA:3.40.50.1390,Coil
MKRCALYVRVSTDEQKKHGLSVDSQIVALRDYCKQNDLQEVGLYNDAGISARKSYKKRPALLQLIEDCERGLIDVILFTKLDRWFRSVADYYEVQTRLDACHVPWRAIWEDYETETSSGVFKVNIMLSVAQSEADRTSERIKSVFDYKRAQGDYVGTPPYGYKRVDKKLVKDETVAPLVELMFKTYLMTYSSTRTMEALQAVGYNVNMNAMRKRLKNPIYAGDMNGFACPAYITAEDHQKIIDNMSQYIRTPKGGINYIFSGLMICGYCGNRMGAKSSTNQIKTGKVRCKYYVCDGKTYATKHEKRLTISERKVEKYLLDQIATIISKYNINLSNEEKKSDAKDKRKALEQKLERVGIRFEVGDLSVEEYKEKRELILRDISDLDRMMSDREPIILDDNWKETYIKLDDIHKRAFWRSFISSIEVLPDKTLNIKIGH

SEQ ID NO: 9305 - protein, 437 aa, Unknown
  Description of Unknown: Integrase B9306 sequence
  SM00857,G3DSA:1.10.10.2600,IPR036162,PS51737,G3DSA:3.40.50.1390, mobidb-lite,IPR006119,IPR038109,PF07508,IPR011109, SSF53041,PTHR30461,PS51736,cd00338,PF00239
MKKTIRVIEPTIPLLKKKKRVAAYARVSSGKDAMLMSLSAQVSYYSELIQRNSEWEYAGVYADEAMTGTKEDRTNFQKLLKACRNGEIDIILTKSISRFARNTVTLLEAVRELKKYGVDVYFERENIHSLSGDGELMLTILASFAQEESLSASENQKWRIKKNFEEGKPWTYGMLGYRYNGEFYEVIPEEAEVVRKIFAYYLEGLGYNAICKRLDAEGIVTRNNNKWSQNSVSKILKNYTYTGNLLLQKTFRENHITKKTRVNRGELPKYHAEDTHEAIIDIDTFMAVQNEMALRLKGFEHKSQVQRTYPFTHKMVCDCCDAYYRRKITKTRVVWICATFNQKGKALCQHSKQLPEETLIALCNDVLGLVEFNEQIFINKVSQIRILDNNRVQFLLSNGKTEERTWKDRSRSESWTDEMKETARQRTLQRYASKEVE

SEQ ID NO: 9306 - protein, 437 aa, Unknown
  Description of Unknown: Integrase B9307 sequence
  PTHR30461:SF3,IPR036162,PS51737,IPR011109,PTHR30461, PS00397,PF00239,G3DSA:1.10.10.2600,IPR006119,SSF53041, cd00338,SM00857,IPR025827,IPR038109, PS51736,IPR006118,PF13408,G3DSA:3.40.50.1390,Coil
MIAALMRVALYIRVSSEEQARHGLSLQEQRDALMRYAKEHKMTVVGIYEDAGISARKPYKKRPALLRLLGDCKDGQIDMILFVKLDRWFRNVAGYYDVQTQLDQYGVTWQATEEDYETRTASGRLKVNIMLSVAQDEADRTSERIKFINDGKRAKGQPAGSKAPLGYVITDRQYQIDNGTVDAARDMFAAFIRLKSVLAVKRYMLDTWGIDRAYSKYVNYFRNRLYIGEVYGIENACPALVSKQDFDIVNDIIRQRSQRCAGVDTDRVYLFSGILHCKECGKTMQSETVKKTYTYYRCRTRMLDNTSCPHTKRIREDVLEDYLLHELAGIAERNNRYYKKAEKKPTQSADSIRKKMSKLKTLYLNDLIELDDYKAEYSILKRSLETVEEKPKTDLDALRNGLGEYGTYSREEKKEFWTRFIKRIDADNDGAFFVTPR

SEQ ID NO: 9307 - protein, 437 aa, Unknown
  Description of Unknown: Integrase B9308 sequence
  PTHR30461:SF3,SM00857,IPR036162,PF13408,IPR025827, G3DSA:3.40.50.1390,PS51737,IPR006119,SSF53041,IPR011109, PTHR30461,Coil,cd00338,PF00239
MLHGDTLEAQDLILEDFIKVNRMILVDTFIDEALTARKRFNKRKEFVRLLNGVKAHDFDLIIFTKLDRWFRNIGDYHKIQEILEANGVQWKAVTENYDTTTTNGRLHINIRLSVAQDECDRDSDRIKDVFAYKLKNKTYVSGSLPRGLKLDAEKHVIIDPEWNCFALDMFDRFEATCSKRDTQLFLQEKYNIRVCYDTVARYLKNPLFKGQYRDDPDFCPATISPERFERIQKLAIRNVRIRHTQQFYIFSGLLICSSCNHYMCGTVTYRRMADGSEKMYKNYRCNFKAQSKLCDRGKTYREADLEEYMLAHIRPALSDYIAKYEVTAASTVQKNPVTEIAKIERKMKKLYDLFMDDLIDKEAYRSEYDKFKAQIEELQKCSTAAPMRSLDSVKKLLSEDWEAVYHTFSDREKNTFWKSFVESVLVYEDGSMDIRFL

SEQ ID NO: 9308 - protein, 437 aa, Unknown
  Description of Unknown: Integrase B9309 sequence
  PTHR30461:SF3,IPR036162,PS51737,IPR011109, PTHR30461,PS00397,PF00239,G3DSA:1.10.10.2600, IPR006119,SSF53041,cd00338,SM00857,IPR025827 ,IPR038109,PS51736,IPR006118,PF13408,G3DSA:3.40.50.1390,Coil
MRAALIRVALYIRVSSEEQARHGLSLQEQRDALIRYAKANKMTVVGIYEDAGISARKPYKKRPALLRLLGDCKDGKIDMILFVKLDRWFRNVAGYYDVQTQLDQYGVTWQATEEDYETRTASGRLKVNIMLSVAQDEADRTSERIKFINDGKRAKGQPAGSKAPLGYAIKDRQYQIDNGTADAARDMFAAFIRLKSVLAVKRYMLDTWGIDRAYSKYVNYFRNRLYIGEVYGIENACPALVSKQDFDIVNDIIRQRSQRCAGVDTDRVYLFSGILHCKECGKTMQSETVKKTYTYYRCRTRMLDNTSCPHTKRIREDVLENYLLHELAGIAERNNRYYKKAEKKPTQSADSIRKKMSKLKTLYLNDLIELDDYKAEYSILKRSLETVEEKPKTDLDALRNGLGEYGTYSREEKKEFWTRFIKRIDADNDGAFFVMPR

SEQ ID NO: 9309 - protein, 437 aa, Unknown
  Description of Unknown: Integrase B9310 sequence
  SM00857,G3DSA:1.10.10.2600,IPR036162,PS51736,PS51737, G3DSA:3.40.50.1390,IPR006119,IPR038109,PF07508,IPR011109, SSF53041,PTHR30461,mobidb-lite,cd00338,PF00239
MERLIQKIEPSVDISHKLQNVAAYARVSSGKDAMLHSLSAQVGYYSELIQSNPEWRFCGVFADEAITGTKESRPEFQKMLAECRKGKIDLIITKSISRFARNTITVLETVRELKMLGIDVYFQEQNIHSISADGELMLSILSSYAQEESFSASENQKWRIRKDFEQGKICNIRMLGYRRTTNGSLEIVESEAEIVRFIFLNYLSGNGKLLISNKLNEMGIATINGCEWTTADIHRILQNEKYAGNMLLQKRFRENHLTKRMIRNDGQLPKYFVEESHPAIIEKSIFDAVQKKLEEQHQRFSSSKSVASYPFTGKIQCTCCGKNYRHKITATGNVWICATYNTRGKKYCPTAKQIPESTLISVCCEILSIAEFDANIFENQVEKILVPAPNKLIIQLKNGKCINTTWKDRSRSESWTEEKRAAAAKSSKTRRWRKCQK

SEQ ID NO: 9310 - protein, 437 aa, Unknown
  Description of Unknown: Integrase B9311 sequence
  SM00857,G3DSA:1.10.10.2600,IPR036162,PF13408, PS51737,G3DSA:3.40.50.1390,IPR025827,IPR006119, IPR038109,PF07508,IPR011109,SSF53041, PTHR30461,PS51736,cd00338,PF00239
MERIIQRVQFPNAQKVKLLRTVAYARVSSGKDAMLHSLSAQVSYYNSFIQSNPAWLFCGVYADEALTGTKDNRENFQKLLSECRAGRIDLIITKSISRFARNTVTLLETVRELKELGVDVYFEEQNIHSISPDGEFMLTLLGSYAQEESYSASENQKWRIRKDFEFGKVSTVIMLGYKRNSEGVLEIIPEEAETVRMIFADFLNGIGRQSIANKLNELNILTKNGCQWTSEAIRRILNNEKYCGDLMLQKFYSENHITKRKMVNNGVLRMIQVEDAHPAIIDKETFLRVQELLKAKQDYFTPDKPTNVTYPFTGMIHCGCCGKYYRRKVQKYRTLWICWTYNARGKKFCPESKQIPEDILYDKCCEVLNLDEFDNEVFQDEIEYISVPKPNVLTFIFKTGEKRTVHWLDHSRTEAWTPEMRKKAAEHSKKRGKKCQE

SEQ ID NO: 9311 - protein, 437 aa, Unknown
  Description of Unknown: Integrase B9312 sequence
  PTHR30461:SF3,IPR036162,PS51737,IPR011109,PTHR30461, PS00397,PF00239,G3DSA:1.10.10.2600,IPR006119,SSF53041, cd00338,SM00857,IPR025827,IPR038109,PS51736, IPR006118,PF13408,G3DSA:3.40.50.1390,Coil
MKRCALYVRVSTDEQKKHGLSVDSQIVALRDYCKQNGLQEVGLYNDAGISARKSYKKRPALLQLIEDCERGLIDVILFTKLDRWFRSVADYYEVQTRLDACHVPWRAIWEDYETETSSGVFKVNIMLSVAQSEADRTSERIKSVFDYKRAQGDYVGTPPYGYKRVDKKLVKDETVAPLVELMFKTYLMTYSSTRTMEALQAVGYNVNMNAMRKRLKNPIYAGDMNGFACPAYITAEDHQKIIDNMSQYIRTPKGGINYIFSGLMICGYCGNRMGAKSSTNQIKTGKVRCKYYVCDGKTYATKHEKRLTISERKVEKYLLDQIATIISKYNINLSNEEKKSDAKDKRKALEQKLERVGIRFEVGDLSVEEYKEKRELILRDISDLDRMMSDNEPIILDDNWKETYIKLDDIHKRAFWRSFISSIEVLPDKTLNIKIGH

SEQ ID NO: 9312 - protein, 437 aa, Unknown
  Description of Unknown: Integrase B9313 sequence
  SM00857,G3DSA:1.10.10.2600,IPR036162,PS51736,PS51737, G3DSA:3.40.50.1390,IPR006119,IPR038109,PF07508,IPR011109, SSF53041,PTHR30461,mobidb-lite,cd00338,PF00239
MERLIQKIEPSVDISHKLQNVAAYARVSSGKDAMLHSLSAQVGYYSELIQSNPEWRFCGVFADEAITGTKESRPEFQKMLAECRKGKIDLIITKSISRFARNTITVLETVRELKMLGIDVYFQEQNIHSISADGELMLSILSSYAQEESFSASENQKWRIRKDFEQGKICNIRMLGYRRTTNGSLEIVESEAEIVRFIFLNYLSGNGKLLISNKLNEMGIATINGCEWTTADIHRILQNEKYAGNMLLQKRFRENHLTKRMIRNDGQLPKYFVEESHPAIIEKSIFDAVQKKLEEQRQRFSSSKSVVSYPFTGKIQCTCCGKNYRHKITATGNVWICATYNTRGKKYCPTAKQIPESTLISVCCEILSITEFDANIFENQVEKILVPVPNKLIFQLTNGKCINTTWKDRSRSESWTEEKRAAAAESSKTRRWRKCQK

SEQ ID NO: 9313 - protein, 437 aa, Unknown
  Description of Unknown: Integrase B9314 sequence
  PTHR30461:SF3,SM00857,IPR036162,PF13408,PS51737, G3DSA:3.40.50.1390,IPR025827,IPR006119,SSF53041,IPR011109, PTHR30461,Coil,cd00338,PF00239
MLHGDTLEAQDLILEDFIKVNRMILVDTFIDEALTARKKFNKRKEFVRLLDGVKAHAFDLIIFTKLDRWFRNIGDYHKIQEILEANGVQWKAVTENYDTTTTNGRLHINIRLSVAQDECDRDSDRIKDVFAYKLKNKTYVSGSLPRGLKLDAEKHVIIDPEWNCFALDMFDRFEATCSKRDTQLFLQEKYNIRVCYDTVARYLKNPLFKGQYRDDPDFCPATISPERFERIQKLAIRNVRIRHTQQFYIFSGLLICSSCNHYMCGTVTYRRMADGSEKMYKNYRCNFKAQSKLCDRGKTYREADLEEYMLAHIRPALSDYIAKYEVTAASTVQKNPVTEIAKIERKMKKLYDLFMDDLIDKEAYRSEYDKFKAQIEELQKCSTAAPMRSLDSVKKLLSEDWEAVYHTFSDQEKNTFWKSFVESVLVYEDGSMDIRFL

SEQ ID NO: 9314 - protein, 436 aa, Unknown
  Description of Unknown: Integrase B9315 sequence
  PTHR30461:SF3,SM00857,G3DSA:1.10.10.2600,IPR036162,PF13408, PS51737,G3DSA:3.40.50.1390,IPR025827,mobidb-lite,IPR006119, IPR038109,PF07508,IPR011109,SSF53041,PTHR30461, PS51736,cd00338,PF00239
MQITKISAAKKLEKKKLVCAYARVSSDKDAMLHSLSAQVQYYKDYIMSNNDWLFVKVYYDEGISGTKQNRPAFQQMLQDAKDGKIDLIITKSISRFARNTVTLLEAVRKLKKYDVDVYFEEQRIHSISNDGELMLTILASYAQEEARSVSENMKWRVKRNFEEGKPWGRAPYGYTIEHSKFVIVPKEAEAVKLIFKLYLDGIGSYRIKDIMNKSEYPTKNNCLWTETTIRGMLKNYIYTGNAVFQTTYVKNYITKKKAKNNGEKPMYHVEECHDAIISIEDYNKVQKIIKERTEKIHKGITPKDNLFKGKLICAHCGCTFRMKKNYKKYVWRCGTYIRLGSKKCLSKQIPNDALKNIAKEILGVDELTSEIIDERIEKVIVGDDKLLTFYLKDGNKIDAHWMQKSRSESWTEEMKENARRKAVEIHGKSNSNPIND

SEQ ID NO: 9315 - protein, 435 aa, Unknown
  Description of Unknown: Integrase B9316 sequence
  PTHR30461:SF3,SM00857,G3DSA:1.10.10.2600,IPR036162,PF13408, PS51737,IPR025827,G3DSA:3.40.50.1390,IPR006119,IPR038109, PF07508,IPR011109,SSF53041,PTHR30461,PS51736, cd00338,PF00239
MSTDQEEQLSSYENQVRYYTEIITRNPDYELADIYADEGISGTNTKKRDDFNRMIEDCRGGKIDLIITKLISRFARNTLDCLNYVRELKDLGIGITFEKENINTMDAKGEVLLTILSSLAQDESRSISENCTWGIRRRFEQGEHKMSTKRFLGYDYDEDGKLIVNRAQAKVVVRLYEEFLSGKTVDYIARIFRKEKIKSWDGKCNWLASTLDSMLRNEKYMGDTILQKSYTADFLSKKRVMNDGTIQMYHIEEDHEPIIDVEIWEAVQHELERRQRFCEEHRTNTYAVNPETNPFSGKVVCGNCNNLYSRVKYTTRRGTKIVKWRCGSTNKAAGHRVCACPYIYEEALMKFFVMSWNQIVENQKSYKEAWDENLRSDDPLLKYKTRLLMRTAAAGPIREFDSELMRMVMDIITVHEDGRLQIRFYDGTEFELTAE

SEQ ID NO: 9316 - protein, 435 aa, Unknown
  Description of Unknown: Integrase B9317 sequence
  PTHR30461:SF3,cd00338,SM00857,G3DSA:1.10.10.2600,IPR036162, PF13408,PS51737,G3DSA:3.40.50.1390,IPR025827,IPR006119, IPR038109,PF07508,SSF53041,IPR011109,PTHR30461, PS51736,Coil,PF00239
MISDCRKGKIDRIYTKSISRFARNTKDCLKNIRELKSLGITVFFEKENIDTAKLTDEMMITIMGGLAQEESTSISQNLRWSCRKRMANGTYELSCPPYGYKKVNGKLVICPEQAKVVKEIYDSYLSGIGMISIMKNLNERNIPCCKNSERWHMIGVSYILTNEKYTGNTLLQKTYSTNTLPVRRFKNNGNADQYYVRNTHPAIIQQETFDKVQRLISEKNQKQPRGTPHNSVLHKHIFCGSCGSILIRKSCRKKYYWSCRKHDLAAVDCPTKQISEDKIHSAFIRLYNKLVYNFKPVLTPLQQALQDLKYKNTKSGTTIIEKYKEIAKLKEQTHVLARLKTKGFLDEAKYLEQTTELNSKIAKLQTKIKKLNVSDEEDETLEQLDMLIGYFEKRQKLMVEFEELAFESIVDKIVVKNQNELEFHLIGGLELAEEI

SEQ ID NO: 9317 - protein, 435 aa, Unknown
  Description of Unknown: Integrase B9318 sequence
  PTHR30461:SF3,SM00857,G3DSA:1.10.10.2600,IPR036162,PF13408, PS51737,G3DSA:3.40.50.1390,IPR025827,IPR006119,IPR038109, PF07508,IPR011109,SSF53041,PTHR30461,PS51736, cd00338,PF00239
MSTDQEEQLSSYENQVRYYTEIITRNPDYELADIYADEGISGTNTKKRDDFNRMIADCRAGKIDLIITKSISRFARNTLDCLNYVRELKDLAIGIVFEKENINTLDAKGEVLLTILSSLAQDESRSISENCTWGIRRRFEQGKHKMSTKRFLGYDTDEEGHLVVNRQQAKIVVRLYEEFMSGKTVDYIARIFKAEKIKNWDGKYNWQASTLDSMLRNEKYMGDAILQKSYTADFLSKRRVMNDGSVQMYHIEEDHEPIINIETWEAVQAELERRAQYCTDHFTNAYGQMSEKNPFYAKIICGNCGNIYSRVKYTTRGGTKIVKWRCGSCNKADGHKVCSNRYVTDETFTKLFVMSWNEIIEHLEDYQEKWEANIKSDDVLLRYKTRLLMKHAAAGPIKEFDPELMMAVMDHITVFEDGRLQIKFYNGTEFEVETE

SEQ ID NO: 9318 - protein, 434 aa, Unknown
  Description of Unknown: Integrase B9319 sequence
  SM00857,IPR006118,G3DSA:1.10.10.2600,IPR036162,PF13408, IPR025827,PS51737,G3DSA:3.40.50.1390,IPR006119,IPR038109, IPR011109,SSF53041,PTHR30461,PS00397,PS51736, cd00338,PF00239
MIRAAIYIRVSTEEQARHGLSMDEQESNLRDYAKAHGMKVVDCYLDAGKSARKRYTKRPEFMRLLADIESDKIDMVLFIKLDRWFRNISDYYEVQRVLDAHNVTWRATQEDYETVTASGRFKVNIMLSVAQDEADRTSERIKFVFEGKKERNEPITGKVPRGYKLDGKSVVIDPVTGPMVRAAFDMYLETGSISKVIKAYPQLELTYFSARYMFSNPAYMGQFAGISIPAIISQDEYKKADSLRGRIVRKTTQNRVYLFSGLLICPECGNRLGGFSASRVYKETHYYGCSSHRKMTGCPNNKSYNEEKIEEYMLDRIEAKVQTSIISRNEQRAVSHKSQRDAIQRKLSKLSELYISDLISLQDYKKQFRALNDELAAIPEDIPDIDIEALKSRFWGDWRQLYDDLPRDGKQSFWRKTVKKIYLSSDSVADFDLI

SEQ ID NO: 9319 - protein, 434 aa, Unknown
  Description of Unknown: Integrase B9320 sequence
  PTHR30461:SF3,SM00857,IPR006118,G3DSA:1.10.10.2600,IPR036162, PF13408,PS51737,G3DSA:3.40.50.1390,IPR025827,IPR006119, IPR038109,IPR011109,SSF53041,PTHR30461,PS00397, PS51736,cd00338,PF00239
MTRAALYIRVSTEEQAKHGLSMDEQESNLRDYAKAHGMKVVDCYLDAGKSARKRYTKRPEFMRLLADIESDKIDMVLFIKLDRWFRNISDYYEVQRVLDAHNVTWRATQEDYETVTASGRFKVNIMLSVAQDEADRTSERIKFVFEGKKERNEPITGNVPKGYKLDGKSVVIDPVTGPIVRAAFDMYLENGSISKVIRAYPELGLSYTSARYMFSNPAYMGEFAGITIPAIISPDEYQKADSIRGCIVRKTTHNRVYLFSGLLICPKCGNRLGGFSASRVYKETHYYGCSSSRKMTGCSNNKSYNEEKIEEYMLDRIEAKVQTSIISRNEQRAVSHKSQRDAIQRKLSKLSELYISDLISLQDYKKQFRALNDELAAIPEDIPDIDIEALKSRFWGDWRQLYDDLPRDGKQSFWRKTVKKIYLSSDSVADFDLI

SEQ ID NO: 9320 - protein, 434 aa, Unknown
  Description of Unknown: Integrase B9321 sequence
  PTHR30461:SF3,IPR036162,PS51737,IPR011109,PTHR30461, PS00397,PF00239,G3DSA:1.10.10.2600,IPR006119,SSF53041, cd00338,SM00857,IPR025827,IPR038109,PS51736, IPR006118,PF13408,G3DSA:3.40.50.1390,Coil
MRAALYIRVSTEEQAKHGLSLPEQRDALSKYADANNMEVIGVYEDAGISARKPYKKRPALLRLLEDCNAGKIDVILFIKLDRWFRNVSGYYAVQDQLDKCGVKWQATQEDYETRTASGRLKVNIMLSVAQDEADRTSERIKFINDGKRAKGQPTNAKAPLGLVVKDRQYQIDPDTAEAAKDMFSAFIRLRGILPLRKYMAATWGINRSYSKYVGLIQNRLYIGEVYGIADACPALINKDEFTLANELLQHRSQRGASASPDRTYLFSGLLHCRECGTSMQSETAKKIYTYYRCRKRMLDNSACPHNRRIREDVLEEYLLREIEHIATAYHGKYEKAEKKPAIAADKIKRKMQKLKELYLADLIDIEEYRKDYEDMKRSLEIMEASQPPAFDVGALKSGLAEYPHMTKEQKKGFWTRTIQRIDADNDGAFFVTPR

SEQ ID NO: 9321 - protein, 434 aa, Unknown
  Description of Unknown: Integrase B9322 sequence
  PTHR30461:SF3,IPR036162,PS51737,IPR011109,PTHR30461, PS00397,PF00239,G3DSA:1.10.10.2600,IPR006119,SSF53041, cd00338,SM00857,IPR025827,IPR038109,PS51736, IPR006118,PF13408,G3DSA:3.40.50.1390,Coil
MRAALYIRVSTEEQAKHGLSLPEQRDALSKYADANNMEVIGVYEDAGISARKPYKKRPALLRLLEDCNAGKIDVILFIKLDRWFRNVSGYYAVQDQLDKCGVKWQATQEDYETRTASGRLKVNIMLSVAQDEADRTSERIKFINDGKRAKGQPTNAKAPLGLVVKDRQYQIDPDTEEAAKDMFSAFIRLRGILPLRKYMAATWGINRSYSKYVGLIQNRLYIGEVYGIADACPALINKDEFTLANELLQHRSQRGASASPDRTYLFSGLLHCRECGTSMQSETAKKIYTYYRCRKRMLDNSACPHNRRIREDVLEEYLLREIEHIATAYHGKYEKAEKKPAITADKIKRKMQKLKELYLADLIDIEEYRKDYEDMKRSLEIMEASQPPAFDVGALKSGLAEYPHMTKEQKKGFWTRTIQRIDADNDGAFFVTPR

SEQ ID NO: 9322 - protein, 434 aa, Unknown
  Description of Unknown: Integrase B9323 sequence
  SM00857,IPR006118,G3DSA:1.10.10.2600,IPR036162,PF13408, IPR025827,G3DSA:3.40.50.1390,PS51737,IPR006119,IPR038109, IPR011109,SSF53041,PTHR30461,PS00397,PS51736, cd00338,PF00239
MTRAAIYIRVSTEEQARHGLSMDEQEAHLRDYAKGHGMKVVDCYLDAGKSARKRYTKRPEFMRLLADIESDKIDMVLFIKLDRWFRNISDYYEVQRVLDAHNVTWRATQEDYETVTASGRFKVNIMLSVAQDEADRTSERIKFVFEGKKERNEPITGNVPKGYKLDGKSVVIDPVTGPMVRAAFDMYLEAGSISKVIREYPELGLSYTSARYMFSNPAYMGKFAGITIPAIISPDEYRKANSLRGCIVRKTTQSRVYLFSGLLICPKCGNRLGGYSVSRVHKETHYYGCSSSRKKTGCSNNKNYNEEKIEAYMLDRIEAKVQTSIISRNEQRAISHKPQRDAIQRKLSKLSELYISDLISMQDYKRQFRALNDELAAIPEDVPDIDIEALKSRFWGDWRQLYDDLPRDGKQSFWRKTVKKIYLSNDSVADFDLI

SEQ ID NO: 9323 - protein, 434 aa, Unknown
  Description of Unknown: Integrase B9324 sequence
  PTHR30461:SF3,IPR036162,PS51737,IPR011109,PTHR30461, PS00397,PF00239,G3DSA:1.10.10.2600,IPR006119,SSF53041, cd00338,SM00857,IPR025827,IPR038109,PS51736, IPR006118,PF13408,G3DSA:3.40.50.1390,Coil
MRAALYIRVSTEEQAKQGLSLPEQRDALSKYADANNMEVIGVYEDAGISARKPYKKRPALLRLLEDCNAGKIDVILFIKLDRWFRNVSGYYAVQDQLDKCGVKWQATQEDYETRTASGRLKVNIMLSVAQDEADRTSERIKFINDGKRAKGQPTNAKAPLGLVVKDRQYQIDPDTAEAAKDMFSAFIRLRGILPLRKYMAATWGINRSYSKYVGLIQNRLYIGEVYGIADACPALINKDEFTLANELLQHRSQRGASASPDRTYLFSGLLHCRECGTSMQSETAKKIYTYYRCRKRMLDNSACPHNRRIREDVLEEYLLREIEHIATAYHGKYEKAEKKPAIAADKIKRKMQKLKELYLADLIDIEEYRKDYEDMKRSLEIMEASQPPAFDVGALKSGLAEYPHMTKEQKKGFWTRTIQRIDADNDGAFFVTPR

SEQ ID NO: 9324 - protein, 434 aa, Unknown
  Description of Unknown: Integrase B9325 sequence
  PTHR30461:SF3,SM00857,G3DSA:1.10.10.2600,PS51736,PF13408, PS51737,IPR025827,IPR036162,G3DSA:3.40.50.1390,IPR006119, IPR038109,PF07508,IPR011109,SSF53041,PTHR30461, mobidb-lite,cd00338,PF00239
MERVIERVDFQIPMQPKALRVCAYARVSSGKDAMLHSLSAQVSYYNSLIQTHAGWLYCGVYSDEAITGTKSQRDGFQRMLANCRAGEIDLIITKSISRFARNTVTLLETVRELKSLGVDVFFEEQNIHTMSADGELMLTILASYAQEESLSASENQKWRIRKAFENGELVNLRFLFGYNITASGIQVNEREAAIVREIFTRFNGGESLSAISRDLNDRGCERPLGGTWCAERIRNLLSNEKYTGNALLQKKYRNNHIDKKLVPNRGRLPMYYVAGSHEPIIDQTAFDKAQVRLNEMARQAEKREKPTRSTFSGLIRCGLCGSTYKRVTCRGKHFWNCTTFQTKGKAECPAKKIPAETLEALAREVLGTDALDPDMVRSKITMIRAEKNNVAVFCMDDGSEIVKRWKDRSRAESWSPEMKEQARQRALQTRRVQK

SEQ ID NO: 9325 - protein, 434 aa, Unknown
  Description of Unknown: Integrase B9326 sequence
  PTHR30461:SF3,SM00857,G3DSA:1.10.10.2600,IPR036162,PF13408, IPR025827,G3DSA:3.40.50.1390,PS51736,PS51737,IPR006119, IPR038109,PF07508,SSF53041,IPR011109,PTHR30461, mobidb-lite,cd00338,PF00239
MERVIERVDFQIPMQPKALRVCAYARVSSGKDAMLHSLSAQVSYYNSLIQSHADWLYCGVFSDEAITGTKSQRDGFQRMLASCRAGEIDLVITKSISRFARNTVTLLQTVRELKSLGVDVFFEEQNIHTMSADGELMLTILASYAQEESLSASENQKWRIRKAFENGELANLRFLFGYNITANGIQVNEKEAAIVREIFTRFNGGESLSSISRDLNDRGCERPLGGTWCADRIRNLLSNEKYTGNALLQKQYRKNHIDKKLVPNRGELPMYYVAGSHESIIDQAAFDKAQVRLNELARQAEKREKPTRSTFSGLIRCGLCGSTYKRVTCRGKHFWNCTTFQTKGKAECPAKKIPAEMLKFLTCEVLGADALDSDMVRSKITMIRAEKNNVVVFCMDDGSEIVKRWKDRSRAESWSPEMKEQARQRALQTRRVQK

SEQ ID NO: 9326 - protein, 434 aa, Unknown
  Description of Unknown: Integrase B9327 sequence
  PTHR30461:SF3,cd00338,SM00857,G3DSA:1.10.10.2600,IPR036162, PS51737,G3DSA:3.40.50.1390,IPR006119,IPR038109,PF07508, SSF53041,IPR011109,PTHR30461,PS51736,Coil, PF00239
MMIKIGGYLRCSTKKQSSHNGHVSIAMQKKTVYKYLLLIGLVEKMSDIAWYIDEGISGESLDRPDMKRLVNDIKCGRINIVATYDFARISRDVIESNLFTNLVNQYGVRVVCVYDTYNGKTADGRMTANVKFAVNQYEREKDVERTNDGLLSLVEVHHRYPSAIVPYGFKLEDKNIYLKEETAAYVKDAFNMIEDGFSLDDVREYLNTVQTEEHFTNDRISRTLRNIKYSGFLLYKDTLYCDIVPKVVEPSVQAHVIEILDKKRRSVHHESYLLTSLVYCKKCEKRMINVFGTSRNGNRYFYYKCTKCGKYFPQIKLEKLLFEMNLKDLQEKRSKINVSKNIQNLDKRMKTLNDELLGGFIDMDLYKELRDQYTKKKEILEKLLPKKQITTLTAEMSDFERLQFYHMNFDRIIVDCEEKEVVELIYLHKEKKEG

SEQ ID NO: 9327 - protein, 434 aa, Unknown
  Description of Unknown: Integrase B9328 sequence
  SM00857,IPR036162,PF13408,IPR025827,PS51737, G3DSA:3.40.50.1390,IPR006119,SSF53041,IPR011109,PTHR30461, PS51736,cd00338,PF00239
MRVALYERVSSEEQALHGYSLEAQDSALRKFAEDNGHIIVDVYKDEGISAHKPYTARPELLRLLNDTDKIDLILFVKLDRWFRNVQEYYKVQEILDKNHTYWQAITEDYETITANGRFTVTVMLAIAQQEAEKTGERIKFVFNSKLQKNQPITGNYGFGFKTIEQYGLKTVSHDENEAAVYDMFDYFSKVQNVSLLNDYMKEKYGIIAANQTWSRRLRSEKYAGIAHGIANFLPPYITMEKHYEVLEILDSRRSRRSKNRIYLFSGILKCPECGGTMAGCTCIQSGKEYPYYRCSKCWNKGGCSNKKSTYESVVEKFLLENLEAQARVQIEEEPKKAKSTKSLEDRLSRLNDIYLMGNMEKSIYEEKTKEIKEKIIKIQMENKKHGECSGANRILSMDFKNVYETLTRDAKKVFWRNTLGKILVGDTISFTFRG

SEQ ID NO: 9328 - protein, 434 aa, Unknown
  Description of Unknown: Integrase B9329 sequence
  PTHR30461:SF3,SM00857,IPR006118,G3DSA:1.10.10.2600, IPR036162,PF13408,IPR025827,PS51737, G3DSA:3.40.50.1390,IPR006119,IPR038109,IPR011109, SSF53041,PTHR30461,PS00397,PS51736,cd00338,PF00239
MIRAAIYIRVSTEEQARHGLSMDEQEAHLRDYAKEHGMKVVDCYLDAGKSARKRYTKRPEFMRLLADIESDKIDMVLFIKLDRWFRNISDYYEVQRVLDAHNVTWRATQEDYETVTASGRFKVNIMLSVAQDEADRTSERIKFVFEGKKERNEPITGNVPKGYKLDGKSVAIDPVTGPMVRAAFDMYLENGSISKVIRAYPELGLSYTSARYMFSNPAYMGDFAGITIPAIISPAEYQKADSLRGRIVRKTTQNRVYLFSGLLICPECGNRLGGFSASRVYKETHYYGCSSHRKMTGCPNNKSYNEEKIEEYMLDRIEAKVQTSIISRNEQRAVSHKSQRDAIQRKLSKLSELYISDLISLQDYKKQFRALNDELAAIPEDIPDIDIEALKSRFWGDWRQLYDDLPRDGKQSFWRKTVKKIYLSSDSVADFDLI

SEQ ID NO: 9329 - protein, 433 aa, Unknown
  Description of Unknown: Integrase B9330 sequence
  PTHR30461:SF3,SM00857,G3DSA:1.10.10.2600,IPR036162,PF13408, PS51737,G3DSA:3.40.50.1390,mobidb-lite,IPR025827,IPR006119, IPR038109,PF07508,SSF53041,IPR011109,PTHR30461, PS51736,cd00338,PF00239
MSRKITIVSKPPKLERKKRVAAYARVSSGKDAMLHSLSAQVSYYSDLIQSHGEWLYAGVYADEAKTGTKDSRAGFQSLVADCRAGEIDMVITKSISRFARNTVTLLQTVREFKALGVDIYFEEQNIHTMSGDGELMMTILASYAQEESRSASENQKWRVKRNFEAGIPWDRTLLGYRMENNHYVIVPKEAEIVRRIYNEYLSGSGYQLIAKRLNEEGVPSRFGGKWNQSAVSRILSNHTYTGNLLLQKTFRENHITKRKIFNNGELPKYLAEESHEAIVDEETFQAVQEEKSRRSARFNKKSVSKKTYPFSSFMVCDNCGKNYRRKVTKSGPVWVCNTFNSLGKSACASKQIPEPILQQVTAEVLGKADFTGEQLRSRIQKIVVCNENVLIFRFRDGSEVTRKWKDRSRSESWTEEMKAAANQKALERNKHNA

SEQ ID NO: 9330 - protein, 433 aa, Unknown
  Description of Unknown: Integrase B9331 sequence
  PTHR30461:SF3,SM00857,G3DSA:1.10.10.2600,IPR036162,PF13408, PS51737,G3DSA:3.40.50.1390,IPR025827,PS51736,IPR006119, IPR038109,PF07508,IPR011109,SSF53041,PTHR30461, mobidb-lite,cd00338,PF00239
MERTIQIVQPMKLAERKVLRVAAYARVSCDKDAMRRSLKAQVDYYKDLIHSRSEWSFAGVYADAFYTGTKDNRPQFSEMLKACRDGKIDRIITKSISRFARNTVTLLSTVRDLRCAGIGIYFEEQNIDTLTEAGELMITILASQAQEESRATSENCKWRIRKMFEEGYTTPFNLLGYKAVDGLVETIPEETEAVQRIFQLYLEGFGKQAIANILKEERVPTCLGGEWAPTTIGSILKNEKYAGDLLLQKSFVEDHISKISRKNRGEMPKYFIQNDHEAIIPREVFNAAEEESVRRRAKYFHSSGEKSELSSKICCGICGKNYRRKTTAARILWCCSTYNTRGRKYCASKAIPEMTLKESCCQALGLAEYDPQEIADRIIQIDALPDNRLVFHLADGTDSEIQWTFPSRSESWTEEKRQKAAEQARRHHAKTGR

SEQ ID NO: 9331 - protein, 433 aa, Unknown
  Description of Unknown: Integrase B9332 sequence
  PTHR30461:SF3,SM00857,IPR006118,G3DSA:1.10.10.2600,IPR036162, PF13408,IPR025827,G3DSA:3.40.50.1390,PS00397,IPR006119, IPR038109,SSF53041,PTHR30461,Coil,PS51736, cd00338,PF00239
MRAALYIRVSTEEQARHGLSLAEQKESLERYAEAHEMEVVGIYEDAGISARKPYKKRPALLRLLEDCKSGKIDTILFIKLDRWFRNVAGYYDVQTQLDKYGVTWQATKEDYETRTASGRLKVNIMLSVAQDEADRTSERIKFINEGKKAKGIPAGSKTPLGITIKDGRYEIDQDTAEIAVDMFSAYIKLKSTLALKQYMFDTWGIYRAYNNYKNAITNRLYIGEVYGIENAFPALISIHDFELAGEIMKQRSQRCCGMRKGNVYLFSGILRCRECGKIMQSNVVKGYKYYRCRTQFRMDAQCDHRQYVREDVLESYMLNSIEQMAAKYHGQYDEAEKKPAVSADKIRKKMSKLKDLYLADLIELDEYRKDYEDLKQQLSQMEPQKPKYFDRDALHREIEEYPNLSPQMKKEFWTRTVKRIEADNNGAFFVLPR

SEQ ID NO: 9332 - protein, 433 aa, Unknown
  Description of Unknown: Integrase B9333 sequence
  PTHR30461:SF3,SM00857,G3DSA:1.10.10.2600,IPR036162,PF13408, PS51737,G3DSA:3.40.50.1390,IPR025827,IPR006119,IPR038109, SSF53041,IPR011109,PTHR30461,PS51736,cd00338, PF00239
MRVAGYTRVSTQEQKLHGVSVAAQEQALADWAAEHGHEYVGCYNDAGISARSRYTKRPELLRLLQDVQAHRVELIIFTKLDRWFRNVGDYYEIQRVLDDCGVAWKAIWEDYETETASGRLKVNIMLSVAQDEADRTSERLKQTNAYRWAAGEVVQKLPAGYRREGKTVVVDEKMQPAVAAFFHTYLNTGSVAAAMDAANLLGLHMTRVGASKMLRNPFFTGTVRGISVPAYLTVEEFEQIQRRKATFVRTAKHNKTYLFSGLLVCGNCGAILHAQSNRSTVYYVCGRYLNRNGCSKEARAYANERKLEQWLLDHLEYLLAQEIQVAKVEGKADEKNDISRQNALTQRLERIKLLFINGDIDLPEYQTRKEEVEQQLQALRPRPRTRAERLDGLLPEGWKDVYTGLSREGRRAFWLRTVQRVVIHPDRHPEIVF

SEQ ID NO: 9333 - protein, 433 aa, Unknown
  Description of Unknown: Integrase B9334 sequence
  PTHR30461:SF3,SM00857,G3DSA:1.10.10.2600,IPR036162,PF13408, IPR025827,PS51736,PS51737,G3DSA:3.40.50.1390,IPR006119, IPR038109,PF07508,SSF53041,IPR011109,PTHR30461, mobidb-lite,cd00338,PF00239
MSGKITIVSKPPKLERKKRVAAYARVSSGKDAMLHSLSAQVSYYSDLIQNHGDWLYTGVYSDEAKTGTKDSRAGFQNLVADCRAGKIDMVITKSISRFARNTVTLLQTVREFKALGVDIYFEEQNIHTISGDGELMMTILASYAQEESRSASENQKWRIKRSFESGIPWDRTLMGYRMENEHYVIVPREAEIVRRIYNEYLSGSGYQLIAKRLNEEGVPSRFGGKWNQSAVSRILSNHTYTGNLLLQKTFRENHITKRKIFNNGELPKYLAEESHEAIVDEKTFQAVQEEKSRRAARFNKKSVPKKTYPFSSLMVCDNCGKNYRRKITKTGAVWVCGTYNSLGKAACASKQIPESTLQQVTADVLGQNDFTHEWLCHRIQHIRVCNDNTLIFYFKDGSEITRIWKDRSRSQSWTDEMKEAARQKTLERSKHNA

SEQ ID NO: 9334 - protein, 433 aa, Unknown
  Description of Unknown: Integrase B9335 sequence
  PTHR30461:SF3,SM00857,IPR006118,G3DSA:1.10.10.2600,IPR036162, PF13408,IPR025827,G3DSA:3.40.50.1390,PS00397,IPR006119, IPR038109,SSF53041,PTHR30461,Coil,PS51736, cd00338,PF00239
MRAALYIRVSTEEQARHGLSLAEQKESLERYAKAHEMEVVGIYEDAGISARKPYKKRPALLRLLEDCKSGKIDTILFIKLDRWFRNVAGYYDVQTQLDKYNVTWQATKEDYETRTASGRLKVNIMLSVAQDEADRTSERIKFINEGKKAKGIPSGSKTPLGITIKDGRYEIDQDTAEIAVDMFSAYIKLKSTLALRQYMFDTWGVYRAYNNYKNAITNRLYIGEVYGIENAFPALISTHDFDLAGEIMKQRSQRCCGTRKGNVYLFSGILRCRECGQIMQSNVVKGYKYYRCRTQFRMNAQCDHRQCVREDVLESYMLNSIEQMAAKYHGQYDEAEKKPALSADKIRKKMSKLKDLYLADLIELDEYRKDYEDLKQQLSQMEPQKPKHFDRDALHREIEEYPNLSPQMKKEFWTRTVKRIEADNNGAFFVLPR

SEQ ID NO: 9335 - protein, 433 aa, Unknown
  Description of Unknown: Integrase B9336 sequence
  PTHR30461:SF3,IPR036162,PS51737,IPR011109,PTHR30461, PS00397,PF00239,G3DSA:1.10.10.2600,IPR006119,SSF53041, cd00338,SM00857,IPR025827,IPR038109,PS51736, IPR006118,PF13408,G3DSA:3.40.50.1390,Coil
MMRVALYIRVSSEEQARHGLSLQEQRDALTRYAQEHKMTVVGIYEDAGISARKPYKKRPALLRLLSDCKAGKVDTILFIKLDRWFRSVAGYYDVQTQLDRYGVTWQATEEDYETRTASGRLKVNIMLSVAQDEADRTSERIKFINDGKRAKGQPAGSKAPLGYAIKDRQYQIDNDTVDAARDMFAAFIRLKSVLAVKRYMLDTWGIDRAYSKYVNYFRNRLYIGEVYGIENACPALVSKQDFDLVTDIIQHRSQRCAGVDTDRVYLFSGILHCKECGKTMQSETVKKTYTYYRCRTRMLDNSACPHTKRIREDALENYLLHELEGIAERNNRYYKKSEKKPTQSADSIRKKMGKLKTLYLNDLIDLDDYKTEYASLKRALETVEEKPETDLNALKDGLGEYDTYSREEKKEFWTRFIRRIDADDNGAFFVTPR

SEQ ID NO: 9336 - protein, 433 aa, Unknown
  Description of Unknown: Integrase B9337 sequence
  PTHR30461:SF3,IPR036162,PS51737,IPR011109,PTHR30461, PS00397,PF00239,G3DSA:1.10.10.2600,IPR006119,SSF53041, cd00338,SM00857,IPR025827,IPR038109,PS51736, IPR006118,PF13408,G3DSA:3.40.50.1390,Coil
MMRVALYIRVSSEEQARHGLSLQEQRDTLTRYAKANKMTVVGIYEDAGISARKPYKKRPALLRLLDDCKAGTVDTILFIKLDRWFRNVAGYYDVQTQLDKYGVTWQATEEDYETRTASGRLKVNIMLSVAQDEADRTSERIKFINDGKRAKGQPAGSKAPLGYIVKDRQYQIDNGTVDAARDMFAAYIRLQSVLGVKKYMLETWKIDRAYTKYVNYFRNRLYIGEVYGIENACPALISKQDFDIVNDILRQRSQRCAGVETDRVYLFSGLLHCKECGKTMQSETAKQIYTYYRCRTRMLDNSACQHKKRIREDALEDYLLHELEGIAERNNRYYKKAEKKATQSADAIRKKMSKLKTLYLNDLIELDEYKREYASLKKSLEAVEEKPKTNLDALRNGLAEYDTYSREEKKEFWTRFIRRIDADDDGAFFVTPR

SEQ ID NO: 9337 - protein, 433 aa, Unknown
  Description of Unknown: Integrase B9338 sequence
  PTHR30461:SF3,SM00857,IPR006118,G3DSA:1.10.10.2600,IPR036162, PF13408,PS51737,IPR025827,G3DSA:3.40.50.1390,IPR006119, IPR038109,IPR011109,SSF53041,PTHR30461,PS00397, PS51736,cd00338,PF00239
MRVAGYARVSTQEQKLHGVSVAAQEQALADWAAEHGHEYVGCYNDAGISARSRYTKRPELLRLLQDVQAHRVELIIFTKLDRWFRNVGDYYEIQRVLDDCGVAWKAIWEDYETETASGRLKVNIMLSVAQDEADRTSERLKQTNAYRWAAGEVVQKLPAGYRREGKTVVVDEKMQPAVAAFFHTYLNTGSVAAAMDAANLLGLHMTRVGASKMLRNPFFTGTVRGISVPAYLTEEEFEQIQRRKATFVRTAKHNKTYLFSGLLVCGNCGAILHAQSNRSTVYYVCGRYLNRNGCSKEARAYANERKLEQWLLDHLEYLLAQEIQVAKVEGKADEKNDISRQNALTQRLERIKLLFINGDIDLPEYQTRKEEVEQQLQALRPRPRTRAERLDGLLPEGWKDVYTGLSREGRRAFWLRTVQRVVIHPDRHPEIVF

SEQ ID NO: 9338 - protein, 433 aa, Unknown
  Description of Unknown: Integrase B9339 sequence
  PTHR30461:SF3,SM00857,G3DSA:1.10.10.2600,PS51736,PF13408, PS51737,IPR025827,G3DSA:3.40.50.1390,IPR036162,IPR006119, IPR038109,PF07508,IPR011109,SSF53041,PTHR30461, mobidb-lite,cd00338,PF00239
MERTIKRVDRKLPKQEKLIRAAAYCRVSSDKDAMLHSLSAQVSYFSTTIQNHPGWVYVGAYVDEGITGTKEDRPKFVKLMEDCRAGRIDLIITKSVTRFARNTVVLLDSIRELKSMGIDVFFEKENIHTLSADGELMISILASYAQEESRSASENQKWRVKRNFEEGKPWRYFMLGYRNVDGEMTIVPEEAEIVKGIFRDYLAGVGITTIVNNLNTSGFVTQSGYKFHNSAVERILRNYAYTGNLMLQTKYRENHLTKRTLVNNGELPKYHAFETHEPIISLEVFNAVQEEMKRRAEKYAPKAKRQQYPFSGLMVCANCGKNYRRKVTTTGPVWICPTYNSSGKASCASKAIPEGILMDTTASALGVDKFNEAFFHERVSKMVISVGNCITYHMKDGTEIQRVWKDRSRRESWTPEMKEKARQATTERWRSNG

SEQ ID NO: 9339 - protein, 433 aa, Unknown
  Description of Unknown: Integrase B9340 sequence
  SM00857,G3DSA:1.10.10.2600,IPR036162,PS51737,G3DSA:3.40.50.1390, IPR006119,IPR038109,PF07508,IPR011109,SSF53041, PF00239,PTHR30461,PS51736,Coil,cd00338
MREVKKAIAYFRVSTDMQKEDLSLETQEKGGEIFARDNNIEIVKKFTDVMSGGNRNRKGFIEAQKYLEENQGEIDYFIAYDVSRIARDAFAFLSLFNKLNLLNVKLKLINNPTLDSDSPMGKLILTILAAIFEFFRFDNADRVRDNMIVKVKEGKRMNNAPYGYRIIDKKMVIVPEEAELIKYIYQEYLKGHGIVALERMTGKDRSTIKQWLNNKVYAGYNIFGKRKMNKTTFKPMKNPDETKIVEAKGDWEPIIDIDTWEKVANRMSLNQELRMRNIEKTSYLLSGLLFHTCGSKFRGNAGRKGTYYYRCTGCSRSIKSDTLDKKVLDELFNSEFLDELNKIPLENNNKDNELKKLKAQKSKLKTREENLIELYADGDITKKQFKSKKVDIQNSLIDIEAKIIELENERNEVKQNLDFTRGNSGIRGFCGIY

SEQ ID NO: 9340 - protein, 433 aa, Unknown
  Description of Unknown: Integrase B9341 sequence
  PTHR30461:SF3,SM00857,G3DSA:1.10.10.2600,IPR036162,PF13408, PS51737,G3DSA:3.40.50.1390,IPR025827,IPR006119,IPR038109, IPR011109,SSF53041,PTHR30461,PS51736, cd00338,PF00239
MRVAGYTRVSTQEQKLHGVSVAAQEQALADWAAEHGHEYVGCYNDAGISARSRYTKRPELLRLLQDVQAHRVELIIFTKLDRWFRNVGDYYEIQRVLDDCGVAWKAIWEDYETETASGRLKVNIMLSVAQDEADRTSERLKQTNAYRWAAGEVVQKLPAGYRREGKTVVVDEKMQPAVAAFFHTYLNTGSVAAAMDAANLLGLHMTRVGASKMLRNPFFTGTVRGISVPAYLTEEEFEQIQRRKATFVRTAKHNKTYLFSGLLVCGNCGAILHAQSNRSTVYYVCGRYLNRNGCSKEARAYANERKLEQWLLDHLEYLLAQEIQVAKVEGKADEKNDISRQNALTQRLERIKLLFINGDIDLPEYQTRKEEVEQQLQALRPRPRTRAERLDGLLPEGWKDVYTGLSREGRRAFWLRTVQRVVIHPDRHPEIVF

SEQ ID NO: 9341 - protein, 433 aa, Unknown
  Description of Unknown: Integrase B9342 sequence
  PTHR30461:SF3,SM00857,G3DSA:1.10.10.2600,IPR036162,PF13408, PS51737,G3DSA:3.40.50.1390,IPR025827,PS51736,IPR006119, IPR038109,PF07508,IPR011109,SSF53041,PTHR30461, mobidb-lite,cd00338,PF00239
MSGKITIVSKPPKLERKKRVAAYARVSSGKDAMLHSLSAQVSYYNDLIQNHGDWLYAGVYSDEAKTGTKDSRAGFQNLVAECRAGKIDMVITKSISRFARNTVTLLQTVREFKTLGVDIYFEEQNIHTMSGDGELMMTILASYAQEESRSASENQKWRVKRNFEAGIPWDRTLLGYRMENEHYVIVPKEAEIVRRIYNEYLSGSGYNSIAKMLNDEGILSRFGGKWNQSAVSRVLSNYTYTGNLLLQKTFSENHITKRKMFNTGELPKYHAEDAHEAIIDMETFQAVQKEKERRAAQFIKKPAPKKIYPFTGLLVCGNCGKNYRRKVTKAGAVWVCGTYNSLGKAACASKQIPESTLQQVTADVLGQNDFTHEWLCHRIQHIRVCNDNTLIFYFKDGSEITRIWKDRSRSQSWTDEMKEAARQKTLERSKHNA

SEQ ID NO: 9342 - protein, 433 aa, Unknown
  Description of Unknown: Integrase B9343 sequence
  PTHR30461:SF3,SM00857,IPR006118,G3DSA:1.10.10.2600,IPR036162, PF13408,IPR025827,G3DSA:3.40.50.1390,PS00397,IPR006119, IPR038109,SSF53041,PTHR30461,Coil,PS51736, cd00338,PF00239
MRAALYIRVSTEEQARHGLSLAEQKESLERYAEAHEMEVVGIYEDAGISARKPYKKRPALLRLLEDCKSGKIDTILFIKLDRWFRNVAGYYDVQTQLDKYGVTWQATKEDYETRTASGRLKVNIMLSVAQDEADRTSERIKFINEGKKAKGIPAGSKTPLGITIKDGRYEIDQDTAEIAVDMFSAYIKLKSTLALRQYMFDTWGVYRAYNNYKNAITNRLYIGEVYGIENAFPALISTHDFDLAGEIMKQRSQRCCGTRKGNVYLFSGILRCRECGQIMQSNVVKGYKYYRCRTQFRINAQCDHRQCVREDVLESYMLNSIEQMAAKYHGQYDEAEKKPALSADKIRKKMSKLKDLYLADLIELDEYRKDYEDLKQQLSQMEPQKPKYFDRDALHREIEEYPNLSPQMKKEFWTRTVKRIEADNNGAFFVLPR

SEQ ID NO: 9343 - protein, 433 aa, Unknown
  Description of Unknown: Integrase B9344 sequence
  PTHR30461:SF3,SM00857,IPR006118,G3DSA:1.10.10.2600,IPR036162, PF13408,PS51737,IPR025827,G3DSA:3.40.50.1390,IPR006119, IPR038109,IPR011109,SSF53041,PTHR30461,PS00397, PS51736,cd00338,PF00239
MRVAGYARVSTQEQKLHGVSVAAQEQALADWAAEHGHEYVGCYNDAGISARSRYTKRPELLRLLQDVQAHRVELIIFTKLDRWFRNVGDYYEIQRVLDDCGVAWKAIWEDYETETASGRLKVNIMLSVAQDEADRTSERLKQTNAYRWAAGEVVQKLPAGYRREGKTVVVDEKMQPAVAAFFHTYLNTGSVAAAMDAANLLGLHMTRVGASKMLRNPFFTGTVRGISVPAYLTVEEFEQIQRRKATFVRTAKHNKTYLFSGLLVCGNCGAILHAQSNRSTVYYVCGRYLNRNGCSKEARAYANERKLEQWLLDHLEYLLAQEIQVAKVEGKADEKNDISRQNALTQRLERIKLLFINGDIDLPEYQTRKEEVEQQLQALRPRPRTRAERLDGLLPEGWKDVYTGLSREGRRAFWLRTVQRVVIHPDRHPEIVF

SEQ ID NO: 9344 - protein, 433 aa, Unknown
  Description of Unknown: Integrase B9345 sequence
  PTHR30461:SF3,SM00857,IPR006118,G3DSA:1.10.10.2600,IPR036162, PF13408,PS51737,IPR025827,G3DSA:3.40.50.1390,IPR006119, IPR038109,IPR011109,SSF53041,PTHR30461,PS00397, PS51736,cd00338,PF00239
MRVAGYARVSTQEQKLHGVSIAAQEQALADWAAEHGHEYVGCYNDAGISARSRYTKRPELLRLLQDVQAHRVELIIFTKLDRWFRNVGDYYEIQRVLDDCGVAWKAIWEDYETETASGRLKVNIMLSVAQDEADRTSERLKQTNAYRWAAGEVVQKLPAGYRREGKTVVVDEKMQPAVAAFFHTYLNTGSVAAAMDAANLLGLHMTRVGASKMLRNPFFTGTVRGISVPAYLTEEEFEQIQRRKATFVRTAKHNKTYLFSGLLVCGNCGAILHAQSNRSTVYYVCGRYLNRNGCSKEARAYANERKLEQWLLDHLEYLLAQEIQVAKVEGKADEKNDISRQNALTQRLERIKLLFINGDIDLPEYQTRKEEVEQQLQALRPRPRTRAERLDGLLPEGWKDVYTGLSREGRRAFWLRTVQRVVIHPDRHPEIVF

SEQ ID NO: 9345 - protein, 433 aa, Unknown
  Description of Unknown: Integrase B9346 sequence
  PTHR30461:SF3,IPR036162,PS51737,IPR011109,PTHR30461, PS00397,PF00239,G3DSA:1.10.10.2600,IPR006119,SSF53041, cd00338,SM00857,IPR025827,IPR038109,PS51736, IPR006118,PF13408,G3DSA:3.40.50.1390,Coil
MRAALYIRVSTEEQARHGLSLAEQKESLERYAEAHEMEVVGIYEDAGISARKPYKKRPALLRLLEDCKSGKIDTILFIKLDRWFRNVAGYYDVQTQLDKYGVTWQATKEDYETRTASGRLKVNIMLSVAQDEADRTSERIKFINEGKKAKGIPSGSKTPLGITIKDGRYEIDQNTAEIAVDMFSAYIKLKSTLALRRYMFDTWGIYRAYNNYKKAITNRLYIGEVYGIENAFPALINTHDFELAGEIIKQRSQRCCDMRKGNIYLFSGILRCRECGKIMQSNVVKGYKYYRCRTQFRMNAQCDHRQCVREDVLESYMLNSIEQMAAKYHGQYDEAGKKPALSADKIRKKMSKLKDLYLADLIELDEYRKDYEDLKQQLSQMEPQKPKYFDRDALHREIEEYPNLSPQMKKEFWTRTVKRIEADNNGAFFVLPR

SEQ ID NO: 9346 - protein, 433 aa, Unknown
  Description of Unknown: Integrase B9347 sequence
  PTHR30461:SF3,SM00857,G3DSA:1.10.10.2600,IPR036162,PF13408, IPR025827,PS51737,mobidb-lite,G3DSA:3.40.50.1390,IPR006119, IPR038109,PF07508,IPR011109,SSF53041,PTHR30461, PS51736,cd00338,PF00239
MERTIKRVDRKLPKQEKLIRTAAYCRVSSNKDAMLHSLSAQVSYFSSTIQNHPGWVYVGAYVDEGITGTKEDRPKFVKLMEDCRAGKIDLIITKSVTRFARNTVVLLDSIRELKSMGIDVFFEKENIHTLSADGELMISILASYAQEESRSASENQKWRVKRNFEEGKPWRYFMLGYRNVDGKMTIVPEEAEIVKGIFRDYLAGVGITTIVNNLNTSGFVTQSGYKFHNSAVERVLRNYAYTGNLMLQTKYRENHLTKRTLVNNGELPKYHAFETHEPIISLEIFNAVQEEMKRRAEKYAPKTQRQQYPFSGLMVCANCGKNYRRKVTATGPVWICPTYNSSGKASCASKAIPEGILRETTASALEVDKFNEAFFHERVSKMVISAGNCITYYFKDGTEIQRVWKDRSRRESWTPEMKEKARRATAERWKANG

SEQ ID NO: 9347 - protein, 432 aa, Unknown
  Description of Unknown: Integrase B9348 sequence
  PTHR30461:SF3,SM00857,IPR006118,G3DSA:1.10.10.2600,IPR036162, PF13408,PS51737,G3DSA:3.40.50.1390,IPR025827,IPR006119, IPR038109,IPR011109,SSF53041,PTHR30461,PS00397, PS51736,cd00338,PF00239
MRVALYIRVSTEEQAVHGLSVDDQKESLKKWAEENKHKVIDYYVDAGVSGRKSVSKRPELQRLLYDVGAGKIDLVAFTKLDRWFRNIGEFYKAQEVLDAHGVVWQATYEDYETATAAGRLKVNIMLSVAQDEADRTSERVKRIMQHKRELGLCPAGKTPIGLKAVESRLCIDEETAHIARRMFEDYIATGSVNHVKKMLVSEFGIMRANHHIKGALSNERYVGLNNGIKVCDALIPPEDFALVQRMLTARSVRNNGSQHTWLFSGLVWCAECGHRLVTHSTRQRGTDYFYYRCKNYELGICRHKKRINEAALEKYLLAKLPIEVQAHNAKLKAGKTKPPVDTAAIKRKMDKLTDLYLADLINREKYEMEYTALKEKLNVPPDPKPINEELVMSLLDAYDKLPPSGKKEVWNRFIRRIVVSENGDIFFELVWL

SEQ ID NO: 9348 - protein, 432 aa, Unknown
  Description of Unknown: Integrase B9349 sequence
  PTHR30461:SF3,SM00857,IPR006118,G3DSA:1.10.10.2600,IPR036162, PF13408,PS51737,G3DSA:3.40.50.1390,IPR025827,IPR006119, IPR038109,IPR011109,SSF53041,PTHR30461,PS00397, PS51736,cd00338,PF00239
MRAALYIRVSTEEQARNGLSLGDQRESLLAYAADNGMEVVGVYEDAGISARKPYKRRPALLRLLADCKDGKIDTILFVKLDRWFRSVAGYYAVQEELDRCHVTWQATREDYETRTASGRLKVNIMLSVAQDEADRTSERIKAINEGKRLKGQPTTWRTPIGICVKDRHYAIDEETADAARDMFPAFIRLQSILALRRYMATEWGIKRSYNKYKDALSNRLYLGEAFGVENVLPSLVDQETFNLAGRILEQRSQRNASADRIYLFTGILRCRECGRNMQPETVKKVYKYYRCRTHTLDPADCPHILRIREDVLEDYLLREFEGIAKKYYSKSKTAEKKPPKTAEQIKRKMQKLKDLYLSDLIEIEEYKKDYTELKQQLAAINPEPIKEFDLETLRRELKEYPDLDRQAKKEFWVRTIQRIDADNDGAFFVTPS

SEQ ID NO: 9349 - protein, 432 aa, Unknown
  Description of Unknown: Integrase B9350 sequence
  PTHR30461:SF3,SM00857,IPR006118,G3DSA:1.10.10.2600,IPR036162, PF13408,PS51737,G3DSA:3.40.50.1390,IPR025827,IPR006119, IPR038109,IPR011109,SSF53041,PTHR30461,PS00397, PS51736,cd00338,PF00239
MRVALYVRVSTEEQAVHGLSVDDQKDSLKRWAEENKHKVVDYYIDAGVSGRKSVSKRPELQRLLSDVEAGKIDLVAFTKLDRWFRNIGEFYKAQEVLDAHGVVWQATYEDYETATAAGRLKVNIMLSVAQDEADRTSERVKRIMQHKRELGLCPAGKTPIGLKAVESRLCIDEETAHIARRMFEDYIATGSVNHVKKMLVSEFGIMRANHHIKGALSNERYIGLNNGIKVCDALIPPEDFALVQRMLTARSIRNNGSRHTWLFSGLVWCAECGHRLVTHSTRQRGTDYFYYRCKNYEMGICRHKKRINEATLEKYLLAKLPIEVQAHNAKLKAGKTKPPVDTAAIKRKMDKLTDLYLADLISREKYEMEYTSLKEKLNVPPEPKPINEELVMSLLDAYDKLPPSGKKEVWNRFIRRIVISENGDIFFELVWL

SEQ ID NO: 9350 - protein, 432 aa, Unknown
  Description of Unknown: Integrase B9351 sequence
  PTHR30461:SF3,IPR036162,PS51737,IPR011109,PTHR30461, PS00397,PF00239,G3DSA:1.10.10.2600,IPR006119,SSF53041, cd00338,SM00857,IPR025827,IPR038109,PS51736, IPR006118,PF13408,G3DSA:3.40.50.1390,Coil
MRAALYIRVSSEEQARHGLSLQEQRDALMRYAKANKMLVVGIYEDAGISARKPYKQRPALLRLLDDCKAGKVDTILFIKLDRWFRNVAGYYDVQTQLDKYGVTWQATEEDYETRTASGRLKVNIMLSVAQDEADRTSERIKFINDGKRAKGQPAGSKAPLGYIVKDRQYQIDNDTVAAARDMFAAYVRLQSVLGVKKYMLERWGIDRAYTKYVNYFRNRLYIGEVYGIENACPALVSKQDFDIVNDILRKRSQRCAGVETDRVYLFSGLLHCKECGKTMQSETAKQIYTYYRCRTRMLDNSACQHKKRIREDALEDYLLHELEGIAERNNRYYKKAAKKPTQSADAIRKKMSKLKTLYLNDLIELDEYKREYASLKKSLEAVEEKPKTNLDALRNGLAEYDTYSREEKKEFWTRFIRRIDADDDGAFFVTPR

SEQ ID NO: 9351 - protein, 432 aa, Unknown
  Description of Unknown: Integrase B9352 sequence
  PTHR30461:SF3,SM00857,IPR006118,G3DSA:1.10.10.2600,IPR036162, PF13408,PS51737,G3DSA:3.40.50.1390,IPR025827,IPR006119, IPR038109,SSF53041,IPR011109,PTHR30461,PS00397, PS51736,cd00338,PF00239
MRVALYVRVSTEEQAVHGLSVDDQKESLKKWAEENKHKVVDYYVDAGVSGRKSVSKRPELQRLLSDVETGQIDLVAFTKLDRWFRNIGEFYKAQEVLDAHGVVWQATYEDYETATAAGRLKVNIMLSVAQDEADRTSERVKRIMQHKRELGLCPAGKTPIGLKAVESRLCIDEETAHIARRMFEDYIATGSVNHVKKMLVSEFGIMRANHHIKGALSNERYIGLNSGIKVCDALIPPEDFALVQRMLTARSIRNNGSRHTWLFSGLVWCAECGHRLVTHSTRQRGTDYFYYRCKNYELGICRHKKRINKAALEKYLLAKLPIEVQAHNAKLKAGKTKPPVDTAAIKRKMDKLTDLYLADLISREKYEIEYTSLKEKLNVPPEPKPINEELVMSVLDAYGKLPPSGKKEVWNRFIRRIVVSENGDIFFELVWL

SEQ ID NO: 9352 - protein, 432 aa, Unknown
  Description of Unknown: Integrase B9353 sequence
  PTHR30461:SF3,IPR036162,PS51737,IPR011109,PTHR30461, PS00397,PF00239,G3DSA:1.10.10.2600,IPR006119,SSF53041, cd00338,SM00857,IPR025827,IPR038109,PS51736, IPR006118,PF13408,G3DSA:3.40.50.1390,Coil
MRAALYIRVSSDEQARHGLSLQEQRDALTRYAQEHKMTVAGIYEDAGISARKPYKKRPALLRLLGDCKVGKVDTILFIKLDRWFRNVAGYYDVQTQLDQYGVTWQATEEDYETRTASGRLKVNIMLSVAQDEADRTSERIKFINDGKRAKGQPAGSKAPLGYAIKDRQYQIDNGTVDAARDMFAAFIRLKSVLAVKRYMLDTWGIDRAYSKYVNYFRNRLYIGEVYGIENACPALVSKQDFDLVTDIIQHRSQRCAGVDTDRVYLFPGILHCKECGKTMQSETVKKTYTYYRCRTRMLDNSACPHTKRIREDALEDYLLHELEGIAERNNRYYKKADKKPTQSADSIRKKMGKLKTLYLNDLIELDEYKREYASLKKALEATEERPEINLDALKKELQEYETYSRDEKKEFWTRFIRRIDADNDGAFFVTPR

SEQ ID NO: 9353 - protein, 432 aa, Unknown
  Description of Unknown: Integrase B9354 sequence
  PTHR30461:SF3,IPR036162,PS51737,IPR011109,PTHR30461, PS00397,PF00239,G3DSA:1.10.10.2600,IPR006119,SSF53041, cd00338,SM00857,IPR025827,IPR038109,PS51736, IPR006118,PF13408,G3DSA:3.40.50.1390,Coil
MRAALYIRVSSEEQARHGLSLQEQRDALTRYAKANEMTVVGIYEDAGISARKPYKKRPALLRLLDDCKAGKIDTILFIKLDRWFRNVAGYYDVQTQLDKYGVTWQATEEDYETRTASGRLKVNIMLSVAQDEADRTSERIKFINDGKRAKGQPAGSKAPLGYIVKDRQYQIDNDMADAARDMFAAYIRLQSVLGVKKYMLETWGIDRAYTKYVNYFRNRLYIGEVYGIENACPALISKQDFDIVNDILRQRSQRCAGVETDRVYLFSGLLHCKECGKTMQSETAKQIYTYYRCRTRMLDNSACQHKKRIREDALEDYLLHELEGIAERNNRYYKKAEKKPTQSADAIRKKMSKLKTLYLNDLIELDEYKQEYASLKKSLEAVEEKPKTNLDALRNGLAEYDTYSREEKKEFWTRFIRRIDADDDGAFFVTPR

SEQ ID NO: 9354 - protein, 432 aa, Unknown
  Description of Unknown: Integrase B9355 sequence
  PTHR30461:SF3,IPR036162,PS51737,IPR011109,PTHR30461, PS00397,PF00239,G3DSA:1.10.10.2600,IPR006119,SSF53041, cd00338,SM00857,IPR025827,IPR038109,PS51736, IPR006118,PF13408,G3DSA:3.40.50.1390,Coil
MRVALYIRVSSEEQARHGLSLQEQRDALIRYAKANKMTVAGIYEDAGISARKPYKKRPALLRLLDDCKAGKVDTILFIKLDRWFRNVAGYYDVQTRLDQYGVTWQATEEDYETRTASGRLKVNIMLSVAQDEADRTSERIKFINDGKRAKGQPAGSKAPLGYIIKGRQYQIDNGTADAARDMFAAYIRLQSVLGVKRYMLETWGIDRAYTKYVNYFRNRLYIGEVYGIENACPALVSKQDFDIVNDILRQRSQRCAGIETDRVYLFSGLLHCKECGKTMQSETAKQIYTYYRCRTRMLDTSACQHKKRIREDALEAYLLHELEGIAERNNRYYKKAEKKPTQSADAIRKKMDKLKTLYLNDLIELDEYKKEYTTLKKSLEAVEEKPKTNLDALRNGLAEYDTYLREEKKEFWTRFIRRIDADDDGAFFVTPR

SEQ ID NO: 9355 - protein, 432 aa, Unknown
  Description of Unknown: Integrase B9356 sequence
  PTHR30461:SF3,SM00857,G3DSA:1.10.10.2600,IPR036162,PF13408, IPR025827,G3DSA:3.40.50.1390,mobidb-lite,PS51737,IPR006119, IPR038109,PF07508,SSF53041,IPR011109,PTHR30461, PS51736,cd00338,PF00239
MERSIKQTIFYKPPSEQLKRVAGYARVSSGKDAMLHSLSAQVSYYSEFIQKHRGWTYVGVYADEAKTGTKDERESFQRLLADCHAGKIDMVITKSISRFARNTVTLLETVRELKSLGIDVYFEEQNIHTMSADGELMLSILASYAQEESRSASENQKWRIRKNFHEGMPWNGTMLGYRYENGKYIIVPEEAEIVRKIYSYYTTGLGITAIMKTLNEKHISTRNGNLWCKSSVMKVLRNYAYTGNLLLQKTFRENYLTKRTLVNNGELPQYHAVNTHEAIIPLETFEAVQAEIACRAEKHTRTGSGQKVYPFTGLLTCAICGKHYRRKVTATGPVWICSTYNTLGKAACASKQIPEDTLMTVAAEALGTDTFDADAFYNKITAVRVEVGNTLVFCFKDGIETVKRWSDRSRAESWTPEMREAARKKTQRRGEH

SEQ ID NO: 9356 - protein, 432 aa, Unknown
  Description of Unknown: Integrase B9357 sequence
  PTHR30461:SF3,IPR036162,PS51737,IPR011109,PTHR30461, PS00397,PF00239,G3DSA:1.10.10.2600,IPR006119,SSF53041, cd00338,SM00857,IPR025827,IPR038109,PS51736, IPR006118,PF13408,G3DSA:3.40.50.1390,Coil
MRAALYIRVSSDEQARHGLSLQEQRDALTRYAQEHKMTVAGIYEDAGISARKPYKKRPALLRLLGDCKVGKVDTILFIKLDRWFRNVAGYYDVQTQLDQYGVTWQATEEDYETRTASGRLKVNIMLSVAQDEADRTSERIKFINDGKRAKGQPAGSKAPLGYAIKDRQYQIDNGTVDAARDMFAAFIRLKSVLAVKRYMLDTWGIDRAYSKYVNYFRNRLYIGEVYGIENACPALVSKQDFDLVTDIIQHRSQRCAGVDTDRVYLFSGILRCKECGKTMQSETVKKTYTYYRCRTRMLDNSACPHTKRIREDALEDYLLHEMEGIAERNNRYYKKADKKPTQSADSIRKKMGKLKTLYLNDLIELDEYKREYASLKKALEATEERPEINLDALKKELQEYETYSRDEKKEFWTRFIRRIDADNDGAFFVTPR

SEQ ID NO: 9357 - protein, 432 aa, Unknown
  Description of Unknown: Integrase B9358 sequence
  PTHR30461:SF3,IPR036162,PS51737,IPR011109,PTHR30461, PS00397,PF00239,G3DSA:1.10.10.2600,IPR006119,SSF53041, SM00857,IPR025827,IPR038109,PS51736,cd03768, IPR006118,PF13408,G3DSA:3.40.50.1390,PF07508
MARKRTNLIGNTPSVRETKVAIYIRVSTIHQVDKDSIPMQKKDLIAYCQLILGTDNYEIFEDAGYSGKNTDRPAFQNMMGRIRKGEFTHVLVWKIDRVSRNLLDFAEMYEELRSLRVTFVSKNEQFDTSTAIGEAMLKIILVFAELERNMTSERVTATMISRANSGQWNGGRIPFGYSYDPKEKIFSIREDEASICRELKDLYLLNRSLAYVSRALNEKGYKTRAGVSWSPHSVWIIASSPFYAGIYRYNRYKGVESRTINPEEEWVMIQNHHPAIFTLEEHQAMRSIMKSNQRNMDNLPGRVHLSTKTHIFQGIMYCDKCGSKMVSTPGRLHVDGYRTSNYGCPLRRNTKKCNNPTVNDIVIGEFVINYILNMLNAKKTFSTINTPDELNAALLSGSVFSEVSSVEENGLNSFFNLLSRYCLLYTSPSPRD

SEQ ID NO: 9358 - protein, 432 aa, Unknown
  Description of Unknown: Integrase B9359 sequence
  PTHR30461:SF3,SM00857,IPR006118,G3DSA:1.10.10.2600,IPR036162, PF13408,PS51737,G3DSA:3.40.50.1390,IPR025827,IPR006119, IPR038109,IPR011109,SSF53041,PTHR30461,PS00397, PS51736,cd00338,PF00239
MRAALYIRVSTEEQARHGLSLGDQRESLLAYAADNGMEVVGVYEDAGISARKPYKRRPALLRLLEDCKDGKIDTILFVKLDRWFRNVAGYYAVQEELDRCHVTWQATREDYETRTASGRLKVNIMLSVAQDEADRTSERIKAINEGKRLKGQPTTWRTPIGICVKDRHYAIDEETADAARDMFPAFIRLQSILALRRYMATEWGIKRSYNKYKDALSNRLYLGEAFGVENVLPALVDQETFNLAGRILEQRSQRNASADRIYLFTGILRCRECGRNMQPETVKQVYKYYRCRTHTLDPADCPHILRIREDVLEDYLLREFEGIAKKYYSKSKTAEKKPPKTAEQIKRKMQKLKDLYLSDLIEIEEYKKDYTELKQQLAAINPEPIKEFDLETLRRELKEYPDLDRQAKKEFWVRTIQRIDADNDGAFFVTPS

SEQ ID NO: 9359 - protein, 432 aa, Unknown
  Description of Unknown: Integrase B9360 sequence
  PTHR30461:SF3,SM00857,IPR006118,G3DSA:1.10.10.2600,IPR036162, PF13408,PS51737,IPR025827,G3DSA:3.40.50.1390,IPR006119, IPR038109,SSF53041,IPR011109,PTHR30461,PS00397, PS51736,cd00338,PF00239
MRVALYVRVSTEEQAVHGLSVDDQKESLKKWAEENKHKVVDYYVDAGVSGRKSVSKRPELQRLLSDVETGQIDLVAFTKLDRWFRNIGEFYKAQEVLDAHGVVWQATYEDYETATAAGRLKVNIMLSVAQDEADRTSERVKRIMQHKRELGLCPAGKTPIGLKAVESRLCIDEETAHIARRMFEDYIATGSVNHVKKMLVSEFGIMRSNHHIKGALSNERYIGLNSGIKVCDALIPPEDFALVQRMLTARSIRNNGSRHTWLFSGLVWCAECGHRLVTHSTRQRGTDYFYYRCKNYELGICRHKKRINEAALEKYLLAKLPIEVQAHNAKLKAGKTKPPVDTAAIKRKMDKLTDLYLADLISREKYEIEYTSLKEKLNVPPEPKPINEELVMSVLDAYGKLPPSGKKEVWNRFIRRIVVSENGDIFFELVWL

SEQ ID NO: 9360 - protein, 432 aa, Unknown
  Description of Unknown: Integrase B9361 sequence
  PTHR30461:SF3,SM00857,IPR006118,G3DSA:1.10.10.2600,IPR036162, PF13408,PS51737,G3DSA:3.40.50.1390,IPR025827,IPR006119, IPR038109,SSF53041,IPR011109,PTHR30461,PS00397, PS51736,cd00338,PF00239
MRVALYIRVSTEEQARHGLSLGDQRESLLAYAANNGMEVVGVYEDAGISARKPYRQRPALLRLLADCKDGKIDTILFVKLDRWFRSVAGYYAVQEELDRCHVTWQATREDYETRTASGRLKVNIMLSVAQDEADRTSERIKAINEGKRLKGQPTTWRTPIGICVKNRHYAIDEETADAARDMFPAFIRLQSILALRRYMATEWGIKRSYNKYKDALSNRLYLGEAFGVENALPALVDQETFNLARRILEQRSQRNASADRIYLFTGILRCRECGRNMQPETVKQVYKYYRCRTHTLDPADCPHILRIREDVLEDYLLREFEGIAKKYYSKSKTAEKKPPKTAEQIKRKMQKLKDLYLSDLIEIEEYKKDYTELKQQLAAINPEPIKEFDLETLRRELKEYPDLDRQAKKEFWIRTIQRIDADNDGAFFVTPS

SEQ ID NO: 9361 - protein, 432 aa, Unknown
  Description of Unknown: Integrase B9362 sequence
  PTHR30461:SF3,IPR036162,PS51737,IPR011109,PTHR30461, PS00397,PF00239,G3DSA:1.10.10.2600,IPR006119,SSF53041, cd00338,SM00857,IPR025827,IPR038109,PS51736, IPR006118,PF13408,G3DSA:3.40.50.1390,Coil
MRAALYIRVSSEEQARHGLSLQEQRGTLTKYAKANKMTVVGIYEDAGISARKPYKKRPALLRLLDDCKAGKVDTILFIKLDRWFRNVAGYYDVQTQLDKYGVTWQATEEDYETRTASGRLKVNIMLSVAQDEADRTSERIKFINDGKRAKGQPAGSKAPLGYIVKDRQYQIDNDTVAAARDMFAAYIRLQSVLGVKRYMLETWGIDRAYTKYVNYFRNRLYIGEVYGIENACPALVSKQDFDIVNDILRQRSQRCAGVETDRVYLFSGLLHCKECGKTMQSETAKQIYTYYRCRTRMLDNSACRHKKRIREDALEDYLLHELEGIAERNNRYYKKAEKKPTQSADAIRKKMSKLKTLYLNDLIELDEYKREYASLKKALETVEEKPKTNLDALRNGLAEYDTYSREEKKEFWTRFIRRIDADDDGAFFVTPR

SEQ ID NO: 9362 - protein, 432 aa, Unknown
  Description of Unknown: Integrase B9363 sequence
  PTHR30461:SF3,SM00857,IPR006118,G3DSA:1.10.10.2600,IPR036162, PF13408,PS51737,G3DSA:3.40.50.1390,IPR025827,IPR006119, IPR038109,IPR011109,SSF53041,PTHR30461,PS00397, PS51736,cd00338,PF00239
MRVALYIRVSTEEQARHGLSLGDQRESLLAYAANNGMEVVGVYEDAGISARKPYRQRPALLRLLADCKDGKIDTILFVKLDRWFRSVAGYYAVQEELDRCHVTWQATREDYETRTASGRLKVNIMLSVAQDEADRTSERIKAINEGKRLKGQPTTWRTPIGICVKNRHYAIDEETADAARDMFPAFIRLQSILALRRYMATEWGIKRSYNKYKDALSNRLYLGEAFGVENVLPSLVDQETFDLAGKILERRSQRNASADRIYLFTGILRCRECGRNMQPETVKQVYKYYRCRTHTLDPADCPHILRIREDVLEDYLLREFEGIAKKYYSKSKTAEKKPPKTAEQIKRKMQKLKELYLSDLIEIEEYKKDYTKLKQQLTAINPEPIKEFDLETLRRELKEYPDLDRQAKKEFWVRTIQRIDADNDGAFFVTPS

SEQ ID NO: 9363 - protein, 432 aa, Unknown
  Description of Unknown: Integrase B9364 sequence
  PTHR30461:SF3,IPR036162,PS51737,IPR011109,PTHR30461, PS00397,PF00239,G3DSA:1.10.10.2600,IPR006119,SSF53041, cd00338,SM00857,IPR025827,IPR038109,PS51736, IPR006118,PF13408,G3DSA:3.40.50.1390,Coil
MRAALYIRVSSDEQARHGLSLQEQRDALTRYAQEHKMTVAGIYEDAGISARKPYKKRPALLRLLGDCKAGKVDTILFIKLDRWFRNVAGYYDVQTQLDRYGVTWQATEEDYETRTASGRLKVNIMLSVAQDEADRTSERIKFINDGKRAKGQPAGSKAPLGYAIKDRQYQIDNGTADAARDMFAAFIRLKSVLAVKRYMLDTWGIDRAYNKYVNYFRNRLYIGEVYGIENACPALVSKQDFDLVNDIIRQRSQRCAGVGTDRVYLFSGILRCKECGKTMQSETVKKTYTYYRCRTRMFDNSACPHTKRIREDALEDYLLHEMEGIAERNNRYYKKAEKKPTHSADSIRKKMSKLKTLYLNDLIELGDYKAEYASLKRALETVEEKPETDLDALKDGLGEYDTYSRNEKKEFWTRFIRRIDADNDGAFFVTPR

SEQ ID NO: 9364 - protein, 432 aa, Unknown
  Description of Unknown: Integrase B9365 sequence
  PTHR30461:SF3,IPR036162,PS51737,IPR011109,PTHR30461, PS00397,PF00239,G3DSA:1.10.10.2600,IPR006119,SSF53041, cd00338,SM00857,IPR025827,IPR038109,PS51736, IPR006118,PF13408,G3DSA:3.40.50.1390,Coil
MRAALYIRVSSEEQARHGLSLQEQRDALARYAKANKMTVVGIYEDAGISARKPYKKRPALLRLLDDCKAGKVDTILFIKLDRWFRNVAGYYDVQTQLDRYGVTWQATEEDYETRTASGRLKVNIMLSVAQDEADRTSERIKFINDGKRAKGQPAGSKAPLGYIIKDRQYQIDNDTADAARDMFAAYIRLKSVLAVKRYMLDTWGIDRAYNKYVNYFHNRLYIGEVYGIENACPSLVSKQDFDLVTDVSRQRSQRCAGVDVDRVYLFSGLLHCKECGRTMQSETAKQIYTYYRCRTRMLDNSACLHMKRIREDLLEEYLLHELVGIAERNNRYYKKAKKKPTQSADAIRKKIGKLKTLYLNDLIELDDYKAEYASLKKSLETVEEKPKTDLDALRNGLGEYDTYSREEKKEFWTRFIRRIDADNDGAFFVTPR

SEQ ID NO: 9365 - protein, 432 aa, Unknown
  Description of Unknown: Integrase B9366 sequence
  PTHR30461:SF3,IPR036162,PS51737,IPR011109,PTHR30461, PS00397,PF00239,G3DSA:1.10.10.2600,IPR006119,SSF53041, cd00338,SM00857,IPR025827,IPR038109,PS51736, IPR006118,PF13408,G3DSA:3.40.50.1390,Coil
MRAALYIRVSSEEQARHGLSLQEQRDTLTRYAKANKMTVVGIYEDAGISARKPYKKRPALLRLLDDCKAGKVDTILFIKLDRWFRNVAGYYDVQTRLDKYGVTWQATEEDYETRTASGRLKVNIMLSVAQDEADRTSERIKFINDGKRAKGQPAGSKAPLGYIVKDRQYQIDNDTADAARDMFAAYIRLQSVLGVKRYMLETWKIDRAYTKYVNYFRNRLYIGEVYGIENACPALISKQDFDIVNDILRQRSQRCAGVETDRVYLFSGLLHCKECGKTMQSETAKQIYTYYRCRTRMLDNSACQHKKRIREDALEDYLLHELEGIAERNNRYYKKAEKKPTQSADAIRKKMSKLKTLYLNDLIELDEYKREYASLKKSLEDVEEKPKTNLDALRNGLAEYDTYSREEKKEFWTRFIRRIDADDDGAFFVTPR

SEQ ID NO: 9366 - protein, 432 aa, Unknown
  Description of Unknown: Integrase B9367 sequence
  PTHR30461:SF3,IPR036162,PS51737,IPR011109,PTHR30461, PS00397,PF00239,G3DSA:1.10.10.2600,IPR006119,SSF53041, cd00338,SM00857,IPR025827,IPR038109,PS51736, IPR006118,PF13408,G3DSA:3.40.50.1390,Coil
MRAALYIRVSSEEQARHGLSLQEQRDTLTRYAKANKMTVVGIYEDAGISARKPYKKRPALLRLLDDCKARKVDTILFIKLDRWFRNVAGYYDVQTQLDKYGVTWQATEEDYETRTASGRLKVNIMLSVAQDEADRTSERIKFINDGKRAKGQPAGSKAPLGYIVKDRQYQIDNDMADAARDMFAAYIRLQSVLGVKKYMLETWGIDRAYTKYVNYFRNRLYIGEVYGIENACPALISKQDFDIVNDILRQRSQRCAGVETDRVYLFSGLLHCKECGKTMQSETAKQIYTYYRCRTRMLDNSACQHKKRIREDALEDYLLHELEGIAERNNRYYKKAEKKPTQSADAIRKKMSKLKTLYLNDLIELDEYKQEYASLKKSLEAVEEKPKTNLDALRNGLAEYDTYSREEKKEFWTRFIRRIDADDDGAFFVTPR

SEQ ID NO: 9367 - protein, 432 aa, Unknown
  Description of Unknown: Integrase B9368 sequence
  PTHR30461:SF3,SM00857,IPR006118,G3DSA:1.10.10.2600,IPR036162, PF13408,IPR025827,PS51737,G3DSA:3.40.50.1390,IPR006119, IPR038109,IPR011109,SSF53041,PTHR30461,PS00397, PS51736,cd00338,PF00239
MRVALYIRVSTEEQARHGLSLGDQRESLLAYAADNGMEVVGVYEDAGISARKPYKQRPALLRLLADCKDGKIDTILFVKLDRWFRSVAGYYAVQEELDRCHVTWQATREDYETRTASGRLKVNIMLSVAQDEADRTSERIKAINEGKRLKGQPTTWRTPVGICVKDRHYAIDEETADAARDMFPAFIRLQSILALRRYMATEWGIKRSYNKYKDALSNRLYLGEAFGVENVLPSLVDQETFDLAGKILERRSQRNASADRIYLFTGILRCRECGRNMQPETVKKVYKYYRCRTHTLDPDDCPHILRIREDVLEDYLLREFEGIAKKYYSKSKTAEKKPPKTAEQIKRKMQKLKELYLSDLIEIEEYKKDYTDLKQQLAAINPEPIKEFDLETLRRELKEYPDLDRQAKKEFWVRTIQRIDADNDGAFFVTPS

SEQ ID NO: 9368 - protein, 432 aa, Unknown
  Description of Unknown: Integrase B9369 sequence
  PTHR30461:SF3,IPR036162,PS51737,IPR011109,PTHR30461, PS00397,PF00239,G3DSA:1.10.10.2600,IPR006119,SSF53041, cd00338,SM00857,IPR025827,IPR038109,PS51736, IPR006118,PF13408,G3DSA:3.40.50.1390,Coil
MRAALYIRVSSEEQARHGLSLQEQRETLVKYARENKMTVAGIYEDAGISARKPYKKRPALLRLLDDCKAGKIDTILFIKLDRWFRNVAGYYDVQTQLDKYGVTWQATKEDYETRTASGRLKVNIMLSVAQDEADRTSERIKFINDGKRAKGQPAGSKAPLGYIIKDRQYQIDNDTADAARDMFAAYVRLQSVLGVKRYMLETWGIDRAYTKYVNYFRNRLYIGEVYGIENACPALVSKQDFDIVNDILRQRSQRCAGVETDRVYLFSGLLHCKECGKTMQSETAKHIYTYYRCRTRMLDNSACQHKKRIREDALEDYLLHELEGIAERNNRYYKKAEKKPTQSADAIRKKMGKLKTLYLNDLIELDEYKKEYTTLKKSIEAVEEKPKTNLDALRNGLAEYDTYSREEKKEFWTRFIRRIDADDDGAFFVTPR

SEQ ID NO: 9369 - protein, 432 aa, Unknown
  Description of Unknown: Integrase B9370 sequence
  PTHR30461:SF3,IPR036162,PS51737,IPR011109,PTHR30461, PS00397,PF00239,G3DSA:1.10.10.2600,IPR006119,SSF53041, cd00338,SM00857,IPR025827,IPR038109,PS51736, IPR006118,PF13408,G3DSA:3.40.50.1390,Coil
MRAALYIRVSSDEQARHGLSLQEQRDALTRYAQEHKMTVAGIYEDAGISARKPYKKRPALLRLLGDCKVGKVDTILFIKLDRWFRNVAGYYDVQTQLDQYGVTWQATEEDYETRTASGRLKVNIMLSVAQDEADRTSERIKFINDGKRAKGQPAGSKAPLGYAIKDRQYQIDNGTVDAARDMFAAFIRLKSVLAVKRYMLDTWGIDRAYNKYVNYFRNRLYIGEVYGIENACPALVSKQDFDLVNDIIRQRSQRCAGVGTDRVYLFSGILRCKECGKTMQSETVKKTYTYYRCRTRMLDNSACPHTKRIREDALEDYLLHEMEGIAERNNRYYKKADKKPTQSADSIRKKMGKLKTLYLNDLIELDEYKREYASLKKALEATEERPEINLDALKKELQEYETYSRDEKKEFWTRFIRRIDADNDGAFFVTPR

SEQ ID NO: 9370 - protein, 432 aa, Unknown
  Description of Unknown: Integrase B9371 sequence
  PTHR30461:SF3,SM00857,G3DSA:1.10.10.2600,IPR036162,PF13408, PS51737,IPR025827,G3DSA:3.40.50.1390,IPR006119,IPR038109, IPR011109,SSF53041,PTHR30461,Coil,PS51736, cd00338,PF00239
MRVALYIRVTSEEQARHGLSLQEQRDALIRYAKANKMTVVGIYEDAGISARKPYKKRPALLQLLDDCKAGKVDTILFIKLDRWFRNVAGYYDVQTQLDKYGVTWQATEEDYETRTASGRLKVNIMLSVAQDEADRASERVKFINDGKRAKGQPAGSKAPLGYIIKDRKYQIDNDTADAARDMFAAYVRLQSVLGVKKYMLETWGVDRAYTKYVNYFRNRLYIGEVYGIENACPALVSKQDFDIVNDILRQRSQRCAGVDTDRVYLFSGLLHCKECGKTMQSETAKQIYTYYRCRTRMLDNSACQHKKRIREDTLEDYLLHELEGIAERNNRYYKKAEKKPTQSADAIRKKMGKLKTLYLNDLIELDEYKREYASLKKTLEAVEEKPKTNLDALRNGLAEYDTYSKEEKKEFWTRFIRRIDADDDGAFFVTPR

SEQ ID NO: 9371 - protein, 432 aa, Unknown
  Description of Unknown: Integrase B9372 sequence
  PTHR30461:SF3,IPR036162,PS51737,IPR011109,PTHR30461, PS00397,PF00239,G3DSA:1.10.10.2600,IPR006119,SSF53041, cd00338,SM00857,IPR025827,IPR038109,PS51736, IPR006118,PF13408,G3DSA:3.40.50.1390,Coil
MRAALYIRVSSEEQARHGLSLQEQRNTLTSYAKANKMTVVGIYEDAGISARKPYKKRPALLRLLDDCKAGKVDTILFIKLDRWFRNVAGYYDVQTQLDKYGVTWQATEEDYETRTASGRLKVNIMLSVAQDEADRTSERIKFINDGKRAKGQPAGSKAPLGYIVKDRQYQIDNGTADAARDMFAAYIRLQSVLGVKKYMLETWGINRAYTKYVNYFRNRLYIGEVYGIENACPALISKQDFDIVNDILRQRSQRCAGVETDRVYLFSGLLHCKECGKTMQSETAKQIYTYYRCRTRMLDNSACQHKKRIREDALEDYLLHELEGIAERNNRYYKKAEKKPTQSADAIRKKMSKLKTLYLNDLIELDEYKREYASLKKTLETVEEKPRTNLDALRNGLAEYDTYSREEKKEFWMRFIRRIDADDDGAFFVTPR

SEQ ID NO: 9372 - protein, 432 aa, Unknown
  Description of Unknown: Integrase B9373 sequence
  PTHR30461:SF3,SM00857,IPR006118,G3DSA:1.10.10.2600,IPR036162, PF13408,PS51737,G3DSA:3.40.50.1390,IPR025827,IPR006119, IPR038109,IPR011109,SSF53041,PTHR30461,PS00397, PS51736,cd00338,PF00239
MRAALYIRVSTEEQARHGLSLGDQRESLLTYAADNGMEVVGVYEDAGISARKPYKRRPALLRLLADCKDGKIDTILFVKLDRWFRSVAGYYAVQEELDRCHVTWQATREDYETRTASGRLKVNIMLSVAQDEADRTSERIKAINEGKRLKGQPTTWRTPIGICVKNRHYAIDEETADAARDMFPAFIRLQSILALRRYMATEWGIKRSYNKYKDALGNRLYLGEAFGVENALPALIDQETFDLAGKILERRSQRNASADRIYLFTGILRCRECGRNMQPETVKQVYKYYRCRTHTLDPADCPHILRIREDVLEDYLLREFEGIAKKYYSKSKTAEKKPPKTAEQIKRKMQKLKDLYLSDLIEIEEYKKDYTDLKQQLAAINPEPIKEFDLETLRRELKEYPDLDRQAKKEFWVRTIQRIDADNDGAFFVTPS

SEQ ID NO: 9373 - protein, 432 aa, Unknown
  Description of Unknown: Integrase B9374 sequence
  PTHR30461:SF3,IPR036162,PS51737,IPR011109,PTHR30461, PS00397,PF00239,G3DSA:1.10.10.2600,IPR006119,SSF53041, cd00338,SM00857,IPR025827,IPR038109,PS51736, IPR006118,PF13408,G3DSA:3.40.50.1390,Coil
MRAALYIRVSSDEQARHGLSLQEQRDALTRYAQEHKMTVAGIYEDAGISARKPYKKRPALLRLLGDCKAGKVDTILFIKLDRWFRNVAGYYDVQTQLDRYGVTWQATEEDYETRTASGRLKVNIMLSVAQDEADRTSERIKFINDGKRAKGQPAGSKAPLGYAIKDRQYQIDNGTADAARDMFAAFIRLKSVLAVKRYMLDTWGIDRAYNKYVNYFRNRLYIGEVYGIENACPALVSKQDFDLVNDIIRQRSQRCAGVGTDRVYLFSGILRCKECGKTMQSETVKKTYTYYRCRTRMLDNSACPHTKRIREDALEDYLLHEMEGIAERNNRYYKKADKKPTQSADSIRKKMGKLKTLYLNDLIELDEYKREYASLKKALEATEERPEINLDALKKELQEYETYSRDEKKEFWTRFIRRIDADNDGAFFVTPR

SEQ ID NO: 9374 - protein, 432 aa, Unknown
  Description of Unknown: Integrase B9375 sequence
  PTHR30461:SF3,SM00857,IPR006118,G3DSA:1.10.10.2600,IPR036162, PF13408,PS51737,G3DSA:3.40.50.1390,IPR025827,IPR006119, IPR038109,IPR011109,SSF53041,PTHR30461,PS00397, PS51736,cd00338,PF00239
MRAALYIRVSTEEQARHGLSLGDQRESLLAYAADNGMEVVGVYEDAGISARKPYKRRPALLRLLEDCKDGKIDTILFVKLDRWFRSVAGYYAVQEELDRCHVTWQATREDYETRTASGRLKVNIMLSVAQDEADRTSERIKAINEGKRLKGQPTTWRTPIGICVKDRHYAIDEETADAARDMFPAFIRLQSILALRRYMATEWGIKRSYNKYKDALSNRLYLGEAFGVENVLPALVDQETFNLAGRILEQRSQRNASADRIYLFTGILRCRECGRNMQPETVKQVYKYYRCRTHTLDPADCPHILRIREDVLEDYLLREFEGIAKKYYSKSKTAEKKPPKTAEQIKRKMQKLKDLYLSDLIEIEEYKKDYTDLKQQLAAINPEPIKEFDLETLRRELKEYPDLDRQAKKEFWVRTIQRIDADNDGAFFVTPS

SEQ ID NO: 9375 - protein, 432 aa, Unknown
  Description of Unknown: Integrase B9376 sequence
  PTHR30461:SF3,IPR036162,PS51737,IPR011109,PTHR30461, PS00397,PF00239,G3DSA:1.10.10.2600,IPR006119,SSF53041, cd00338,SM00857,IPR025827,IPR038109,PS51736, IPR006118,PF13408,G3DSA:3.40.50.1390,Coil
MRAALYIRVSSEEQARHGLSLQEQRDALTRYAKENKMTVVGIYEDAGISARKPYKKRPALLRLLDDCKAGKVDTILFIKLDRWFRNVAGYYDVQTQLDKYGVTWQATEEDYETRTASGRLKVNIMLSVAQDEADRTSERIKFINDGKRAKGQPAGSKAPLGYIIKDRQYQIDNDTVAAARDMFAAYIKLQSVLGVKRYMFETWGIDRAYTKYVNYFRNRLYIGEVYGIENACPALISKQDFDIVNDILRQRSQRCAGVETDRVYLFSGLLHCKECGKTMQSETAKQIYTYYRCRTRMLDNSACQHKKRIREDALEDYLLHELEGIAERNNRYYKKAEKKPTQSADAIRKKMGKLKTLYLNDLIELDEYKREYASLKKTLETVEEKPQTNLDALRNGLAEYDTYSREEKKEFWTRFIWRIDADDDGAFFVTPR

SEQ ID NO: 9376 - protein, 432 aa, Unknown
  Description of Unknown: Integrase B9377 sequence
  PTHR30461:SF3,SM00857,IPR006118,G3DSA:1.10.10.2600,IPR036162, PF13408,IPR025827,G3DSA:3.40.50.1390,PS51737,IPR006119, IPR038109,SSF53041,IPR011109,PTHR30461,PS00397, PS51736,cd00338,PF00239
MRVALYVRVSTEEQAVHGLSVDDQKDSLKRWAEENKHKVVDYYVDAGVSGRKSVSKRPELQRLLSDVEAGKIDLVAFTKLDRWFRNIGEFYKAQEVLDAHGVVWQATYEDYETATAAGRLKVNIMLSVAQDEADRTSERVKRIMQHKRELGLCPAGKTPIGLKAVESRLCIDEETAHIARRMFEDYIATGSVNHVKKMLVSEFGIMRANHHIKGALSNERYIGLNSGIKVCDALIPPEDFALVQRMLTARSIRNNGSRHTWLFSGLVWCAECGHRLVTHSTRQRGTDYFYYRCKNYELGICRHKKRINEAALEKYLLAKLPIEVQAHNAKLKAGKTKPPVDTAAIKRKMDKLTDLYLADLISREKYEIEYTSLKEKLNVPPEPKPINEELVMSVLDAYGKLPPSGKKEVWNRFIRRIVVSENGDIFFELVWL

SEQ ID NO: 9377 - protein, 432 aa, Unknown
  Description of Unknown: Integrase B9378 sequence
  PTHR30461:SF3,IPR036162,PS51737,IPR011109,PTHR30461, PS00397,PF00239,G3DSA:1.10.10.2600,IPR006119,SSF53041, cd00338,SM00857,IPR025827,IPR038109,PS51736, IPR006118,PF13408,G3DSA:3.40.50.1390,Coil
MRVALYIRVSSEEQARHGLSLQEQRDALTRYAEANKMSVVGIYEDAGISARKPYKKRPALLRLLDDCKAGKVDMILFIKLDRWFRNVAGYYDVKTQLDKYGVTWQATEEDYETRTASGRLKVNIMLSVAQDEADRTSERIKFINDGKRAKGQPAGSKAPLGYIIKDRQYQIDNGTADAARDMFAAYIRLQSVLGVKRYMLETWGIDRSYNKYINYFRNRLYIGEVYGIENACPALVSKQDFDIVNDILRQRSQRCAGFETDRVYLFSGLLHCKECGKTMQSETAKQIYTYYRCRTRMLDSSTCQHKKRIREDALEDYLLHELEGIAERNIRYYKKAEKKPTQSADAIRKKMDKLKTLYLNDLIELDEYKKEYTALKKSLETVEEKPRTNLDALRNGLAEYDTYSREEKKEFWTRFIRRIDADDDGAFFVTPR

SEQ ID NO: 9378 - protein, 432 aa, Unknown
  Description of Unknown: Integrase B9379 sequence
  PTHR30461:SF3,SM00857,IPR006118,G3DSA:1.10.10.2600,IPR036162, PF13408,IPR025827,G3DSA:3.40.50.1390,PS51737,IPR006119, IPR038109,SSF53041,IPR011109,PTHR30461,PS00397, PS51736,cd00338,PF00239
MRVALYVRVSTEEQAVHGLSVDDQKDSLKRWAEENKHKVVDYYVDAGVSGRKSVSKRPELQRLLSDVEAGKIDLVAFTKLDRWFRNIGEFYKAQEVLDAHGVVWQATYEDYETATAAGRLKVNIMLSVAQDEADRTSERVKRIMQHKRELGLCPAGKTPIGLKAVESRLCIDEETAHIARRMFEDYIATGSVNHVKKMLVSEFGIMRANHHVKGALSNERYVGLNNGIKVCDALIPPEDFALVQRMLTARSIRNNGSKHTWLFSGLVWCAECSHRLVTHSTRQRGTDYFYYRCKNYEMGICRHKKRINEATLEKYLLAKLPIEVQAHNAKLKAGKTKPPVDTAAIKRKMDKLTDLYLADLISREKYEMEYTALKEKLNVPPEPKPINEELVMSLLDAYDKLPPSGKKEVWNRFIRRIVVSENGDIFFELVWL

SEQ ID NO: 9379 - protein, 432 aa, Unknown
  Description of Unknown: Integrase B9380 sequence
  PTHR30461:SF3,IPR036162,PS51737,IPR011109,PTHR30461, PS00397,PF00239,G3DSA:1.10.10.2600,IPR006119,SSF53041, cd00338,SM00857,IPR025827,IPR038109,PS51736, IPR006118,PF13408,G3DSA:3.40.50.1390,Coil
MRVALYIRVSSEEQARHGLSLQEQRDALIRYAKANKMTVVGIYEDAGISARKPYKKRPALLRLLGDCKDGQIDMILFVKLDRWFRNVAGYYDVQTQLDQYGVTWQATEEDYETRTASGRLKVNIMLSVAQDEADRTSERIKFINDGKRAKGQPAGSKAPLGYAIKDRQYQIDNGTADAARDMFAAFIRLKSVLAVKRYMLDTWGIDRAYSKYVNYFRNRLYIGEVYGIENACPALVSKQDFDLVNDIIRQRSQRCAGVDTDRVYLFSGILHCKECGKTMQSETVKKTYTYYRCRTRMLDNTSCPHTKRIREDVLEDYLLHELAGIAERNNRYYKKAEKKPMQSADSIRKKMSKLKTLYLNDLIELDDYKAEYSILKRSLETVEEKPKTDLDALRNGLGEYGTYSREEKKEFWTRVIKRIDADNDGAFFVMPR

SEQ ID NO: 9380 - protein, 432 aa, Unknown
  Description of Unknown: Integrase B9381 sequence
  PTHR30461:SF3,IPR036162,PS51737,IPR011109,PTHR30461, PS00397,PF00239,G3DSA:1.10.10.2600,IPR006119,SSF53041, cd00338,SM00857,IPR025827,IPR038109,PS51736, IPR006118,PF13408,G3DSA:3.40.50.1390,Coil
MRAALYIRVSSEEQARHGLSLQEQRDTLTRYAKANKMTVVGIYEDAGISARKPYKKRPALLRLLDDCKAGKIDTILFIKLDRWFRNVAGYYDVQTRLDQYGVTWQATEEDYETRTASGRLKVNIMLSVAQDEADRTSERIKFINDGKRAKGQPAGSKAPLGYIVKDRQYQIDNGTVDAARDMFAAYIRLQSVLGVKKYMLETWGIDRAYTKYVNYFRNRLYIGEVYGIENACPALVSKQDFDIVNDILRQRSQRCAGVETDRVYLFSGLLHCKECGKTMQSETAKQIYTYYRCRTRMLDNSACQHKKRIREDSLEDYLLHELEGIAERNNRYYKKAEKKPTQNADAIRKKMSKLKTLYLNDLIELDEYKREYASLKKSLEAVEEKPQTNLDALRNGLAEYDTYSREEKKEFWTRFIRRIDADDDGAFFVTPR

SEQ ID NO: 9381 - protein, 432 aa, Unknown
  Description of Unknown: Integrase B9382 sequence
  SM00857,IPR006118,G3DSA:1.10.10.2600,IPR036162,PS51737, G3DSA:3.40.50.1390,IPR006119,IPR038109,SSF53041,IPR011109, PTHR30461,PS00397,PS51736,cd00338,PF00239
MKRIIAMYLRVSTLDQARNGYGLGDQEVQCKKYIDLYYPNDEVEIYKDDGYSAKNLERPEMARMLDDMKKGKIHTIIAFKLDRLTRNVVDTYKLIKQVMDYNCSLVAVVDRLDITSANGRMFVGLLSLISQWEREVISERTIAGLEQMVRSGKYPCGGKAPYGWNKTEDGKLVINEDEAEIINYMTDCYIEGYSLKDISKMVFAKYGYRKSWRHLKELLIRKLNIGVFEFHGASYDDFVPPIMNLNKYNELLKMAAHREVHSLEKQTYTFHHLVYCSCGEMMQHVCTIKHNSGVSTIYRYYYCSKCNKRVNQSFLEKEIFETLFLEEFRIKTIEKHKKQELILSSLDVKKEEVFNAYKENIIDFDTYKFTMAKLEKERSLALKELTSLDIVSNSKYFEMTQDEKYAYVHDMISKIIFDFDEQIVLSIQFKKK

SEQ ID NO: 9382 - protein, 432 aa, Unknown
  Description of Unknown: Integrase B9383 sequence
  PTHR30461:SF3,IPR036162,PS51737,IPR011109,PTHR30461, PS00397,PF00239,G3DSA:1.10.10.2600,IPR006119,SSF53041, cd00338,SM00857,IPR025827,IPR038109, PS51736,IPR006118,PF13408,G3DSA:3.40.50.1390,Coil
MRAALYIRVSSEEQARHGLSLQEQRDALTRYAKANKMTVVGIYEDAGISARKPYKKRPALLRLLDDCKAGKVDTILFIKLDRWFRNVAGYYDVQTRLDKYGVTWQATEEDYETRTASGRLKVNIMLSVAQDEADRTSERIKFINDGKRAKGQPAGSKAPLGYIIKDRQYQIDNDTADAARDMFAAYIRLQSVLGVKKYMLETWKIDRAYTKYVNYFRNRLYIGEVYGIENACPALISKQDFDIVNDIFRQRSQRCAGVETDRVYLFSGLLHCKECGKTMQSETAKQIYTYYRCRTRMLDNSACQHKKRIREDALEDYLLHELEGIAERNNRYYKKAEKKPTQSADAIRKKMSKLKTLYLNDLIELDEYKREYASLKKSLEAVEEKPKTNLDALRNGLAEYDTYSREEKKEFWTRFIRRIDADDDGAFFVTPR

SEQ ID NO: 9383 - protein, 432 aa, Unknown
  Description of Unknown: Integrase B9384 sequence
  PTHR30461:SF3,IPR036162,PS51737,IPR011109,PTHR30461, PS00397,PF00239,G3DSA:1.10.10.2600,IPR006119,SSF53041, cd00338,SM00857,IPR025827,IPR038109,PS51736, IPR006118,PF13408,G3DSA:3.40.50.1390,Coil
MRAALYIRVSSEEQARHGLSLQEQRDALTRYAKANKMTVVGIYEDAGISARKPYKKRPALLRLLDDCKVGKVDTILFIKLDRWFRNVAGYYDVQTQLDKYGVTWQATEEDYETRTASGRLKVNIMLSVAQDEADRTSERIKFINDGKRAKGQPAGSKAPLGYIVKDRQYQIDNDTADAARDMFAAYIRLQSVLGVKKYMLETWGIDRAYTKYVNYFRNRLYIGEVYGIENACPALVSKQDFDIVNDILRQRSQRCAGVETDRVYLFSGLLHCKECGKTMQSETAKQIYTYYRCRTRMLDNSACQHKKRIREDALEDYLLHELEGIAERNNRYYKKAEKKPTQSADAIRKKMSKLKTLYLNDLIELDEYKREYASLRKSLEAVEEKPKTNLAALRNGLAEYDTYSREEKKEFWTRFIRQIDADDDGAFFVTPR

SEQ ID NO: 9384 - protein, 432 aa, Unknown
  Description of Unknown: Integrase B9385 sequence
  PTHR30461:SF3,SM00857,IPR006118,G3DSA:1.10.10.2600,IPR036162, PF13408,IPR025827,G3DSA:3.40.50.1390,PS51737,IPR006119, IPR038109,SSF53041,IPR011109,PTHR30461,PS00397, PS51736,cd00338,PF00239
MRVALYVRVSTEEQAVHGLSVDDQKESLKKWAEENKHKVVDYYVDAGVSGRKSVSKRPELQRLLSDVEAGKIDLVAFTKLDRWFRNIGEFYKAQEVLDAHGVVWQATYEDYETATAAGRLKVNIMLSVAQDEADRTSERVKRIMQHKRELGLCPAGKTPIGLKAVESRLCIDEETAHIARRMFEDYIATGSVNHVKKMLVSEFGIMRANHHIKGALSNERYIGLNSGIKVCDALIPPEDFALVQRMLTARSIRNNGSRHTWLFSGLVWCAECGHRLVTHSTRQRGTDYFYYRCKNYELGICRHKKRINEAALEKYLLAKLPIEVQAHNAKLKAGKTKPPVDTAAIKRKMDKLTDLYLADLISREKYEIEYTSLKEKLNVPPEPKPINEELVVSLLDAYGKLPPSGKKEVWNRFIRRIVVSENGDIFFELVWL

SEQ ID NO: 9385 - protein, 432 aa, Unknown
  Description of Unknown: Integrase B9386 sequence
  PTHR30461:SF3,IPR036162,PS51737,IPR011109,PTHR30461, PS00397,PF00239,G3DSA:1.10.10.2600,IPR006119,SSF53041, cd00338,SM00857,IPR025827,IPR038109,PS51736, IPR006118,PF13408,G3DSA:3.40.50.1390,Coil
MRAALYIRVSSEEQARHGLSLQEQRDALTRYAKANKMTVAGIYEDAGISARKPYKKRPALLRLLDDCKAGKVDTILFIKLDRWFRNVAGYYDVQTRLDQYGVTWQATEEDYETRTASGRLKVNIMLSVAQDEADRASERVKFINDGKRAKGQPAGSKAPLGYIIKDRQYQIDNDTADAARDMFAAYIRLQSVLGVKKYMLETWGIDRAYTKYVNYFRNRLYIGEVYGIENACPALVSKQDFDIVNDILRQRSQRCAGVETDRVYLFSGLLHCKECGKTMQSETTKQIYTYYRCRTRMLDNSACQHKKRIREDALEDYLLHELEGIAERNNRYYKKAEKKPTQSADAIRKKMSKLKTLYLNDLIELDEYKQEYASLKKALEAVEEKPKTNLDALRNGLAEYGTYSREEKKEFWTRFIRRIDADDDGAFFVTPR

SEQ ID NO: 9386 - protein, 432 aa, Unknown
  Description of Unknown: Integrase B9387 sequence
  PTHR30461:SF3,SM00857,IPR006118,G3DSA:1.10.10.2600,IPR036162, PF13408,PS51737,G3DSA:3.40.50.1390,IPR025827,IPR006119, IPR038109,IPR011109,SSF53041,PTHR30461,PS00397, PS51736,cd00338,PF00239
MRAALYIRVSTEEQARNGLSLGDQRESLLAYAADNGMEVVGVYEDAGISARKPYKRRPALLRLLADCKDGKIDTILFVKLDRWFRSVAGYYAVQEELDRCHVTWQATREDYETRTASGRLKVNIMLSVAQDEADRTSERIKAINEGKRLKGQPTTWRTPIGICVKDRHYAIDEETADAARDMFPAFIRLQSILALRRYMATEWGIKRSYNKYKDALSNRLYLGEAFGVENVLPSLVDQETFNLAERILEQRSQRNASADRIYLFTGILRCRECGRNMQPETVKKVYKYYRCRTHTLDPADCPHILRIREDVLEDYLLREFEGIAKKYYSKSKTAEKKPPKTAEQIKRKMQKLKDLYLSDLIEIEEYKKDYTELKQQLAAINPEPIKEFDLETLRRELKEYPDLDRQAKKEFWVRTIQRIDADNDGAFFVTPS

SEQ ID NO: 9387 - protein, 432 aa, Unknown
  Description of Unknown: Integrase B9388 sequence
  PTHR30461:SF3,IPR036162,PS51737,IPR011109,PTHR30461, PS00397,PF00239,G3DSA:1.10.10.2600,IPR006119,SSF53041, cd00338,SM00857,IPR025827,IPR038109,PS51736, IPR006118,PF13408,G3DSA:3.40.50.1390,Coil
MIAALYIRVSSEEQARHGLSLQEQRDALIRYAKANKMTVAGIYEDAGISARKPYKKRPALLRLLDDCKAGKVDTILFIKLDRWFRNVAGYYDVQTRLDQYGVTWQATEEDYETRTASGRLKVNIMLSVAQDEADRTSERIKFINDGKRAKGQPAGSKAPLGYIIKDRQYQIDNDTADAARDMFAAYIRLQSVLGVKRYMLETWGIDRAYTKYVNYFRNRLYIGEVYGIENACPALVSKQDFDIVNDILRQRSQRCAGVETDRVYLFSGLLHCKECGKTMQSETAKQIYTYYRCRTRMLDNSACQHKKRIREDALEDYLLHELEGIAERNNRYYKKAEKKPTQSADAIRKKMSKLKTLYLNDLIELDEYKKEYTALKKSLEAVEEKPKTNLDALRNGLAEYDTYSREEKKEFWTRFIRRIDADDDGAFFVTPR

SEQ ID NO: 9388 - protein, 432 aa, Unknown
  Description of Unknown: Integrase B9389 sequence
  PTHR30461:SF3,SM00857,IPR006118,G3DSA:1.10.10.2600,IPR036162, PF13408,IPR025827,PS51737,G3DSA:3.40.50.1390,IPR006119, IPR038109,IPR011109,SSF53041,PTHR30461,PS00397, PS51736,cd00338,PF00239
MRVALYIRVSTEEQAVHGLSVDDQKESLKKWAEENKHKVVDYYVDAGVSGRKSVSKRPELQRLLSDVEAGKIDLVAFTKLDRWFRNIGEFYKAQEVLDTHGVVWQATYEDYETATAAGRLKVNIMLSVAQDEADRTSERVKRIMQHKRELGLCPAGKTPIGLKAVESRLCIDEETAHIARRMFEDYIATGSVNHVKKMLVSEFGIMRANHHIKGALSNERYIGLNNGIKVCDALIPPEDFALVQRMLTARSVRNNGSRHTWLFSGLVWCAECGHRLVTHSTRQRGTDYFYYRCKNYEMGICRHKKRINEATLEKYLLAKLPIEVQAHNAKLKAGKTKPPVDTAAIKRKMDKLTDLYLADLISREKYEMEYTSLKEKLNVPPEPKPINEELVMSVLDAYDKLPSSGKKEVWNRFIRRIVVSENGDIFFELVWL

SEQ ID NO: 9389 - protein, 432 aa, Unknown
  Description of Unknown: Integrase B9390 sequence
  PTHR30461:SF3,IPR036162,PS51737,IPR011109,PTHR30461, PS00397,PF00239,G3DSA:1.10.10.2600,IPR006119,SSF53041, cd00338,SM00857,IPR025827,IPR038109,PS51736, IPR006118,PF13408,G3DSA:3.40.50.1390,Coil
MRAALYIRVSSEEQARHGLSLQEQRDALARYAKANKMTVVGIYEDAGISARKPYKKRPALLRLLDDCKAGKVDTILFIKLDRWFRNVAGYYDVQTQLDQYGVTWQATEEDYETRTASGRLKVNIMLSVAQDEADRTSERIKFINDGKRAKGQPAGSKAPLGYIIKERQYQIDNDTADAARDMFAAYIRLKSVLAVKRYMLETWGIDRAYSKYVNYFRNRLYIGEVYGIENACPALVSKQDFDLVTDISRQRSQRCAGVDADRVYLFSGLLHCKECGRTMQSETAKQIYTYYRCRTRMLDNSACPHMKRIREDALEDYLLHELMGIAERNNRYYKKAEKKPTQSADAIRKKMSKLKTLYLNDLIELDDYKAEYASLKKSLETVEEKPKTDLDDLRNGLCEYDTYLREEKKEFWTRFIRRIDADNDGAFFVTPR

SEQ ID NO: 9390 - protein, 432 aa, Unknown
  Description of Unknown: Integrase B9391 sequence
  PTHR30461:SF3,IPR036162,PS51737,IPR011109,PTHR30461, PS00397,PF00239,G3DSA:1.10.10.2600,IPR006119,SSF53041, cd00338,SM00857,IPR025827,IPR038109,PS51736, IPR006118,PF13408,G3DSA:3.40.50.1390,Coil
MRAALYIRVSSDEQARHGLSLQEQRDALTRYAQEHKMTVAGIYEDAGISARKPYKKRPALLRLLGDCKVGKVDTILFIKLDRWFRNVAGYYDVQTQLDQYGVTWQATEEDYETRTASGRLKVNIMLSVAQDEADRTSERIKFINDGKRAKGQPAGSKAPLGYVIKDRQYQIDSGTVDAARDMFASFIRLKSVLAVKRYMLDKWGIDRAYSKYVNYFRNRLYIGEVYGIENACPALVSKQDFDLVNDIIRQRSQRCAGVGTDRVYLFSGILRCKECGKTMQSETVKKTYTYYRCRTRMLDNSACPHTKRIREDALEDYLLHELEGIAERNNRYYKKADKKPTQSADSIRKKMGKLKTLYLNDLIELDEYKREYASLKKALEATEERPEINLDALKKELQEYETYSRDEKKEFWTRFIRRIDADNDGAFFVTPR

SEQ ID NO: 9391 - protein, 432 aa, Unknown
  Description of Unknown: Integrase B9392 sequence
  PTHR30461:SF3,IPR036162,PS51737,IPR011109,PTHR30461, PS00397,PF00239,G3DSA:1.10.10.2600,IPR006119,SSF53041, cd00338,SM00857,IPR025827,IPR038109,PS51736, IPR006118,PF13408,G3DSA:3.40.50.1390,Coil
MRAALYIRVSSDEQARHGLSLQEQRDALTRYAQEHKMTVAGIYEDAGISARKPYKKRPALLRLLGDCKVGKVDTILFIKLDRWFRNVAGYYDVQTQLDQYGVTWQATEEDYETRTASGRLKVNIMLSVAQDEADRTSERIKFINDGKRAKGQPAGSKAPLGYAIKDRQYQIDNGTVDAARDMFAAFIRLKSVLAVKRYMLDTWGIDRAYNKYVNYFRNRLYIGEVYGIENACPALVSKQDFDLVNDIIRQRSQRCAGVGTDRVYLFSGILRCKECGKTMQSETVKKTYTYYRCRTRMFDNSACPHTKRIREDALEDYLLHEMEGIAERNNRYYKKAEKKPTHSADSIRKKMSKLKTLYLNDLIELGDYKAEYASLKRALETVEEKPETDLDALKDGLGEYDTYSRNEKKEFWTRFIRRIDADNDGAFFVTPR

SEQ ID NO: 9392 - protein, 432 aa, Unknown
  Description of Unknown: Integrase B9393 sequence
  cd00338,SM00857,G3DSA:1.10.10.2600,IPR036162,PF13408, IPR025827,G3DSA:3.40.50.1390,PS51737,IPR006119,IPR038109, PF07508,IPR011109,SSF53041,PTHR30461,PS51736, Coil,PF00239
MKAVIYARYSCDNQREESIEGQLRECKAFAERKGFKLVGTYIDRAMSAKTDNRPEFQRMIKESANELFDVVIVWKLDRFARNRYDSAHCKATLRKNGVKVISATEVISEGAEGIILESVLEGYAEYYSAELSEKVIRGMTDNALKCQYNGGSLTIGYTIDENKHYQLDTLVAPFIKEAFEMYSSGKMVKDIVKYLNDNGVRSGKGKPITKTSATSMLSNVKYKGQYKYRDIIIDGGVPRIVSDALFNKVQERLKKNKYSRSRFKAKIEYFLSTKLICGYCGEFMIGESGTSRQKIKYNYYKCTGVKRHKGCHKKTVRKADIEEIVLNDVMDKMFKEDLINDIADSVMRLQEKENTTIPLMQKQLAEIHQSINNLVKAMEMGIVSRETKQRFEELEAQRTELETDIIKQEIQEEIITREQVVEWLKEMKRLDL

SEQ ID NO: 9393 - protein, 432 aa, Unknown
  Description of Unknown: Integrase B9394 sequence
  PTHR30461:SF3,IPR036162,PS51737,IPR011109,PTHR30461, PS00397,PF00239,G3DSA:1.10.10.2600,IPR006119,SSF53041, cd00338,SM00857,IPR025827,IPR038109,PS51736, IPR006118,PF13408,G3DSA:3.40.50.1390,Coil
MRAALYIRVSSDEQARHGLSLQEQRDALTRYAQEHKMTVAGIYEDAGISARKPYKKRPALLRLLGDCKVGKVDTILFIKLDRWFRNVAGYYDVQTQLDQYGVTWQATEEDYETRTASGRLKVNIMLSVAQDEADRTSERIKFINDGKRAKGQPAGSKAPLGYAIKDRQYQIDNGTVDAARDMFAAFIRLKSVLAVKRYMLDTWGIDRAYSKYVNYFRNRLYIGEVYGIENACPALVSKQDFDLVTDIIQHRSQRCAGVDTDRVYLFPGILHCKECGKTMQSETVKKTYTYYRCRTRMLDNSACPHTKRIREDALEDYLLHEMEGIAERNNRYYKKADKKPTQSADSIRKKMGKLKTLYLNDLIELDEYKREYASLKKALEATEERPEINLDALKKELQEYETYSRDEKKEFWTRFIRRIDADNDGAFFVTPR

SEQ ID NO: 9394 - protein, 432 aa, Unknown
  Description of Unknown: Integrase B9395 sequence
  PTHR30461:SF3,SM00857,IPR006118,G3DSA:1.10.10.2600,IPR036162, PF13408,PS51737,G3DSA:3.40.50.1390,IPR025827,IPR006119, IPR038109,IPR011109,SSF53041,PTHR30461,PS00397, PS51736,cd00338,PF00239
MRAALYIRVSTEEQARHGLSLGDQRESLLAYAANNGMEVVGVYEDAGISARKPYKRRPALLRLLADCKDGKIDTILFVKLDRWFRSVAGYYAVQEELDRCHVTWQATREDYETRTASGRLKVNIMLSVAQDEADRTSERIKAINEGKRLKGQPTTWRTPIGICVKDRHYAIDEETADAARDMFPAFIRLQSILALRRYMATEWGIKRSYNKYKDALGNRLYLGEAFGVENALPALVDQETFDLAGKILERRSQRNASADRIYLFTGILRCRECGRNMQPETVKKVYKYYRCRTHTLDPADCPHILRIREDVLEDYLLREFEGIAKKYYSKSKTAEKKPPKTAEQIKRKMQKLKDLYLSDLIEIEEYKKDYTELKQQLAAINPEPIKEFDLETLRRELKEYPDLDRQAKKEFWVRTIQRIDADNDGAFFVTPS

SEQ ID NO: 9395 - protein, 432 aa, Unknown
  Description of Unknown: Integrase B9396 sequence
  PTHR30461:SF3,IPR036162,PS51737,IPR011109,PTHR30461, PS00397,PF00239,G3DSA:1.10.10.2600,IPR006119,SSF53041, cd00338,SM00857,IPR025827,IPR038109,PS51736, IPR006118,PF13408,G3DSA:3.40.50.1390,Coil
MRAALYIRVSSEEQARHGLSLQEQRDALTRYAEANKMTVVGIYEDAGISARKPYKKRPALLRLLDDCKAGKVDTILFIKLDRWFRNVAGYYDVQTRLDQYGVTWQATEEDYETRTASGRLKVNIMLSVAQDEADRTSERIKFINDGKRAKGQPAGSKAPLGYIIKDRQYQIDNDTADAARDMFAAYIRLQSVLGVKRYMLDRWGIDRAYNKYINYFHNRLYIGEVYGIENACPALVSKQDFDLVNDIIRQRSQRCAGVETDRIYLFSGLLHCKECGKTMQSETAKQVYTYYRCRTRMLDNSACQHKKRIREDALEGYLLHELEGIAERNNRYYKKAEKKPTQSADTIRKKMGKLKTLYLNDLIELDEYKREYASLKKALEAVEEKPKADLDALRNGLAEYDTYSREEKKEFWTRFIRRIDADDDGAFFVTPR

SEQ ID NO: 9396 - protein, 432 aa, Unknown
  Description of Unknown: Integrase B9397 sequence
  PTHR30461:SF3,IPR036162,PS51737,IPR011109,PTHR30461, PS00397,PF00239,G3DSA:1.10.10.2600,IPR006119,SSF53041, cd00338,SM00857,IPR025827,IPR038109,PS51736, IPR006118,PF13408,G3DSA:3.40.50.1390,Coil
MRAALYIRVSSEEQARHGLSLQEQRDTLTRYAKANKMTVVGIYEDAGISARKPYKKRPALLRLLDDCKVGKVDTILFIKLDRWFRNVAGYYDVQTRLDKYGVTWQATEEDYETRTASGRLKVNIMLSVAQDEADRASERVKFINDGKRAKGQPAGSKAPLGYIIKDRQYQIDNDTANAARDMFTAYIRLQSVLGVKKYMLETWKIDRAYTKYVNYFRNRLYIGEVYGIENACPALISKQDFDIVNDILRQRSQRCAGVETDRVYLFSGLLHCKECGKTMQSETAKQIYTYYRCRTRMLDNSACQHKKRIREDALEDYLLHELEGIAERNNRYYKKAEKKPTQSADAIRKKMSKLKTLYLNDLIELDEYKREYASLKKTLEAVEEKPETNLDALRNGLAEYDTYSREEKKEFWTRFIRRIDADDDGAFFVTPR

SEQ ID NO: 9397 - protein, 432 aa, Unknown
  Description of Unknown: Integrase B9398 sequence
  PTHR30461:SF3,IPR036162,PS51737,IPR011109,PTHR30461, PS00397,PF00239,G3DSA:1.10.10.2600,IPR006119,SSF53041, cd00338,SM00857,IPR025827,IPR038109,PS51736, IPR006118,PF13408,G3DSA:3.40.50.1390,Coil
MRAALYIRVSSEEQARHGLSLQEQRDTLARYAKANKMTAVGIYEDAGISARKPYKKRPALLRLLDDCKAGKVDTILFIKLDRWFRNVAGYYDVQTRLDQYGVTWQATEEDYETRTASGRLKVNIMLSVAQDEADRTSERIKFINDGKRAKGQPAGSKAPLGYIVKDRQYQIDNDTVDAARDMFAAYIRLQSVLGVKRYMLETWGIDRAYTKYVNYFRNRLYIGEVYGIENACPALVSKQDFDIVNDILRQRSQRCAGVETDRVYLFSGLLHCKECGKTMQSETAKQIYTYYRCRTRMLDNSACRHKKRIREDALEDYLLHELEGIAERNNRYYKKAEKKPTQSADAIRKKMSKLKTLYLNDLIELDEYKKEYTTLKKSLETVEEKPKTNLDALRNGLAEYDTYSREEKKEFWTRFIRRIDADDDGAFFVTPR

SEQ ID NO: 9398 - protein, 432 aa, Unknown
  Description of Unknown: Integrase B9399 sequence
  PTHR30461:SF3,IPR036162,PS51737,IPR011109,PTHR30461, PS00397,PF00239,G3DSA:1.10.10.2600,IPR006119,SSF53041, cd00338,SM00857,IPR025827,IPR038109,PS51736, IPR006118,PF13408,G3DSA:3.40.50.1390,Coil
MRAALYIRVSSEEQARHGLSLQEQRDALARYAKANKMTVVGIYEDAGISARKPYKKRPALLRLLDDCKAGKVDTILFIKLDRWFRNVAGYYDVQTQLDRYGVTWQATEEDYETRTASGRLKVNIMLSVAQDEADRTSERIKFINDGKRAKGQPAGSKAPLGYIIKERQYQIDNDTADAARDMFAAYIRLKSVLAVKRYMLDTWGIDRAYNKYVNYFHNRLYIGEVYGIENACPSLVSKQDFDLVNDISRQRSQRCAGVDVDRVYLFSGLLHCKECGRTMQSETAKQIYTYYRCRTRMLDNSACPHMKRIREDALEDYLLHELAEITERNNRYYKKAEKKPTQSADSIRKKMSKLKTLYLNDLIELDDYKTEYASLKKSLETVEEKPKTDLDALRNGLGEYDTYSREEKKEFWTRFIRRIDADNDGAFFVTPR

SEQ ID NO: 9399 - protein, 432 aa, Unknown
  Description of Unknown: Integrase B9400 sequence
  PTHR30461:SF3,IPR036162,PS51737,IPR011109,PTHR30461, PS00397,PF00239,G3DSA:1.10.10.2600,IPR006119,SSF53041, cd00338,SM00857,IPR025827,IPR038109,PS51736, IPR006118,PF13408,G3DSA:3.40.50.1390,Coil
MRVALYIRVSTEEQARHGLSLGDQRESLLAYAADNGMEVVGVYEDAGISARKPYKQRPALLRLLADCKNGKIDTILFVKLDRWFRNVAGYYAVQEELDRCHVTWQATREDYETRTASGRLKVNIMLSVAQDEADRTSERIKAINESKRLKGQPTTWRTPIGICVKDRHYAIDEETADAARDMFRAYIKLQSILALRRHMATEWGIKRSYNKYKDALGNRLYLGEAFGVENALPALVDQETFALAGRILERRSQRNASADRIYLFSGILRCRECGRNMQPETVKQVYKYYRCRTHMLDSADCPHILRIREDVLEDYLLREFEGIAEKYYSKSKTAEKKPPKTAEQIKRKMQKLKELYLSDLIEIEEYKKDYTELKQQLAAINPEPIKEFDLETLRRELKEYPDLDRQAKKEFWVRTIQRIDADNDGAFFVTPS

SEQ ID NO: 9400 - protein, 432 aa, Unknown
  Description of Unknown: Integrase B9401 sequence
  PTHR30461:SF3,IPR036162,PS51737,IPR011109,PTHR30461, PS00397,PF00239,G3DSA:1.10.10.2600,IPR006119,SSF53041, cd00338,SM00857,IPR025827,IPR038109,PS51736, IPR006118,PF13408,G3DSA:3.40.50.1390,Coil
MRAALYIRVSSEEQARHGLSLQEQRDTLTRYAKANKMTVVGIYEDAGISARKPYKKRPALLRLLDDCKAGKVDTILFIKLDRWFRNVAGYYDVQTRLDKYGVTWQATEEDYETRTASGRLKVNIMLSVAQDEADRTSERIKFINDGKRAKGQPAGSKAPLGYIIKDRQYQIDNDTADAARDMFAAYIRLQSVLGVKKYMLETWGIDRAYTKYVNYFRNRLYIGEVYGIENACPALISKQDFDIVNDILRQRSQRCAGVETDRVYLFSGLLHCKECGKTMQSETAKQIYTYYRCRTRMLDNSACQHKKRIREDALEDYLLHELEGIAERNNRYYKKAEKKPTQSADAIRKKMSKLKTLYLNDLIELDEYKREYTSLKKTLETVEEKPQTNLDALRNGLAEYDTYSREEKKEFWTRFIRRIDANDDGAFFVTPR

SEQ ID NO: 9401 - protein, 432 aa, Unknown
  Description of Unknown: Integrase B9402 sequence
  PTHR30461:SF3,SM00857,G3DSA:1.10.10.2600,IPR036162,PF13408, IPR025827,PS51737,G3DSA:3.40.50.1390,IPR006119,IPR038109, SSF53041,IPR011109,PTHR30461,Coil,PS51736, cd00338,PF00239
MRVALYIRVTSEEQARHGLSLQEQRDALIRYAKANKMTVVGIYEDAGISARKPYKKRPALLQLLDDCKAGKVDTILFIKLDRWFRNVAGYYDVQTQLDKYGVTWQATEEDYETRTASGRLKVNIMLSVAQDEADRASERVKFINDGKRAKGQPAGSKAPLGYIIKDRKYQIDNDTADAARDMFAAYVRLQSVLGVKKYMLETWGVDRAYTKYVNYFRNRLYIGEVYGIENACPALISKQDFDIVNDILRQRSQRCAGVETDRVYLFSGLLHCKECGKTMQSETAKQIYTYYRCRTRMLDNSACQHKKRVREDALEDYLLHELEGIAERNNRYYKKAEKKPTQSADAIRKKMGKLKTLYLNDLIELDEYKREYASLKKTLETVEEKPQTNLDALRNGLAEYDTYSREEKKEFWTRFIRRIDADDDGAFFVTPR

SEQ ID NO: 9402 - protein, 432 aa, Unknown
  Description of Unknown: Integrase B9403 sequence
  PTHR30461:SF3,IPR036162,PS51737,IPR011109,PTHR30461, PS00397,PF00239,G3DSA:1.10.10.2600,IPR006119,SSF53041, cd00338,SM00857,IPR025827,IPR038109,PS51736, IPR006118,PF13408,G3DSA:3.40.50.1390,Coil
MRAALYIRVSSEEQARHGLSLQEQRDALTRYAKANKMTVVGIYEDAGISARKPYKKRPALLRLLDDCKAGKVDTILFIKLDRWFRNVAGYYDVQTRLDKYGVTWQATEEDYETRTASGRLKVNIMLSVAQDEADRASERVKFINDGKRAKGQPAGSKAPLGYIIKDRQYQIDNGTVDAARDMFAAYIRLQSVLGVKKYMLETWKIDRAYTKYVNYFRNRLYIGEVYGIENACPALVSKQDFDIVNDILRQRSQRCAGVETDRVYLFSGLLHCKECGKTMQSETAKKIYTYYRCRTRMLDNSACQHKKRIREDALEDYLLHELEGIAERNNRYYKEAEKKPTQSADAIRKKMSKLKTLYLNDLIELDEYKQEYAILKKGLEAVEEKPKTNLDALRNGLAEYDTYSREEKKEFWTRFIRRIDADDDGAFFVTPR

SEQ ID NO: 9403 - protein, 432 aa, Unknown
  Description of Unknown: Integrase B9404 sequence
  PTHR30461:SF3,SM00857,IPR006118,G3DSA:1.10.10.2600,IPR036162, PF13408,PS51737,G3DSA:3.40.50.1390,IPR025827,IPR006119, IPR038109,SSF53041,IPR011109,PTHR30461,PS00397, PS51736,cd00338,PF00239
MRVALYIRVSTEEQARHGLSLGDQRESLLAYAADNSMEVVGVYEDAGISARKPYRQRPALLRLLADCKDGKIDTILFVKLDRWFRNVAGYYAVQEELDRCHVTWQATREDYETRTASGRLKVNIMLSVAQDEADRTSERIKAINEGKRLKGQPTTWRTPIGICVKNRHYAIDEETADAARDMFPAFIRLQSILALRRYMATEWGIKRSYNKYKDALSNRLYLGEAFGVENALPALVDQETFNLARRILEQRSQRNASADRIYLFTGILRCRECGRNMQPETVKQVYKYYRCRTHTLDPADCPHILRIREDVLEDYLLREFEGIAKKYYSKSKTAEKKPPKTAEQIKRKMQKLKELYLSDLIEIEEYKKDYTELKQQLAAINPEPIKEFDLETLRRELKEYPDLDRQAKKEFWVRTIQRIDADNDGAFFVTPS

SEQ ID NO: 9404 - protein, 432 aa, Unknown
  Description of Unknown: Integrase B9405 sequence
  PTHR30461:SF3,IPR036162,PS51737,IPR011109,PTHR30461, PS00397,PF00239,G3DSA:1.10.10.2600,IPR006119,SSF53041, cd00338,SM00857,IPR025827,IPR038109,PS51736, IPR006118,PF13408,G3DSA:3.40.50.1390,Coil
MRAALYIRVSSEEQARHGLSLQEQRDTLTRYAKSNKMTVVGIYEDAGISARKPYKKRPALLRLLDDCKAGKVDTILFIKLDRWFRSVAGYYDVQTRLDQYGVTWQATEEDYETRTASGRLKVNIMLSVAQDEADRTSERIKFINDGKRAKGQPAGSKAPLGYIVKDRQYQIDNDTADAARDMFAAYIKLQSVLGVKKYMLETWGIDRAYTKYVNYFRNRLYIGEVYGIENACPALVGKQDFDIVNDILRQRSQRCAGVETDRVYLFSGLLHCKECGKTMQSETAKQIYTYYRCRTRMLDNSACQHKKRIREDALEDYLLHELEGIAERNNRYYKKAEKKPTQSADAIRKKMGKLKTLYLNDLIELDEYKKEYAALKKSLEAVEEKPKTNLDALRNGLAEYDTYSREEKKEFWTRFIRRIDADDDGAFFVTTR

SEQ ID NO: 9405 - protein, 432 aa, Unknown
  Description of Unknown: Integrase B9406 sequence
  SM00857,G3DSA:1.10.10.2600,IPR036162,PF13408,PS51737, IPR025827,G3DSA:3.40.50.1390,IPR006119,IPR038109,PF07508, IPR011109,SSF53041,PTHR30461,PS51736,cd00338, PF00239
METKVTKIDALPKLEKKLRVAAYARVSSEKDAMLQSLSNQVSYYNNLIRSTEGWSFVGVYADEALSGTKDTRDEFQRLIKDAVEGKIDLILVKSISRFARNTVTMLETVRKLKTIGVDVYFEEQNLHSLSGEGEMVLTFLASFAQEEARSVSENQKWKVRKTFESGVQWSATKSYGYRVINKKYVVVPEEAKIVKYIFDLYINGLGFQAISNKLQSENIKPFYAKAWNKTSVKNIISNINYTGDLLLQKGYSENFLTKKYVANKGAKDQFLVEDDHEAIISKEIFNKAMDLKRGRAKYFKTSRETQIRYELSGKIKCGICGKSFNHRTTKYSQKWICITYNEKGKSVCPSKCVPDAELKRITDKVGLDNIDWVEVFPNNELKIYLRDGTNVIEKWNDYSRKNSWTDEMKAKAREQAIKKSLVNYLRGGNING

SEQ ID NO: 9406 - protein, 432 aa, Unknown
  Description of Unknown: Integrase B9407 sequence
  PTHR30461:SF3,IPR036162,PS51737,IPR011109,PTHR30461, PS00397,PF00239,G3DSA:1.10.10.2600,IPR006119,SSF53041, cd00338,SM00857,IPR025827,IPR038109,PS51736, IPR006118,PF13408,G3DSA:3.40.50.1390,Coil
MRAALYIRVSSEEQARHGLSLQEQRDTLTMYAKANKMTVVGIYEDAGISARKPYKKRPALLRLLDDCKAGEVDTILFIKLDRWFRNVAGYYDVQTQLDKYGVTWQATEEDYETRTASGRLKVNIMLSVAQDEADRTSERIKFINDGKRAKGQPAGSKAPLGYIIKDRQYQIDNGTADAARDMFAAYIRLQSVLGVKRYMLETWGIDRAYTKYVNYFRNRLYIGEVYGVENACPALVSKQDFDIVNDILRQRSQRCAGVETDRVYLFSGLLHCKECGKTMQSETAKQIYTYYRCRTRMLDSSACPHKKRIREDALEDYLLHELEGIAERNNRYYKKAEKKPTQSADAIRKKMSKLKTLYLNDLIELDEYKREYASLKKALETVEEKPKTNLDALRNGLAEYDTYSREEKKEFWTRFIRRIDADDDGAFFVTPR

SEQ ID NO: 9407 - protein, 432 aa, Unknown
  Description of Unknown: Integrase B9408 sequence
  PTHR30461:SF3,IPR036162,PS51737,IPR011109,PTHR30461, PS00397,PF00239,G3DSA:1.10.10.2600,IPR006119,SSF53041, cd00338,SM00857,IPR025827,IPR038109,PS51736, IPR006118,PF13408,G3DSA:3.40.50.1390,Coil
MRVALYIRVSSEEQARHGLSLQEQRDALIRYAKANKMTVVGIYEDAGISARKQYKKRPALLRLLGDCKDGQIDMILFVKLDRWFRNVAGYYDVQTQLDQYGVTWQATEEDYETRTASGRLKVNIMLSVAQDEADRTSERIKFINDGKRAKGQPAGSKAPLGYVITDRQYQIDNGTADAARDMFAAFIRLKSVLAVKRYMLDTWGIDRAYSKYVNYFRNRLYIGEVYGIENACPALVSKQDFDLVNDIIRQRSQRCAGVDTDRVYLFSGILHCKECGKTMQSETVKKTYTYYRCRTRMLDNTSCPHTKRIREDVLEDYLLHELAGIAERNNRYYKKAEKKPTQSADSIRKKMSKLKTLYLNDLIELDDYKAEYASLKKMLETVEEKPKTDLDALKNGLGEYGTYSREEKKEFWTRFIKRIDADNDGAFFVTPR

SEQ ID NO: 9408 - protein, 432 aa, Unknown
  Description of Unknown: Integrase B9409 sequence
  PTHR30461:SF3,SM00857,G3DSA:1.10.10.2600,IPR036162,PF13408, PS51737,IPR025827,G3DSA:3.40.50.1390,IPR006119,IPR038109, IPR011109,SSF53041,PTHR30461,Coil,PS51736, cd00338,PF00239
MRAALYMRVTSEEQARHGLSLQEQRDALIRYAKANKMTVVGIYEDAGISARKPYKKRPALLRLLDDCKAGKVDTILFIKLDRWFRNVAGYYDVQTQLDKYGVTWQATEEDYETRTASGRLKVNIMLSVAQDEADRASERVKFITDGKRAKGQPAGSKAPLGYIIKDRQYQIDNDTVDAARDMFAAYIRLQSVLGVKKYMLETWGIDRAYTKYVNYFRNRLYIGEVYGIENSCPALISKRDFDIVNDILRQRSQRCAGVETDRVYLFSGLLHCKECGKTMQSETAKQIYTYYRCRTRMLDNSACPHTKRIREDALEDYLLREVVEIAERTNRSYKQEKKKPPQSADAIRKKMSKLKTLYLNDLIELDEYKREYASLKKALEAVKEKPKTNLDALRNGLAEYDTYSREEKKEFWTRFIRRIDADDDGAFFVTPR

SEQ ID NO: 9409 - protein, 432 aa, Unknown
  Description of Unknown: Integrase B9410 sequence
  PTHR30461:SF3,SM00857,IPR006118,G3DSA:1.10.10.2600,IPR036162, PF13408,IPR025827,G3DSA:3.40.50.1390,PS51737,IPR006119, IPR038109,IPR011109,SSF53041,PTHR30461,PS00397, PS51736,cd00338,PF00239
MRAALYIRVSTEEQARHGLSLGDQRESLLAYAADNGMEVVGVYEDAGISARKPYKRRPALLRLLEDCKDGKIDTILFVKLDRWFRSVAGYYAVQEELDRCHVTWQATREDYETRTASGRLKVNIMLSVAQDEADRTSERIKAINEGKRLKGQPTTWRTPIGICVKDRHYAIDEETADAARDMFPAFIRLQSILALRRYMATEWGIKRSYNKYKDALSNRLYLGEAFGVENALPALVDQETFNLAGRILEQRSQRNASADRIYLFTGILRCRECGRNMQPETVKQVYKYYRCRTHTLDPADCPHILRIREDVLEDYLLREFEGIAKKYYSKSKTAEKKPPKTAEQIKRKMQKLKDLYLSDLIEIEEYKKDYTELKQQLAAINPEPIKEFDLETLRRELKEYPDLDRQAKKEFWVRTIQRIDADNDGAFFVTPS

SEQ ID NO: 9410 - protein, 432 aa, Unknown
  Description of Unknown: Integrase B9411 sequence
  PTHR30461:SF3,SM00857,IPR006118,G3DSA:1.10.10.2600,IPR036162, PF13408,PS51737,G3DSA:3.40.50.1390,IPR025827,IPR006119, IPR038109,SSF53041,IPR011109,PTHR30461,PS00397, PS51736,cd00338,PF00239
MRAALYIRVSTEEQARHGLSLGDQRESLLAYAADNGMEVVGIYEDAGISARKPYKQRPALLRLLADCKDGKVDTILFVKLDRWFRSVAGYYAVQEELDRCHVTWQATREDYETRTASGRLKVNIMLSVAQDEADRTSERIKAINEGKRLKGQPTTWRTPIGICVKNRHYAIDEETADAARDMFPAFIRLQSILALRRYMATEWGIKRSYNKYKDALSNRLYLGEAFGVENVLPSLVDQETFDLAGKILERRSQRNASADRIYLFTGILRCRECGRNMQPETVKQVYKYYRCRTHTLDPADCPHILRIREDVLEDYLLREFEGIAKKYYSKSKTAEKKPPKTAEQIKRKMQKLKDLYLSDLIEIEEYKKDYTDLKQQLAAINPEPVKEFDLETLRRELKEYPDLDRQAKKEFWVRTIQRIDADNDGAFFVTPS

SEQ ID NO: 9411 - protein, 432 aa, Unknown
  Description of Unknown: Integrase B9412 sequence
  PTHR30461:SF3,IPR036162,PS51737,IPR011109,PTHR30461, PS00397,PF00239,G3DSA:1.10.10.2600,IPR006119,SSF53041, cd00338,SM00857,IPR025827,IPR038109,PS51736, IPR006118,PF13408,G3DSA:3.40.50.1390,Coil
MRAALYIRVSSEEQARHGLSLQEQRDALTRYAKANKMTVVGIYEDAGISARKPYKKRPALLRLLDDCKAGKVDTILFIKLDRWFRNIAGYYDVQTQLDKYGVTWQATEEDYETRTASGRLKVNIMLSVAQDEADRTSERIKFINDGKRAKGQPAGSKAPLGYIVKDRQYQIDNGTVDAARDMFTAYIRLQSVLGVKKYMLETWGIDRAYTKYVNYFRNRLYIGEVYGIENACPALISKQDFDIVNDILRQRSQRCAGVETDRVYLFSGLLHCKECGKTMQSETAKQIYTYYRCRTRMLDNSACQHKKRIREDTLEDYLLHELEGIAERNNRYYKKAEKKPTKNADAIRKKMGKLKTLYLNDLIELDEYKREYVSLKKALEAVEEKPKTNLDALRNGLAEYGTYSREEKKEFWTRFIRRIDADADGAFFVTPR

SEQ ID NO: 9412 - protein, 432 aa, Unknown
  Description of Unknown: Integrase B9413 sequence
  PTHR30461:SF3,IPR036162,PS51737,IPR011109,PTHR30461, PS00397,PF00239,G3DSA:1.10.10.2600,IPR006119,SSF53041, cd00338,SM00857,IPR025827,IPR038109,PS51736, IPR006118,PF13408,G3DSA:3.40.50.1390,Coil
MRAALYIRVSSEEQARHGLSLQEQRDTLTRYAKANKMTVAGIYEDAGISARKPYKKRHALLRLLDDCKAGKVDTILFIKLDRWFRNVAGYYDVQTRLDQYGVTWQATEEDYETRTASGRLKVNIMLSVAQDEADRTSERIKFINDGKRAKGQPAGSKAPLGYIIKDRQYQIDNDTADAARDMFAAYIKLQSVLGVKKYMLETWAIDRAYTKYVNYFRNRLYIGEVYGIENACPALISKQDFDIVNDILRQRSQRCAGVETDRVYLFSGLLHCKECGKTMQSETAKQIYTYYRCRTRMLDNSACRHKKRIREDALEDYLLHELEGIAERNNRYYKKAAKKPTQNADAIRKKMSKLKTLYLNDLIELDEYKREYASLKKSLEAVEEKPKTNLDALRNGLAEYGTYSREEKKEFWTRFIRRIDADDDGAFFVTPR

SEQ ID NO: 9413 - protein, 432 aa, Unknown
  Description of Unknown: Integrase B9414 sequence
  PTHR30461:SF3,IPR036162,PS51737,IPR011109,PTHR30461, PS00397,PF00239,G3DSA:1.10.10.2600,IPR006119,SSF53041, cd00338,SM00857,IPR025827,IPR038109,PS51736, IPR006118,PF13408,G3DSA:3.40.50.1390,Coil
MRVALYIRVSSEEQARHGLSLQEQRDTLTRYTQEHKMTVVGIYEDAGISARKPYKKRPALLRLLGDCKAGKIDTILFIKLDRWFRNVAGYYDVQTQLDQYGVTWQATEEDYETRTASGRLKVNIMLSVAQDEADRTSERIKFINDGKRAKGQPAGSKAPLGYAIKDRQYQIDNGTVDAARDMFAAFIRLKSVLAVKRYMLDTWGIDRAYNKYVNYFRNRLYIGEVYGIENACPALVSKQDFDLVNDIIRQRSQRCAGVGTDRVYLFSGILRCKECGKTMQSETVKKTYTYYRCRTRMLDNSACPHTKRIREDALEDYLLHEMEGIAERNNRYYKKADKKPTQSADSIRKKMGKLKTLYLNDLIELDEYKREYASLKKALEATEERPEINLDALKKELQEYETYSRDEKKEFWTRFIRRIDADNDGAFFVTPR

SEQ ID NO: 9414 - protein, 432 aa, Unknown
  Description of Unknown: Integrase B9415 sequence
  PTHR30461:SF3,IPR036162,PS51737,IPR011109,PTHR30461, PS00397,PF00239,G3DSA:1.10.10.2600,IPR006119,SSF53041, cd00338,SM00857,IPR025827,IPR038109,PS51736, IPR006118,PF13408,G3DSA:3.40.50.1390,Coil
MRVALYIRVSSEEQARHGLSLQEQRDALIRYAKANKMTVVGIYEDAGISARKPYKKRPALLRLLDDCKAGKVDTILFIKLDRWFRNVAGYYDVQTQLDKYGVTWQATEEDYETRTASGRLKVNIMLSVAQDEADRTSERIKFINDGKRAKGQPAGSKAPLGYVIKDRQYQIDNDTADAARDMFAAYIRLQSVLGVKRYMLETWGIDRAYNKYVNYFHNRLYIGEVYGIENACPALISKQDFDIVNDILRQRSQRCAGVETDRVYLFSGLLHCKECGKTMQSETAKQIYTYYRCRTRMLDNSACQHKKRIREDALEDYLLHELEGIAERNNRYYKKAEKKPTQSADAIRKKMSKLKTLYLNDLIELDEYKKEYTTLKKSLEAVEENPKTNLDALRNGLAEYDTYSREEKKEFWTRFIRRIDADDDGAFFVTPR

SEQ ID NO: 9415 - protein, 432 aa, Unknown
  Description of Unknown: Integrase B9416 sequence
  PTHR30461:SF3,IPR036162,PS51737,IPR011109,PTHR30461, PS00397,PF00239,G3DSA:1.10.10.2600,IPR006119,SSF53041, cd00338,SM00857,IPR025827,IPR038109,PS51736, IPR006118,PF13408,G3DSA:3.40.50.1390,Coil
MRAALYIRVSSEEQARHGLSLQEQRDALTRYAEANKMTVVGIYEDAGISARKPYKKRPALLRLLDDCKAGKVDTILFIKLDRWFRNVAGYYDVQTRLDQYGVTWQATEEDYETRTASGRLKVNIMLSVAQDEADRTSERIKFINDGKRAKGQPAGSKAPLGYIIKDRQYQIDNDTADAARDMFAAYIRLQSVLGVKRYMLDRWGIDRAYNKYINYFHNRLYIGEVYGIENACPALVSKQDFDLVNDIIRQRSQRCAGVETDRIYLFSGLLHCKECGKTMQSETAKQVYTYYRCRTRMLDNSACQHKKRIREDALEDYLLHELEGIAERNNRYYKKAEKKPTQSADAIRKKMSKLKTLYLNDLIELDEYKKEYTTLKKSLEAVEENPKTNLDALRNGLAEYDTYSREEKKEFWTRFIRRIDADDDGAFFVTPR

SEQ ID NO: 9416 - protein, 432 aa, Unknown
  Description of Unknown: Integrase B9417 sequence
  SM00857,G3DSA:1.10.10.2600,IPR036162,PF13408,PS51737, G3DSA:3.40.50.1390,IPR025827,IPR006119,IPR038109,PF07508, IPR011109,SSF53041,PTHR30461,PS51736,cd00338, PF00239
METKITKIDALPKLEKKLRVAAYARVSSEKDAMLQSLSNQVSYYNNLIRSTEGWSFVGVYADEALSGTKDTRDEFQRLIKDAVEGEIDLILVKSISRFARNTVTMLETVRKLKAIGVDVYFEEQNLHSLSGEGEMVLTFLASFAQEEARSVSENQKWKVRKTFESGVQWSATKSYGYRVINKKYVVVPEEAKIVKYIFDLYINGLGFQAISNKLQSENIKPFYAKAWNKTSVKNIISNINYTGDLLLQKGYSENFLTKKYVANKGAKDQFLVEDDHEAIISKEIFNKAMDLKRGRAKYFKASRETQIRYELSGKIKCGICGKSFNHRTTKYSQKWICITYNEKGKSVCPSKCVPDAELKRITDKVGLDNIDWVEVFPNNELKIYLRDGTNVIEKWNDYSRKNSWTDEMKAKAREQAIKKSLVNYLKGGNING

SEQ ID NO: 9417 - protein, 432 aa, Unknown
  Description of Unknown: Integrase B9418 sequence
  PTHR30461:SF3,IPR036162,PS51737,IPR011109,PTHR30461, PS00397,PF00239,G3DSA:1.10.10.2600,IPR006119,SSF53041, cd00338,SM00857,IPR025827,IPR038109,PS51736, IPR006118,PF13408,G3DSA:3.40.50.1390,Coil
MRVALYIRVSSEEQARHGLSLQEQRDTLTRYAQEHKMAVVGIYEDAGISARKPYKKRPALLRLLCDCKAGKVDTILFIKLDRWFRNVAGYYDVQTQLDQYGVTWQATEEDYETRTASGRLKVNIMLSVAQDEADRTSERIKFINDGKRAKGQPAGSKAPLGYVIKDRRYQIDNDTADAARDMFAAFIRLKSVLAVKRYMLDTWGIDRAYSKYVNYFRNRLYIGEVYGIENACPALVSKQDFDLVNDIIRHRSQRCAGVDTDRVYLFSGLLHCKECGKTMQSETVKKTYTYYRCRTRMLDNSACPHTKRIREDALEDYLLNELEGIAERNNRYYKKAEKKPTHSADSIRKKMSKLKTLYLNDLIELDDYKAEYASLKRTLETVKEKPKTDLDALRNGLSEYDTYSREEKKEFWTRFIRRIDADNDGAFFVTPR

SEQ ID NO: 9418 - protein, 432 aa, Unknown
  Description of Unknown: Integrase B9419 sequence
  PTHR30461:SF3,SM00857,G3DSA:1.10.10.2600,IPR036162,PF13408, PS51737,IPR025827,G3DSA:3.40.50.1390,IPR006119,IPR038109, IPR011109,SSF53041,PTHR30461,Coil,PS51736, cd00338,PF00239
MRVALYIRVTSEEQARHGLSLQEQRDALIRYAKANKMTVVGIYEDAGISARKPYKKRPALLQLLDDCKAGKVDTILFIKLDRWFRNVAGYYDVQTQLDKYGVTWQATEEDYETRTASGRLKVNIMLSVAQDEADRASERVKFINDGKRAKGQPAGSKAPLGYIIKDRKYQIDNDTADAARDMFAAYVRLQSVLGVKKYMLETWGVDRAYTKYVNYFRNRLYIGEVYGIENACPALVSKQDFDIVNDILRQRSQRCAGVETDRVYLFSGLLHCKECGKTMQSETAKQIYTYYRCRTRMLDNSACQHKKRVREDALEDYLLHELEGIAERNNRYYKKAEKKPTQSADAIRKKMGKLKTLYLNDLIELDEYKKEYTTLKKSIEAVEQKPKTNLDALRNGIAEYDTYSREEKKEFWTRFIRRIDADDDGAFFVTPR

SEQ ID NO: 9419 - protein, 432 aa, Unknown
  Description of Unknown: Integrase B9420 sequence
  PTHR30461:SF3,IPR036162,PS51737,IPR011109,PTHR30461, PS00397,PF00239,G3DSA:1.10.10.2600,IPR006119,SSF53041, cd00338,SM00857,IPR025827,IPR038109,PS51736, IPR006118,PF13408,G3DSA:3.40.50.1390,Coil
MRAALYIRVSSDEQARHGLSLQEQRDALTRYAQEHKMTVAGIYEDAGISARKPYKKRPALLRLLGDCKVGKVDTILFIKLDRWFRNVAGYYDVQTQLDQYGVTWQATEEDYETRTASGRLKVNIMLSVAQDEADRTSERIKFINDGKRAKGQPAGSKAPLGYAIKDRQYQIDNGTVDAARDMFAAFIRLKSVLAVKRYMLDKWCIDRAYSKYVNYFRNRLYIGEVYGIENACPALVSKQDFDLVNDIIRQRSQRCAGVGTDRVYLFSGILRCKECGKTMQSETVKKTYTYYRCRTRMLDNSACPHTKRIREDALEDYLLHEMEGIAERNNRYYKKAEKKPTHSADSIRKKMSKLKTLYLNDLIELGDYKAEYASLKRALETVEEKPETDLDALKDGLGEYDTYSRNEKKEFWTRFIRRIDADNDGAFFVTPR

SEQ ID NO: 9420 - protein, 432 aa, Unknown
  Description of Unknown: Integrase B9421 sequence
  PTHR30461:SF3,IPR036162,PS51737,IPR011109,PTHR30461, PS00397,PF00239,G3DSA:1.10.10.2600,IPR006119,SSF53041, cd00338,SM00857,IPR025827,IPR038109,PS51736, IPR006118,PF13408,G3DSA:3.40.50.1390,Coil
MRAALYIRVSSEEQARHGLSLQEQRDALTRYAKANKMTVVGIYEDAGISARKPYKKRPALLRLLDDCKAGKVDTILFIKLDRWFRNVAGYYDVQTQLDRYGVTWQATEEDYETRTASGRLKVNIMLSVAQDEADRTSERIKFINDGKRAKGQPAGSKAPLGYIIKDRQYQIDNDTADAARDMFAAYIRLKSVLAVKRYMLETWSIDRAYNKYVNYFRNRLYIGEVYGIENACPSLVSKQDFDLVNDISRQRSQRCAGVDVDRVYLFSGLLHCKECGKTMQSETAKQIYTYYRCRTRMLDNSACPHMKRIREDALEDYLLHELAGITERNNRYYKKAEKKPTQSADAIRKKMSKLKTLYLNDLIELDDYKAEYASLKKSLETVEEKPKTDLDALRNGLGEYDTYSREEKKEFWTRFIRRIDADNDGAFFVTPR

SEQ ID NO: 9421 - protein, 432 aa, Unknown
  Description of Unknown: Integrase B9422 sequence
  PTHR30461:SF3,IPR036162,PS51737,IPR011109,PTHR30461, PS00397,PF00239,G3DSA:1.10.10.2600,IPR006119,SSF53041, cd00338,SM00857,IPR025827,IPR038109,PS51736, IPR006118,PF13408,G3DSA:3.40.50.1390,Coil
MRVALYIRVSSEEQARHGLSLQEQRDTLTRYTQEHKMTVVGIYEDAGISARKPYKKRPALLRLLGDCKAGKVDTILFIKLDRWFRNVAGYYDVQTQLDQYGVTWQATEEDYETRTASGRLKVNIMLSVAQDEADRTSERIKFINDGKRAKGQPAGSKAPLGYVIKDRQYQIDSGTVDAARDMFASFIRLKSVLAVKRYMLDTWGIDRAYNKYVNYFRNRLYIGEVYGIENACPALVSKQDFDLVNDIIRQRSQRCAGVGTDRVYLFSGILRCKECGKTMQSETVKKTYTYYRCRTRMLDNSACPHTKRIREDALEDYLLHEMEGIAERNNRYYKKADKKPTQSADSIRKKMGKLKTLYLNDLIELDEYKREYASLKKALEATEERPEINLDALKKELQEYETYSRDEKKEFWTRFIRRIDADNDGAFFVTPR

SEQ ID NO: 9422 - protein, 432 aa, Unknown
  Description of Unknown: Integrase B9423 sequence
  PTHR30461:SF3,IPR036162,PS51737,IPR011109,PTHR30461, PS00397,PF00239,G3DSA:1.10.10.2600,IPR006119,SSF53041, cd00338,SM00857,IPR025827,IPR038109,PS51736, IPR006118,PF13408,G3DSA:3.40.50.1390,Coil
MRAALYIRVSSEEQARHGLSLQEQRDALTRYAKANKMTVVGIYEDAGISARKPYKKRPALLRLLDDCKAGKVDTILFIKLDRWFRNVAGYYDVQTQLDRYGVTWQATEEDYETRTASGRLKVNIMLSVAQDEADRTSERIKFINDGKRAQGQPAGSKAPLGYIIKERQYQIDNDTADAARDMFAAYIRLKSVLAVKRYMLDTWGIDRAYNKYVNYFHNRLYIGEVYGIENACPSLVSKQDFDLVNDISRQRSQRCAGVDVDRVYLFSGLLHCKECGKTMQSETAKQIYTYYRCRTRMLDNSACPHMKRIREDALEDYLLHELAEITERNNRYYKKAEKKPTQSADAIRKKMSKLKTLYLNDLIELDDYKAEYASLKKSLETVEEKPKTDLDALRNGLGEYDTYSREEKKEFWTRFIRRIDADNDGAFFVTPR

SEQ ID NO: 9423 - protein, 432 aa, Unknown
  Description of Unknown: Integrase B9424 sequence
  PTHR30461:SF3,IPR036162,PS51737,IPR011109,PTHR30461, PS00397,PF00239,G3DSA:1.10.10.2600,IPR006119,SSF53041, cd00338,SM00857,IPR025827,IPR038109,PS51736, IPR006118,PF13408,G3DSA:3.40.50.1390,Coil
MRVALYIRVSSEEQARHGLSLQEQRDALIRYAKANKMTVAGIYEDAGISARKPYKKRPALLRLLDDCKAGKVDTILFIKLDRWFRNVAGYYDVQTRLDQYGVTWQATEEDYETRTASGRLKVNIMLSVAQDEADRTSERIKFINDGKRAKGQPAGSKAPLGYIIKDRKYQIDNDTADAARDMFAAYIKLQSVLGVKRYMLETWGIDRAYNKYVNYFHNRLYIGEVYGIENVCPALISKQDFDIVNDILRQRSQRCAGIKTDRVYLFSGLLHCKECGKTMQSETAKQIYTYYRCRTRMLDNSACQHKKRIREDALEDYLLHELEGIAERNNRYYKKAEKKPTQSADAIRKKMDKLKTLYLNDLIELDEYKKEYTTLKKSLEAVEEKPKTNLDALRNGLAEYDTYSREEKKEFWTRFIRRIDADNDGAFFVTPR

SEQ ID NO: 9424 - protein, 432 aa, Unknown
  Description of Unknown: Integrase B9425 sequence
  PTHR30461:SF3,IPR036162,PS51737,IPR011109,PTHR30461, PS00397,PF00239,G3DSA:1.10.10.2600,IPR006119,SSF53041, cd00338,SM00857,IPR025827,IPR038109,PS51736, IPR006118,PF13408,G3DSA:3.40.50.1390,Coil
MRAALYIRVSSEEQARHGLSLQEQRGALTKYAKANKMTVVGIYEDAGISARKPYKKRPALLRLLDDCKAGKIDTILFIKLDRWFRNVAGYYDVQTQLDKYGVTWQATEEDYETRTASGRLKVNIMLSVAQDEADRTSERIKFINDGKRAKGQPAGSKAPLGYIIKDRQYQIDNDTADAARDMFAAYIRLQSVLGVKKYMLETWKIDRAYTKYVNYFRNRLYIGEVYGIENACPALISKQDFDIVNDILRQRSQRCAGVETDRVYLFSGLLHCKECGKTMQSETAKQIYTYYRCRTRMLDNSACPHTKRIREDALEDYLLREVVEIAERTNRSYKQEKKKPTQSADAIRKKMGKLKTLYLNDLIELDEYKREYASLKKALEAVEEKPKTNLDALRNGLAEYDTYSREEKKEFWTRFIRRIDADDDGAFFVTPR

SEQ ID NO: 9425 - protein, 432 aa, Unknown
  Description of Unknown: Integrase B9426 sequence
  PTHR30461:SF3,IPR036162,PS51737,IPR011109,PTHR30461, PS00397,PF00239,G3DSA:1.10.10.2600,IPR006119,SSF53041, cd00338,SM00857,IPR025827,IPR038109,PS51736, IPR006118,PF13408,G3DSA:3.40.50.1390,Coil
MRAALYIRVSSDEQARHGLSLQEQRDALTRYAQEHKMTVAGIYEDAGISARKPYKKRPALLRLLGDCKVGKVDTILFIKLDRWFRNVAGYYDVQTQLDQYGVTWQATEEDYETRTASGRLKVNIMLSVAQDEADRTSERIKFINDGKRAKGQPAGSKAPLGYAIKDRQYQIDNGTVDAARDMFAAFIRLKSVLAVKRYMLDTWGIDRAYSKYVNYFRNRLYIGEVYGIENACPALVSKQDFDLVTDIIQHRSQRCAGVDTDRVYLFSGILRCKECGKTMQSETVKKTYTYYRCRTRMLDNSACPHTKRIREDALEDYLLHEMEGIAERNNRYYKKADKKPTQSADSIRKKMGKLKTLYLNDLIELDEYKREYASLKKALEATEESPEINLDALKKELQEYETYSRDEKKEFWTRFIRRIDADNDGAFFVTPR

SEQ ID NO: 9426 - protein, 432 aa, Unknown
  Description of Unknown: Integrase B9427 sequence
  PTHR30461:SF3,SM00857,IPR006118,G3DSA:1.10.10.2600,IPR036162, PF13408,PS51737,IPR025827,G3DSA:3.40.50.1390,IPR006119, IPR038109,IPR011109,SSF53041,PTHR30461,PS00397, PS51736,cd00338,PF00239
MRVALYVRVSTEEQAVHGLSVDDQKDSLKRWAEENKHKVVDYYVDAGVSGRKSVSKRPELQRLLSDVEAGKIDLVAFTKLDRWFRNIGEFYKAQEVLDAHGVVWQATYEDYETATAAGRLKVNIMLSVAQDEADRTSERVKRIMQHKRELGLCPAGKTPIGLKAVESRLCIDEETAHIARRMFEDYIATGSVNHVKKMLVSEFGIMRANHHIKGALSNERYIGLNNGIKVCDALIPPEDFALVQRMLTARSIRNNGSKHTWLFSGLVWCAECGHRLVTHSTRQRGTDYFYYRCKNYEIGICRHKKRINEATLEKYLLAKLPIEVQAHNAKLKAGKTKPPVDTAAIKRKMDKLTDLYLADLISREKYEIEYTALKEKLNVPPEPKPINEELVMSLLDAYDKLPPRGKKEVWNRFIRRIVVSENGDIFFELVWL

SEQ ID NO: 9427 - protein, 432 aa, Unknown
  Description of Unknown: Integrase B9428 sequence
  PTHR30461:SF3,IPR036162,PS51737,IPR011109,PTHR30461, PS00397,PF00239,G3DSA:1.10.10.2600,IPR006119,SSF53041, cd00338,SM00857,IPR025827,IPR038109,PS51736, IPR006118,PF13408,G3DSA:3.40.50.1390,Coil
MRAALYIRVSSDEQARHGLSLQEQRDALTRYAQEHKMTVAGIYEDAGISARKPYKKRPALLRLLGDCKVGKVDTILFIKLDRWFRNVAGYYDVQTQLDQYGVTWQATEEDYETRTASGRLKVNIMLSVAQDEADRTSERIKFINDGKRAKGQPAGSKAPLGYAIKDRQYQIDNGTVDAARDMFAAFIRLKSVLAVKRYMLDTWGIDRAYSKYVNYFRNRLYIGEVYGIENACPALVSKQDFDLVTDIIRHRSQRCAGVDTDRVYLFPGILHCKECGKTMQSETVKKTYTYYRCRTRMLDNSACPHTKRIREDALEDYLLHELEGIAERNNRYYKKADKKPTQSADSIRKKMGKLKTLYLNDLIELDEYKREYASLKKALEATEERPEINLDALKKELQEYETYSRDEKKEFWTRFIRRIDADNDGAFFVTPR

SEQ ID NO: 9428 - protein, 432 aa, Unknown
  Description of Unknown: Integrase B9429 sequence
  PTHR30461:SF3,SM00857,IPR006118,G3DSA:1.10.10.2600,IPR036162, PF13408,IPR025827,G3DSA:3.40.50.1390,PS51737,IPR006119, IPR038109,SSF53041,IPR011109,PTHR30461,PS00397, PS51736,cd00338,PF00239
MRVALYVRVSTEEQAVHGLSVDDQKESLKKWAEENKHKVVDYYVDAGVSGRKSVSKRPELQRLLSDVEAGKIDLVAFTKLDRWFRNIGEFYKAQEVLDAHGVVWQATYEDYETATAAGRLKVNIMLSVAQDEADRTSERVKRIMQHKRELGLCPAGKTPIGLKAVESRLCIDEETAHIARRMFEDYIATGSVNHVKKMLVSEFGIMRANHHIKGALSNERYIGLNSGIKVCDALIPPEDFALVQRMLTARSIRNNGSRHTWLFSGLVWCAECGHRLVTHSTRQRGTDYFYYRCKNYELGICRHKKRINEATLEKYLLAKLPIEVQAHNAKLKAGKTKPPVDTAAIKRKMDKLTDLYLADLISREKYEMEYTSLKEKLKVPPEPKPINEELVMSVLDAYDKLPPSGKKEVWNRFIRRIVISENGDIFFELVWL

SEQ ID NO: 9429 - protein, 432 aa, Unknown
  Description of Unknown: Integrase B9430 sequence
  PTHR30461:SF3,IPR036162,PS51737,IPR011109,PTHR30461, PS00397,PF00239,G3DSA:1.10.10.2600,IPR006119,SSF53041, cd00338,SM00857,IPR025827,IPR038109,PS51736, IPR006118,PF13408,G3DSA:3.40.50.1390,Coil
MRAALYIRVSSEEQARHGLSLQEQRDALTRYAKANKMTVVSIYEDAGISARKPYKKRPALLRLLDDCKAGKVDTILFIKLDRWFRNVAGYYDVQTRLDKYGVTWQATEEDYETRTASGRLKVNIMLSVAQDEADRTSERIKFINDGKRAKGQPAGSKAPLGYVIKDRQYQIDNNTVAAARDMFAAYIRLQSVLGVKRYMLETWGIDRSYNKYINYFRNRLYIGEVYGIENACPALVSKQDFDIVNDILRQRSQRCAGVETDRVYLFSGLLHCKECGKTMQSETIKQTYTYYRCRTRMLDNSACQHKKRIREDALEDYLLHELEGIAARNNRYYKKAEKKPTQSADAIRKKMDKLKTLYLNDLIELDEYKKEYTALKKSLETVEEKPQTNLDALRNGLAEYDTYSREEKKEFWTRFIRRIDADDDGAFFVTPR

SEQ ID NO: 9430 - protein, 432 aa, Unknown
  Description of Unknown: Integrase B9431 sequence
  PTHR30461:SF3,SM00857,IPR006118,G3DSA:1.10.10.2600,IPR036162, PF13408,PS51737,G3DSA:3.40.50.1390,IPR025827,IPR006119, IPR038109,SSF53041,IPR011109,PTHR30461,PS00397, PS51736,cd00338,PF00239
MRAALYIRVSTEEQARHGLSLGDQRESLLAYAADNGMEVVGVYEDAGISARKPYKRRPALLRLLADCKDGKIDTILFVKLDRWFRSVAGYYAVQEELDRCHVTWQATREDYETRTASGRLKVNIMLSVAQDEADRTSERIKAINEGKRLKGQPTTWRTPIGICVKNRHYAIDEETADAARDMFPAFIRLQSILALRRYMATEWGIKRSYNKYKDALGNRLYLGEAFGVENALPALIDQETFDLAGKILERRSQRNASADRIYLFTGILRCRECGRNMQPETVKQVYKYYRCRTHTLDPADCPHILRIREDVLEDYLLREFEGIAKKYYSKSKTAEKKPPKTAEQIKRKMQKLKELYLSDLIEIEEYKKDYTELKQQLAAINPEPIKEFDLETLRRELKEYPDLDRQAKKEFWVRTIQRIDADNDGAFFVTPS

SEQ ID NO: 9431 - protein, 432 aa, Unknown
  Description of Unknown: Integrase B9432 sequence
  PTHR30461:SF3,IPR036162,PS51737,IPR011109,PTHR30461, PS00397,PF00239,G3DSA:1.10.10.2600,IPR006119,SSF53041, cd00338,SM00857,IPR025827,IPR038109,PS51736, IPR006118,PF13408,G3DSA:3.40.50.1390,Coil
MRAALYIRVSSEEQARHGLSLQEQRDTLTRYANANKMTVVGIYEDAGISARKPYKKRPALLRLLDNCKTGKVDTILFIKLDRWFRNVAGYYDVQTQLDKYGVTWQATEEDYETRTASGRLKVNIMLSVAQDEADRTSERIKFINDGKRAKGQPAGSKAPLGYIIKDRQYQIDNDTADAARDMFAAYVRLQSVLGVKRYMLETWGIDRAYTKYVNYFRNRLYIGEVYGIENACPALVSKQDFDIVNDILRQRSQRCAGVETDRVYLFSGLLHCKECGKTMQSETAKHIYTYYRCRTRMLDNSACQHKKRIREDALEDYLLHELEGIAERNNRYYKKAEKKPTQSADAIRKKMSKLKTLYLNDLIELDEYKREYASLKKVLEAVEEKPKTNLDALRNGLAEYDTYSREEKKEFWTRFIRRIDADDDGAFFVTPR

SEQ ID NO: 9432 - protein, 432 aa, Unknown
  Description of Unknown: Integrase B9433 sequence
  PTHR30461:SF3,IPR036162,PS51737,IPR011109,PTHR30461, PS00397,PF00239,G3DSA:1.10.10.2600,IPR006119,SSF53041, cd00338,SM00857,IPR025827,IPR038109,PS51736, IPR006118,PF13408,G3DSA:3.40.50.1390,Coil
MRAALYIRVSSEEQARHGLSLQEQRDALTKYAKANKMTVVGIYEDAGISARKPYKKRPALLRLLDDCKAGKVDTILFIKLDRWFRNVAGYYDVQTQLDKYGVTWQATEEDYETRTASGRLKVNIMLSVAQDEADRTSERIKFINDGKRAKGQPAGSKAPLGYIIKDRQYQIDNDTVAAARDMFAAYIRLQSVLGVKRYMLETWGIDRAYTKYVNYFRNRLYIGEVYGVENACPALISKQNFDIVNDILRQRSQRCAGVETDRVYLFSGLLHCKECGKTMQSETAKQIYTYYRCRTRMLDNSACQHKKRIREDALEDYLLHELEGIAERNNRYYKKTEKKPTQNADAIRKKMSKLKTLYLNDLIELDEYKREYASLKKTLETVEEKPQTNLDALRNGLAEYDTYSREEKKEFWTRFIRRIDADDDGAFFVTPR

SEQ ID NO: 9433 - protein, 432 aa, Unknown
  Description of Unknown: Integrase B9434 sequence
  PTHR30461:SF3,IPR036162,PS51737,IPR011109,PTHR30461, PS00397,PF00239,G3DSA:1.10.10.2600,IPR006119,SSF53041, cd00338,SM00857,IPR025827,IPR038109,PS51736, IPR006118,PF13408,G3DSA:3.40.50.1390,Coil
MRAALYIRVSSEEQARHGLSLQEQRDTLTRYAKANKMTVVGIYEDAGISARKPYKKRPALLRLLDDCKAGKVDTILFIKLDRWFRNVAGYYDVQTKLDKYGVTWQATEEDYETRTASGRLKVNIMLSVAQDEADRTSERIKFINDGKRAKGQPAGSKAPLGYIVKDRQYQIDNGTVAAARDMFAAYIRLQSVLGVKKYMLETWGIDRAYTKYVNYFRNRLYIGEVYGIENACPALISKQDFDIVNDILRQRSQRCAGVETDRVYLFSGLLHCKECGKTMQSETAKQIYTYYRCRTRMLDNSACQHKKRIREDALEDYLLHELEGIAERNNRYYKKAEKKPTQSADAIRKKMSKLKTLYLNDLIELDEYKQEYASLKKSLEAVEEKPKTNLDALRNGLAEYDTYSREEKKEFWTRFIRRIDADDDGAFFVTPR

SEQ ID NO: 9434 - protein, 432 aa, Unknown
  Description of Unknown: Integrase B9435 sequence
  PTHR30461:SF3,IPR036162,PS51737,IPR011109,PTHR30461, PS00397,PF00239,G3DSA:1.10.10.2600,IPR006119,SSF53041, cd00338,SM00857,IPR025827,IPR038109,PS51736, IPR006118,PF13408,G3DSA:3.40.50.1390,Coil
MRAALYIRVSSEEQARHGLSLQEQRDTLTRYAKANKMTVVGIYEDAGISARKPYKKRPALLRLLDDCKAGKVDTILFIKLDRWFRNVAGYYDVQTQLDKYGVTWQATEEDYETRTASGRLKVNIMLSVAQDEADRTSERIKFINDGKRAKGQPAGSKAPLGYIIKDRQYQIDNDTVAAARDMFAAYIRLQSVLGVKKYMLETWGIDRAYTKYVNYFRNRLYIGEVYGIENACPALISKQDFDIVNDILRQRSQRCAGVETDRVYLFSGLLHCKECGKTMQSETAKQIYTYYRCRTRMLDNSACQHKKRIREDALEDYLLHELEGIAERNNRYYKKAEKKPTQSADAIRKKMGKLKTLYLNDLIELDEYKREYASLKKALEAVEEKPKTNLDSLRNGLAEYDTYSREEKKEFWTRFIRRIDADDEGAFFVTPR

SEQ ID NO: 9435 - protein, 432 aa, Unknown
  Description of Unknown: Integrase B9436 sequence
  PTHR30461:SF3,SM00857,IPR006118,G3DSA:1.10.10.2600,IPR036162, PF13408,PS51737,G3DSA:3.40.50.1390,IPR025827,IPR006119, IPR038109,IPR011109,SSF53041,PTHR30461,PS00397, PS51736,cd00338,PF00239
MRAALYIRVSTEEQARHGLSLGDQRESLLAYAADNGMEVVGVYEDAGISARKPYKRRPALLRLLEDCKDGKIDTILFVKLDRWFRSVAGYYAVQEELDRCHVTWQATREDYETRTASGRLKVNIMLSVAQDEADRTSERIKAINEGKRLKGQPTTWRTPIGICVKNRHYAIDEETADAARDMFPAFIRLQSILALRRYMATEWGIKRSYNKYKDALSNRLYLGEAFGVENALPALVDQETFNLARRILEQRSQRNASADRIYLFTGILRCRECGRNMQPETVKQVYKYYRCRTHTLDPADCPHILRIREDVLEDYLLREFEGIAKKYYSKSKTAEKKQPKTAEQIKRKMQKLKDLYLSDLIEIEEYKKDYTELKQQLAAINPEPIKEFDLETLRRELKEYPDLDRQAKKEFWVRTIQRIDADNDGAFFVTPS

SEQ ID NO: 9436 - protein, 432 aa, Unknown
  Description of Unknown: Integrase B9437 sequence
  PTHR30461:SF3,IPR036162,PS51737,IPR011109,PTHR30461, PS00397,PF00239,G3DSA:1.10.10.2600,IPR006119,SSF53041, cd00338,SM00857,IPR025827,IPR038109,PS51736, IPR006118,PF13408,G3DSA:3.40.50.1390,Coil
MRAALYIRVSSEEQARHGLSLQEQRDTLTRYAKANKMTVAGIYEDAGISARKPYKKRHALLRLLDDCKAGKVDTILFIKLDRWFRNVAGYYDVQTRLDQYGVTWQATEEDYETRTASGRLKVNIMLSVAQDEADRTSERIKFINDGKRAKGQPAGSKAPLGYIIKDRQYQIDNDTADAARDMFAAYIKLQSVLGVKKYMLETWAIDRAYTKYVNYFRNRLYIGEVYGIENACPALISKQDFGIVNDILRQRSQRCAGVETDRVYLFSGLLHCKECGKTMQSETAKQIYTYYRCRTRMLDNSACQHKKRIREDALEDYLLHELEGIAERNNRYYKKAGKKPTQSADAIRKKMSKLKTLYLNDLIELDEYKREYASLKKSFEAVEEKPKTNLDALRNGLAEYDTYSREEKKEFWTRFIRRIDADDDGAFFVTPR

SEQ ID NO: 9437 - protein, 432 aa, Unknown
  Description of Unknown: Integrase B9438 sequence
  PTHR30461:SF3,IPR036162,PS51737,IPR011109,PTHR30461, PS00397,PF00239,G3DSA:1.10.10.2600,IPR006119,SSF53041, cd00338,SM00857,IPR025827,IPR038109,PS51736, IPR006118,PF13408,G3DSA:3.40.50.1390,Coil
MRAALYIRVSSEEQARHGLSLQEQRDALTRYAQEHKLIVVGIYEDAGISARKPYKKRPALLRLLDDCKAGKVDTILFIKLDRWFRNVAGYYGVQTQLDRYGVTWQATEEDYETRTASGRLKVNIMLSVAQDEADRTSERIKFINDGKRAKGQPAGSKAPLGYAIKDRQYQIDNGTVDAARDMFAAFIRLKSVLAVKRYMLDTWGIDRAYNKYVNYFRNRLYIGEVYGIENACPALVSKQDFDLVNDIIRERSQRCAGVGTDRVYLFSGILRCKECGKTMQSETVKKTYTYYRCRTRMLDNSACPHTKRIREDALEDYLLHEMEGIAERNNRYYKKADKKPTQSADSIRKKMGKLKTLYLNDLIELDEYKREYASLKKALEATEERPEINLDALKKELQEYETYSRDEKKEFWTRFIRRIDADNDGAFFVTPR

SEQ ID NO: 9438 - protein, 432 aa, Unknown
  Description of Unknown: Integrase B9439 sequence
  PTHR30461:SF3,SM00857,IPR006118,G3DSA:1.10.10.2600,IPR036162, PF13408,PS51737,G3DSA:3.40.50.1390,IPR025827,IPR006119, IPR038109,IPR011109,SSF53041,PTHR30461,PS00397, PS51736,cd00338,PF00239
MRAALYIRVSTEEQARHGLSLGDQRESLLAYAADNGMEVVGVYEDAGISARKPYKRRPALLRLLADCKDGKIDTILFVKLDRWFRSVAGYYAVQEELDRCHVTWQATREDYETRTASGRLKVNIMLSVAQDEADRTSERIKAINEGKRLKGQPTTWRTPIGICVKDRHYAIDEETADAARDMFPAFIRLQSILALRRYMATEWGIKRSYNKYKDALGNRLYLGEAFGVENALPALVDQETFDLAGKILERRSQRNASADRIYLFTGILRCRECGRNMQPETVKKVYKYYRCRTHTLDPADCPHILRIREDVLEDYLLREFEGIAKKYYSKSKTAEKKPPKTAEQIKRKMQKLKDLYLSDLIEIEEYKKDYTELKQQLAAINPEPIKEFDLETLRRELKEYPDLDRQAKKEFWVRTIQRIDADNDGAFFVTPS

SEQ ID NO: 9439 - protein, 432 aa, Unknown
  Description of Unknown: Integrase B9440 sequence
  PTHR30461:SF3,SM00857,G3DSA:1.10.10.2600,IPR036162,PF13408, PS51737,IPR025827,G3DSA:3.40.50.1390,IPR006119,IPR038109, SSF53041,IPR011109,PTHR30461,Coil,PS51736, cd00338,PF00239
MRVALYIRVTSEEQARHGLSLQEQRDALIRYAKANKMTVVGIYEDAGISARKPYKKRPALLRLLDDCKAGKVDTILFIKLDRWFRNVAGYYDVQTQLDKYGVTWQATEEDYETRTASGRLKVNIMLSVAQDEADRASERVKFINDGKRAKGQPAGSKAPLGYIIKDRQYQIDNDTADAARDMFAAYIRLQSVLGVKKYMLETWKIDRAYTKYVNYFRNRLYIGEAYGIENACPALISKQDFDIVNDILRQRSQRCAGVETDRVYLFSGLLHCKECGKTMQSETAKQIYTYYRCRTRMLDNSACQHKKRIREDALEDYLLHELEGIAERNNRYYKKAEKKPTQSADAIRKKMSKLKTLYLNDLIELDEYKLEYASLKKSLEAVEEKPKTNLDALRNGLAEYDTYSREEKKEFWTRFIRRIDADDDGAFFVTPR

SEQ ID NO: 9440 - protein, 432 aa, Unknown
  Description of Unknown: Integrase B9441 sequence
  PTHR30461:SF3,IPR036162,PS51737,IPR011109,PTHR30461, PS00397,PF00239,G3DSA:1.10.10.2600,IPR006119,SSF53041, cd00338,SM00857,IPR025827,IPR038109,PS51736, IPR006118,PF13408,G3DSA:3.40.50.1390,Coil
MRAALYIRVSSEEQARHGLSLQEQRDALTRYAKANKMTVVGIYEDAGISARKPYKKRPALLRLLGDCKAGKVDTILFIKLDRWFRNVAGYYDVQTRLDQYGVTWQATEEDYETRTASGRLKVNIMLSVAQDEADRTSERIKFINDGKRAKGQPAGSKAPLGYIVKDRQYQIDTGAVDAARDMFTAYIRLQSVLGVKKYMLETWGIDRAYTKYVNYFRNRLYIGEVYGIENACPALVSRQDFDIVNDILRQRSQRCAGVETDRVYLFSGLLHCKECGKTMQSETAKQIYTYYRCRTRMLDNSACQHKKRIREDALEDYLLHELEGIAERNNRYYKKAEKKPTQSADAIRKKMGKLKTLYLNDLIELDEYKREYASLKKTLETVEEKPQTNLDALRNGLAEYDTYSREEKKEFWTRFIRRIDADDDGAFFVTPR

SEQ ID NO: 9441 - protein, 432 aa, Unknown
  Description of Unknown: Integrase B9442 sequence
  PTHR30461:SF3,SM00857,IPR006118,G3DSA:1.10.10.2600,IPR036162, PF13408,PS51737,G3DSA:3.40.50.1390,IPR025827,IPR006119, IPR038109,SSF53041,IPR011109,PTHR30461,PS00397, PS51736,cd00338,PF00239
MRAALYIRVSTEEQARNGLSLGDQRESLLAYAADNSMEVVGVYEDAGISARKPYRQRPALLRLLADCKDGKIDTILFVKLDRWFRNVAGYYAVQEELDRCHVTWQATREDYETRTASGRLKVNIMLSVAQDEADRTSERIKAINEGKRLKGQPTTWRTPIGICVKNRHYAIDEETADAARDMFPAFIRLQSILALRRYMATEWGIKRSYNKYKDALSNRLYLGEAFGVENALPALVDQETFNLARRILEQRSQRNASADRIYLFTGILRCRECGRNMQPETVKQVYKYYRCRTHTLDPADCPHILRIREDVLEDYLLREFEGIAKKYYSKSKTAEKKPPKTAEQIKRKMQKLKDLYLSDLIEIEEYKKDYTDLKQQLAAINPEPVKEFDLETLRRELKEYPDLDRQAKKEFWVRTIQRIDADNDGAFFVTPS

SEQ ID NO: 9442 - protein, 432 aa, Unknown
  Description of Unknown: Integrase B9443 sequence
  PTHR30461:SF3,SM00857,G3DSA:1.10.10.2600,IPR036162,PF13408, PS51737,IPR025827,G3DSA:3.40.50.1390,IPR006119,IPR038109, IPR011109,SSF53041,PTHR30461,Coil,PS51736, cd00338,PF00239
MRVALYIRVTSEEQARHGLSLQEQRDALIRYAKANKMTVVGIYEDAGISARKPYKKRPALLQLLDDCKAGKVDTILFIKLDRWFRNVAGYYDVQTQLDKYGVTWQATEEDYETRTASGRLKVNIMLSVAQDEADRASERVKFINDGKRAKGQPAGSKAPLGYIIKDRKYQIDNDTADAARDMFAAYVRLQSVLGVKKYMLETWGVDRAYTKYVNYFRNRLYIGEVYGIENACPALVSKQDFDIVNDILRQRSQRCAGVETDRVYLFSGLLHCKECGKTMQSETAKQIYTYYRCRTRMLDNSACQHKKRVREDALEDYLLHELEGIAERNNRYYKKAEKKPTQSADAIRKKMGKLKTLYLNDLIELDEYKKEYTTLKKSIEAVEEKPKTNLDALRNGLAEYDTYSREEKKEFWTRFIRRIDADDDGAFFVTPR

SEQ ID NO: 9443 - protein, 432 aa, Unknown
  Description of Unknown: Integrase B9444 sequence
  PTHR30461:SF3,IPR036162,PS51737,IPR011109,PTHR30461, PS00397,PF00239,G3DSA:1.10.10.2600,IPR006119,SSF53041, cd00338,SM00857,IPR025827,IPR038109,PS51736, IPR006118,PF13408,G3DSA:3.40.50.1390,Coil
MRAALYIRVSSEEQARHGLSLQEQRDALARYAKANKMTVVGIYEDAGISARKPYKKRPALLRLLDDCKAGKVDTILFIKLDRWFRNVAGYYDVQTQLDRYGVTWQATEEDYETRTASGRLKVNIMLSVAQDEADRTSERIKFINDGKRAKGQPAGSKAPLGYIIKDRQYQIDNDTADAARDMFAAYIRLKSVLAVKRYMLDTWGIDRAYNKYVNYFHNRLYIGEVYGIENACPSLVSKQDFDLVNDISRQRSQRCAGVDVDRVYLFSGLLHCKECGRTMQSETAKQIYTYYRCRTRMLDNSACPHMKRIREDALEDYLLHELAGITERNNRYYKKAEKKPTQSADAIRKKMSKLKTLYLNDLIELDDYKAEYASLKKSLETVEEKPKTDLDALRNGLGEYDTYSREEKKEFWTRFIRRIDADNDGAFFVTPR

SEQ ID NO: 9444 - protein, 432 aa, Unknown
  Description of Unknown: Integrase B9445 sequence
  PTHR30461:SF3,IPR036162,PS51737,IPR011109,PTHR30461, PS00397,PF00239,G3DSA:1.10.10.2600,IPR006119,SSF53041, cd00338,SM00857,IPR025827,IPR038109,PS51736, IPR006118,PF13408,G3DSA:3.40.50.1390,Coil
MRAALYIRVSSEEQARHGLSLQEQRDALTRYAKEHKMTVAGIYEDAGISARKPYKNRPALLRLLGDCKAGKVDTILFIKLDRWFRNVAGYYDVQTQLDQYGVTWQATEEDYETRTASGRLKVNIMLSVAQDEADRTSERIKFINDGKRAKGQPAGSKAPLGYVIKDRQYQIDNDTADAARDMFAAFIRLKSVLAVKRYMLDTWGVDRAYSKYVNYFRNRLYIGEVYGIENACPALVSKQDFALVNDIIRQRSQRCAGVETDRVYLFSGILHCKECGKTMQSETVKQTYTYYRCRTRMLDNSACPHTKRIREDALEDYLLNELEGIAERNNRYYKKAEKKPTQSADAIRKKMGKLKTLYLNDLIELDEYKREYASLKKALEATEERPEINLDALKKELQEYETYSRDEKKEFWTRFIRRIDANNDGAFFVTPR

SEQ ID NO: 9445 - protein, 432 aa, Unknown
  Description of Unknown: Integrase B9446 sequence
  PTHR30461:SF3,SM00857,IPR006118,G3DSA:1.10.10.2600,IPR036162, PF13408,PS51737,G3DSA:3.40.50.1390,IPR025827,IPR006119, IPR038109,IPR011109,SSF53041,PTHR30461,PS00397, PS51736,cd00338,PF00239
MRAALYIRVSTEEQARHGLSLGDQRESLLAYAADNGMEVVGVYEDAGISARKPYKRRPALLRLLEDCKDGKIDTILFVKLDRWFRSVAGYYAVQEELDRCHVTWQATREDYETRTASGRLKVNIMLSVAQDEADRTSERIKAINEGKRLKGQPTTWRTPIGICVKDRHYAIDEETADAARDMFPAFIRLQSILALRRYMATEWGIKRSYNKYKDALSNRLYLGEAFGVENVLPALVDQETFNLAGRILEQRSQRNASADRIYLFTGILRCRECGRNMQPETVKRVYKYYRCRTHTLDPADCPHILRIREDVLEDYLLREFEGIAKKYYSKSKTAEKKPPKTAEQIKRKMQKLKDLYLSDLIEIEEYKKDYTELKQQLAAINPEPIKEFDLETLRRELKEYPDLDRQAKKEFWVRTIQRIDADNDGAFFVTPS

SEQ ID NO: 9446 - protein, 432 aa, Unknown
  Description of Unknown: Integrase B9447 sequence
  PTHR30461:SF3,SM00857,IPR006118,G3DSA:1.10.10.2600,IPR036162, PF13408,IPR025827,G3DSA:3.40.50.1390,PS51737,IPR006119, IPR038109,SSF53041,IPR011109,PTHR30461,PS00397, PS51736,cd00338,PF00239
MRVALYIRVSTEEQAVHGLSVDDQKDSLKRWSEENKHKVVDYYIDAGVSGRKSVSKRPELQRLLSDVEAGKIDLVAFTKLDRWFRNIGEFYKAQEVLDAHGVVWQATYEDYETATAAGRLKVNIMLSVAQDEADRTSERVKRIMQHKRELGLCPAGKTPIGLKAVESRLCIDEETAHIARRMFEDYIATGSVNHVKKMLVSEFGIMRANHHIKGALSNERYIGLNSGIKVCDALIPPEDFALVQRMLTARSIRNNGSRHTWLFSGLVWCAECGHRLVTHSTRQRGTDYFYYRCKNYEIGICRHKKRINEAALEKYLLAKLPIEVQAHNAKLKAGKTKPPVDTAAIKRKMDKLTDLYLADLINREKYEIEYTALKEKLNVPPEPKPINEELVMSLLEAYDKLPPSGKKEVWNRFIRRIVISENGDIFFELVWL

SEQ ID NO: 9447 - protein, 432 aa, Unknown
  Description of Unknown: Integrase B9448 sequence
  PTHR30461:SF3,IPR036162,PS51737,IPR011109,PTHR30461, PS00397,PF00239,G3DSA:1.10.10.2600,IPR006119,SSF53041, cd00338,SM00857,IPR025827,IPR038109,PS51736, IPR006118,PF13408,G3DSA:3.40.50.1390,Coil
MRVALYIRVSSEEQARHGLSLQEQRDTLTRYTQEHKMTVVGIYEDAGISARKPYKKRPALLRLLGDCKAGKVDTILFIKLDRWFRNVAGYYDVQTQLDRYGVTWQATEEDYETRTASGRLKVNIMLSVAQDEADRTSERIKFINDGKRAKGQPAGSKAPLGYAIKDRQYQIDNGTVDAARDMFAAFIRLKSVLAVKRYMLDTWGIDRAYNKYVNYFRNRLYIGEVYGIENACPALVSKQDFDLVNDIIRQRSQRCAGVGTDRVYLFSGILRCKECGKTMQSETVKKTYTYYRCRTRMLDNSACPHTKRIREDALEDYLLHELEGIAERNNRYYKKAGKKPTQSADLIRKKMGKLKTLYLNDLIDLEDYKAEYASLKRTLETVEEKPETDLAALKDGLGEYDTYSRDEKKEFWTRFIRRIDADNDGAFFVTPR

SEQ ID NO: 9448 - protein, 432 aa, Unknown
  Description of Unknown: Integrase B9449 sequence
  PTHR30461:SF3,IPR036162,PS51737,IPR011109,PTHR30461, PS00397,PF00239,G3DSA:1.10.10.2600,IPR006119,SSF53041, cd00338,SM00857,IPR025827,IPR038109,PS51736, IPR006118,PF13408,G3DSA:3.40.50.1390,Coil
MRAALYIRVSSEEQARHGLSLHEQRDALTRYAKANKMTVVGIYEDAGISARKPYKKRPALLRLLDDCKAGKIDTILFIKLDRWFRNVAGYYDVQTQLDKYGVTWQATEEDYETRTASGRLKVNIMLSVAQDEADRTSERIKFINDGKRAKGQPAGSKAPLGYIIKDRQYQIDNDTADAARDMFAAYVRLQSVLGVKRYMLETWKIDRAYTKYVNYFRNRLYIGEVYGIENACPALVSKQDFDIVNDILRQRSQRCAGVDTDRVYLFSGLLHCKECGKTMQSETAKQIYTYYRCRTRMLDNSACQHKKRIREDTLEDYLLHELEGIAERNNRYYKKAEKKPTQSADAIRKKMGKLKTLYLNDLIELDEYKREYASLKKTLEAVEEKPKTNLDALRNGLAEYDTYSKEEKKEFWTRFIRRIDADDDGAFFVTPR

SEQ ID NO: 9449 - protein, 432 aa, Unknown
  Description of Unknown: Integrase B9450 sequence
  PTHR30461:SF3,IPR036162,PS51737,IPR011109,PTHR30461, PS00397,PF00239,G3DSA:1.10.10.2600,IPR006119,SSF53041, cd00338,SM00857,IPR025827,IPR038109,PS51736, IPR006118,PF13408,G3DSA:3.40.50.1390,Coil
MRVALYIRVSSEEQARHGLSLQEQRDALTRYAQEHKLTVVGIYEDAGISARKPYKKRPALLRLLDDCKAGKVDTILFIKLDRWFRNVAGYYDVQTQLDRYGVTWQATEEDYETRTASGRLKVNIMLSVAQDEADRTSERIKFINDGKRAKGQPAGSKAPLGYAIKDRQYQIDNGTVDAARDMFAAFIRLKSVLAVKRYMLDTWGIDRAYNKYVNYFRNRLYIGEVYGIENACPALVSKQDFDLVNDIIRQRSQRCAGVGTDRVYLFSGILRCKECGKTMQSETVKKTYTYYRCRTRMFDNSACPHTKRIREDALEDYLLHEMEGIAERNNRYYKKAEKKPTHSADSIRKKMSKLKTLYLNDLIELGDYKAEYASLKRALETVEEKPETDLDALKDGLGEYDTYSRNEKKEFWTRFIRRIDADNDGAFFVTPR

SEQ ID NO: 9450 - protein, 432 aa, Unknown
  Description of Unknown: Integrase B9451 sequence
  PTHR30461:SF3,SM00857,IPR006118,G3DSA:1.10.10.2600,IPR036162, PF13408,PS51737,G3DSA:3.40.50.1390,IPR025827,IPR006119, IPR038109,IPR011109,SSF53041,PTHR30461,PS00397, PS51736,cd00338,PF00239
MRAALYIRVSTEEQARHGLSLGDQRESLLAYAADNGMEVVGVYEDAGISARKPYKRRPALLRLLEDCKDGKIDTILFVKLDRWFRSVAGYYAVQEELDRCHVTWQATREDYETRTASGRLKVNIMLSVAQDEADRTSERIKAINEGKRLKGQPTTWRTPIGICVKDRHYAIDEETADAARDMFPAFIRLQSILALRRYMATEWGIKRSYNKYKDALSNRLYLGEAFGVENVLPALVDQETFNLAGRILEQRSQRNASADRIYLFTGILRCRECGRNMQPETVKQVYKYYRCRTHTLDPADCPHILRIREDVLEDYLLREFEGIAKKYYSKSKTAEKKPPKTAEQIKRKMQKLKDLYLSDLIEIEEYKKDYTELKQQLAAINPEPIKEFDLETLRRELKEYPDLDRQAKKEFWVRTIQRIDADNDGAFFVTPS

SEQ ID NO: 9451 - protein, 432 aa, Unknown
  Description of Unknown: Integrase B9452 sequence
  PTHR30461:SF3,IPR036162,PS51737,IPR011109,PTHR30461, PS00397,PF00239,G3DSA:1.10.10.2600,IPR006119,SSF53041, cd00338,SM00857,IPR025827,IPR038109,PS51736, IPR006118,PF13408,G3DSA:3.40.50.1390,Coil
MRAALYIRVSSEEQARHGLSLQEQRDALMRYAKANKMLVVGIYEDAGISARKPYKKRPALLRLLDDCKAGKIDTILFIKLDRWFRNVAGYYDVQTQLDKYGVTWQATEEDYETRTASGRLKVNIMLSVAQDEADRTSERIKFINDGKRAKGQPAGSKAPLGYIVKDRQYQIDNDTVAAARDMFAAYVRLQSVLGVKKYMLERWGIDRAYTKYVNYFRNRLYIGEVYGIENACPALVSKQDFDIVNDILRKRSQRCAGVETDRVYLFSGLLHCKECGKTMQSETAKQIYTYYRCRTRMLDNSACQHKKRIREDALEDYLLHELEGIAERNNRYYKKAAKKPTQSADAIRKKMSKLKTLYLNDLIELDEYKREYASLKKSLEAVEEKPKTNLDALRNGLAEYDTYSREEKKEFWTRFIRRIDADDDGAFFVTPR

SEQ ID NO: 9452 - protein, 432 aa, Unknown
  Description of Unknown: Integrase B9453 sequence
  PTHR30461:SF3,SM00857,IPR006118,G3DSA:1.10.10.2600,IPR036162, PF13408,PS51737,IPR025827,G3DSA:3.40.50.1390,IPR006119, IPR038109,IPR011109,SSF53041,PTHR30461,PS00397, PS51736,cd00338,PF00239
MRVALYIRVSTEEQAVHGLSVDDQKDSLKKWAEENKHKVVDYYIDAGVSGRKSVSKRPELQRLLSDVEAGKIDLVAFTKLDRWFRNIGEFYKAQEVLDAHGVVWQATYEDYETATAAGRLKVNIMLSVAQDEADRTSERVKRIMQHKRELGLCPAGKTPIGLKSVESRLCIEEETAHIARRMFEDYIATGSVNHVKKMLISEFGIMRANHHIKGALSNERYVGLNNGIKVCDALIPPEDFALVQRMLTARSIRNNGSKHTWLFSGLVWCAECGHRLVTHSTRQRGTDYFYYRCKNYELGICRHKKRINEAALEKYLLAKLPIEVQAHNAKLKAGKTKPPVDTAAIKRKMDKLTDLYLADLISREKYEVEYTALKEKLNVPPEPKPINEELVMSLLDAYDKLPPSGKKEVWNRFIRRIVVSENGDIFFELVWL

SEQ ID NO: 9453 - protein, 432 aa, Unknown
  Description of Unknown: Integrase B9454 sequence
  PTHR30461:SF3,IPR036162,PS51737,IPR011109,PTHR30461, PS00397,PF00239,G3DSA:1.10.10.2600,IPR006119,SSF53041, cd00338,SM00857,IPR025827,IPR038109,PS51736, IPR006118,PF13408,G3DSA:3.40.50.1390,Coil
MRAALYIRVSTEEQARHGLSLGDQRESLLAYAADNGMEVVGVYEDAGISARKPYKRRPALLRLLEDCKDGKIDTILFVKLDRWFRSVAGYYAVQEELDRCHVTWQATREDYETRTASGRLKVNIMLSVAQDEADRTSERIKAINESKRLKGQPTTWRTPIGICVKDRHYAIDEETADAARDMFHAYIKLQSILALRRHMATEWGIKRSYNKYKDALGNRLYLGEAFGVENALPALVDQETFDLAGRILERRSQRNASADRIYLFSGILRCRECGRNMQPETVKQVYKYYRCRTHMLDPADCPHMLRIREDVLEDYLLREFEGIAEKYYSKSKTAEKKPPKTAEQIKRKMQKLKELYLSDLIEIEEYKKDYTELKQQLVVINPEPIKEFDLETLRRELREYPNLDRQAKKEFWVRTIQRIDADNDGAFFVTPS

SEQ ID NO: 9454 - protein, 432 aa, Unknown
  Description of Unknown: Integrase B9455 sequence
  PTHR30461:SF3,IPR036162,PS51737,IPR011109,PTHR30461, PS00397,PF00239,G3DSA:1.10.10.2600,IPR006119,SSF53041, cd00338,SM00857,IPR025827,IPR038109,PS51736, IPR006118,PF13408,G3DSA:3.40.50.1390,Coil
MRAALYIRVSSEEQARHGLSLHEQRDALTRYAKANKMTVVGIYEDAGISARKPYKKRPALLRLLDDCKAGKVDTILFIKLDRWFRNVAGYYDVQTRLDQYGVTWQATEEDYETRTASGRLKVNIMLSVAQDEADRTSERIKFINDGKRAKGQPAGSKAPLGYIVKDRQYQIDNGTVDAARDMFAAYIRLQSVLGVKRYMLETWGIDRAYTKYVNYFRNRLYIGEVYGIENACPALISKQDFDIVNDILRQRSQRCAGVETDRVYLFSGLLHCKECGKTMQSETAKQIYTYYRCRTRMLDNSACQHKKRIREDALEDYLLHELEGIAERNNRYYKKAAKKPTQSADAIRKKMSKLKTLYLNDLIELDEYKREYASLKKFLEAVEEKPKTNLDALRNGLAEYDTYSREEKKEFWTRFIRRIDADDDGAFFVTPR

SEQ ID NO: 9455 - protein, 432 aa, Unknown
  Description of Unknown: Integrase B9456 sequence
  PTHR30461:SF3,IPR036162,PS51737,IPR011109,PTHR30461, PS00397,PF00239,G3DSA:1.10.10.2600,IPR006119,SSF53041, cd00338,SM00857,IPR025827,IPR038109,PS51736, IPR006118,PF13408,G3DSA:3.40.50.1390,Coil
MRAALYIRVSSEEQARHGLSLQEQRDALIRYAKANKMTVVGIYEDAGISARKPYKKRPALLRLLDDCKAGKVDTILFIKLDRWFRNVAGYYDVQTQLDQYGVTWQATKEDYETRTASGRLKVNIMLSVAQDEADRTSERIKFINDGKRAKGQPAGSKAPLGYIVKDRQYQIDNDTVAAARDMFAAYIRLQSVLGVKKYMLETWGIDRAYTKYVNYFRNRLYIGEVYGIENACPALISKQDFDIVNDILRQRSQRCAGVETDRVYLFSGLLHCKECGKTMQSETAKQIYTYYRCRTRMLDNSACQHKKRIREDALEDYLLHELEGIAERNNRYYKKAEKKPTQSADAIRKKMSKLKTLYLNDLIELDEYKREYASLKKSLEAVEEKPKTNLDALRNGLAEYDTYSREEKKEFWTRFIRRIDADDDGAFFVTPR

SEQ ID NO: 9456 - protein, 432 aa, Unknown
  Description of Unknown: Integrase B9457 sequence
  PTHR30461:SF3,IPR036162,PS51737,IPR011109,PTHR30461, PS00397,PF00239,G3DSA:1.10.10.2600,IPR006119,SSF53041, cd00338,SM00857,IPR025827,IPR038109,PS51736, IPR006118,PF13408,G3DSA:3.40.50.1390,Coil
MRAALYIRVSSEEQARHGLSLQEQRDALARYAKANKMTVVGIYEDAGISARKPYKKRPALLRLLDDCKAGKVDTILFIKLDRWFRNVAGYYDVQTQLDRYGVTWQATEEDYETRTASGRLKVNIMLSVAQDEADRTSERIKFINDGKRAKGQPAGSKAPLGYIIKDRQYQIDNDTADAARDMFAAYIRLKSVLAVKRYMLETWGIDRAYNKYVNYFHNRLYIGEVYGIENACPALISKQDFDIVNDILRQRSQRCAGVETDRVYLFSGLLHCKECGKTMQSETIKQTYIYYRCRTRMLDNSACQHKKRIREDALEDYLLHELEGIAERNNRYYKKAEKKPTQSADAIRKKMDKLKTLYLNDLIELDEYKKEYTALKKSLEAVEEKPKTNLDALRNGLAEYGTYSREEKKEFWTRFIRRIDTDDDGAFFVTPR

SEQ ID NO: 9457 - protein, 432 aa, Unknown
  Description of Unknown: Integrase B9458 sequence
  PTHR30461:SF3,IPR036162,PS51737,IPR011109,PTHR30461, PS00397,PF00239,G3DSA:1.10.10.2600,IPR006119,SSF53041, cd00338,SM00857,IPR025827,IPR038109,PS51736, IPR006118,PF13408,G3DSA:3.40.50.1390,Coil
MRAALYIRVSSEEQARHGLSLQEQRDTLTRYAKANKMTVVGIYEDAGISARKPYKKRPALLRLLDDCKAGKVDTILFIKLDRWFRNVAGYYDVQTRLDQYGVTWQATEEDYETRTASGRLKVNIMLSVAQDEADRASERVKFINDGKRAKGQPAGSKAPLGYIIKDRQYQIDTGTVNAARDMFAAYIRLQSVLGVKKYMLETWKIDRAYTKYVNYFRNRLYIGEVYGIENACPALVSKRDFDIVNDILRQRSQRCAGVWTDRVYLFSGLLHCKECGKTMQSETAKQIYTYYRCRTRMLDNSACQHKKRIREDALEDYLLHELEGIAERNNRYYKKAEKKPTQSADAIRKKMSKLKTLYLNDLIELDEYKREYASLKKALEAVEEKPKTNLDALRNGLAEYDTYSREEKKEFWTRFIQRIDADDDGAFFVTPR

SEQ ID NO: 9458 - protein, 432 aa, Unknown
  Description of Unknown: Integrase B9459 sequence
  PTHR30461:SF3,SM00857,IPR006118,G3DSA:1.10.10.2600,IPR036162, PF13408,PS51737,G3DSA:3.40.50.1390,IPR025827,IPR006119, IPR038109,IPR011109,SSF53041,PTHR30461,PS00397, PS51736,cd00338,PF00239
MRAALYIRVSTEEQARNGLSLGDQRESLLAYAADNGMEVVGVYEDAGISARKPYKQRPALLRLLADCKDGKIDTILFVKLDRWFRNVAGYYAVQEELDRCHVTWQATREDYETRTASGRLKVNIMLSVAQDEADRTSERIKAINEGKRLKGQPTTWRTPIGICVKNRHYAIDEETADAARDMFPAFIRLQSILALRRYMATEWGIKRSYNKYKDALSNRLYLGEAFGVENVLPSLVDQETFDLAGKILERRSQRNASADRIYLFTGILRCRECGRNMQPETVKQVYKYYRCRTHTLDPADCPHILRIREDVLEDYLLREFEGIAKKYYSKSKTAEKKPPKTAEQIKRKMQKLKELYLSDLIEIEEYKKDYTDLKQQLAAINPEPIKEFDLETLRRELKEYPDLDRQAKKEFWIRTIQRIDADNDGAFFVTPS

SEQ ID NO: 9459 - protein, 432 aa, Unknown
  Description of Unknown: Integrase B9460 sequence
  PTHR30461:SF3,IPR036162,PS51737,IPR011109,PTHR30461, PS00397,PF00239,G3DSA:1.10.10.2600,IPR006119,SSF53041, cd00338,SM00857,IPR025827,IPR038109,PS51736, IPR006118,PF13408,G3DSA:3.40.50.1390,Coil
MRAALYIRVSSEEQARHGLSLQEQRDALTRYAKANKMTVVGIYEDAGISARKPYKKRPALLRLLDDCKAGKVDTILFIKLDRWFRNVAGYYDVQTQLDRYGVTWQATEEDYETRTASGRLKVNIMLSVAQDEADRTSERIKFINDGKRAKGQPAGSKAPLGYIIKDRQYQIDNDTADAARDMFAAYIRLKSVLAVKRYMLETWSIDRAYNKYVTYFHNRLYIGEVYGIENACPSLVSKQDFDLVNDISRQRSQRCAGVDVDRVYLFSGLLHCKECGRTMQSETAKQIYTYYRCRTRMLDNSACQHKKRIREDALEGYLLHELEGIAERNNRYYKKAKKKPTQSADAIRKKMDKLKTLYLNDLIELDEYKKEYTTLKISLETVEEKPKTDLDALRNGLGEYDTYSREEKKEFWTRFIRRIDADDDGAFFVTPR

SEQ ID NO: 9460 - protein, 432 aa, Unknown
  Description of Unknown: Integrase B9461 sequence
  PTHR30461:SF3,SM00857,G3DSA:1.10.10.2600,IPR036162,PF13408, PS51737,IPR025827,G3DSA:3.40.50.1390,IPR006119,IPR038109, SSF53041,IPR011109,PTHR30461,Coil,PS51736, cd00338,PF00239
MRAALYMRVTSEEQARHGLSLQEQRDALIRYAKANKMTVVGIYEDAGISARKPYKKRPALLRLLDDCKAGKVDTILFIKLDRWFRNVAGYYDVQTQLDKYGVTWQATEEDYETRTASGRLKVNIMLSVAQDEADRASERVKFITDGKRAKGQPAGSKAPLGYIIKNRQYQIDNDTVDAARDMFAAYIRLQSVLGVKKYMLERWGIDRAYTKYVNYFRNRLYIGEVYGIENACPALVSKQDFDIVNDILRQRSQRCAGVETDRVYLFSGLLHCKECGKTMQSETAKQIYTYYRCRTRMLDNSACQHKKRIREDALEDYLLHELEGIAERNNRYYKKAAKKPTQSADAIRKKMSKLKTLYLNDLIELDEYKREYASLKKSLEAVEEKPKTNLDALRNGLAEYDTYSREEKKEFWTRFIRRIDADDDGAFFVTPR

SEQ ID NO: 9461 - protein, 432 aa, Unknown
  Description of Unknown: Integrase B9462 sequence
  PTHR30461:SF3,IPR036162,PS51737,IPR011109,PTHR30461, PS00397,PF00239,G3DSA:1.10.10.2600,IPR006119,SSF53041, cd00338,SM00857,IPR025827,IPR038109,PS51736, IPR006118,PF13408,G3DSA:3.40.50.1390,Coil
MRAALYIRVSSEEQARHGLSLQEQRDALTRYAKANKMTVVGIYEDAGISARKPYKKRPALLRLLDDCKAGKVDTILFIKLDRWFRNIAGYYDVQTQLDKYGVTWQATEEDYETRTASGRLKVNIMLSVAQDEADRTSERIKFINDGKRAKGQPAGSKAPLGYIVKDRQYQIDNGTVDAARDMFTAYIRLQSVLGVKKYMLETWGIDRAYTKYVNYFRNRLYIGEVYGIENACPALISKQDFDIVNDILRQRSQRCAGVETDRVYLFSGLLHCKECGKTMQSETAKQIYTYYRCRTRMLDNSACQHKKRIREDALEDYLLHELEGIAERNNRYYKKAEKKPTQSADAIRKKMDKLKTLYLNDLIELDEYKKEYTTLKKSLEAVEEKPKTNLDALRNGLAEYDTYSREEKKEFWTRFIRRIDADDDGAFFVTPR

SEQ ID NO: 9462 - protein, 432 aa, Unknown
  Description of Unknown: Integrase B9463 sequence
  PTHR30461:SF3,IPR036162,PS51737,IPR011109,PTHR30461, PS00397,PF00239,G3DSA:1.10.10.2600,IPR006119,SSF53041, cd00338,SM00857,IPR025827,IPR038109,PS51736, IPR006118,PF13408,G3DSA:3.40.50.1390,Coil
MRAALYIRVSSEEQARHGLSLQEQRDALMRYAKANKMLVVGIYEDAGISARKPYKKRPALLRLLDNCKAGKVDTILFIKLDRWFRNVAGYYDVQTQLDKYGVTWQATEEDYETRTASGRLKVNIMLSVAQDEADRTSERIKFINDGKRAKGQPAGSKAPLGYIIKDRQYQIDNDTADAARDMFAAYVRLQSVLGVKRYMLETWGIDRAYTKYVNYFRNRLYIGEVYGIENACPALVSKQDFDIVNDILRQRSQRCAGVETDRVYLFSGLLHCKECGKTMQSETAKHIYTYYRCRTRMLDNSACQHKKRIREDALEDYLLHELEGIAERNNRYYKKAEKKPTQSADAIRKKMSKLKTLYLNDLIELDEYKREYASLKKVLEAVEEKPKTNLDALRNGLAEYDTYSREEKKEFWTRFIRRIDADDDGAFFVTPR

SEQ ID NO: 9463 - protein, 432 aa, Unknown
  Description of Unknown: Integrase B9464 sequence
  PTHR30461:SF3,IPR036162,PS51737,IPR011109,PTHR30461, PS00397,PF00239,G3DSA:1.10.10.2600,IPR006119,SSF53041, cd00338,SM00857,IPR025827,IPR038109,PS51736, IPR006118,PF13408,G3DSA:3.40.50.1390,Coil
MRAALYIRVSSEEQARHGLSLQEQRDTLTRYAKANKMTVAGIYEDAGISARKPYKKRHALLRLLDDCKAGKVDTILFIKLDRWFRNVAGYYDVQTRLDQYGVTWQATEEDYETRTASGRLKVNIMLSVAQDEADRTSERIKFINDGKRAKGQPAGSKAPLGYIIKDRQYQIDNDTADAARDMFAAYVRLQSVLGVKKYMIETWGIDRAYTKYVNYFRNRLYIGEVYGIENACPALISKQDFDIVNDILRQRSQRCAGVETDRVYLFSGLLHCKECGKTMQSETAKQIYTYYRCRTRMLDNSACQHKKRIREDALEDYLLHELEGIAERNNRYYKKAEKKPTQSADAIRKKMGKLKTLYLNDLIELDEYKKEYTTLKKSIEAVEEKPKTNLDALRNGLAEYDTYSREEKKEFWTRFIRRIDADDDGAFFVTPR

SEQ ID NO: 9464 - protein, 432 aa, Unknown
  Description of Unknown: Integrase B9465 sequence
  PTHR30461:SF3,SM00857,G3DSA:1.10.10.2600,IPR036162,PF13408, IPR025827,PS51737,G3DSA:3.40.50.1390,IPR006119,IPR038109, SSF53041,IPR011109,PTHR30461,Coil,PS51736, cd00338,PF00239
MRVALYIRVTSEEQARHGLSLQEQRDALIRYAKANKMTVVGIYEDAGISARKPYKKRPALLQLLDDCKAGKVDTILFIKLDRWFRNVAGYYDVQTQLDKYGVTWQATEEDYETRTASGRLKVNIMLSVAQDEADRASERVKFINDGKRAKGQPAGSKAPLGYIIKDRKYQIDNDTADAARDMFAAYVRLQSVLGVKRYMFETWGIDRAYTKYVNYFRNRLYIGEVYGIENACPALISKQDFDIVNDILRQRSQRCAGVETDRVYLFSGLLHCKECGKTMQSETAKQIYTYYRCRTRMLDNSACQHKKRIREDALEDYLLHELEGIAERNNRYYKKAEKKPTQSADAIRKKMGKLKTLYLNDLIELDEYKREYASLKKTLETVEEKPQTNLDALRNGLAEYDTYSREEKKEFWTRFIWRIDADDDGAFFVTPR

SEQ ID NO: 9465 - protein, 432 aa, Unknown
  Description of Unknown: Integrase B9466 sequence
  PTHR30461:SF3,IPR036162,PS51737,IPR011109,PTHR30461, PS00397,PF00239,G3DSA:1.10.10.2600,IPR006119,SSF53041, cd00338,SM00857,IPR025827,IPR038109,PS51736, IPR006118,PF13408,G3DSA:3.40.50.1390,Coil
MRVALYIRVSSEEQARHGLSLQEQRDTLTRYTQEHKMTVVGIYEDAGISARKPYKKRPALLRLLGDCKAGKVDTILFIKLDRWFRNVAGYYDVQTQLDQYGVTWQATEEDYETRTASGRLKVNIMLSVAQDEADRTSERIKFINDGKRAKGQPAGSKAPLGYVIKDRQYQIDSGTVDAARDMFASFIRLKSVLAVKRYMLDKWGIDRAYSKYVNYFRNRLYIGEVYGIENACPALVSKQDFDLVNDIIRQRSQRCAGVGTDRVYLFSGILRCKECGKTMQSETVKKTYTYYRCRTRMLDNSACPHTKRIREDALEDYLLHEMEGIAERNNRYYKKADKKPTQSADSIRKKMGKLKTLYLNDLIELDEYKREYASLKKALEATEERPEINLDALKKELQEYETYSRDEKKEFWTRFIRRIDADNDGAFFVTPR

SEQ ID NO: 9466 - protein, 432 aa, Unknown
  Description of Unknown: Integrase B9467 sequence
  PTHR30461:SF3,IPR036162,PS51737,IPR011109,PTHR30461, PS00397,PF00239,G3DSA:1.10.10.2600,IPR006119,SSF53041, cd00338,SM00857,IPR025827,IPR038109,PS51736, IPR006118,PF13408,G3DSA:3.40.50.1390,Coil
MRAALYIRVSSEEQARHGLSLHEQRDALTRYAKANKMTVVGIYEDAGISARKPYKKRPALLRLLDDCKAGKVDTILFIKLDRWFRNVAGYYDVQTQLDKYGVTWQATEEDYETRTASGRLKVNIMLSVAQDEADRTSERIKFINDGKRAKGQPAGSKAPLGYIIKDRQYQIDNDTADAARDMFAAYVRLQSVLGVKRYMLETWGIDRAYTKYVNYFRNRLYIGEVYGIENACPALVSKQDFDIVNDILRQRSQRCAGVDTDRVYLFSGLLHCKECGKTMQSETAKHIYTYYRCRTRMLDNSACQHKKRIREDTLEDYLLHELEGIAERNNRYYKKAEKKPTQSADAIRKKMGKLKTLYLNDLIELDEYKREYASLKKTLEAVEEKPKTNLDALRNGLAEYDTYSKEEKKEFWTRFIRRIDADDDGAFFVTPR

SEQ ID NO: 9467 - protein, 432 aa, Unknown
  Description of Unknown: Integrase B9468 sequence
  PTHR30461:SF3,IPR036162,PS51737,IPR011109,PTHR30461, PS00397,PF00239,G3DSA:1.10.10.2600,IPR006119,SSF53041, cd00338,SM00857,IPR025827,IPR038109,PS51736, IPR006118,PF13408,G3DSA:3.40.50.1390,Coil
MRAALYIRVSSDEQARHGLSLQEQRDALTRYAQEHKMTVAGIYEDAGISARKPYKKRPALLRLLGDCKVGKVDTILFIKLDRWFRNVAGYYDVQTQLDQYGVTWQATEEDYETRTASGRLKVNIMLSVAQDEADRTSERIKFINDGKRAKGQPAGSKAPLGYVIKDRQYQIDSGTVDAARDMFASFIRLKSVLAVKRYMLDTWGIDRAYNKYVNYFRNRLYIGEVYGIENACPALVSKQDFDLVNDIIRQRSQRCAGVGTDRVYLFSGILRCKECGKTMQSETVKNTYTYYRCRTRMLDNSACPHTKRIREDALEDYLLHEMEGIAERNNRYYKKADKKPTQSADSIRKKMGKLKTLYLNDLIELDEYKREYASLKKALEATEERPEINLDALKKELQEYETYSRDEKKEFWTRFIRRIDADNDGAFFVTPR

SEQ ID NO: 9468 - protein, 432 aa, Unknown
  Description of Unknown: Integrase B9469 sequence
  PTHR30461:SF3,IPR036162,PS51737,IPR011109,PTHR30461, PS00397,PF00239,G3DSA:1.10.10.2600,IPR006119,SSF53041, cd00338,SM00857,IPR025827,IPR038109,PS51736, IPR006118,PF13408,G3DSA:3.40.50.1390,Coil
MRAALYIRVSSEEQARHGLSLQEQRDALTRYAKANKMTVVGIYEDAGISARKPYKKRPALLRLLDDCKAGKVDTILFIKLDRWFRNVAGYYDVQTQLDKYGVTWQATEEDYETRTASGRLKVNIMLSVAQDEADRTSERIKFINDGKRAKGQPAGSKAPLGYIIKDRQYQIDTDTADAARDMFAAYIRLKSVLAVKRYMLETWGIDRAYTKYVNYFRNRLYIGEVYGIENACPSLVSKQDFDLVNDISRQRSQRCAGVDADRVYLFSGLLHCKECGRTMQSETAKQIYTYYRCRTRMLDNSACPHMKRIREDALEGYLLHELEGIAERNNRYYKKAEKKPTQSADAIRKKMDKLKTLYLNDLIELDEYKKEYTTLKISLETVEEKPKTDLDALRNGLGEYDTYSREEKKEFWTRFIRRIDADDDGAFFVTPR

SEQ ID NO: 9469 - protein, 432 aa, Unknown
  Description of Unknown: Integrase B9470 sequence
  PTHR30461:SF3,SM00857,IPR006118,G3DSA:1.10.10.2600,IPR036162, PF13408,IPR025827,G3DSA:3.40.50.1390,PS51737,IPR006119, IPR038109,SSF53041,IPR011109,PTHR30461,PS00397, PS51736,cd00338,PF00239
MRAALYIRVSTEEQARNGLSLGDQRESLLAYAADNGMEVVGVYEDAGISARKPYKQRPALLRLLADCKGGKIDTILFVKLDRWFRSVAGYYAVQEELDRCHVTWQATREDYETRTASGRLKVNIMLSVAQDEADRTSERIKAINEGKRLKGQPTTWRTPIGICVKDRHYAIDEETADAARDMFPAFIRLQSILALRRYMATEWGIKRSYNKYKDALSNRLYLGEAFGVENALPALVDQETFNLARRILEQRSQRNASADRIYLFTGILRCRECGRNMQPETVKQVYKYYRCRTHTLDPADCPHILRIREDVLEDYLLREFEGIAKKYYSKSKTAEKKPPKTAEQIKRKMQKLKDLYLSDLIEIEEYKKDYTDLKQQLAAINPEPVKEFDLETLRRELKEYPDLDRQAKKEFWVRTIQRIDADNDGAFFVTPS

SEQ ID NO: 9470 - protein, 432 aa, Unknown
  Description of Unknown: Integrase B9471 sequence
  PTHR30461:SF3,IPR036162,PS51737,IPR011109,PTHR30461, PS00397,PF00239,G3DSA:1.10.10.2600,IPR006119,SSF53041, cd00338,SM00857,IPR025827,IPR038109,PS51736, IPR006118,PF13408,G3DSA:3.40.50.1390,Coil
MRVALYIRVSSEEQARHGLSLQEQRDTLTRYTQEHKMTVVGIYEDAGISARKPYKKRPALLRLLGDCKAGKVDTILFIKLDRWFRNVAGYYDVQTQLDRYGVTWQATEEDYETRTASGRLKVNIMLSVAQDEADRTSERIKLINDGKRAKGQPAGSKAPLGYAIKDRQYQIDNGTVDAARDMFAAFIRLKSVLAVKRYMLDTWGIDRAYNKYVNYFRNRLYIGEVYGIENACPALVSKQDFDLVNDIIRQRSQRCAGVGTDRVYLFSGILRCKECGKTMQSETVKKTYTYYRCRTRMLDNSACPHTKRIREDALEDYLLHELEGIAERNNRYYKKAGKKPTQSADLIRKKMGKLKTLYLNDLIDLEDYKAEYASLKRTLETVEEKPETDLAALKDGLGEYDTYSRDEKKEFWTRFIRRIDADNDGAFFVTPR

SEQ ID NO: 9471 - protein, 432 aa, Unknown
  Description of Unknown: Integrase B9472 sequence
  PTHR30461:SF3,SM00857,IPR006118,G3DSA:1.10.10.2600,IPR036162, PF13408,IPR025827,G3DSA:3.40.50.1390,PS51737,IPR006119, IPR038109,SSF53041,IPR011109,PTHR30461,PS00397, PS51736,cd00338,PF00239
MRAALYIRVSTEEQARHGLSLGDQRESLLAYAADNGMEVVGVYEDAGISARKPYKRRPALLRLLEDCKDGKIDTILFVKLDRWFRSVAGYYAVQEELDRCHVTWQATREDYETRTASGRLKVNIMLSVAQDEADRTSERIKAINEGKRLKGQPTTWRTPIGICVKDRHYAIDEETADAARDMFPAFIRLQSILALRRYMATEWGIKRSYNKYKDALSNRLYLGEAFGVENALPALVDQETFNLARRILEQRSQRNASADRIYLFTGILRCRECGRNMQPETVKQVYKYYRCRTHTLDPADCPHILRIREDVLEDYLLREFEGIAKKYYSKSKTAEKKPPKTAEQIKRKMQKLKDLYLSDLIEIEEYKKDYTELKQQLAAINPEPIKEFDLETLRRELKEYPDLDRQAKKEFWVRTIQRIDADNDGAFFVTPS

SEQ ID NO: 9472 - protein, 432 aa, Unknown
  Description of Unknown: Integrase B9473 sequence
  PTHR30461:SF3,IPR036162,PS51737,IPR011109,PTHR30461, PS00397,PF00239,G3DSA:1.10.10.2600,IPR006119,SSF53041, cd00338,SM00857,IPR025827,IPR038109,PS51736, IPR006118,PF13408,G3DSA:3.40.50.1390,Coil
MRAALYIRVSSEEQARHGLSLHEQRDALTRYAKANKMTVVGIYEDAGISARKPYKKRPALLRLLDDCKAGKVDTILFIKLDRWFRNVAGYYDVQTQLDKYGVTWQATEEDYETRTASGRLKVNIMLSVAQDEADRTSERIKFINDGKRAKGQPAGSKAPLGYIIKDRQYQIDNDTADAARDMFAAYVRLQSVLGVKRYMLETWGIDRAYTKYVNYFRNRLYIGEVYGIENACPALVSKQDFDIVNDILRQRSQRCAGVETDRVYLFSGLLHCKECGKTMQSETAKHIYTYYRCRTRMLDNSACQHKKRIREDALEDYLLHELEGIAERNNRYYKKAEKKPTQSAGAIRKKMGKLKTLYLNDLIELDEYKKEYTTLKKSIEAVEEKPKTNLDALRNGLAEYDTYSREEKKEFWTRFIRRIDADDDGAFFVTPR

SEQ ID NO: 9473 - protein, 432 aa, Unknown
  Description of Unknown: Integrase B9474 sequence
  PTHR30461:SF3,SM00857,G3DSA:1.10.10.2600,IPR036162,PF13408, PS51737,G3DSA:3.40.50.1390,IPR025827,IPR006119,IPR038109, IPR011109,SSF53041,PTHR30461,Coil,PS51736, cd00338,PF00239
MRAALYMRVTSEEQARHGLSLQEQRDALIRYAKANKMTVVGIYEDAGISARKPYKKRPALLRLLDDCKAGKIDMILFIKLDRWFRNVAGYYDVQTQLDKYGVTWQATEEDYETRTASGRLKVNIMLSVAQDEADRTSERIKFINDGKRAKGQPAGSKAPLGYIIQDRQYQIDNDTADAARDMFAAYIRLQSVLGVKRYMLETWGIDRAYNKYVNYFRNRLYIGEVYGIENACPALVSKQDFDIVNTVAQQRSQRCAGVETDRVYLFSGLLHCKECGKTMQSETIKQTYTYYRCRTRMLDNSACQHKKRIREDALEDYLLHELEGIAARNNRYYKKAEKKPTQSADAIRKKMSKLKTLYLNDLIELDEYKREYASLKKSLETVEEKPQTNLDALRNGLAEYDTYSREEKKEFWTRFIRRIDADDDGAFFVTPR

SEQ ID NO: 9474 - protein, 432 aa, Unknown
  Description of Unknown: Integrase B9475 sequence
  PTHR30461:SF3,IPR036162,PS51737,IPR011109,PTHR30461, PS00397,PF00239,G3DSA:1.10.10.2600,IPR006119,SSF53041, cd00338,SM00857,IPR025827,IPR038109,PS51736, IPR006118,PF13408,G3DSA:3.40.50.1390,Coil
MRVALYIRVSSEEQARHGLSLQEQRDTLTRYTQEHKMTVVGIYEDAGISARKPYKKRPALLRLLGDCKAGKVDTILFIKLDRWFRNVAGYYDVQTQLDRYGVTWQATEEDYETRTASGRLKVNIMLSVAQDEADRTSERIKFINDGKRAKGQPAGSKAPLGYAIKDRQYQIDSGTVDAARDMFAAFIRLKSVLAVKRYMLDTWGIDRAYSKYVNYFRNRLYIGEVYGIENACPALVSKKDFDLVNDIIRQRSQRCAGVDTDRVYLFPGILHCKECGKTMQSETVKKTYTYYRCRTRMLDNSACPHTKRIREDALEDYLLHELEGIAERNNRYYKKADKKPTQSADSIRKKMGKLKTLYLNDLIELDEYKREYASLKKALEATEERPEINLDALKKELQEYETYSRDEKKEFWTRFIRRIDADNDGAFFVTPR

SEQ ID NO: 9475 - protein, 431 aa, Unknown
  Description of Unknown: Integrase B9476 sequence
  PTHR30461:SF3,IPR036162,PS51737,IPR011109,PTHR30461, PS00397,PF00239,G3DSA:1.10.10.2600,IPR006119,SSF53041, cd00338,SM00857,IPR025827,IPR038109,PS51736, IPR006118,PF13408,G3DSA:3.40.50.1390,Coil
MKKVGLYVRVSTQEQKLHGISIENQLDALQKYCKEKEYIIVATYNDAGISAHVSYKKRPALLQMIQDCQEQKIELLLFTRLDRFFRSVEDYYLVLSQMEKVPWKAIWENYETETSDGQLRVNIMLSIAEAEAARTSEKIKSIMDYKRERGDHLGTVPLGYRTENKKLAIDPTTEPIVREIFSMYDSGKGPNAIRKYLSSVGHDMHSRSIRELIFSPVYAGDDNGRPCPAYFSKEEYQRRLATRKIHEPRNDRRETYIFSGLIKCGVCGATMHAQKANGKYLNYICTTGKQKFLHPGLCASEKWLESTLLSRLQDFADEYNFASASAAPDEAEREKEIATLKGKLKRIGVRYEDGDISTEEYRAKRDDLKSKIAALEVIPSAKQIILPDGFSETYAQLGRDGKQRFWRSLITSITFYPDRKYNIQVGDIFWR

SEQ ID NO: 9476 - protein, 431 aa, Unknown
  Description of Unknown: Integrase B9477 sequence
  PTHR30461:SF3,IPR036162,PS51737,IPR011109,PTHR30461, PS00397,PF00239,G3DSA:1.10.10.2600,IPR006119,SSF53041, cd00338,SM00857,IPR025827,IPR038109,PS51736, IPR006118,PF13408,G3DSA:3.40.50.1390,Coil
MKKVGLYVRVSTQEQKLHGISIENQLDALQKYCKEKGYIVVATYNDAGVSAHGSYKKRPALLQMIQDCQEKKIELLLFTRLDRFFRSVGDYYIVTSQMDKVPWKAIWEEYETETSDGQFRVNIMLSIAEAEAARTSEKIKSIMDYKRERGDHLGTVPLGYRTENKKLVIDPDTEPIVREIFSMYDSGKGPNAIRKYLSNVGHDMHSRSIRELIFSPVYAGDDNGRPCPAYFSKEEYQRRLATRKIHEPRNDRQETYIFSGLIKCGVCGATMHAQKANGKYLNYICTTGKQKFLHPGLCASEKHLESTLLSRLQDFADEYNFASASAASNEADRKKEIASLNGKLKRIGIRFEDGDISTEEYRAKRDDLKSKLAALEVIPSAKQIILPDDFFETYAQLGRDGKQRFWRSLITSITFTPDRKYDIQVGDIFWR

SEQ ID NO: 9477 - protein, 431 aa, Unknown
  Description of Unknown: Integrase B9478 sequence
  PTHR30461:SF3,IPR036162,PS51737,IPR011109,PTHR30461, PS00397,PF00239,G3DSA:1.10.10.2600,IPR006119,SSF53041, cd00338,SM00857,IPR025827,IPR038109,PS51736, IPR006118,PF13408,G3DSA:3.40.50.1390,Coil
MKKVGLYVRVSTQEQKLHGISIENQLDALQKYCKEKGYIIVATYNDAGVSAHGSYKKRPALLQMIQDCQEKKIELLLFTRLDRFFRSVGDYYLVTSQMDKVPWKAIWEEYETETSDGQFRVNIMLSIAEAEAARTSEKIKSIMDYKRERGDHLGTVPLGYRTENKKLAIDPTPEPIVREIFSMYDSGKGPNAIRKYLSSVGHDMHSRSIRGLIFSPVYAGDDNGRPCPAYFSKEEYQRRLATRKIHEPRNDRRETYIFSGLIKCGVCGATMHAQKANGKYLNYICTTGKQKFLHPGLCASEKHLESTLLSRLQDFADEYNFASASAAPDEAEREKEIATLKGKLKRIGVRYEDGDISTEEYRAKRDDLKSKIAALEVIPSAKQIILPDGFSETYAQLGRDGKQRFWRSLITSITFYPDRKYNIQVGDIFWR

SEQ ID NO: 9478 - protein, 431 aa, Unknown
  Description of Unknown: Integrase B9479 sequence
  PTHR30461:SF3,IPR036162,PS51737,IPR011109,PTHR30461, PS00397,PF00239,G3DSA:1.10.10.2600,IPR006119,SSF53041, cd00338,SM00857,IPR025827,IPR038109,PS51736, IPR006118,PF13408,G3DSA:3.40.50.1390,Coil
MKKVGLYVRVSTQEQKLHGISIENQLDALQKYCKEKGYIIVATYNDAGVSAHGSYKKRPALLQMIQDCQEKKIELLLFTRLDRFFRSVGDYYLVTSQMDKVPWKAIWEEYETETSDGQFRVNIMLSIAEAEAARTSEKIKSIMDYKRERGDHLGTVPLGYRTENKKLAIDPTTEPIVREIFSMYDSGKGPNAIRKYLSSVGHDMHSRSIRGLIFSPVYAGDDNGRPCPAYFSKEEYQRRLATRKIHEPRNDRRETYIFSGLIKCGVCGATMHAQKANGKYLNYICTTGKQKFLHPGLCASEKHLESTLLSRLQDFADEYNFASASAAPDEAEREKEIATLKGKLKRIGVRYEDGDISTEEYRAKRDDLKSKIAALEVIPSAKQIILPDGFSETYAQLGRDGKQRFWRSLITSITFYPDRKYNIQVGDIFWR

SEQ ID NO: 9479 - protein, 431 aa, Unknown
  Description of Unknown: Integrase B9480 sequence
  PTHR30461:SF3,SM00857,G3DSA:1.10.10.2600,IPR036162,PF13408, IPR025827,G3DSA:3.40.50.1390,PS51737,IPR006119,IPR038109, PF07508,IPR011109,SSF53041,PTHR30461,PS51736, cd00338,PF00239
MDKKITVIDALPKLEKKLRVAAYCRVSSGKDAMLHSLSNQISYYNNLIRNTKGWEFAGVYADEAISGTKNDREEFVRLINDAKNGKIDLIIVKSISRFARNTVTMLETIRELKAIGVDVFFEEQNLHSISSEGEMVLTFLASFAQEEARSVSENMKWRVRKNFEKGISWCTRKTLGYIYKDRKLVVEPEEAKLVRRIFDMYIGGLGLQAITNKLNEERVKPPESVKWKKDSIRYILTNITYTGDLLLQKYFNIDYMSKKHKPNKGELNQYLVEDDHEPIIRKETFNKVQQLMYERAEKVNSSRAAQIIHPLASLIKCSICGKSYHHRTTKYTKKWMCQTFNREGKSHCASKAVPASEMDRLVYEVVGDDIPKIKEIIVYPNNTLLLNLNDGSSITKTWNDISRSNSWTDEMKEEARKRSLKQWENIKREGK

SEQ ID NO: 9480 - protein, 430 aa, Unknown
  Description of Unknown: Integrase B9481 sequence
  PTHR30461:SF3,SM00857,IPR006118,G3DSA:1.10.10.2600,IPR036162, PF13408,PS51737,IPR025827,G3DSA:3.40.50.1390,IPR006119, IPR038109,IPR011109,SSF53041,PTHR30461,PS00397, PS51736,cd00338,PF00239
MRVALYVRVSTEEQAVHGLSVDDQKDSLKRWAEENKHKVVDYYVDAGVSGRKSVSKRPELQRLLSDVEAEKIDLVAFTKLDRWFRNISEFYKAQEVLDARGVVWQATYEDYETATAAGRLKVNIMLSVAQDEADRTSERVKRIMQHKRELGLCPAGKTPIGLKAVESRLCIDEETAHIARRMFEDYIATGSVNHVKKMLVSEFGIMRGNHHIKNALGNERYIGKNNGIQVCDALIPPEDFALVQRMLTARSVRNNGSRHAWLFSGLVWCAECGQRLVTHSTRQRGTDYFYYKCKNYEVGICRHKKRINEATLEKYLLAKLSIEVQAHNAKLKAGKTKPPVDTAAIKRKMDKLTDLYLADLINREKYEMEYTVLKEKLNVPPEPKPIDEALVMSLIDAYDKLPPSGKKEAWNRFIRRIVIANNGDIFFDLV

SEQ ID NO: 9481 - protein, 430 aa, Unknown
  Description of Unknown: Integrase B9482 sequence
  PTHR30461:SF3,SM00857,IPR006118,G3DSA:1.10.10.2600,IPR036162, PF13408,IPR025827,G3DSA:3.40.50.1390,PS51737,IPR006119, IPR038109,SSF53041,IPR011109,PTHR30461,PS00397, PS51736,cd00338,PF00239
MRIALYVRVSTEEQAVHGLSVDDQKESLKKWAEENKHKVVDCYVDAGVSGRKSVSKRPELQRLLSDVEAGKIDLVAFTKLDRWFRNIGEFYKAQEVLDAHGVVWQATYEDYETATAAGRLKVNIMLSVAQDEADRTSERVKRIMQHKRELGLCPAGKTPIGLKAVESRLCIDEETAHIARRMFEDYIATGSVNHVKKMLVSEFGIMRGNYHIKNALGNERYIGKNNGIQVCDALIPPEDFALVQRMLTARSVRNNGSRHTWLFSGLVWCAECGHRLVTHSTRQRGTDYFYYRCKNYEIGLCSHKKRINEAEIEAYLLMKLPIEVQAHNAKLKAGKIKPPVDTAAIKRKMDKLTDLYLADLINREKYEMEYTVLKEKLNVPPEPKPIDEALVMSLIDAYDKLPPSGKKEAWNRFIRRIVIANNGDIFFELV

SEQ ID NO: 9482 - protein, 430 aa, Unknown
  Description of Unknown: Integrase B9483 sequence
  PTHR30461:SF3,SM00857,G3DSA:1.10.10.2600,IPR036162,PF13408, PS51737,G3DSA:3.40.50.1390,IPR025827,IPR006119,IPR038109, PF07508,IPR011109,SSF53041,PTHR30461,PS51736, cd00338,PF00239
MIQKVVFPQKKQFPLKRTAAYARVSSGKDAMLHSLSSQVSYYNQLIQSNPEWLFCGVYADEALTGTKGNRAEFQKLLNRCRQGEIDLILTKSISRFARNTVTLLETVRELKSLGVDVYFEEQRIHSMSSDGELLLSILASYAQEESYSASENRKWQIRKDFSIGKIGSITILGYRRNAEGVLEIEPNEAELVRMIFSDYISGMGQQRIANKINEMGIPTRQGNLWTNPRIREILTNEKYIGNLMLQKYYRNNHIEKKKTRNQGELQKYYVEEAHEPIIDLETFAKAKAILAQRHEQYTHDGATNRYPLSGLIICGLCGKNYQRKQLPQGIIWMCATFLRRGKKYCPGSKQIPESILYALICDVLKLDEFDTAVFRDNIHHIVIPKPFEVQFFFHDGTSEIRHWEYPSRAESWTEEMKQAARERNQKWVEK

SEQ ID NO: 9483 - protein, 430 aa, Unknown
  Description of Unknown: Integrase B9484 sequence
  PTHR30461:SF3,SM00857,G3DSA:1.10.10.2600,IPR036162,PF13408, IPR025827,G3DSA:3.40.50.1390,PS51737,IPR006119,IPR038109, PF07508,SSF53041,IPR011109,PTHR30461,PS51736, cd00338,PF00239
MNAVIYARYSSDNQREESIEGQLRECLSYAEKNNLKIVNHYIDRAFSARTDDRPAFRQMIQESEKKEFSIILVWKLDRFSRDRYDSAYYKHQLKKNGVRVLSATENISEGPEGIILESMLEGMAEYYSAELAVKVRRGQQENALKCRSNGGVLPLGYCVSKDHTFEIVPEKAAIVREIFTRYDNGEALQAIANSLNKQGLCTQKGKEFRMSSLGKILRNRKYTGEYRYDTTVIPDGMPRIIEQDLFDRAQKRLDQNKRAPGRAKAEEEYLLTTKAFCGECGSMLVGDCGTSKTGSVYYYYKCAGRKRHNGCKLKPIKKAWLEQFVVETTVSRVFREKEDLKLSITQAKLCRPVYAKDEILRWIMQFKHGSLSDPVYRRRIIDVFVNSVYVFGDKIVFTYNFKDGTDTFSLKDVSAAIHAKSSDVAYSASP

SEQ ID NO: 9484 - protein, 430 aa, Unknown
  Description of Unknown: Integrase B9485 sequence
  PTHR30461:SF3,SM00857,IPR006118,G3DSA:1.10.10.2600,IPR036162, PF13408,IPR025827,G3DSA:3.40.50.1390,PS51737,IPR006119, IPR038109,SSF53041,IPR011109,PTHR30461,PS00397, PS51736,cd00338,PF00239
MRVALYVRVSTEEQAVHGLSVDDQKESLKKWAEENKHKVVDYYVDAGVSGRKSVSKRPELQRLLSDVEARQIDLVAFTKLDRWFRNIGEFYKAQEVLDAHGVVWQATYEDYETATAAGRLKVNIMLSVAQDEADRTSERVKRIMQHKRELGLCPAGKTPIGLKAVESRLCIDEETAHIARRMFEDYIATGSINHVKKMLVSEFGIMRGNHHIKNALGNERYIGKNNGIQVCDALIPPEDFALVQRMLTARSVRNNGSRHTWLFSGLVWCAECGHRLVTHSTRQRGTDYFYYRCKNYEIGLCSHKKRINEAELEAYLLMKLPIEVQAHNAKLKAGKIKPPVDTAAIKRKMDKLTDLYLADLINREKYEIEYTALKEKLNVPPEPKPIDEALVMSLIDAYDKLPPSGKKEAWNRFIRRIVIANNGDIFFDLV

SEQ ID NO: 9485 - protein, 430 aa, Unknown
  Description of Unknown: Integrase B9486 sequence
  PTHR30461:SF3,SM00857,IPR006118,G3DSA:1.10.10.2600,IPR036162, PF13408,IPR025827,G3DSA:3.40.50.1390,PS51737,IPR006119, IPR038109,SSF53041,IPR011109,PTHR30461,PS00397, PS51736,cd00338,PF00239
MRVALYVRVSTEEQAVHGLSVDDQKESLKKWAEENKHKIVDYYVDAGVSGRKSVSKRPELQRLLSDVEAGKIDLVAFTKLDRWFRNIGEFYKAQEVLDANGVVWQATYEDYETATAAGRLKVNIMLSVAQDEADRTSERVKRIMQHKRELGLCPAGKTPIGLKAVESRLCIDEETAHIAKRMFEDYIATGSVNHVKKMLVSEFGIMRGNSHIKNTLKNERYIGKNNGIQVCDALIQPDDFALVQRMLTARSIRNDGSRHAWLFSGLVWCAECGQRLVTHSTRQRGTDYFYYKCKNYEVGICRHKKRINEATLEKYLLAKLSIEVQAHNAKLKAGKTKPPVDTAAIKRKMDKLTDLYLADLINREKYEIEYTALKEKLNVPPEPKPIDEALVMSLIDAYDKLPPSGKKEAWNRFVRRIVIANNGDIFFDLV

SEQ ID NO: 9486 - protein, 430 aa, Unknown
  Description of Unknown: Integrase B9487 sequence
  PTHR30461:SF3,SM00857,G3DSA:1.10.10.2600,IPR036162,PF13408, PS51737,IPR025827,G3DSA:3.40.50.1390,IPR006119,IPR038109, PF07508,IPR011109,SSF53041,PTHR30461,PS51736, cd00338,PF00239
MIQKVVFPQKKQFPLKRTAAYARVSSGKDAMLHSLSSQVSYYNQLIQSNPEWLFCGVYADEALTGTKGNRAEFQKLLNRCRQGEIDLILTKSISRFARNTVTLLETVRELKSLGVDVYFEEQRIHSMSSDGELLLSILASYAQEESYSASENRKWQIRKDFSIGKIGSITILGYRRNAEGVLEIEPNEAELVRMIFSDYISGMGQQRIANKINEMGIPTRQGNLWTNPRIREILTNEKYIGNLMLQKYYRNNHIEKKKTRNQGELPKYYVEEAHEPIIDLETFAKAKAILAQRHEQYTHDGATNRYPLSGLIICGLCGKNYQRKQLPQGIIWMCATFLRRGKRYCPGSKQIPESILYALICDVLKLDEFDAAVFRDNIHHIVIPKPFEVQFFFHDGTSDIRHWKYPSRAESWTEEMKQAARERNQKWVEK

SEQ ID NO: 9487 - protein, 430 aa, Unknown
  Description of Unknown: Integrase B9488 sequence
  PTHR30461:SF3,SM00857,IPR006118,G3DSA:1.10.10.2600,IPR036162, PF13408,PS51737,IPR025827,G3DSA:3.40.50.1390,IPR006119, IPR038109,SSF53041,IPR011109,PTHR30461,PS00397, PS51736,cd00338,PF00239
MRVALYVRVSTEEQAVHGLSVDDQKESLKKWAEENKHKVVDYYIDAGVSGRKSVSKRPELQRLLSDVEAGQIDLVAFTKLDRWFRNIGEFYKAQEVLDAHGVVWQATYEDYETATAAGRLKVNIMLSVAQDEADRTSERVKRIMQHKRELGLCPAGKTPIGLKAVESRLCIDEETAHIAKRMFEDYIATGSVNHVKKMLVSEFGIMRGNSHIKNTLKNERYIGKNNGIQVCDALIPPEDFALVQRMLTARSVRNNGSRHTWLFSGLVWCAECGHRLVTHSTRQRGTDYFYYRCKNYEIGLCSHKKRINEAELEAYLLMKLPIEMQAHNAKLKAGKIKPPVDTAAIKRKMDKLTDLYLADLINREKYEIEYTALKEKLTVPPEPKPIDEALVMSLLDAYDKLPPSGKKEAWNRFIRRIVIANNGDIFFDLV

SEQ ID NO: 9488 - protein, 430 aa, Unknown
  Description of Unknown: Integrase B9489 sequence
  PTHR30461:SF3,SM00857,IPR006118,G3DSA:1.10.10.2600,IPR036162, PF13408,PS51737,G3DSA:3.40.50.1390,IPR025827,IPR006119, IPR038109,IPR011109,SSF53041,PTHR30461,PS00397, PS51736,cd00338,PF00239
MRVALYIRVSTEEQAVHGLSVDDQKDSLKRWAEENKHKVVDYYVDAGVSGRKSVSKRPELQRLLSDVEAGKIDLVAFTKLDRWFRNIGEFYKAQEVLDAHGVVWQATYEDYETATAAGRLKVNIMLSVAQDEADRTSERVKRIMQHKRELGLCPAGKTPIGLKAVESRLCIDEETAHIARRMFEDYIATGSVNHVKKMLVSEFGIMRANHHIKGALSNERYIGLNNGIKVCDALIPPEDFALVQRMLTARSIRNNGSRHTWLFSGLVWCAECGHRLVTHSTRQRGTDYFYYRCKNYEMGICRHKKRINEAELEAYLLMKLPIEVQAHNAKLKAGKIKPPVDTAAIKRKMDKLTDLYLADLINREKYEIEYTALKEKLNVPPEPKPIDEALVMSLIDAYDKLPPSGKKEAWNRFIRRIVIANNGDIFFELV

SEQ ID NO: 9489 - protein, 430 aa, Unknown
  Description of Unknown: Integrase B9490 sequence
  PTHR30461:SF3,SM00857,IPR006118,G3DSA:1.10.10.2600,IPR036162, PF13408,IPR025827,G3DSA:3.40.50.1390,PS51737,IPR006119, IPR038109,IPR011109,SSF53041,PTHR30461,PS00397, PS51736,cd00338,PF00239
MRVALYVRVSTEEQAVHGLSVDDQKESLKKWAEENKHKIVDYYVDAGVSGRKSVSKRPELQRLLSDVEAGKIDLVAFTKLDRWFRNIGEFYKAQEVLDAHGVVWQATYEDYETATAAGRLKVNIMLSVAQDEADRTSERVKRIMQHKRELGLCPAGKTPIGLKAVESHLCIDEETAHIARRMFEDYIATGSVNHVKKMLVSEFGIMRGNHHIKNALGNERYIGKNNGIQVCDALIPPEDFALVQRMLTARSVRNNGSRHTWLFSGLVWCAECGHRLVTHSTRQHGTDYFYYRCKNYEIGLCSHKKRINEAELEAYLLMKLPIEVQAHNAKLKAGKTKPPVDTAAIKRKMDKLTDLYLADLINREKYEMEYTALKEKLNVPPEPKPIDEALVMSLIDAYDKLPPSGKKEAWNRFIRRIVIANNGDIFFDLV

SEQ ID NO: 9490 - protein, 430 aa, Unknown
  Description of Unknown: Integrase B9491 sequence
  PTHR30461:SF3,SM00857,IPR006118,G3DSA:1.10.10.2600,IPR036162, PF13408,PS51737,IPR025827,G3DSA:3.40.50.1390,IPR006119, IPR038109,IPR011109,SSF53041,PTHR30461,PS00397, PS51736,cd00338,PF00239
MRVALYIRVSTEEQAVHGLSVDDQKESLKKWAEENKHKVVDYYVDAGVSGRKSVSKRPELQRLLSDVEAGKIDLVAFTKLDRWFRNIGEFYKAQEVLDAHGVVWQATYEDYETATAAGRLKVNIMLSVAQDEADRTSERVKRIMQHKRELGLCPAGKTPIGLKAVESRLCVDEETAHIARRMFEDYIATGSVNHVKKMLVSEFGIMRGNHHIKNALGNERYIGKNNGIQVCDALIPPEDFALVQRMLTARSVRNNGSKHTWLFSGLVWCAECGHRLVTHSTRQRGTDYFYYRCKNYEIGLCSHKKRINEAELEAYLLMKLPIEVQAHNAKLKAGKIKPPVDTAAIKRKMDKLTDLYLADLINREKYEIEYTALKEKLNVPPEPKPIDEALVMSLVDAYDKLPPSGKKEAWNRFIRRIVIANNGDIFFDLV

SEQ ID NO: 9491 - protein, 430 aa, Unknown
  Description of Unknown: Integrase B9492 sequence
  PTHR30461:SF3,SM00857,IPR006118,G3DSA:1.10.10.2600,IPR036162, PF13408,IPR025827,G3DSA:3.40.50.1390,PS51737,IPR006119, IPR038109,SSF53041,IPR011109,PTHR30461,PS00397, PS51736,cd00338,PF00239
MRVALYVRVSTEEQAVHGLSVDDQKESLKKWAEENKHKVVDYYVDAGVSGRKSVSKRPELQRLLSDVEAGKIDLVAFTKLDRWFRNIGEFYKAQEVLDAHGVVWQATYEDYETATAAGRLKVNIMLSVAQDEADRTSERVKRIMQHKRELGLCPAGKTPIGLKAVESRLCIDEETAHIARRMFEDYIATGSVNHVKKMLVSEFGIMRGNHHIKNALSNERYIGLNNGIKVCDALIPPEDFALVQRMLTARSVRNNGSRHTWLFSGLVWCAECGHRLVTHSTRQHGTDYFYYRCKNYEVGICSHKKRINEAELEAYLLMKLPIEVQAHNAKLKAGKIKPPVDTAAIKRKMDKLTDLYLADLINREKYEIEYTALKEKLNVPPEPKLIDEALVMSLIDAYDKLPPSGKKEAWNRFIRRIVIANNGDIFFDLV

SEQ ID NO: 9492 - protein, 430 aa, Unknown
  Description of Unknown: Integrase B9493 sequence
  PTHR30461:SF3,SM00857,IPR006118,G3DSA:1.10.10.2600,IPR036162, PF13408,PS51737,G3DSA:3.40.50.1390,IPR025827,IPR006119, IPR038109,IPR011109,SSF53041,PTHR30461,PS00397, PS51736,cd00338,PF00239
MRVALYVRVSTEEQAVHGLSVDDQKDSLKRWAEENKHKIVDYYIDAGVSGRKSVSKRPELQRLLSDVEAGKIDLVAFTKLDRWFRNIGEFYKAQEVLDAHGVVWQATYEDYETATAAGRLKVNIMLSVAQDEADRTSERVKRIMQHKRELGLCPAGKTPIGLKAVESRLCIDEETAHIARRMFEDYIATGSINHVKKMLVSEFGIMRGNHHIKNALGNERYIGKNNGIQVCDALIPPEDFALVQRMLTARSIRNNGSKHTWLFSGLVWCAECGHRLVTHSTQQRGTDYFYYRCKNYEIGLCSHKKRINEAELEAYLLMKLPIEVQAHNAKLKAGKIKPPVDTAAIKRKMDKLTDLYLADLINREKYEIEYTALKEKLNVPPEPKPIDEALVMSLIDAYDKLPPSGKKEAWNRFIRRIVIANNGDIFFDLV

SEQ ID NO: 9493 - protein, 430 aa, Unknown
  Description of Unknown: Integrase B9494 sequence
  PTHR30461:SF3,SM00857,IPR006118,G3DSA:1.10.10.2600,IPR036162, PF13408,IPR025827,G3DSA:3.40.50.1390,PS51737,IPR006119, IPR038109,SSF53041,IPR011109,PTHR30461,PS00397, PS51736,cd00338,PF00239
MRVALYVRVSTEEQAVHGLSVDDQKESLKKWAEENKHKVVDYYVDAGVSGRKSVSKRPELQRLLSDVEAGQIDLVAFTKLDRWFRNIGEFYKAQEVLDAHGVVWQATYEDYETATAAGRLKVNIMLSVAQDEADRTSERVKRIMQHKRELGLCPAGKTPIGLKAVESRLCVDEETAHIARRMFEDYIATGSVNHVKKMLVSEFGIMRANHHIKGALSNERYIGLNNGIKVCDALIPPEDFALVQRMLTARSIRNNGSRHTWLFSGLVWCAECGHRLVTHSTRQRGTDYFYYRCKNYEIGLCSHKKRINEAELEAYLLMKLPIEVQAHNAKLKAGKIKPPVDTAAIKRKMDKLTDLYLADLINREKYEMEYTALKEKLNVPPEPKPIDKALVMSLIDAYDKLPPSGKKEAWNRFIRRIVIANNGDIFFDLV

SEQ ID NO: 9494 - protein, 430 aa, Unknown
  Description of Unknown: Integrase B9495 sequence
  PTHR30461:SF3,cd00338,SM00857,G3DSA:1.10.10.2600,IPR036162, PF13408,PS51737,IPR025827,G3DSA:3.40.50.1390,IPR006119, IPR038109,PF07508,IPR011109,SSF53041,PTHR30461, PS51736,Coil,PF00239
MIQKVVFPQKKQFPLKRTAAYARVSSGKDAMLHSLSSQVSYYNQLIQSNPEWLFCGVYADEALTGTKGNRAEFQKLLNRCRQGEIDLILTKSISRFARNTVTLLETVRELKSLGVDVYFEEQRIHSMSSDGELLLSILASYAQEESYSASENRKWQIRKDFSIGKIGSITILGYRRNAEGVLEIEPNEAELVRMIFSDYISGMGQQRIANKINEMGIPTRQGNLWTNPRIREILTNEKYIGNLMLQKYYRNNHIEKKKTRNQGELQKYYVEEAHEPIIDLETFAKAQTILAQRHEQYTHDGATNRYPLSGLIICGLCGKNYQRKQLPQGIIWMCATFLRRGKKYCPGSKQIPESILYALICDVLKLDEFDAAVFRDNIHHIVIPKPFEVQFFFHDGTSDIRHWKYPSRAESWTEEMKQAARERNQKWVEK

SEQ ID NO: 9495 - protein, 430 aa, Unknown
  Description of Unknown: Integrase B9496 sequence
  PTHR30461:SF3,SM00857,IPR006118,G3DSA:1.10.10.2600,IPR036162, PF13408,IPR025827,G3DSA:3.40.50.1390,PS51737,IPR006119, IPR038109,SSF53041,IPR011109,PTHR30461,PS00397, PS51736,cd00338,PF00239
MRVALYVRVSTEEQAVHGLSVDDQKESLKKWAEENKHKVVDYYVDAGVSGRKSVSKRPELQRLLSDVEAGKIDLVAFTKLDRWFRNIGEFYKAQEVLDAHGVVWQATYEDYETATAAGRLKVNIMLSVAQDEADRTSERVKRIMQHKRELGLCPAGKTPIGLKAVESRLCIDEETAHIARRMFEDYIATGSVNHVKKMLVSEFGIMRANHHIKGALSNERYIGLNSGIKVCDALIPPEDFALVQRMLTARSIRNNGSRHTWLFSGLVWCAECGHRLVTHSTRQRGTDYFYYRCKNYEIGLCSHKKRINEAELEAYLLMKLPIEVQAHNAKLKAGKIKPTVDTAAIKRKMDKLTDLYLADLINREKYEIEYTALKEKLNVPPEPKPIDEALIMSLLDAYDKLPPSGKKEAWNRFIRRIVIANNGEIFFDLV

SEQ ID NO: 9496 - protein, 429 aa, Unknown
  Description of Unknown: Integrase B9497 sequence
  PTHR30461:SF3,cd00338,SM00857,G3DSA:1.10.10.2600,IPR036162, PF13408,PS51737,IPR025827,G3DSA:3.40.50.1390,IPR006119, IPR038109,PF07508,SSF53041,IPR011109,PTHR30461, PS51736,Coil,PF00239
MISDCRKGKIDRIYTKSISRFARNTKDCLKNIRELKSLGITVLFEKENIDTADMTDEMMITIMGGLAQEESVSISKNLKWSYQKRFEKGIVNVFSAPFGFKLNNGALIIDKIQAQIVEEIFDMFLNGIGYQRISEICQSKYKVYKDKFSYYGIRYILSNEKYIGDSVYQKTFTTNNLPYRKIQNNGQLNKYCIQNTHEAIISIEIFEKAQKLIESRKHKNIVSESPFRGKLICANCGTKYKRKDSRNKIYWVCRKHDNLAELCMNKRVEEKFIKQSFIRLHNKLWHDYKQILVPLQTALQDLKFRKFSGKTQVMDISKEIAKLREQTHVLARLKTKGFLDEAKYIEQTTELMAKINKLQAELKKFTRSDDEDETLDQIEMLIDFFERRDKPITEFEELAFESIVEKIIVINQHELEFHLIGGLKFKEKI

SEQ ID NO: 9497 - protein, 428 aa, Unknown
  Description of Unknown: Integrase B9498 sequence
  PTHR30461:SF3,SM00857,G3DSA:1.10.10.2600,IPR036162,PF13408, IPR025827,PS51737,G3DSA:3.40.50.1390,IPR006119,IPR038109, PF07508,SSF53041,IPR011109,PTHR30461,PS51736, cd00338,PF00239
MDKENKAVRCAIYTRKSHEEGLEQDFNSLDAQRESGENYIASQKTRGWICLPERYDDGGFSGGNTNRPALKKLLEDIASGKIDVVVVYKIDRLSRSICDFAELSKTFDKFGASFVAVTQDINTSTSSGRMMLNILVTFAQYEREVIAERIRDKMSASRKKGLWVGGVTPFGYRVLNKHLEIVPEQAEIVKRMFQRYSETASVKQVCDELTDGGIRTRTGKFFNPSMVYRILDNHSYIGKVQYKGEVFPGDHAAIIGQTLWNVVHEILKENTAAENGNSRRQQTSASLRGLLKCGHCDCAMGPTYTGKKGKNYLYYICEKDYKRTRPSCPVRRISGGDIEKLVIEQLQKLFNSQTFIDLTAENGNMSRDSVASAFANLSGFWKELFPAERNRLLKLLIERVTVNEGNIEITIKTEGMKNLMMEMEHEHN

SEQ ID NO: 9498 - protein, 428 aa, Unknown
  Description of Unknown: Integrase B9499 sequence
  PTHR30461:SF3,SM00857,G3DSA:1.10.10.2600,IPR036162,PF13408, IPR025827,G3DSA:3.40.50.1390,PS51737,IPR006119,IPR038109, PF07508,IPR011109,SSF53041,PTHR30461,PS51736, cd00338,PF00239
MIQKVAFPQKKPFLLKRTAAYARVSSGKDAMLHSLSAQVSYYNQLIQSNPEWLFCGVYADEALTGTKENRAEFQKLLNRCRQGEIDLILTKSISRFARNTVTLLETVRELKTLGVDVYFEEQRIHSMSSDGELMLSILASYAQEESYSASENKKWQMRKDFEQGKVGSMRMLGYRRTKSGKLEIVPEEAEIVRMIFLYYLSGMGKLAIAKKLNEQQICTVRGCAWTTEDVRRTLRNEKYTGNLLLQKSFRENHITKKKVANIGQLPQYFVAGSHEAIISQEQFDAVQKQMAERQKKYAGSCTTNRYPFTQKIRCACCGKYYRRKTTVTGVVWICSTYNTKGKKYCPTAKQIPENTLLSACCDVLEISEFDAEQFAERIEQIQIPAPNELQFCFSDGTEQTVHWKDRSRSESWTAEMREKARQKKWRQS

SEQ ID NO: 9499 - protein, 428 aa, Unknown
  Description of Unknown: Integrase B9500 sequence
  SM00857,G3DSA:1.10.10.2600,IPR036162,PS51737,G3DSA:3.40.50.1390, IPR006119,IPR038109,PF07508,IPR011109,SSF53041, PTHR30461,PS51736,cd00338,PF00239
MEQYLIYLRKSRSDLEAEAHGEGETLSRHEHTLLELAKRQHLNVTDIYREVVSGDTIAARPMMQRVLSEVEQGVWSGVLVMEVERLARGDTIDQGIIAQTFKFSGTKIITPIKTYDPDNEFDEEYFEFGLFMSRREYKIINRRLQRGRLASAKEGKWPSGLAPFGYRRVKLKNEKGCSLEPIEEQAAIVRMIFDLYTVGLQDEDGSARPLSLGSIATRLNDMHIPSPSGSQWARITIRGIIKNPTYIGMVRWGSRETKKKVVDGKVVSVRGPADPEKECVFKGIHPPLIPKETFELANDKLTRSENTSTHKEKVVRNPLAGLLVCSECGRQMMRMINPVHPDMPVVRCPRRGCPNCSSYLPIVEERVIQGLSEWMKGYELEWSSAAASSSVSTVFPLSHKSSVTSPPSLNTGKFRPIRFSGYSDSSFL

SEQ ID NO: 9500 - protein, 427 aa, Unknown
  Description of Unknown: Integrase B9501 sequence
  PTHR30461:SF3,IPR036162,PS51737,IPR011109, PTHR30461,PF00239,G3DSA:1.10.10.2600,IPR006119, SSF53041,cd00338,SM00857,IPR025827,IPR038109 ,PS51736,mobidb-lite,PF13408,G3DSA:3.40.50.1390,PF07508,Coil
MDRIIKRVDFPKIMQPQFLKVCAYTRVSSGKDSMLHSLSAQVSHYSEMIQSHTGWVYCGVYSDEALTGTKSDRDGFQQMLTDCRAGKIDMVITKSISRFARNTVTLLETVRELKSLGVDVFFEEQNIHTMSADGELMLTILASYAQEESRSVSENQKWRVKRNFEAGIPWNGRMLGYRMQDGKYYIIPEEAELVRRIYREFLDGMGRNRIAAKLNDEGIQPTRYGEEWHPQTIAKILRNYAYTGNLLLQRFFCESYITKKTVPNNGQKTMYHAERTHEAIIPLEEWKEVQTEIERRAEQHKSKPPAQPSFFYTGRIQCAKCGKNFRRKTTAARVVWICATLNTKGKKHCASKQIPEATLDELVRQVTDDPFSVKKIIADDGNTLHFHFSDGTAVTRTWTDRSRAESWTPEMKEKARQQSLARRRQKS

SEQ ID NO: 9501 - protein, 427 aa, Unknown
  Description of Unknown: Integrase B9502 sequence
  PTHR30461:SF3,IPR036162,PS51737,IPR011109,PTHR30461, PS00397,PF00239,G3DSA:1.10.10.2600,IPR006119,SSF53041, cd00338,SM00857,IPR025827,IPR038109,PS51736, IPR006118,PF13408,G3DSA:3.40.50.1390,Coil
MRIALYARVSTEEQAIHGLSIEAQSEALEEWAKQEHANVVGTYIDAGISARKPASKRPSMQRLLADIERGKIDMVVFTKLDRWFRNIAEYYKVQEVLERHGVSWKTIHEDYDTATASGRFKVNIMLAVAQDEADRTSERIKAVFDSKRKRGEAVSGSVPPGIKICNKKFTVDEDKAPIMRDVFNFFIANHSVYATQRYAANTHGFLRDTSTLKRLLANPLYRGRVVDEATFDLAKELLSVRSQRNSGSPRGRIYLFKGMLHCDVCGGMMSGIVCKDFYYYRCNKHTFTGNCPNSKYIRESHVEQWLLERVVSECDAYNSRITQERTERPRIDDAGIRRKMSKLKDLYLSDLIDRDEYERDYTELRQTLEKVQEAEPPAKPIDVEYVRSAIAMYDDLERPEKKEFWMRIVKEIIAYPDGTFSFVLRNI

SEQ ID NO: 9502 - protein, 425 aa, Unknown
  Description of Unknown: Integrase B9503 sequence
  PTHR30461:SF3,SM00857,G3DSA:1.10.10.2600,IPR036162,PF13408, PS51737,IPR025827,PS51736,G3DSA:3.40.50.1390,IPR006119, IPR038109,PF07508,IPR011109,SSF53041,PTHR30461, mobidb-lite,cd00338,PF00239
MPRTVEQIQFTPHMPKALRVAAYARVSCGKDAMLHSLAAQVDHYSTYIRHHPGWEYVGVYADEAKTGTRDSRENFQRMLADCRKGKINHIITKSISRFSRNTVTLLETVRELKGLGISVYFEEQSIDTATADGELMLSILASYAQEESLSASENQKWRVKRNFEEGIPWRFFMLGYRRENGKLAIVPEEAEIVRSIFDDYLAGKGVTAIAKRLNESGYATQSGCVFHKSAVERILRNYAYTGNLLLQTKFRENHLTKVTRKNQGELPRYHAADTHEAIISQETFDAVQAEILRRKRKYASTKPQQPSPFTGLITCAICNKHYRRKTTATGPVWICSTYNSYGKSYCPSKAIPEEKLMQTVALVGHTGEITAITAHNDNLLEFTLKDGTNAVKRWQDRSRAESWTAEMRKSAGEKTRERNKRHAES

SEQ ID NO: 9503 - protein, 425 aa, Unknown
  Description of Unknown: Integrase B9504 sequence
  SM00857,G3DSA:1.10.10.2600,IPR036162,PF13408,IPR025827, G3DSA:3.40.50.1390,PS51737,IPR006119,IPR038109,PF07508, IPR011109,SSF53041,PTHR30461,PS51736,cd00338, PF00239
MRVKVINKRPASVLQKKRVYAYARVSTDSRQEDSLENQMETYERLITGNSEYEFIGVFADQGISDYCENRQQFQRMMEKARAGEIDLIITKSISRFARNTVTVLKFARELKELGVGIFFEEQNINTLSGDGETMLAVLASFAQEESRSMSENNKWSIRKKFERGEVMITTSRFLGYDKNEYGDLIVNRKEAEIVSLTFDLYLMNVGSSRIGELLDYLGVKTVTGTTWESGTINGMLCNEKYKGDFHLQKYYTPENKRNHTRKNNGEVQSYYISENHEPIVSPEVWEQVQKVREQRKRDRNIGQDNTMKFQNRYPLSGMLICPYCGKTLRRRQVYKKKIQWLCSTYIEKGVKACKGIRIDDAELQGLNITEQTVIEEVVKNGKKHYCYTSKADFDCGIRNSTVSAEIEDGSVLPSVNRPRRTVIKL

SEQ ID NO: 9504 - protein, 425 aa, Unknown
  Description of Unknown: Integrase B9505 sequence
  PTHR30461:SF3,IPR036162,PS51737,IPR011109,PTHR30461, PF00239,G3DSA:1.10.10.2600,IPR006119,SSF53041,cd00338, SM00857,IPR025827,IPR038109,PS51736,mobidb-lite, PF13408,G3DSA:3.40.50.1390,PF07508,Coil
MYEDIKTACLYVRFSSHNQTEQSIEGQTRVCRDFCKRHNIRIVEIYADRATSASKDIEKRVQFLKMIKDSEKGLFDAVIVYKLDRFARSRYDSATYKYRLKRNGVQLISATENISNDPEGIILESVLEGMAEFYSAELSQKINRGMRESAYKHNSIGGAIPLGYKIEDKKLVIDPKTAPIVKEAFKKYADGETVAEICRQFNARGYKTSKGTAFGKSSFTKIFRNERYIGVYTFHDYRAEDAIPAIIDKDLWDRVQLRVGKIKNAPARNKAKVVYLLSGKIFCGHCGSKMNGNCNAGNYCYYQCYGKKNGNVDCKKKNIRKEFIERLVAQDALSLLTDEYIEQIATIACEKNQHEIELDSALPTIRDRIHQVDLSLNHLLKAIESGSAPDMLVKRMGELEKEKKDLQAQAKKESEDIVELDKAQV

SEQ ID NO: 9505 - protein, 424 aa, Unknown
  Description of Unknown: Integrase B9506 sequence
  PTHR30461:SF3,SM00857,G3DSA:1.10.10.2600,IPR036162,PF13408, PS51737,IPR025827,G3DSA:3.40.50.1390,PS51736,IPR006119, IPR038109,PF07508,IPR011109,SSF53041,PTHR30461, mobidb-lite,cd00338,PF00239
MDRIIEKMRFDVPTQPKAKRVAAYARVSSGKDAMLHSLSAQISYYSEMIQEHPGWLYAGVYSDEALTGTKENRSGFQSLLADCRAGKIDMVIVKSISRLARNTVTLLETVRELKSLGVDVYFEEQNIHTLSSEGELMLTILASYAQEESLSVSENQKWRIQKNFKEGKPWNGTMLGYRNVNGMLTVVPEEAEIVKRIFDMYLSGMGIQLIANTLNREGISTRLGAKFKRSAISKMLRNEAYAGNLLLQKTFKDNHIAKRTRINRGELPMYYVENAHEAIIPSEIFQKVQEMITQRAEKYAPPSLEKPAVYPFTSLITCTKCGKHFRRKTVRGKPVWICPTFNYEGKDACAAKQIPEEILEKITSDMDMENVAGITADDGNRLLFHFTDGTVTERTWCDRSRSESWTDEMRQKARDRTKARNQKK

SEQ ID NO: 9506 - protein, 423 aa, Unknown
  Description of Unknown: Integrase B9507 sequence
  PTHR30461:SF3,cd00338,SM00857,G3DSA:1.10.10.2600,IPR036162, PF13408,PS51737,G3DSA:3.40.50.1390,IPR025827,IPR006119, IPR038109,PF07508,IPR011109,SSF53041,PTHR30461, Coil,PF00239
MKRVYCLYRVSTKGQVDKDDIPMQKTSCREFAERNGWTILKEFQEKGVSGFKVSASDRDAIQDLKAAAEKKEFDVLLVFMFDRIGRIDDETPFVVEWFIKHGIEVWSVNEGEQRMDNHVDKLMNYIRFWQANGESQKTSARVKTRLNQMTLDGKFTGGVAPFGYKLIKSGEVNKKGKELMDIVVDDDEAPIVKKIFEMTVKEGYGSYRMADFLNSHGIRTHNNSKFQCNTVNRILKNKMYCGYFISGGVESPYIERLHIIDENVYEQAQFILSQRSNKNEEKKQIARTTKGSTLLSGNIYCAHCGQKMVSTSYIDKYDRADGSQYRVRRQRYICTNKAMKRGACDGQSAYVAHRIDGAVLATLRDYLAKIKSTPKDIALEKRYKSEISEYKRKQTKIEKEIDKLKRQVIELSAEIGRSLLGES

SEQ ID NO: 9507 - protein, 423 aa, Unknown
  Description of Unknown: Integrase B9508 sequence
  SM00857,G3DSA:1.10.10.2600,IPR036162,PF13408,PS51737, G3DSA:3.40.50.1390,IPR025827,IPR006119,IPR038109,SSF53041, IPR011109,PTHR30461,PS51736,cd00338,PF00239
MRAALYERVSTDEQRIHGLSLDAQREVLEEYAKNHGMVVAGHYTDAGVSGQKPLSKRPALRRLLEDVDAGKIDIVLFTKLDRWSRKVKEYYKAQDILDRHKIPWRAVLEDYETETPSGEFKVNIMLSVNQNEAQRTSERIKTVFDAKRSRGEVCSGKVPFGVRISADKCLEAVEPEASIVRDVFREYLAVRSSYIAQRYMANNYGVVRNTTAFRRMLRNQRYRGLVVDEAVFDAVQEVLAVRSQRNAPIGRVYLFKGLVVCGNCGHHAAAYFCKNVCYYRCSYRVNTGQCNFAKHVREDVIERKLLDGFLIAAERLNAELLGRRAAPPIDRAGIKRKMDKLTDLYMSDLISRDKYEVEYRELQAALSVPDPEEQRPIDIGAARSALEMYGQLDRAGQKEFWSRTIKEITLHPDAGISFSLRQL

SEQ ID NO: 9508 - protein, 422 aa, Unknown
  Description of Unknown: Integrase B9509 sequence
  SM00857,IPR006118,IPR036162,PF13408, IPR025827,G3DSA:3.40.50.1390,IPR006119,SSF53041, PTHR30461,PS00397,PS51736,cd00338, PF00239
MKAALYIRVSTEEQAIHGLSIAAQTEALDEWAKANGTTVVDHYVDAGISARKSAAKRPELQRLLKDVQAGRVDIIVFTKLDRWFRNIAEYYKVQEVLDKHKVKWRAIHEDYETETSGGQFKVNIMLSVAQNEADKTGERIKAVFDGKKARGEVCSGSVPPGIRIENKHCVADEPMASAVRDLFSHYIATQSLYKTRIYAGSKYNLYRDSKTFRRMLSNARYRGLVVDNAAFDLAQSMLSARAQRHSCSTLGNTYLFRGLMRCPECGSAMNACVCKNIYYYRCSLCFGNRKCSYNLYTREDKVEAFLLTNIMAKCTEYNAEIAGREKEEIDYAGIRRRMAKLKDLYLSDLIERDEYEHDYRELRKILETPQTAPKPIDIAQVRSSLTDYDELTRDGRKEFWTRTISEISPSGRDFFNITVRKP

SEQ ID NO: 9509 - protein, 422 aa, Unknown
  Description of Unknown: Integrase B9510 sequence
  PTHR30461:SF3,SM00857,IPR036162,PF13408,IPR025827, G3DSA:3.40.50.1390,IPR006119,SSF53041,PTHR30461,Coil, PS51736,cd00338,PF00239
MRAALYERVSTEEQKMHGLSLEAQKEALEAYAKERSMLIVGHYTDAGVSGQKPISKRPALQRLLADVQAGKVDIVLFTKLDRWSRKVKEYYKAQDVLDKRKVPWRAILEDYETETPSGEFKVNIMLSVNQNEAQRATERIKAVFDAKRARGEVCSGSVPPGIAITADKHLEAVEPGASMMRDIFREFIAVRSIYAAQRYMAQKYNVLRDTTTFRKLLCNKKYRGLVIDAEVFDVAQEILNTRAQRNAQTGRVYLFSGLLVCGCCGYRMNAYVCKDYYYYRCARRLSVGDCNFASHIREEKVERYLLDHFLIRVEEYNAELHARRQAPIDTAAIKRKMDKLTDIYIADLISREKYEREYRELQAALSAASRVDERPIDVAQARAVLELYNQLDKPGKKEFWSRTIKSITVHPDSSFSFTLRQL

SEQ ID NO: 9510 - protein, 422 aa, Unknown
  Description of Unknown: Integrase B9511 sequence
  PTHR30461:SF3,SM00857,G3DSA:1.10.10.2600,IPR036162, PF13408,IPR025827,G3DSA:3.40.50.1390,PS51737, IPR006119,IPR038109,PF07508,SSF53041, IPR011109,PTHR30461,PS51736,cd00338,PF00239
MRLRKIEPIEAKTKKIRVCAYARVSTDSLKQGESFENQVTTYEALIKSKPEYEFAGVYADQGLSGTSENRPEFQRMLADCRAGKIDLIITKSISRFARNTTIVLDYTRELKQLGIGVYFEENNINTLSAEGELMMTVLASFAQEESRSISENNKWSIGKRFERGEGMINTTRFMGYDKDETGDLVINKKEAKIVRRIFEMYLSGEGCHRIAKILNDEGIKTITGSTWHPSTIKGMLTNEKYKGDFHIQKYYTPEGKRNQTVRNKGEVKSFYVSENHPAIVSEEEWHQVQELMQYHKKQRNIQSGDKYQRRYPMSGMLVCPHCGKSLRRRYVYKRKVEWICSTYIQQGKEACKGIRVRDELLTGLSFTEPMVVEEVFENGEKHYGYTSKAAYDNGERAADRIEEERSSVLPRINRSRRTVIEL

SEQ ID NO: 9511 - protein, 421 aa, Unknown
  Description of Unknown: Integrase B9512 sequence
  PTHR30461:SF3,SM00857,G3DSA:1.10.10.2600,IPR036162,PF13408, IPR025827,G3DSA:3.40.50.1390,PS51737,IPR006119,IPR038109, PF07508,SSF53041,IPR011109,PTHR30461,PS51736, cd00338,PF00239
MKLRKIEPLKPKQKKLRVCAYARVSTDSLKQGESFDNQVSTYERVIKSNPEYEFVSVYADQGMTGRSENRPEFQRMIADCKAGKIDLIITKSISRFARNTTTVLKYTRELKEIGVGVLFEENNINTLSSEGELMMTVLASFAQEESRSISENNKWTLKKKFERGEGMVNTARFMGYDKDETGDLVINKEEAKVVRQIFKMYLSGMGCHRIAKALNEEGVPTIAESSWHASTIKGMLTNEKYKGDFHIQKTYIPEGTHQSVKNNGQVQSYYVTEDHPAIISAEEWQQVQELMEYHRKQRNIGKGEKYQNRYPMSGMLVCPYCGKSLRRRYVYNRKVEWLCATYIHKGKEACKGIRIRDTELTGLSFSEPMVVEEVMIDGEKHYGYTSKRAYDAGERAADRIEKESSSVLPRVNGPRRTVIKL

SEQ ID NO: 9512 - protein, 421 aa, Unknown
  Description of Unknown: Integrase B9513 sequence
  cd03768,PTHR30461:SF3,SM00857,G3DSA:1.10.10.2600,IPR036162, PF13408,IPR025827,G3DSA:3.40.50.1390,PS51737,IPR006119, IPR038109,PF07508,IPR011109,SSF53041,PTHR30461, PS51736,Coil,PF00239
MQQLIKDADTGLYDAVLVYKLDRLSRSQKDTLYLIEDIFQKNNIHFISLSENFDTSTAFGKAMIGILSVFAQLEREQIKERMSMGRVGRAKSGKIMEFNNPAFGYEIDGDNYKVDPLRAEIVKRIYKMYLSGTSINKIKETLNSEGHIGNKKNWSDTRIRYILSNPTYLGKIRYDGKTYDGKFSPIIDEETFNKTQNELKERQTATYKRFNMKLRPFQSKYMLSGLLRCGYCGATLFVNSYVYNGKRKLRYNCPSTYKSKQKTRTYKIMDPNCPFKLVYAKDLEPAVINEIKNLALNPQSIQKPVKKTPDIDVEAIQKELTKVRKQQQRLIDLYVISDDVNIDNISKKSADLKLQEETLKKQLAPLEEPDNDDKIVAFNEILAQIKDIDSLDYDKQKFIVKKLIKKIDVWNDNKIKIHWNI

SEQ ID NO: 9513 - protein, 421 aa, Unknown
  Description of Unknown: Integrase B9514 sequence
  SM00857,G3DSA:1.10.10.2600,IPR036162,PF13408,IPR025827, G3DSA:3.40.50.1390,PS51737,IPR006119,IPR038109,PF07508, IPR011109,SSF53041,PTHR30461,PS51736,cd00338, PF00239
MKLRKIEPLKPKQKKLRVCAYARVSTDSLKQGESFENQVSTYERVIKSNPEYEFVSVYADQGMTGRSENRPEFQRMIADCKAGKIDLIITKSISRFARNTTTVLKYTRELKEIGVGVLFEENNINTLSSEGELMMTVLASFAQEESRSISENNKWTLKKKFERGEGMVNTARFMGYDKDETGDLVINKEEAKVVRLIFKMYLSGIGCHRIAKALNEEGVPTIAESSWHASTIKGMLTNEKYKGDFHIQKTYIPEGTHQSVKNNGQVQSYYVTEDHPAIISAEEWQQVQELMEYHRKQRNIGKAEKYQKRYPMSGMLVCPYCGKSLRRRYVYNRKVEWLCATYIHKGKEACKGIRIRDTELTGLSFSEPMVVEEVMINGEKHYGYTSKRAYDAGERAADRIEKESSSVLPRVNGPRRTVIKL

SEQ ID NO: 9514 - protein, 420 aa, Unknown
  Description of Unknown: Integrase B9515 sequence
  PTHR30461:SF3,SM00857,G3DSA:1.10.10.2600,IPR036162,PF13408, IPR025827,G3DSA:3.40.50.1390,PS51737,IPR006119,IPR038109, PF07508,IPR011109,SSF53041,PTHR30461,Coil, PS51736,cd00338,PF00239
MQREESITAQKRYMMMYAKRNNMEVIDWYCDEAKSAKTVNRPAFQKMINDAKNNPEFKAVLVHKTDRFSRNLSDSIQYKKLLEEYGVQVIFVNERFENNPESHLLYHIMGSVNQFYNENLAREVMKGLKENAYQCKFTGGRPPLGYDVDKDLKLVINEKEAEAVRLIFEMSAEGYGYGETIDKLNILGYKTKKGLPFVKNSLYEILRNEKYKGTYIFNRSCSANSLNKRNNHRRKPEEEIIRIENGCPAIVSSGLWHRANAVKKATRSSYTNAKNTYLLTGLIHCGECGGKFHGNVRYNKNNTNLVYRCSSKKNKRKYESKEIRCEYLDSFVIDKFVEFFFNDDNIKVITKQLNEQYSKSCISDLEYNEAKSTLKILEKNINNLVEAIAKTGINDIMSDKIKEYEEQIKKTAEFIQKYEK

SEQ ID NO: 9515 - protein, 420 aa, Unknown
  Description of Unknown: Integrase B9516 sequence
  PTHR30461:SF3,SM00857,G3DSA:1.10.10.2600,IPR036162,PF13408, PS51737,G3DSA:3.40.50.1390,IPR025827,IPR006119,IPR038109, PF07508,IPR011109,SSF53041,PTHR30461,PS51736, cd00338,PF00239
MRYYTEVITRNAEYELVDIYADEGISGTNTKKRDDFNRMIADCRAGKIDLIITKSISRFARNTLDCLNYVRELKDLGIGIIFEKENINTLDAKGEVLLTILSSLAQDESRSISENCTWGIRRRFEQGKHKMSTKRFLGYDTDEEGHLVVNRQQAKIVVRLYEEFMSGKTVDYIARIFKTEKIKNWDGKYNWQASTLDSMLRNEKYMGDAILQKSYTADFLSKRRVMNDGSVQMYHIEEDHEPIIDIETWEAVQAELERRAQYCTDHFTNAYSQKSEINPFYAKIICGNCGNIYSRVKYTTRAGTKITKWRCGSCNKADGHKVCSNRYVTDETFTKLFVMGWNEIVEHQEEYQQYWQVNLKGEDVLLRYKTKLLIKRTAAGPIKKFEPELMMAVMDYITVFEDGRLQIKFYDGTEFEVATE

SEQ ID NO: 9516 - protein, 419 aa, Unknown
  Description of Unknown: Integrase B9517 sequence
  cd00338,SM00857,IPR036162,PF13408,PS51737, IPR025827,G3DSA:3.40.50.1390,IPR006119,PF07508,IPR011109, SSF53041,PTHR30461,Coil,PF00239
MKRVISYIRFSSEKQAKGDSLRRQSKMVTDWLKAHPEYYLDQDLSFRDLGVSGFTGKHLKGGLGDFLTAIEKGLVKAGIKVSKRCPAWLKLNDDRKSFSVIPEKVETVKRCFQLRLEGKSIWEIVRTLNAEGHQTLNQYKAGKFGQTSVQDLLKNRSVIGYFTPKGCEEIAGYYPSVIDETTFYKVQQLSHSRYGRKPASDKPLSVNLFKGVIRCSECGHALIITGFSDTRNGIYRCPLRNENRCSAKGLSRKQTDGTLLALLSRLDRFDSDMTNTIDTLKLHREHISSNIEKLVQLSLEIEDLSAITSKLRQLKNELSQVDADIEKETQRLKSIDVGCLSDCDLTTKAGRIEAQLIIKSAVKEVVLNTAKRRCKVTFHNGKAITLPITENPSDNVTEAIQSLSEVTERGLIDVDEVII

SEQ ID NO: 9517 - protein, 418 aa, Unknown
  Description of Unknown: Integrase B9518 sequence
  PTHR30461:SF3,SM00857,IPR036162,G3DSA:3.40.50.1390,IPR006119, SSF53041,PF00239,PTHR30461,PS51736,Coil,cd00338
MKIVDHYCDAGVSGGIAYKKRPEMMRLLQDVADGKIDIILFTRLDRWFRNIKEYFKVQEILEEHNVEWKAIWEDYRTDTANGRMAITIFLAIAQNEREKTSERIQVVFENKRKNKESFFGKSSTPFGYMEQKDEDGITRLVKDPELEPALQMFWDIAVKYENVNKAAKMVNLEYGIKKNKNKWMELSKKEIYTGNYRGVEGYCPAYVSVEDWLKLQNRKIPRQSKSDRVYLFTGLIECPVCHNNLASTYCVHKQPDGSKREYHNYRCQFKESYVCKYNHTFSELKIEKWLLKNIRNLMHEEVARVEVEKTKPRPRPKTNVAALKEQLRRLEVVYMTGNKQDEEYIKEQKELNNAIKKAENETPKTDADKDLNMLHEILSTDFESVYKTLSAEDRRRFWRGLINRIYLDGNKISHVDFN

SEQ ID NO: 9518 - protein, 417 aa, Unknown
  Description of Unknown: Integrase B9519 sequence
  PTHR30461:SF3,cd00338,SM00857,IPR036162,PF13408, IPR025827,G3DSA:3.40.50.1390,IPR006119,SSF53041,PTHR30461, PS51736,Coil,PF00239
MEKKERIVERVQFPNAQKVKLLRTAAYAKVSNGKDAMLHSLSAQVSYYNSLIQSNPEWLFCGVYADEALTGTKDNRENFQRLLSECRAGHIDLIITKSISRFARNTVTLLETVRELKNLNVDVYFEEQNIHSISPDGEFLLTLLGSYAQEESYSASENHITKRKMPNHGELPQYFVEHSHEAIIDPEEFELVQAEIERRKGLGKEYSGSSIFSAKIVCACCGGFFGSKVWHSTSKYKRTIWQCNHKFSNGVKCETPHLYEDDIKKRFIEVCNQIATDRADFLTSCREIVILLSNTAALDKKIEAQYAHINELTVSMQEFIKENAMEAQDEDFYKVKMAEYNAKKADMEKVLHELLNKRAERLSRKELLEGLIRTMEHDGIVTDTFDGKLWLLLVEKATVGTDGKLTFTLRNGMEIEV

SEQ ID NO: 9519 - protein, 417 aa, Unknown
  Description of Unknown: Integrase B9520 sequence
  PTHR30461:SF3,cd00338,SM00857,G3DSA:1.10.10.2600, IPR036162,PF13408,PS51737,IPR025827, G3DSA:3.40.50.1390,IPR006119,IPR038109,PF07508, IPR011109,SSF53041,PTHR30461,PS51736,Coil,PF00239
MSKNCVIYARYSSDRQRDESIEGQIRECTAYAENENLNIVKIYVDRAMSARTDHRPEFKKMIQDSTKGSFQYVLVYQLDRFNRNRYDSAMYKAKLKKNGVKVLSAKENIADDPSGIILESVLEGMAEYYSAELSVKVTRGMTENALKGIWPGGTVLQGYKLDKNKKLIIDEKYKPMVEFIFNEYINGCRMETIARQVNAMGYKRKSGKPFTMQSIAGILDNEKYTGTFIWKDIKIEQCYPAIINYETYYRVQELRQLRAKKKNSKSEIYQLCTKLVCGKCGASYIGMSARSSNGSTHYYYACYNRRKHGSCDAKNIRCADIENLVIDYTYKMLQDEEIINKIAQQAVKAQNIPLVEDNTLERLKAELALKEKELDNYMKAIASGLHSTTINATIETVEQHIEKLKQDVAKEELKKGL

SEQ ID NO: 9520 - protein, 417 aa, Unknown
  Description of Unknown: Integrase B9521 sequence
  PTHR30461:SF3,SM00857,G3DSA:1.10.10.2600,IPR036162,PS51737, G3DSA:3.40.50.1390,IPR006119,IPR038109,PF07508,IPR011109, SSF53041,PTHR30461,PS51736,cd00338,PF00239
MMRWRNRYTLTNYSSDVAQKSDGDRCSVRSCGVQILTRITIGHPILLTYIFERGDTSLETNKQNEIRDAYEHSAQVQCIPASIKKTTEHSEEDPLMVAPYCRVSTDSKDQLASYELQCQYYKEYVSKHPGWRLYDIYADEGISGTSVKKRTDFLRMIDDCKAGKINMIIVKNIARFARNVVDCVATVRMLKALDKPVAVYFEDIAINTLTQTGELLMVVMAAIAQGESEAKSESVKWGFQKRFEKGLPKLADLYGYTRDKRLLEIYEPEANVVRLIYQMFYDDRTIPEICYILNQQGIPSPRGGQWTYSTVKTILTNEKYSGDVLMQKTVTVDIFSHRSIRNDGRANQFFIQGYHKAIIPRALWLEVQQILKGENVVPVPSVDEVADLSASDVPRILDGFFVIKPRKDGNNEYLRQL

SEQ ID NO: 9521 - protein, 416 aa, Unknown
  Description of Unknown: Integrase B9522 sequence
  PTHR30461:SF3,SM00857,G3DSA:1.10.10.2600,IPR036162,PF13408, IPR025827,G3DSA:3.40.50.1390,PS51737,IPR006119,IPR038109, PF07508,IPR011109,SSF53041,PTHR30461, PS51736,cd00338,PF00239
MAHISVVTPVRPPTPKLVNVAAYARVSTNAVEQLASLSAQVSYYSRLIQSTPGWAYAGVFTDEGITGTSTKSRQGLADLMDTARSGVVDIVLCKSISRLARNTVDLLATVRELKDLGVAVRFEREQIDTLSADGELLLTLLASFAQEESRSLSQNVKWAIRNRYKSGGTNSFVVYGYQWADCQFTIVEEEAKIVRLLFANYLDGISPEKTATMLNAEGKRSRGGGRFYGSVFRRMLENERYKGCQMLQKMYRPTIQAPTRSFNDGELPRYWVEQALPAIIDEAMFDAVQAEIAHRREAGPAATPSKNTGVFTGRICCGACGKNYQRKTRTYKSGTSYKFWRCWSACTGNGNPCRGHNLRETLLEQACADMLGTQGFDPVQVGEQIVMIEAFEHQLTFHLADGTMTPVGLTSEGRLA

SEQ ID NO: 9522 - protein, 416 aa, Unknown
  Description of Unknown: Integrase B9523 sequence
  PTHR30461:SF3,SM00857,G3DSA:1.10.10.2600,IPR036162,PF13408, PS51737,IPR025827,G3DSA:3.40.50.1390,IPR006119,IPR038109, PF07508,IPR011109,SSF53041,PF00239,PTHR30461, PS51736,Coil,cd00338
MAHISVVTPVRSPAPKLVNVAAYARVSTNGTEQLASLSAQVSYYSRLIQSTPGWAYVGVFTDEGITGTSTKSRQGLADLMDAARSGGVDIVLCKSISRLARNTIDLLATVRELKDLGVAVRFERERIDTLSADGELLLTLLASFAQEESRSLSQNVKWAIRNRYKSGGTNSFVVYGYKWADGQFTIIEEEAKIVRLLFANFLDGISPEKTATMLNAEGKRSRGGGRFYGSVFRRMLENERYKGCQMLQKMYRPTIQAPTRSLNDGELPRYWVDNALPAIIDETTFDAVQKEIAHRREVGPAATPSKNTGVFTGRICCGACGKNYQRKTRTYKSGTSYKFWRCWSACTGNGNPCRGHNLRETLLEHACADMLGTQGFDPVQVGEQVVMIEAFEHQLTFHLADGTMMPVGLTSEGWLA

SEQ ID NO: 9523 - protein, 416 aa, Unknown
  Description of Unknown: Integrase B9524 sequence
  PTHR30461:SF3,SM00857,G3DSA:1.10.10.2600,IPR036162,PF13408, IPR025827,G3DSA:3.40.50.1390,PS51737,IPR006119,IPR038109, PF07508,SSF53041,IPR011109,PTHR30461,Coil, PS51736,cd00338,PF00239
MARKKSKLNDNNLAIAYYRYSSHSQNEASIEQQRELAHEWADAHGLKIVREYEDAAISGTKEDRPGFQLMLSEVAKIRPNTLIAWKTDRLGRDKYVLAMAKKTIRDAGCEIHLLAENIPTDTAEGILIEGLMEALAEYYSRNLSVHIQRGMDFNAEHANFNGHKVFGFKTEKVDKKRKYVIDPDTAPFVQLMFTKYAEGEPMQSICDEFNEAGLRTSRGNPFGVKTMHRMLKNRAYIGEYRHGEFVVPGGMPALVDEETFDRAQKRLAENKRKGSQRARGMDEDGAPRYWLTGKLYCGECGETMQGVSGTSKTGRTYYYYYCSAQRKKLCAKKKVKKDWIEDLVTDVLRYIIDDSENLMSLAVDAAVYYKEHYKETGYLEGLEAKRKEVEKGIANLMKAIEGGALSDTPHRAPEPA

SEQ ID NO: 9524 - protein, 415 aa, Unknown
  Description of Unknown: Integrase B9525 sequence
  PTHR30461:SF3,SM00857,G3DSA:1.10.10.2600,IPR036162,PF13408, IPR025827,G3DSA:3.40.50.1390,PS51737,IPR006119,IPR038109, PF07508,IPR011109,SSF53041,PTHR30461,PS51736, cd00338,PF00239
MKKIRLVLPPPKEQKKLRVAAYCRVSTKSKAQKESLRNQILYYTERILDNDNWEFAGVYYDFGKTGLRKKGRAGLERMLKQADKGKIDYILTKSVSRVSRDTLELLNIIRFLKERGISMYFENEKLDSLNPVAEAYITLSGAVAQEESRNISENMQWAVTRRFEQGTFTNYKAFMGYQCIEGELVIVPEQAEVVKMIFDFYLTGYTFAQIKAELEKRNIKTATGKSQWDTTTIQKMLKNEKYKGDSLFQKTFTEDYLNGIRKKNEGQRPKYYVKDSHPAIISPEIFDRVQEEMFLRARLVLDEKGEKSNIGNRYSSKYLFSNLLVCGNCGAGFRRRTERGKIVWRCGTRMEKGKMVCGCSPTLQDEKMKRILAVAVCGGVYDENIVKNKVKRVDVYEKQIIICFAEENEYKVCSL

SEQ ID NO: 9525 - protein, 414 aa, Unknown
  Description of Unknown: Integrase B9526 sequence
  PTHR30461:SF3,cd00338,G3DSA:1.10.10.2600,IPR036162,PF13408, PS51737,G3DSA:3.40.50.1390,IPR025827,IPR006119,IPR038109, PF07508,IPR011109,SSF53041,PTHR30461,PS51736, Coil,PF00239
MMADAMENKFDVIIFHKIDRNSRNELNYFIFKDKLEKLGIRYEYAAQPIDTDSPEGQVMETVMVGMAAYYSRNLAKETKKGMNENAYKTIFNGGYAPLGYKIVDKHYVIDEKEAEAVRLIFNLYLDGKGYGEICLALAARGYTTRSGKNFPKNSLHDILRNERYMGTYTFNRVPKAKRRNSHSYARPNDFISIPDAIPAIVSKETFLAAQEKMLLNKKRKGGAYTAKRDYLLSGKFFCGYCGSAMQGYSCCTRGNMYYYYSCARKDRVPADRCKQKMIRAEVIEHWIMSTLEKEIFSDAGIQRVADSMSTDFGNVNKEVKNATTVLLQRKAAAERKLNNLYQVIEDGDADEFDMQRLKKTKEELRNINNEICETAVKSAPDIDTSKIVSLLKNMREEIFAKKIATTQNKLLNCL

SEQ ID NO: 9526 - protein, 410 aa, Unknown
  Description of Unknown: Integrase B9527 sequence
  SM00857,G3DSA:1.10.10.2600,IPR036162,PS51737,G3DSA:3.40.50.1390, IPR006119,IPR038109,PF07508,IPR011109,SSF53041, PTHR30461,PS51736,cd00338,PF00239
MAYAMYLRKSRKDDDTGIEDTLARHEKMLQDLADRMGILVCEQDVYREVVSGESIEARPQMQRLLKHVELGEYDGVLCVELERLSRGNGEDQSRILKAFQFSDTKIITLNKTYDLAGEDEFDEEFFEFGLFMSRREYKMIKRRLLRGRMQSQQDGYFIGATPPFGYDKMKNPDGKGWILIPNEQTPIVQMIFERYASGESAASIMHELNRMGIQPSKVYDTAWTSHRVRDIIKNRVYLGEINVKIKRTEKRIEDGKIIESRVRNLNHGTVKGKHEPIVSVETFNKCQELLAMRSTRQAVSKQLSNPLASFLHCSKCGKVMRRTTYTWKGVTTEHLQCSTFKCETRNSSLPMVENMILDALKDELSRQLTVLAEMENPIYRIPNDARERKPLKRGAFLDVSREIYAVRRHM

SEQ ID NO: 9527 - protein, 407 aa, Unknown
  Description of Unknown: Integrase B9528 sequence
  cd00338,SM00857,IPR006118,G3DSA:1.10.10.2600, IPR036162,PS51737,G3DSA:3.40.50.1390,IPR006119, IPR038109,PF07508,IPR011109,SSF53041, PTHR30461,PS00397,PS51736,Coil,PF00239
MKNAIIYVRVSTEEQAKNDLKSSLEMQKSKCLDYCKQNNLNPVKIIQDIQSGGNDKRKGFLELQKELETGIYDIVVVYEISRISRVASTGLEFADMLSRLSVQFASIMQPQANKFILGILFSIAEEERTQGSQRTKSNKLERAKKGFYQGKAPYGYKNIPNSLEIVEEEAKIVRELFEEYLNSLSFSKLSRDYNISISTVKNILTNRAYTGWFKYGEKKRDNLFQEYKKSKDVQYYKGNYPHIIDEAIFYKVQEAISKKIKINAAFPVILFSGLVECSCGAKMYQEKKTKMIKGVKNISYYYKCNSCNKSFNANKEKIIIEAIKSYEVESGEVEKVDNSKIINKLKKELEQLPIKKQRLMELYTNGLISMEVIKEKCNNFDHEKEKIEKIYPRKQRNIYTRNFRYKS

SEQ ID NO: 9528 - protein, 405 aa, Unknown
  Description of Unknown: Integrase B9529 sequence
  G3DSA:1.20.140.160,PTHR30603,IPR036162,PR00046,IPR000943, cd06171,IPR013324,PF00239,G3DSA:1.10.601.10,PF04542, IPR006119,SSF88946,PS00715,SSF53041,IPR014284, cd00338,SM00857,IPR007627,G3DSA:3.40.50.1390,PF04545,SSF88659,
  CONT. FROM ABOVE: TIGR02937,PS00716,PTHR30603:SF17,IPR007630, IPR013325
MARTADTIAIYSRKSRYTGKGESIGNQIDLCREYIRTHYGDAAAEHAVVFEDEGFSGGNLNRPDFKKMMTAAKGRKFKAIVVYRLDRISRNISDFSSLIEELGRLGLTPALCHPDHTMLFPAEKMPKRKKPPENLWAALLPCHILILPQTTFFYKQKTILNPLSPFILYRRTVLEVFRMLLTLLQFFASKFLVLALHLEAGSFPRPLSPQEEIRTFAALRAGDPSAREKLIRHNLRLVAHIAKKYYALPSEQDDLISIGTIGLMKAVDTFDSTRRARFSTYASRCIENELRMHFRRERKNAPTLSLQETLDAGKEDSALTLADVLQDGFCMEDSCEKQDDAQRLRRLIEGLPARERKLILLRYGLAGQPPLTQLETAKLLQISRSYVSRLETHALELLRAGWEQP

SEQ ID NO: 9529 - protein, 405 aa, Unknown
  Description of Unknown: Integrase B9530 sequence
  PTHR30461:SF3,IPR036162,PS51737,IPR011109,PTHR30461, PS00397,PF00239,G3DSA:1.10.10.2600,IPR006119,SSF53041, SM00857,IPR025827,IPR038109,PS51736,cd03768, IPR006118,PF13408,G3DSA:3.40.50.1390,PF07508
MAYNKLSLPGHIRVAIYVRVSTMHQIDRDSLPMQKQDLLAYAKIMLGTDDCIIFEDAGYSGKNTDRPKFQEMMSQIRAGGFTHLLVWKIDRISRNLLDFATMYNELKELGVVFVSKNEQFDTSTAMGEAMLKIVLIFAELERNMTSERVTATMISRASNGLWNGGRVPYGYEWDSKSKEFSYNTDEYNIARLIHDLYEEERSLIREARILNAKGYRTRSGNEWNPVSLHIILRNVFYCGDYRYNVLKEGDRQKVKAESEWITIENHHPAIVSREQKMRIISILDSNSRINKKKNNYKSGKYTHIFSGLIFCGSCGNPMGAAPVSLRADGWRYSKYSCPTRRKSSMACIGKSTSDPIVGEFVFNYILNMLNTQRDFSKITSIDEMQDKLLTGNTFLNRFLCWSCWL

SEQ ID NO: 9530 - protein, 404 aa, Unknown
  Description of Unknown: Integrase B9531 sequence
  SM00857,G3DSA:1.10.10.2600,IPR036162,PS51736,PS51737, G3DSA:3.40.50.1390,IPR006119,IPR038109,PF07508,SSF53041, IPR011109,PTHR30461,mobidb-lite,cd00338,PF00239
MKITKKQPLRPRGRSEDKRQSTKNVIRDAYINGPQKEVQIIPAKRDMEAETEKKKLRVCAYCRVSTDEDTQASSYELQVQNYTRMIRENPEWEFAGIFADEGISGTSVLHREHFLEMIEKCKAGEIDLIITKQVSRFARNVLDSLNYIFMLRKLDPPVGVYFETEKLNTLDKSSDMVITVLSLVAQSESEQKSNSLKWSFKRRRAQGLGIYPSWALLGYRLDDEKNWEIVEDEADIVRTIYSLYLDGYSSTQIADLLTKSGIPTVKGLSVWSSGSVLGILKNEKFCGDALCQKTVTIDFFTHKSVKNNGIEPQYFVEGHHIPIIEKTDWLLAQQIRKERRYRKRRSTHRKPRIVVKGVLSGFMIVDSSWDEEYVDNLLTPATKKPDPASAVAEEDENFIVIEKE

SEQ ID NO: 9531 - protein, 404 aa, Unknown
  Description of Unknown: Integrase B9532 sequence
  SM00857,G3DSA:1.10.10.2600,IPR036162,PS51736, PS51737,G3DSA:3.40.50.1390,IPR006119,IPR038109, PF07508,SSF53041,IPR011109,PTHR30461, Coil,mobidb-lite,cd00338,PF00239
MKITKKQPLRPRGRSEDKRQSTKNVIRDAYINGPQKEVQIIPAKRDMEAETEKKKLRVCAYCRVSTDEDTQASSYELQVQNYTRMIRENPEWEFAGIFADEGISGTSVLHREHFLEMIEKCKAGEIDLIITKQVSRFARNVLDSLNYIFMLRKLDPPVGVYFETEKLNTLDKSSDMVITVLSLVAQSESEQKSNSLKWSFKRRRAQGLGIYPSWALLGYRLDDEKNWEIVEDEADIVRTIYSLYLDGYSSTQIADLLTKSGIPTVKGLSVWSSGSVLGILKNEKYCGDALCQKTVTIDFFTHKSVKNNGIEPQYFVEGHHIPIIEKTDWLLAQQIRKERRYRKRRSTHRKPRIVVKGVLSGFMIVDPSWDEEYVDNLLISATQKPEPAPAVAEEDENFIVIEKE

SEQ ID NO: 9532 - protein, 404 aa, Unknown
  Description of Unknown: Integrase B9533 sequence
  cd03768,SM00857,IPR006118,IPR036162,G3DSA:3.40.50.1390, PS00398,mobidb-lite,IPR006119,SSF53041,PTHR30461, PS00397,PS51736,Coil,PF00239
MAIKKGDDGYLINDMGEVWGYCRVSTTQQKTDRQEIAMEEYGVRSTKIFIDKQSGKSFNRPAYKKLIRILRKGDIIVIKSIDRLGRNYQEIIDQWRMITQDLGCGIYVIDMPLLNTTGDPEDLISKFITDMMLQVLSFVAQNERENTISRQREGIDAARRKRIVSIGRPKIPMPYDFWEIFIMWKKKEFSTADLFRFCHEAYGMSNRTFYRRINELNQRFGEMDPERLEDLMLDKEYFEGITFDNERLEQGIGFYNQYVLNNPEKERKLRERHRKEREEKPELSKEEEEALQRAMLYKRQKEFREKFNMPPLSIYDRTDMPTELIRRPEPKKPTLSKNGKRVGRPPKETTSKMYVFGDGQSYNCHNKNSGVDQAVVLLDKDPRIPDIDESKLDSQRPMKTIVII

SEQ ID NO: 9533 - protein, 403 aa, Unknown
  Description of Unknown: Integrase B9534 sequence
  SM00857,IPR006118,G3DSA:1.10.10.2600,IPR036162, PS51737,G3DSA:3.40.50.1390,Coil,IPR006119, IPR038109,IPR011109,SSF53041,PTHR30461, PS00397,PS51736,cd00338,PF00239
MECVAYIRVSTERQVEEGYGLESQKRDIEEYCKKNEMLITDWYIDAGLSGMDMSKRVELQRLISDVSKINNIVVYKLDRLARDSVDALYMIEKLFTPKGVRVNSVHDFARYETPQDKFQTHIMAAVAEYDRNTMLLRMRGGMLERVKNGYWMGGGNTPYCYRYDKNLGYLVPIPERAEQANRAMDLFIGGMSDVKIQRLLGYKSEFVVRNILTGVVNIGYIPYKGGTYKGLHEPIFERDKFYLAQELRKSRRKQHVYSFTEPHLLTGLCYCKTCGCKMRYQKITGMGIHKIYCCSHDKYLDYLPNYNADCDNSGAWASDIEKAFEHEILDISINLSQYKPKAKETKLQILTNQLEKQKSKLKRLYTLYAEGNDMVLNMIKALETEIRETTEKISAERKNGQYE

SEQ ID NO: 9534 - protein, 401 aa, Unknown
  Description of Unknown: Integrase B9535 sequence
  PTHR30461:SF3,IPR036162,PS51737,IPR011109,PTHR30461, PS00397,PF00239,G3DSA:1.10.10.2600,IPR006119,SSF53041, cd00338,SM00857,IPR025827,IPR038109,PS51736, IPR006118,PF13408,G3DSA:3.40.50.1390,PF07508
MKKAVLYARVSSNRQEKEGFSIPAQIKLLKDYTFQNNIQIVEEFVEAETAKKSGRKKFNEMVSYLHEHEDRRIILVEKVDRLYRNLPDYGTIDNIKGLEIHFVKENEILSENSRSSIKFMIGIRVLMAKQYVDNLAEESAKGLNERIEQGYALYPPLGYMYGNDGTHKHAIIKDPERAEYAVKAFNLFVYENLSASSINNILYEEGLRNPDGNKYAVSTIQRMFKNPMYVGDYIYQGKLYPNGKHEPLISRKLFQLAQEKLNNANNTTRQYDVEFPYIGLFKCSVCGCSYIAERKVKPSGKEYIYYHCTGKGKIKTCKKTSYINESKIDKFIIEILKNLENLPQSLINEIKDCLKEIYDLKNEYSNITQDNIYKRIKEIDRMIQNGYKHMLRSNNDMENEL

SEQ ID NO: 9535 - protein, 401 aa, Unknown
  Description of Unknown: Integrase B9536 sequence
  PTHR30461:SF3,SM00857,G3DSA:1.10.10.2600,IPR036162,PS51736, PS51737,G3DSA:3.40.50.1390,IPR006119,IPR038109,PF07508, IPR011109,SSF53041,PTHR30461,mobidb-lite,cd00338, PF00239
MKKIKIDRAIQERPATRKQTRNEKIRQSLTEHVDVQVIPAITDREGYEKPKLRVCAYCRVSTDMDTQALSYELQVQNYTDYIRGNDEWQFAGIYADRGISGTSLKHRDEFNRMIEDCKAGKIDLIITKAVTRFARNVLDCISTIRMLKQLEHPVAVYFETERINTLDTTSETYLGLISLFAQGESESKSESLKWSYIRRWKRGTGIYPTWSLLGYEMGEDGKWQIVEAEAELVRIIYDMYLNGYSSPQIAEILTRSGVPTATNQTVWSSGGVLGILRNEKYCGNVLCQKTMTVDVFSHKAIKNAGQKTQYFIEGHHEPIILKSDWDRVQQMIDEKYYRKRRGRRTKPRIVLKGCLTGFTQIDLDWDEDDIARIFYSTTPAAEAATPAMADHIEIIKVKGEN

SEQ ID NO: 9536 - protein, 401 aa, Unknown
  Description of Unknown: Integrase B9537 sequence
  PTHR30461:SF3,SM00857,G3DSA:1.10.10.2600,IPR036162,PS51737, G3DSA:3.40.50.1390,IPR006119,IPR038109,PF07508,IPR011109, SSF53041,PTHR30461,PS51736,cd00338,PF00239
MKKIKIDRAIQERPATRKQTRNEKIRQSLTEHVDVQVIPAITDREGYEKPKLRVCAYCRVSTDMDTQALSYELQVQNYTDYIRGNDEWQFAGIYADRGISGTSLKHRDEFNRMIEDCKAGKIDLIITKAVTRFARNVLDCISTIRMLKQLEHPVAVYFETERINTLDTTSETYLGLISLFAQGESESKSESLKWSYIRRWKRGTGIYPAWSLLGYEMGEDGKWQIVEAEAELVRIIYDMYLNGYSSPQIAEILTRSGVPTATNQTVWSSGGVLGILRNEKYCGNVLCQKTMTVDVFSHKAIKNTGQKTQYFIEGHHDPIILRSDWDRVQQMIDEKYYRKRRGRRTKPRIVLKGCLAGFTQIDLDWDEDDIARIFYSTTPAAEAATPAMADHIEIIKVKGEN

SEQ ID NO: 9537 - protein, 401 aa, Unknown
  Description of Unknown: Integrase B9538 sequence
  PTHR30461:SF3,SM00857,G3DSA:1.10.10.2600,PS51736,IPR036162, PS51737,G3DSA:3.40.50.1390,IPR006119,IPR038109,PF07508, SSF53041,IPR011109,PTHR30461,mobidb-lite, cd00338,PF00239
MKKIKIDRAIQERPATRKQTRNEKIRQSLTEHVDVQVIPAITDREGYEKPKLRVCAYCRVSTDMDTQALSYELQVQNYTDYIRGNDEWQFAGIYADRGISGTSLKHRDEFNRMIEDCKAGKIDLIITKAVTRFARNVLDCISTIRMLKQLEHPVAVYFETERINTLDTTSETYLGLISLFAQGESESKSESLKWSYIRRWKRGTGIYPTWSLLGYEMGEDGKWQIVEAEAELVRIIYDMYLNGYSSPQIAEILTRSGVPTATNQTVWSSGGVLGILRNEKYCGNVLCQKTMTVDVFSHKAIKNTGQKTQYFIEGHHEPIILKSDWDRVQQMIDEKYYRKRRGRRTKPRIVLKGCLTGFTQIDLDWDEDDIARIFYSTTPAAEAATPAMADHIEIIKVKGEN

SEQ ID NO: 9538 - protein, 401 aa, Unknown
  Description of Unknown: Integrase B9539 sequence
  PTHR30461:SF3,SM00857,G3DSA:1.10.10.2600,IPR036162,PS51737, G3DSA:3.40.50.1390,IPR006119,IPR038109,PF07508,IPR011109, SSF53041,PTHR30461,PS51736,cd00338,PF00239
MIKRNILDCMTLVGGTPLRFEGEKTYVSTGAVDCDHVDYAQTERVTYEKPKLRVCAYCRVSTDMDTQALSYELQVQNYTDYIRGNDEWQFAGIYADRGISGTSLKHRDEFNRMIEDCKAGKIDLIITKAVTRFARNVLDCISTIRMLKQLEHPVAVYFETERINTLDTTSETYLGLISLFAQGESESKSESLKWSYIRRWKRGTGIYPTWSLLGYEMGEDGKWQIVEAEAELVRIIYDMYLNGYSSPQIAEILTRSGVPTATNQTVWSSGGVLGILRNEKYCGNVLCQKTMTVDVFSHKAIKNTGQKTQYFIEGHHEPIILKSDWDRVQQMIDEKYYRKRRGRRTKPRIVLKGCLTGFTQIDLDWDEDDIARIFYSTTPAAEAATPAMADHIEIIKVKGEN

SEQ ID NO: 9539 - protein, 401 aa, Unknown
  Description of Unknown: Integrase B9540 sequence
  PTHR30461:SF3,cd00338,SM00857,PS51736,PF13408, IPR025827,IPR036162,G3DSA:3.40.50.1390,IPR006119,SSF53041, PTHR30461,mobidb-lite,Coil,PF00239
MNIAIYPRKSKKDDNSESMEQQIDDCKKYINKTYHNANILVYSGDYAITGHSTAKRKDFQRMMDDVRAGRINAVVIMRYDRIARNMRDFCNLYHDMESAGCNLISVSQQIDTSTPYGKNFMYQMANMAELEWAVISERYKDTAAYKIREGKAYTGRVPIGFKIEKIDGVKKVVHDNEEQTRAIFDYLLATKSKRGTVLWVRENFIPDFTRHKLDTMIKSDLYIGKVRENDHFCEPYFTKEQMEEIRSVNQIKYAPSGHIYLFSGLFRCPICGRKMASFYSIDRKTKKHRQYQRCWFGGNEKLHKTKLVSEAKTEKYLLENLDAALKNLEFDVKKEAGKPKRNLNKKLNDAIAERDRLNYLFEKGRIDIPEYEKKYSVLSEKINSINEEMSNNKEVRIEEFK

SEQ ID NO: 9540 - protein, 400 aa, Unknown
  Description of Unknown: Integrase B9541 sequence
  SM00857,G3DSA:1.10.10.2600,IPR036162,PS51736,PS51737, G3DSA:3.40.50.1390,IPR006119,IPR038109,PF07508,IPR011109, SSF53041,PTHR30461,mobidb-lite,cd00338,PF00239
MKITKKQPLRPRGRSDEKRQSTKDAIREAYANGPQKEVQIIPAKKDLVTDAEKKKLRVCAYCRVSTEEDNQASSYELQVQNYTKMIQENPEWEFAGIFADEGISGTSVLHREHFLEMIEKCKAGEIDLIITKQVSRFARNVLDSLNYIFMLRKLDPPVGVYFETEKLNTLDRSSDMVITVLSLVAQSESEQKSNSLKWSFKRRRAQGLGIYPNWSLLGYKGHEWEIDEDEADVVRTIYSLYLEGYSSTQIADLLTKSGILTVKGLSTWSSGSVLGILRNEKYCGDALCQKTVTVDFFTHKSVKNNGLETQYFIEGHHAPIIEKSDWLLVQQIRKERRYTRRQTRKCKPRIVVKGPLAGFIIADPKWGPEDVDSIMEKLSRPTEIVTSPMLEDENFMIEKE

SEQ ID NO: 9541 - protein, 822 aa, Unknown
  Description of Unknown: Integrase B9542 sequence
  cd00338,PF13408,IPR011109,IPR038109, PF07508,Coil,PS51736,IPR036162, IPR006119,PTHR30461,G3DSA:3.40.50.1390,PTHR30461:SF3, PS51737,IPR025827,PF00239,SM00857,G3DSA:1.10.10.2600,SSF53041
MTLFSTKNKYNKTLKNADVIEQNTISIGVLIRVSTDMQVEDGDSLEMQMDLANNHAKQIKGLIYKPYVEEGVSARKVRIENRNVIQELMQDIRDGKVNYVIAYKRDRMFRNTMEYIGFLQFLADYNVDIHLSASGEQQVDLEAFKFAGASKMMEVVMSMVAEMESATTATRVSDTMLMKAKKGEFTGGSAPIGYTFGKGQYKLELLPRAKEVIELVEDLYLEGIGMLSIAKYLNGGKIRGKNQLSEPIPKPIRIEESTVDEWNHKNIHTILFNPIYTGHFSYESKMNPDLDRVIEKSELIEVCRTEERQKKINDAYEKRKSGTKERVTLNTQFLLSGLVYCSECGERMTVITSQPKGTKKQFSYYTCRNKRSSRKENCPHNTLYRKEVLEKIIVDIAKEKIQQLIKPDMIETIKLKLEADKFTYTSEADKVKKDIEKLQTKLDNITELVSELDDDLNLQVVYLKKQKVLLHELNDMKEFYSTLEEKSIQDQDKVFNIEEFMELAIKFGHVFDNAPIGVKKQMLNNLFSNIYIDKDGEIRMMLKVGLTDVESDKASDDGTSDDLNEVISSIMGRSPVVTEDINDLIKVKQEFDIKINYFEEISKQAKIVSEAFAEFAEQFDRMANPINSSMLLKSLTPTQLKRVDNKSKKAETMFKTYFIDYYDSSFYIANIITTVGYNYSAMCSFLKKHNLQFEDFTDYLLDKHKLDFDEDLIEYVLKKRVGKLDKRDKTNTEMLFRGKIICSKCGKNYTRKGGKNVRYICTGRLKSKEFCDTNVITILESDLLRQITKDTGITDFTEKSMAVLIDHVDIYEDTTFKIIYSN

SEQ ID NO: 9542 - protein, 817 aa, Unknown
  Description of Unknown: Integrase B9543 sequence
  cd00338,PF13408,IPR011109,IPR038109,PF07508, Coil,PS51736,G3DSA:3.40.50.1390,IPR006119,IPR036162, PTHR30461,PTHR30461:SF3,IPR025827,PS51737,PF00239, SM00857,G3DSA:1.10.10.2600,SSF53041
MVMDENLFSKENKYKKMQRSNVIVDEFGERQILIGVLERVSTDTQAVDGDSLEMQREMAQDYANSIGGIIYKFYTEEGVSASKVRLEKREKVQQLIQDIKDNKVNYVIAYKRDRMFRNTQEYMWFIQFLADNNCEIYLTARGEQQIDLSAFKTAGASKMMEVVMSMVAEMESATTSARVSDTMISKAQKGEFTGGSVPIGYKLENGKYVPIKGAKSIFEKIEDLYLQGYGMMTIAKWLNGAEIKNLPTLTLPIPKPISYSSTELWNHRNINTILFNPVYTGHLQYQSKKNIDLDRIIEKSDMIIPLRTEERQRDINLLQAKKKKGVRPPRAYNTTFLLSGLLFCDECGEKFLTSTTQDKEGKRRSYYVCKNKRSNYKNTHCNNHGYRKEVIEDLILKAAKDKIAEFLSPNVYEKLKAKIELDKLTYSKQSDNVEKRIEALQEELNNYTELVGQLKDDFELQKVYLQKQKQILIELNDMKEAYAVLAEKSEGESKDFNLEDFMRLATNFGDVVENAPVGIQKQLLEDLFTDIYVNKEGNVSLKIRAGLADNSNILDDADSNDDSEASISFSTGRSPVVVKGRQQRINEFEIEFNYFDFVYEITSMLYKNLEDYLSSFDKNILIENAHAIDLITLPDYKNRAYKDDFIIRKAINAQYLITHYGLNYYSLTKYREKTGLSLKTIKSMIDTSGGSFEEYLEYLLDIYPNMIVDEELLGVCINISNERDKIYDEALFKGKIRCKCGKLYVRKKSIHTSRYVCPNKKNCRTIGIKELELIEKIKVDTGYIIKSYKDVENLIEGIQVYNERKKYKVFYNDSNTN

SEQ ID NO: 9543 - protein, 784 aa, Unknown
  Description of Unknown: Integrase B9544 sequence
  cd00338,IPR011109,IPR038109,PF07508,Coil, PS51736,G3DSA:3.40.50.1390,IPR006119,PTHR30461,IPR036162, mobidb-lite,PS51737,PF00239,SM00857,G3DSA:1.10.10.2600, SSF53041
MKPGTVVKKLDQQALFEKGYIASPNRPDSSSLLSPPVQPSPAPLCVNGTGRVENSGTVEHVEDITQNLSVATQDASRHRTAPTVHTQSPDAIQSIQGSQESARITAGTQGTVEMQKPRPVQKIHTLSTQDLKTGTDASRGDRRSSRRNQVSRQRIRVASYCRVSTWHEVQVDSVRAQEAHYRRVINANPEWELAGIYIEIGVTGTRADIRPQLQGLLAECRKGRVDLILVKSISRFARNVTDALQMIRELTSMGVVIRFEEEKINTGTAVSEFMIAIMSVFAEEESHSISGNTKWGIRQRFREGKYRPARDLFGYSILRRATGVPTPGRRAGTDVKPAVGNDIPAAGETVENSSPGKYDAGNLHILHDEAAVVREVYGMVLSGIGTELIAESLNRRRIRTRDGFEWTAARVADLVRNPTYRGDRLYQRTYKDENFRQRRNLGNLPWYYDEGCHIGIVSREVYDVAQGVVAQHRHENGIARLEEDGIRAGKINTRYGFSGRLYCKHCGRVMRRKTSPHYSSYACVSKRRRATTSGTTADGRPGSTASGEPGKPHPTVRVQEDSIKAAFLTVLNKLAYSEKQRKQHRVVSRYIEMIDACHPQSGTTGSGGTGSVGNSGSGGSTVSVEDRGAREREEAETLEAELKAVRQEAARLAATAQVEGFSARNIEQSNELHDREQRILREMEHVDTMHSATGIHSDTGSRDKKQAAVELKSFIRKWTPTCELSAYRDKDFLRFVEKVVVGRSTSDVSDDTGRQDEKRGTGEASYTITFHFICGLILTEEVGA

SEQ ID NO: 9544 - protein, 732 aa, Unknown
  Description of Unknown: Integrase B9545 sequence
  cd00338,IPR011109,IPR038109,PF07508,Coil, PS51736,IPR036162,IPR006119,G3DSA:3.40.50.1390,PTHR30461, mobidb-lite,PTHR30461:SF3,PS51737,PF00239,SM00857, G3DSA:1.10.10.2600,SSF53041
LKDIRKAAEDRAAHPSNTPAGHSFETERKRQKAAVGMQFDALEGTRIRKIAAMTEDDSGMPRKLRVAAYCRVSTDDLDQALSIHMQQRVYREKIKANPEWIYAGTYVDNGFSGTNTFHRPGFLKLIDDCRAGKIDMVITKAVSRFARNLLDCIGYIEELSNLDPPVRVFFEQEGLDTSVQTSGIILFVLAMVAEEESHMKSEAMLLSLEWRFSRGRFLTPALFGYDKVEVPDGFGGKRKILDINPQEAKVVKWMYAMLLNGSTPEEIAGVLTELQIPTGGRCKDGSLNTSWTGRSVVTLMRNERYCGDVLARKTYTPNFKDHKSKKNRGKKNKYFQADHHEAIVPRRVWNAAQRILNSRRYGHEGEYLPMRIIDKGILAGFISMNRSWAGFDVEDYYRASQIAMGLLDAELDDNLDNEYLPDGGHRLAGMIDDHGISQIARELTEAEQKIKDELDGVDREKQSLDEQAEIIKTFQVVSGDMFSRIHEPVVRIDLHQISFNQNCVSKMVTEYAEILFNPVERMIVVRPCTKKNPNAIKWGGKSRGASYLCKIIYDSMGWDTEYAYRIPCQTIAIEKPDGDYQPILLFDLDNYIGRAVNKKEEIIQARQVQEQAERMEEEAKSYFFPPEEDEEPEELAEIAEQVQKALELSKKIFGTPAFRHTSTFRSIDGEGSWEEWLAPARPLDTNHRYDAEEVDDMLRNIQEDPPELPQEPPPEHKDIIEVPPSDTGEEVP

SEQ ID NO: 9545 - protein, 680 aa, Unknown
  Description of Unknown: Integrase B9546 sequence
  cd00338,IPR011109,Coil,PS51736,G3DSA:3.40.50.1390, IPR006119,IPR036162,PTHR30461,PS51737,PF00239, SM00857,SSF53041
MKSAENSNKRVCFYLRNSTNAGGQDFIFQREALQSVFNTRNDLIFVGEYAEQVSGKLEDIEERPELSKLMQAVNNGDVDSVWVYDVKRLARNSIVLQTVCRDCAKVGVNVFFKEENINTLTPKGEQDAMAKMILNLLGEFAEQDRSAFIRKGIDGKKTSARAGNYVGGNLPCGYAFENAGIKSKFLPKKIFIDDKQRKIVEFVFDEIGNKKQSCNATAINLNNKKLIDSSFDTVMKSKNYGSKNNRWLFHSWAGGTVKSIINCTWYIKGEGYRIYDNEKIELDDSLTFIDSELWHRANEQLKKNQFVKTKTKHSYLIKDLLFCECGQPMYPQNSTRWHYKCKLNIQNNRDKSIKCDSSKSIGIEQLENTIFLLIKNKLPEFKLTVQKKENKIDQINNQINENNSIIGIINSNNITKLTDQRKRTLNLFEKFGGDGADLENKILAIDNEIKQERKKINQLESDNKQLSMSLTQLDMATEIENNIRMIETDRNLIKYYFERLIKKVTVLGGLKRQLVNVVKIEWNDNINNNNSTYLLYHSKVKINPLYYFMSSTENNTIDWTASTKTLNITENNETIKLSIEEIVKVLNAHYWEYAEQLLPNKMLENFPLIREHKNLSTAEQFNTPVKPETFGIDLNNLNYTEHPNYQQYNNLLTVVNSGAINYKFRLNMGVGKLEIVTPFI

SEQ ID NO: 9546 - protein, 670 aa, Unknown
  Description of Unknown: Integrase B9547 sequence
  IPR006119,PS51737,PF00239,G3DSA:3.40.50.1390, PTHR30461,IPR025827,SM00857,SSF53041, IPR011109,PS51736,PS50042,cd00338, PF13408,IPR025161,Coil,IPR036162,PTHR30461:SF3,IPR000595,PF13340
MPSLTMPVATGVLRAVDYNRVSTEEQRKGYGIAAGLRKSASFITRKGWDHVGTYKDEGLSGSLEMGSRADFDRLMLDAKTIDTFGRRAFDVVVVPKGDRIGRTGRAFWRWVWALEDIGIFVALVDKDCDNTTQAGRSEFRKSADYAETEWETIRSRTQDGLQEKAYAGGWIGGPPPFGYEIENQGKRGESHLIVCDREALMVRIVVKALQEGDSLNDAAIILNMEEQFTRSGRPWGRENLRHQIFSDAILNGYVIFRNTAVNAKAGPDGEPLYGPSVKIPVPQFLTDDEVAYLREWQMRSRKPKRRADATYPLSLRLIGMCGKHYSGQGRSESGYIRGYRCSGKNQSYPGAPTCNDHNIDASTLEKAVWDLLCTKLGDRDKLEEISAEWLSLAGEGFEMHESRISDLESAIKRQNSVISTTVVSLARLGQSEEEIAVAVRPLNEELEQIQKMKADAEAWFKEREDGAQRGRDLAALAQMAQERLGDESLETQARFLDLLDVRVHILSPVPILAGGHPCTVAGWYEERKRGVPMELTDDQWARVAPLVGSTDALRRRVNAVLHKARSRCRWADLPSEYGSPNTARRAWTQWSTGLWAQVDQVLDDAERSDFVPTMRPLPDFELRVDVDPRILVVAEPSRTEWFPHSQDVRPRLHLRIDRESAQLRTVLTAA

SEQ ID NO: 9547 - protein, 668 aa, Unknown
  Description of Unknown: Integrase B9548 sequence
  IPR038109,PS00397,IPR006119,PS51737,PF00239, G3DSA:3.40.50.1390, PTHR30461,IPR025827,SM00857,G3DSA:1.10.10.2600, SSF53041,IPR011109,PF07508,PS51736,IPR006118, cd00338,PF13408,Coil,IPR036162,PTHR30461:SF3
MAYVRNKKKILKFWSKKKAALYVRVSTRYQVDKDSLPFQRKKLKEYCKFLGIEDFVIFEDDGYSAKNTDRPHFQEMMSRVRDGEFSHLIVWKVDRVSRNLLDFAAMYQELKDHKVTFISMNEQFDTSTAIGEAMLKIILIFAELERNMTSERVTGIMLDRAEQGLWNGARMPVGYRWNPEIKFPEPDPEETKIVQFIFDEYERVRSTTKIARYLNHNQIASKRGGQWTSKLIRDIIRNPFYIGTYRYNLRESGRGPLKPESEWIVRENNHPAIIAKEQFDRCNAIMDENGTSRDTSDLRARKYVHTFSGRLVCGKCGANMIASKDRARANGWRPSMYRCAQRSRMMDCDNSKTVNESYIGPFIFNYVANLARIQKNFKNIKTLEQLEKELLKGSEFENMKVSKESLRRTFDALAFQEVGKGAYLPDIDLSGGDDDCTAAEQLSILKRELDKCKTAIDRLTDLYLYDPDSMTKEEFAKKKRDLVNKIAGYEKQIEASQATGDKDDLADLEFIRKASAFLVAQRIVSKKHVDYIQMALDLDNEILKDFVDQVIDRIEILEGRVRSIRFVNGLVHEFTYSTPADLPVCQKCGGRIGSTCGCRTRTFDFAGKPYRRIKVGDPGDKFHGVTGAVCPECSAQVGRWHHWKCGIERCPICGEQLIACEHGPNGKD

SEQ ID NO: 9548 - protein, 660 aa, Unknown
  Description of Unknown: Integrase B9549 sequence
  cd00338,Coil,PS51736,IPR036162,IPR006119, PTHR30461,G3DSA:3.40.50.1390,PF00239,SM00857,SSF53041
MGKSIQVKSGIMGIYVRTSVDKENTSIEQQKKLGINFCKKNNFQYYIYEDIGKSGFKIEDENNPFKNRKGLLKLISDIENKIIDKVWVFEHSRLSRNDYSSFLLNRIFQKYNIIIYELDKQYDLNNPQNKMIQGILTQISQYERHLITSRTARGVHDIINSGIHSFNELYGYKRDGTKTIILSGREKTYINWKPFDSEIKQIKYAFNKILEGKSISQIILDIFKSKLTEKNRSSLIRKFSAILRQFVYTGYCLNIEGQEIYRKYKNFEIDSIKELKNKKYYIKSISYPIQIISIDDWIKVVEKINGKRLIYKDRMRRTNSEMLTGIMSCPYCELHYYLTNDKDFIYYKHFPKKLCNQKPKSIRVEKLNKYFEIFFFYFYLVYDDTKSLMEENQKLIDLNLLEIKDKIKSIIESNKRLDNQINKIQSVYESSDDKEIIKLSLKKENDLSIKKEENNIILLQLNNELENLIIKYNNDKLELTYYNVIELITNFFEKMNNEEKRTELIKIISNFQLFGKYILIDTGKLLFIFNLDNEVILSEKIYNKFKNDKRFKNNFLNSSSVIDENGILNIINDWKYFNNNYKNKDFKYKELSENEKLKLIENIIDYFSVRILDNIQIQEIYLKSENDINIKSVIKNQLQNIGIDYPLNNIEKIISFTELF

SEQ ID NO: 9549 - protein, 429 aa, Unknown
  Description of Unknown: Integrase B9550 sequence
  cd00338,PF13408,IPR011109,IPR038109, PF07508,PS51736,G3DSA:3.40.50.1390,PTHR30461, IPR036162,IPR006119,IPR025827,PS51737, PF00239,SM00857,G3DSA:1.10.10.2600,SSF53041
MATKMTVIQPKKIKEFKELRVCAYARVSAKNDDMLRSLGSQVAYYIDYISSHPGWKFVEVFHDKPTTGTKEERPEFLRMIEMCRRGEIDMIITKSLSRFARNTVTTLTYTRELKSLGVDVFFENENIHTMSADGEVVLTCYASFAQDESLSVSENCKWRIKKRFEKGEMTDFRILGYDWVDHQLYINPKEAEIIKRIYREYLEGKGFQGIANGLNKDGLRTKDNNNFGYTSIRCILINEKYVGDLILQKSFYDNHLTKKKIVNKGERDRYFIKDNHEPIIDRETFEKVQQEIQARSKKAPKTQSAPCIFTSLLTCGICGKNYRKKINSKKLVWMCPTYNHIGKSACDSQMIRDDILKETSAKALGMPEFDEEVFKKKVKGIQVLRNNRLIYFFTDGTSKEMIWKQKSRADAWTPEMKEKQSKLILERNL

SEQ ID NO: 9550 - protein, 653 aa, Unknown
  Description of Unknown: Integrase B9551 sequence
  cd00338,IPR011109,IPR038109,PF07508,PS51736, IPR036162,PTHR30461,G3DSA:3.40.50.1390,IPR006119,mobidb-lite, PS51737,PF00239,SM00857,G3DSA:1.10.10.2600,SSF53041
VKENSGQDRKQKIRDKYKGTDASEIEIIPAKPTADFMESGGIRRVAAYVRVSTDNDEQTSSYELQKNYYTEYITGHPGWELVGIYADEGISGTSIAHRKGMLQMIEDCKAGKIDLIMTKSIARFARNIVDCLSVIDLLKNLEPPVGVQFEADNIYTLDNNGRMILTILASVAEEESHSKSVIMNWSIERRFRKGLFLTPELLGYDRDEDGDLIVNEDEAETVKAIYYLYLNGVSFSDIAELLKAYKRKTKQGSYEWSASTLAEIVANERHCGDIRAWKTFTPNFLTHKAKKNNGERTQFRRKNHHEAIVSRTVYEAANFLRASRAYAKKARPLPVLSVVDNGILRGYVPLDKDWTGFSTDEYQKASESVMSELEDTRQIEYKAGLDMRGYEVVRSQYFSTTQNPAMTIADGKLNFNTACLKKFENVEYVELLLNSVNRCIAVRPCDGNNPNAIHWGKLREGRWCALSKSCRGLAKTLFDIMDWDQDLKYRFRGDFIENDDQKVMLFQLDEPEMVKTENIVLPPKEAETDDRAEIAGRTVKQIIYILPPEWEDTFGRPITSIGEINLLEQRHYAADWDVLRPAKELAEYSTLTSEDLEELLQEAEKIIEGWPIPDEHGTGETADNGDGESADVGTVCGSDVGEGTEENRDRADL

SEQ ID NO: 9551 - protein, 652 aa, Unknown
  Description of Unknown: Integrase B9552 sequence
  cd00338,IPR011109,IPR038109,PF07508,Coil,PS51736,IPR036162, G3DSA:3.40.50.1390,PTHR30461,IPR006119,PS51737,PF00239, SM00857,G3DSA:1.10.10.2600,SSF53041
MQSYTFKRCCLFIRAHRLLIDSNIKSYNNEKGMREMRQLLDINNYVIKLDSLGKIIIYLRKSREDMIDGRYASDEETLARHEEQLQQWAKNTLGYEIPPENIFKEVGSGEKIKTRPVFQKVLTMIENEEVDGVLVLNCSRLSRGDLIDCGTIIRTFEVTNTLVLTPPKIYNLNDKYDKRFFKDELLRGNDYLELTKELLGGGRHWSASQGKYIHSVAPFGYDRVTCKEMKVSDGKGFTLKPNQDAEFVQLIFSMWLDGMGTFKIASHLQDINAPFCGQTEWNHCKVKKILQNPHYCGYVTFGRRKKVEKIVDGEVIEKRITNPDCPTYKGLHTAIVSVEDFDRAQNRFKKGQSPTRHDYEDKNSFVGLLKCAVCGRIMTRNVHTNEKKIKRAHALDKIALHQFIKMHQERIKIPKIEVARRLGLKRSVVYDWLGNNPKKFYPSQLFADKWHDMKAVLQIESDEFDKAITEFAEVTKEPTITCTGFKCKNVSSNFAVVESKVLEMVKAKFEDYTYFLDNYEEEITKKVASAKDTIANIDKQIAMKEKQLKNAKIAFEQGADTLQEYIDRKKELNAEMQELIDKKAEISAEKEEEQTLVIKKAVPVLKNVFESYFEMTPAERNELLKTVIESIMYMKTEKGNNDSIVLDVCWLV

SEQ ID NO: 9552 - protein, 650 aa, Unknown
  Description of Unknown: Integrase B9553 sequence
  cd00338,PF13408,IPR011109,IPR038109,PF07508, Coil,G3DSA:3.40.50.1390,IPR006119,IPR036162,PTHR30461, mobidb-lite,PTHR30461:SF3,PS51737,IPR025827,PF00239, SM00857,G3DSA:1.10.10.2600,SSF53041
LASAGGGASYALPGARTERASNGRICSRMSAALCTSVAPSRIKHTAVALRVRRRLTPVMTLPAFLYARYSSLEQGRGTSLVRQFENGRKYAEKKGWLLDPDREISDKGRSAFHGANRSEGGELYAFERQVEKGFYRNGAVFVCEHFDRISRQGWEEVHAFLKVCVENGVSVATIDGDRFYPAGQRIDGGTIMELVFKSEGAREESNKKSERGLFNWSEKIKAIEAGDRKAKIGLPPGWMMRDAKTDDVVLHPHRTAVLREIYDLYVEGHGLPSIVAKLNARKEPSWAVKNKDKGNGWNTAYLHKLLTNRAVLGEYIPMSRTHGGINETSKGIVKPDHYPQAIPAELFARVESVRKLRRFSGGPVEANVSNLFSGSAFCTCGAPMYFQSQQKVGRPTNHKSKIDGRKLSYVSGVDRSYLRCNNNRRKHECQNNKSFRYEALEPAILDAVLAVAIDDRKFTIPDHVAALSANVAEAERLLQSKRQNLQSIVDMIAEHFIKALAVKAAEIEAEIDVEEAKLREMRDELSRQQGGANPIEHLARVREVKDSINSEDKDARYSARVRVKQALAFLTRSTFGADGVATVMLQNGLMAWRFDQKGVMIGEPVDLRNRLDLHRGLPGPKQMIDDVRNRMEQPERPVVHPSEQKWKYGS

SEQ ID NO: 9553 - protein, 633 aa, Unknown
  Description of Unknown: Integrase B9554 sequence
  cd00338,IPR011109,IPR038109,PF07508,PS51736, G3DSA:3.40.50.1390,IPR006119,IPR036162,PTHR30461,PTHR30461:SF3, PS51737,PF00239,SM00857,G3DSA:1.10.10.2600,SSF53041
MGTTEGTTETMIEQKAIRQPLMPEQNILPSGAKLTITPATKRSTQNVKTLKQQENVRVAAYCRVSTDELDQQNSFENQSNYYKDFIKQKEGWTLCGIYSDEGISGMSTKGRHGFNRMIRDAKAGKFDYIITKSISRFSRNTVDGLSIVNDLRNLDPPIGVYFEKEGLDTMQKGCEFLLSIMMSMAQGESDSIGENIQWTYRKKYSEGDPLINPDNIYGYKKGENGEWEIDEEQGDVVRRIFDLFLAGWGTQKIAHTLTADEVLTPRGKSQWNPGTIHSILGNEKYKGDVQMQKYVTVDRKSKKHKKNSGEAKTYYLENHHPAIVSRAEWDATQRIMEAKKRPSTYKHGDATHFSPKKILTCGDCGKELHVRNIDRSVSGYLDDRKKLNGFGSYYFYEKEYSCPNGHARVFRGTFEQSFMEALYRLKRDFEKYGDTSDLATSFQKALDDAALDEKIDLDLLEINYQDFVNALESLPEKNLAGYDMKINGVDTDGSLIRTEDGKLKGTRLYDLKAGKIKITSDKIEEAPDILPFSEEIMKGFIKNGKLYNDRIVFTTTFGIEITAKNTDRKIDSFLGFRKCGNDGKIHMVLDPYEVENDKPYYRMTGNCVGKIEELEEKEEPAETTEEPNDKVAV

SEQ ID NO: 9554 - protein, 649 aa, Unknown
  Description of Unknown: Integrase B9555 sequence
  IPR038109,SSF47413,IPR006119,PS51737,PF00239,PF01381 ,G3DSA:3.40.50.1390,PTHR30461,SM00530,SM00857,G3DSA:1.10.10.2600 ,SSF53041,IPR011109,PF07508,cd00093,PS51736, G3DSA:1.10.260.40,cd00338,IPR036162,IPR010982,PTHR30461:SF3,
  CONT. FROM ABOVE: PS50943,IPR001387
MTPLLPPGTRIGLFIRVSTDDQVRNESPEVHLQRGQEYTDGHGWIVVAVYQLDGVSGASMMNEPDTKRMWRDVESGVIDALLFSAVARMGRNMFDLFKIERHLRAHDKWLVDTRRGVIDTDTQEGLDYFFHSAHRAHSERLELSARVKAGLITRAKMGQFVASLPPYGYKKVPAAQTGKAKKLEIDPIEGPIRVLMYDLYLQHRKFMIVAAELNRRGYRNRNGKPFSLHNVRAILLDSSAMGVYYSNRTAHNNPTGKTEADRIPIPVPQLIDGEKWERVKSLIESNLPKVRRAIYPYSGLLNCICGPKMYTNSSMNNSKSQYRYPPRYSCRQCGNRIRMNLLDEAIGVLFTGFLLDGVPDGVEVELSKTEQQLLALKSELKNVIAGKNRWADAYQAGALELDDFKKYHSPLIERERELTTEISCLEQGLRTDKDQLQAQEQAVQVFQSASWSDLTTEEKHALLREFVQSIILGPENITIKLLYTPAALQVSEPGLAKLHKIIAPRPDHLVMPNDQYAWSWLLHRERKARGEATRKVSTILGIHETTINHWEKMSRPPGPTHIAKIMEYLGYIPWVRTPYAQDTLGAAFRTIREALGVTQLELSNKLRISQAAISKVERGEVVSVKLLNRIEMALKVPVRQIYRAYQPEN

SEQ ID NO: 9555 - protein, 647 aa, Unknown
  Description of Unknown: Integrase B9556 sequence
  cd00338,PF13408,IPR011109,IPR038109,PF07508, Coil,PS51736,G3DSA:3.40.50.1390,IPR036162,IPR006119, PTHR30461,PTHR30461:SF3,PS51737,IPR025827,PF00239, SM00857,G3DSA:1.10.10.2600,SSF53041
MKTKVYIYTRVSTAMQTDGYSLEAQKTRMKAYADFNDYEIVGEYEDAGKSGKSIEGRDAFNQMMEDIKTGKDGVSYVLVFKLSRFGRNAADVLSTLQIMQDFGVNLICVEDGIDSSKDAGKLMISVLSAVAEIERENIRVQTMEGRLQKARDGKWNGGFPPYGYDLKDGMLYINPDEAPVVRQIFDLYTTTNSGANGVAKYLETHGIKKHKRHNNSTPYFDAQGIRKLMKNPVYCGKIAYGRRKTEKVHGSRNEYKIVNSDDYLLSDGLHEAIISEEEWQKAQAKLLAQSKRYERTSTSKHTHLLSGLLRCPICGAAMYGNKIKKRKDGTTYYYYVCRNHNMHKGYICTYNKQINEKMLDAAVVEIVSSLVSRPKFAAELQQKISIDVDTSKIDQEINSLESQLKQFYAIKKKTLEEIECLDPEDRHYERRKSDLNDRVNHMYDKIDEYEQNIIEARSKKQAIEADKISSDNVYSILIHFNKLFDAMNEQERRQLMEILIDNIQIYPKRKPNGQWLKSISFRLPIIDKDIDWDIKCGLGNEEHVETCALLTKLSDTRHHVDVTINMSELDSTKPETKATYNEIRDWVQDNYGFRVTNLNIAQVKRKYGIIERKNHNLPKSSKSKQPGCPSEKVEAIIQALRHFQMIE

SEQ ID NO: 9556 - protein, 646 aa, Unknown
  Description of Unknown: Integrase B9557 sequence
  cd00338,IPR011109,PS00397,PF07508,Coil, IPR038109,PS51736,G3DSA:3.40.50.1390,IPR006119,IPR036162, PTHR30461,PTHR30461:SF3,PS51737,PF00239,SM00857, G3DSA:1.10.10.2600,IPR006118,SSF53041
MDSKNQEEKRIAGIYIRVSTEDQAREGFSLGEQEEKLKQLCAFKEYQVYKVYQDRGISAKDMEHRPGFQEMMDDMRKGKINYIVAYKLDRVTRSVRDLELLIAELEKYDCYLICERDDVNTSTANGRFFVRMLTVLSQLEIEVVSERTKFGMSGAIKAGHLPGTCPLGYYRDTDKVVKLDPNTKGIVRRIFNMYLEGKSYYQISCILDEEKVLYPEHNKWTEAAVRTIINNRIYVGDYVRNKTSKDASKEEVYPDVVAPIITRAEWEEVQIQKEKNMQSFSRDRVYIFFQKLICPKCGKLMLCKGAGGKKKKYMYYNCGDCHLYFREDKIEDVLLNFILSLVEYDEVVKKYFYPILAEKGEVNTENIDKEIAELEKQRNRIKKAFMSGIVEMEDFAEDYKSIEDKLNKLEQDKMKNMEIDTEHFSLMKIMADRDFEIESRLNSDSFVEDLKTEWNTKTKLEKQEFISKFIESMVLEKDEENDSFKIIKINFRSRYLDELKKLNKADCIDLAKPTEDMQGISVIKSTPRITKSELNEYIENLKEHYDVKYYEDVYDWTHSYVQEDKMITMPREKGNERLMRAVFVDNNKSFPIKDSKGKVRGKLGAVSYREKGTTDKNELDDYYEAISDLVLYKKEQTEDEEESSED

SEQ ID NO: 9557 - protein, 645 aa, Unknown
  Description of Unknown: Integrase B9558 sequence
  cd00338,PF13408,IPR011109,IPR038109,PF07508, Coil,PS51736,IPR036162,G3DSA:3.40.50.1390,PTHR30461, IPR006119,PTHR30461:SF3,PS51737,IPR025827,PF00239, SM00857,G3DSA:1.10.10.2600,SSF53041
LINYIENYNLNSLDDLNFLKDNILSIIYPRVSTYDQADRKWSLNSQIEEGIKLAENKLKHIEENILVIPEPGESGDDPDRPAMNNALWCLENGIGRTIIMLHPSRLSRDSYLQSKIADRVWSAGCTIEFCEMDFNPDNAESMLMFNVQGAISQYNKAKILADSKRGRRNKVKNGQIPGMRRLYGYSFEKEFDVLIPNEEEKSTYLLMVDWILNGKDGTSMSCSSIARELAKADTPAPSGDIWYQATVSRILKNFSYTGKYHYGKTETLRRRGKSSIIKKPEKEWVSIPIPSFITKETYDQIQDKLLGLQKKHTGRPTSNYLLKGLLECGKCGKSYISGSATKNKNSTTRYYACSKKNKRNYKVGSGERDNCSAKNHRVEYVDKYVWEYLCDVIKHPEDILEKIIKQKSDPAHLDGLIKKRKQLIILIEEKERILQKKKQMFETGIIENIEDLIKEVNPIKKEIIVIKKDLEIIEKSIEQVKKVFDDFERVQKNIKALQNRIKSKGKDISFEDKREFVTKLIIKVILFDNNDIHIKTIWSTYEESNQDNTHSKSIPGQDDSLVYYVDYHEILPPVIKNKKLSYKVLAISEHLDKVKEMYYEKGLSFANIGQVVGCSWWSIRSLLIYYDLPILPKARKRNTPYLIGE

SEQ ID NO: 9558 - protein, 644 aa, Unknown
  Description of Unknown: Integrase B9559 sequence
  PS00398,IPR038109,IPR006119,PS51737,PF00239, G3DSA:3.40.50.1390, PTHR30461,IPR025827,SM00857,G3DSA:1.10.10.2600, SSF53041,IPR011109,PF07508,PS51736,IPR006118, cd00338,PF13408,Coil,IPR036162
MLRPICYERVSTIYQAVMANGLDDQRSSLTAYLDRNAGKFSTDRIFIQDAGLSAYKNANISAASNLGKFLQDVRDRKYGKGDALIVISLDRLSRRSSWAESTIQFIVNSGIEIHDISTNLVLREDDPMSKIHMELIQHRSHNESLMKSVRAKLAWDNKILRALQNGEVISNRMPNWLRNVDNKYQVISEQAELIVKCFEWYREGLSTGEIVKRIGKKWQMVTVSRLIRDRRLLGEHVRYNGEVVPNVYPKIIDEDLFLTANRMMDRVMLEKKKPAEDLLLEPDVVREIFKLYESGLGSGAIVKRLPKGWSTVNVLRVLRDKKVVTMKIIDNLTFERVNEKLSRNGIANRIRKDITIAQDDYITNLFPKILKCGHCGGNIAIHYNHVRTKYVICRNREEKKICDAKSFQYTRIEKNILQLVKNIDFNKLMIEGQSDAGLLLASLREELSTLKREEETYQNKINERKVAGKKTSLPLMTGLTEVQDRIEEIESEILNAKNIKEIPAFDFDINKVLDPMNVELRAKLRKELRLVLKSVKYWIFEKRIFVQLEYFNEVLSHVLVIDNKRGGGGVLHEIVISESNGERVYTVNEEGKTVFIASVTSGTDLWSLAMSRTKTLDDVGVYLNLLKREDFEIVVNEDLIDWID

SEQ ID NO: 9559 - protein, 528 aa, Unknown
  Description of Unknown: Integrase B9560 sequence
  cd00338,PF13408,IPR011109,IPR038109,PF07508, Coil,PS51736,G3DSA:3.40.50.1390,IPR006119,PTHR30461, IPR036162,PTHR30461:SF3,PS51737,IPR025827,PF00239, SM00857,G3DSA:1.10.10.2600,SSF53041
MARAITVIPATKDKFTALPTASIAKRRVAAYARVSTDSDEQFTSYEAQIDYYTQYIKKRDDWEFVKVYTDEGISGTNTKRREGFNEMVADALAGKIDLIVTKSVSRFARNTVDSLVTVRKLKEHHVEVFFEKENIYTFDSKGELLITIMSSLAQEESRSISENVTWGQRKRFADGKVTMPFKHFLGYDRGEGGVPVINEKEAEVVRMIYRLFLEGKTAAGICKHLMSLGIPTPGGKTKWVQGTVMSILQNEKYKGDALLQKKFTVDFLTKKQKVNEGEVPQYYVEGSHPAIITAMDFDRVQAEIARRQRLGRSYSGSSIFASKLICGDCGGFYGKKVWHSTDAYRREVWRCNSKFKCEARCETPALDTEVIQQMFLKAYNQLMGSREQVIQACQVMRSIVADFTELDAEIDALNEEIQVVAGLVSQCIKDNATSQQSQEEYGKKYSRLVKRYEKAVEKLKKANADKESRMERDRDLRIFIGSIEKQPLVLETWDERLWISLLDSATVHADSRITFRFKDGTEIEVGAE

SEQ ID NO: 9560 - protein, 452 aa, Unknown
  Description of Unknown: Integrase B9561 sequence
  cd00338,PF13408,IPR011109,IPR038109,PF07508, PS51736,G3DSA:3.40.50.1390,IPR036162,IPR006119,PTHR30461, PTHR30461:SF3,IPR025827,PS51737,PF00239,SM00857, G3DSA:1.10.10.2600,SSF53041
MTVTDAKVNKKLRVAAYCRVSTEQEEQLNSFENQVSYYTAYINSKADYEMAGIYADEGISGTSTKRRKDFNRMIEDCEKGFIDLIIVKSISRFARNTQDCLFYARKLKNMGIGVFFEKENINTMDGAGELLFTILSSLAQEESRSISENCKWGIRKKFSDGKVHLNAKRFMGYDKDKDGNLIVNEEQAKVVKRVFAEFMDGINPDTIVRRLNEEQVPGCTGAPRWTCSTIMGMLANEKYMGDSILQKTYTADYLTKKMERNTGQVTQYYVENSHEAIIDADFWKAVQMELERRRIYMEKHGIRCMGRSTDELPFSNRVVCGKCNHVLWRRTLTRANGNKHKAWICSSRLAEKGVKGCGMETMPEYIIHEAFIKAWNKIIENRADYLPKWREYAKGDNPLLAFRSKQMMELTKGKTMKELDLRLVGKVLDHCVVHSKDAIDIHFLDGTIVKVR

SEQ ID NO: 9561 - protein, 635 aa, Unknown
  Description of Unknown: Integrase B9562 sequence
  cd00338,PF13408,IPR011109,PF07508,Coil, G3DSA:3.40.50.1390,IPR006119,IPR036162,PTHR30461,PTHR30461:SF3, IPR025827,PF00239,SM00857,SSF53041
MDKILVAGYRRVSTKSLDQAKSYEDQDARLREFVDDTEKYELYDVYQDEGLTGTALFKRKDFVRLIKDAGLAIYEKEVEREGKAKKRLVYTVYADPTKTPKFRRILVKDTSRFARNVNIKTILDELLINGIAVDFIDKGKSIETQEDLADILSELAFDEKYSRDLSRKLLAGNLRSAERGVVRSGYEKYGYKYIPRERGKITEENNNRLVLIPHEALVIRQLYRLYAGCWDYATQPVYVECDGLCDACTIPKTQGIGYRSILQIFRTFGYKTRKGSDFTQSSLKHLLENEKHCGLLNNRKFTHGTVFNQLPTPAVRQDYVLNLQQSQHIEAIIQPTLYLYCLEKAVSRSINSKGKFIGSYSKYKGRLYCGNCKGPYVHTKSNKYHEVKGYYTCKKRRMQGKDVCPAVTAFDWQVDAYITQLCATDLHAQITHEYKRLIGKIFMRYEYAYDRIVACDTPAIVALDAEIKNETKVFATLAIQSARSAVYAEAVSSEITRLEAWLTEARDRLTELRKTPDELLHETQELTTNADKVLSLIHSVKPSYTLDELWEVVDRVIVYGQSKRGNKTPDCAFVPVLHPATLAERLVLDVPISLYKAKRPVDISYVASLSLDALQCKIDGYKAEVATLSKSFDNR

SEQ ID NO: 9562 - protein, 633 aa, Unknown
  Description of Unknown: Integrase B9563 sequence
  cd00338,IPR011109,IPR038109,PF07508,PS51736,IPR036162,IPR006119, G3DSA:3.40.50.1390,PTHR30461,PS51737,PF00239,SM00857, G3DSA:1.10.10.2600,SSF53041
MIDYAAQETRKKKRAKIKQRVRVSIDEGNFEHYPAQKQMDFYDDKIHQRVAAYCRVSTDSDEQQFSFHLQKKYYEDYVANHGNWELIRVYADEGISGTGRLKRVEFNEMIDACFDNKIDLVVTKSVSRFSRNVVDCISLVRELQELKRPVGVFFESECIFSLNEDSQMALSFIATMAEEESHIRSRSMETSLRMRLDNGLPLTPKLLGYCHDCDGNLAINPEEAPTVKLAFYMYLYGYSTQQIADSFNEQERKSYLGNVNKWTSSGIVQILRNERHCGDVLTRKTYTPNYRTHLSKKNRGQRPQSRYFNHHEAIISRDDFNAVQKMLDNAKYGNKSLLPELRVIDSGLLKGFVSINPRWAAFKEQDYFMAAQSVYRNDDDKVPVEKEDSQSVEIRVEAGDFDLRGFEITRSEFFDAYRKPAVTFSERRIKFNAECVRKFGDKNRVELLVNPVSKKFAVRPADEKNRNSVVFSKLSGGVYQPREVAASAFIETLFSLFEWNIDYKYRIIGSLLEKEGELAYVFDVANSEAFFKTYILPRQTVEGNTALDVQPFLPSGKRIRAIPEEWTSSFGREFYLHELDVSTLEAQSEEAWKLRLEGRLFESGKRLNVTSFAELRQYLEAFNIIKKEDAANE

SEQ ID NO: 9563 - protein, 633 aa, Unknown; identical to SEQ ID NO: 9553
  Description of Unknown: Integrase B9564 sequence
  cd00338,IPR011109,IPR038109,PF07508,PS51736, G3DSA:3.40.50.1390,IPR006119,IPR036162,PTHR30461,PTHR30461:SF3, PS51737,PF00239,SM00857,G3DSA:1.10.10.2600,SSF53041

SEQ ID NO: 9564 - protein, 632 aa, Unknown
  Description of Unknown: Integrase B9565 sequence
  cd00338,IPR011109,IPR038109,PF07508, Coil,IPR036162,PTHR30461,IPR006119, G3DSA:3.40.50.1390,PTHR30461:SF3,PS51737,PF00239, SM00857,G3DSA:1.10.10.2600,SSF53041
MKSQDDVLMYFRKNREDEEIPVDIKIKRFQDEYLMYLRKSRNDGEKVPVEVIVQRHEQTLQELAEKELGFRIPEKNIYREIVSGGEAIEDRPEFINVLKRMEVGNIKGVFVFDPHRLSRSGLYGAGDVLEAFEVTHTLICTPMKFYDLDNKMDKKYLEMIMIQAAEYLNYSKDVMGAGRMTSFAEGKAIMSTPPYGYGKEKLKDEKGYKLVPNPKEAPHVKTMFDLCCEGMGATAIANYLNERNVKPRKKAYFEPSTIRDILHNETYYGYLTWGKNPIKKILENGKTKKKRFYNQKGFKVAKGMYEPLITKEQFDQAQEMMRQRTSRTYHTNTIKNPLAGLVFCGFCGNAMIRRPYNKSFKKNHVRVYELDKQALLEYLRKHKETSGLSLTKIAKELNVTRDIVIGWFPPKLEKFYPSKTLADKWFDLKSLLKIEDNKFDKEVTTYKEPDIQKDTLMCSSLHCNCVSSYLEVVEKGLIEKLNIELENRKYFLNNYEQELKKEKVSNVKELKEVEKKIEEINGYIKNAIKKNAMDLITDEQFLELKTDFEQELKPLLKRKEQLSNTKDEERIIQYKKSIPILEHCVKDYDLLTVEEKNELLKTFIDKIIYKKSVGGRWNKEATVSLEVETYDF

SEQ ID NO: 9565 - protein, 631 aa, Unknown
  Description of Unknown: Integrase B9566 sequence
  cd00338,PF13408,IPR011109,IPR038109,PF07508, Coil,PS51736,IPR036162,IPR006119,G3DSA:3.40.50.1390, PTHR30461,PTHR30461:SF3,IPR025827,PS51737,PF00239, SM00857,G3DSA:1.10.10.2600,SSF53041
MRIPGAFINARYSTDNQNPDSIEVQVEKCTEWCRQNNIPILGVYADEATSGMKDTRPQYERMMRQLRMGVADTVVIYDQSRMFRKMTAWFNFRDELESMGVRVVSVTQPMIGKDLKDPTNFLTEGSMALFNQIWALQSRQKTTEKMRFMARNGLHTGGKPALGYTVKDGRLVICEEEAAIVRRIFSEYAEGRSYKQIIDGLNADGIRTKHGNAFGSNSLHDLLHNEKYIGVLTYGKLAYREDGTRNTHSREGKRALRIVDGVPPIVEESLFRVVQERMTKNRRQQGGRPPKNREYPLKGKVFCADCKAAMTISTSQQKYNYYRCTGKKRLHTCDALPISADDLERTVADGIRQMLGNPHRVENLLAVLRQEADQLQAGAVTRLKALIGKEKEISKKLNNAVEALLSGFNSPTVKKRIADLEAEKAMTERDLQALRASVNATTVPESRLREILAQAISDIHGDNELLLTLVYRVEVAKDTITIWTLLDTGPTGNVDLDSEGVTISPGVPSGVPIKDAVDDTIRCVFYLCKEEGTRTIKCNSPADCCRRQLDGGEHLSAPHGSRCKRVPSGVPHFPSNFDRVRRELFIFKTMTKHAFLRKKQNICRNGRFRICISLKLPLFSRVTNSSFRVTN

SEQ ID NO: 9566 - protein, 631 aa, Unknown
  Description of Unknown: Integrase B9567 sequence
  cd00338,IPR011109,IPR038109,PF07508,Coil, PS51736,IPR036162,PTHR30461,IPR006119,G3DSA:3.40.50.1390, PS51737,PF00239,SM00857,G3DSA:1.10.10.2600,SSF53041
MKEKEERIGNAASQKEKIRQRYKGIDSDELDIIPALPQTNFYEDSREKRVAVYARVSTDDPRQTSSYELQKNHYQDVVSRHPGWKLIEIYADEGISGTSLQHRDSFIRMIEDCHAGKIDLIVTKSVSRFARNVLDCIGYVRKLAALNPPIGVFFETENIYTLNANSEMSLSFISTLAQEESHNKSEIMNASIEMRFRRGIFLTPPLLGYDHDEDGNLVINEDEAKTVRLIFFMYLYGYTCQEIANTLTDLGRRTKKDNTIWSPGSIMQILQNERHCGDVLARKTWTPSYLDHKSKKNRQDRNQYRQKNHHEPIISRDDFIAVQRLISNAKYGNKGILPELKVIPDGLLRGFVSINPRWSGFKANDYRLASESIYDPVIELPGQPLKVNRGDFDLRGYEVARAQFFDTGNKICITFSSTTIKFSTECVKKFDTQYIELFVHPGKDQLVVRPASKQDKNAVQWSRQSEGKILSKQISGAAFLPNLYELFGWNTERKYRIIGVKKQFGDDSLLFFNLQDTEVLIPNKLLQTDEDENGSPIFEENVKPLGTQKNILAYPMSWSHTFGNNYYSQAQAAELAAQTDEDGWNIRAEGTAYHPEPPLQVTSKADIERHIETIIDDMKQEVSDERSNSDE

SEQ ID NO: 9567 - protein, 631 aa, Unknown
  Description of Unknown: Integrase B9568 sequence
  cd00338,IPR011109,IPR038109,PF07508,PS51736,IPR036162,IPR006119, G3DSA:3.40.50.1390,PTHR30461,mobidb-lite,PS51737,PF00239,SM00857 ,G3DSA:1.10.10.2600,SSF53041
MTEAERQLGTRDEQKERIRKKYKGINADELDVILAKPPDSLYEESRERRVAVYARVSTGDPRQTSSYELQKNHYLDVVDRHPGWKLVEIYADEGISGTSLQHRDEFVRMIRDCQRGKIDLIVTKSVSRFARNVLDCIGYVRQLGDMKPPVGVLFETEGIYTLDHRSEMQLSFMATTAQEESHNKSEIMNASIEMRFRRGIFLTPKLLGYDLDAEGNLVVNEEEAKTVRLIFFMYLYGYSTQQIADTLEKYGRPTKKGRMEWSPNTVLGVLQNERHCGDVLARKTWTPNYLNHKSRKNRQDRNQYRQRNHHEAIISRDDFIAVQKMIANAKYGNKGILPELHVIATGALRGFVSIHPRWAGFSVKDYHKASESVYDPQLCLPDETKNIVVDEGSFDLRGYEIARSQFITSQHQLTCTMGIQELKFGIHGIRKLESVEYVELLIHPTEKALAVRKSTKENKYAIWWAQPKDGVITPRKIAATSFMKTIFEMLGWREDCRYRVRGVRKQDENETILIFDLQDTEVFLPHQTPPTMDEESESTEVQAAESSSVSKTATRISAYPAEWVESFGDEFYRHVHTRDPKGFSETEDWQLHAPGQVYNEDPLNTTSREEIQLGISSMLAEMDNRGVDSNE

SEQ ID NO: 9568 - protein, 630 aa, Unknown
  Description of Unknown: Integrase B9569 sequence
  cd00338,IPR011109,IPR038109,PF07508,PS51736, G3DSA:3.40.50.1390,PTHR30461,IPR006119,IPR036162,mobidb-lite, PS51737,PF00239,SM00857,G3DSA:1.10.10.2600,SSF53041
MSKSAKKAADQAEREKVHKRYSNRREPDVIYPAKKQVDFYDADIHQRVAVYVRVSTDNLGQETSYELQKNYYEEFVLKHPNWKLVKIYADKGISGTSTKHRVELNQMLADSRAGKIDLIITKSVSRLARNTVDCITMVRNLAELRNPVGVFFESECIFSLNEDTNMPLSFLASIAENESRIRSRSMEVSLAQRLNGGLPLTPKLLGYSHDADGKLVINPDEAPTVKLIFYMYLSGYTSSHIAKTLEALGKRTFLGNSKWTSGTVIQVLRNERHCGDVLTRKTFTPDVISHKSKKNRGERQQSLYKGEHEAIVSRDDYIAVQHMINNAKYGGKSILPELRVIGSGVLKGFVTISPKWAGFKAADYLQASMSVYTDDTYYGQPAEGDATFEVAAGDFDLRGFEVTNSSLFDANKRPYVLFQSKQIKFSTDCVRQFGKDNKVELLIHPGLRKLAVRRASKDSRQCVQWSRPDDGKYYAKEIPCTAFGGTLFELLDWETDFKFRAYGRLLQNEGDSVFLFDLSEPEIFIQSYLMTGTDSPISGNGELSPLSVSGKRVRAVPKKLADRFGSDFYSHRLTSSSPELQSEDAWKLWLEGQLFETGEKLRVTKFDEMQRFIAEQLAPIKQKEEVDFNA

SEQ ID NO: 9569 - protein, 630 aa, Unknown
  Description of Unknown: Integrase B9570 sequence
  cd00338,IPR011109,IPR038109,PF07508, Coil,PS51736,G3DSA:3.40.50.1390,IPR006119, IPR036162,PTHR30461,PTHR30461:SF3,PS51737, PF00239,SM00857,G3DSA:1.10.10.2600,SSF53041
MMYNMNDYQIELDKLGKIIIYLRKSREEMTDFKHTTEETLARHEEILQKWAKANLGYEIPEEHIFREVVSGETIEDRPEFKKVLSLINEGDIDGLLVVEPERTTRGDLIDCGTVIRSLEITKTLCITPMKIYNLNNEFDKRLFKDQLLKGNEYLEYSKKIMKRGKDLSAEQGKFLGSVAPYGYNRIKCAELGISDGKGWTLKANEDAEIVKMIFNMADEGIGMDRIVKHLVNIDAPLPHDSEWNDSTLKCILNNEVYYGMIAWGKTKIITKLIDGVPVKKAVKQKDYPLYKGLHTGIITKEQFDRVQRGLKDRYKNPIPKGEIFKNPLGGLCKCGKCGKAMIQNSHNGITHTKRKYEVDKEKLYNLLQSQRKALKIPIAEINRQMGYDAFKGGFYYIFSPKFNEKRFYLGDMITNNWFKLKEMLKIETDEFDKAITEFEEITKPTTLLCSENCGMTSSKLYLVEDKLIDSLKILLKEYNVYLDNYEDEYEKVVKTNSKSLGSIEKEIAKKEQQLKKAKEFVEQEIYTPQEFLERKKELTSAIEKLTLEKDKITNHKEEDKVIKIKKAIPSLEKIIENYYSLTMEERNDSLKFIIDRIVYNKNERHINSASDEEQKESIKLDIYLNNRFKL

SEQ ID NO: 9570 - protein, 630 aa, Unknown
  Description of Unknown: Integrase B9571 sequence
  cd00338,IPR011109,IPR038109,PF07508,PS51736, G3DSA:3.40.50.1390,IPR036162,IPR006119,PTHR30461,PS51737, PF00239,SM00857,G3DSA:1.10.10.2600,SSF53041
MIDIEKRELLAQKKAKTRQRMQVRIDPDNYEYIPAEKETDYYDNDIHQRVAIYVRVSTDDIRQTTSFELQKKYYEDFVRQHPNWTLVKIYADEGKSGTNKEHRQEFMQMIEDAKASKFDMIITKSVSRFARNLEDFIGVVRSLAHLKRRVGVFFESEAIFSLNDDAQLALTFQATMAEEESHTRSRSMETSLRMRLDNGIPLTPKLLGYTHDAEGNLVINEDEAPTVKLVFYMYLYGYSTKHIAEALNALERKSYLGNVKWTANGVVQILRNERHCGDVLTRKTYTPDYHDHKSKKNYGKRPQSRYFNHHEAIVSRDDFIAVQHMLDNAKFRNKAFLPELRVIEEGKLKGFVSINPRWAGFKFTDYINASQSVYITEADGTESVPTQSKDEDLKIEFSAGDFDMRGFEVTRSEFFDTFRKPSVSFGSKKIKFSTEIIRKFGAKNYIELLIHPIEKKFAIRATDANNRHGVHCSKLSMKKYVPKDISSAAFNDTLFELFSWNTDCRYKIIGSIYEKDDELVYIFDAQNSEAFLNPHMLERATPDEQSEQAKPLTTAGKRIRAIPQEWTSSFGKDYYLHELTLDTLDTQNEQDWNLRLQGQLYETGKRINVTGFDVLKKYIHAELSGVSLQE

SEQ ID NO: 9571 - protein, 630 aa, Unknown
  Description of Unknown: Integrase B9572 sequence
  cd00338,PF13408,IPR011109,IPR038109, PF07508,Coil,PS51736,IPR036162, IPR006119,G3DSA:3.40.50.1390,PTHR30461,PTHR30461:SF3, PS51737,IPR025827,PF00239,SM00857,G3DSA:1.10.10.2600,SSF53041
LNTPENPDTAPRCAIYCRYSSEQQRDSMSIEAQKRACSEFAERQKWNIARFYIDEARSGTSDDRANFQAMIADATAKDKPFDYIVVHKLDRFARNRYDSIKYKHLLNRKGVRVVSASQPIIGSGDPTEVLLESILEGMDEFYSLNLAREAIKGMAENARNGWYNGGHPPYGFDFETVKTAKGAKKKLVVNSAEAKIVRRIYRDYLSGSGIIAIRNGLNADGSKNRSGRPWTKNVVTGILKNEKYAGDMAFGKRPNRARRNYAPKYEAVIVKNCHEAIVSREDHEEVQRRLARNHPSVTHPRAVASEYLFSGIAKCRLCGGHMKGLSAHGRSERYRYYVCSVNDRVNRKACPQRKIRANVIEEIVIAKLKERLTSREVLEDIIRINNEALKELKAKSEKTLERIEADIARIEQKRRRLFEAIEDGIGGLASEDIAPRLRELQEKKTEAEAERERIKASIAQKPIKSSEEILRKWVEFFKALFDDPDFWKNKARIHSLIESIEIDASRVYVTYCAKLKGETDVLMLDKDPPPDGGGGGGKAVCLPHGAGSHYFLRQTVSIDLKEIIAACRRRVQARPAPAPEFQVSGGRAIMKIPVPSTKQVEMKDGKKIEVWELNGHVFVTAGSSGERCQS

SEQ ID NO: 9572 - protein, 630 aa, Unknown
  Description of Unknown: Integrase B9573 sequence
  cd00338,PF13408,IPR011109,PF07508,Coil, IPR036162,IPR006119,G3DSA:3.40.50.1390,PTHR30461,mobidb-lite, IPR025827,PF00239,SM00857,SSF53041
MSNSNGMGGRRYTRRKKEDQQAERTPRAKFYGRMSTDSDQQAESIDQQRDDCMLLIQRKGWELKGEYTDPAISGWKEREGLNSLLDDVTSGEVDVIVVYHIDRLTRFEPIDAIKRIAFPLFVNKCKIECATGQSFDFSEFGDLITFCVVAGQAHEQSDKQGKSAYRGQLAKAKKGLHVQGALPYALDLDAEGRYKLGDRRQVASMRLMGKLYLAGDSDESIAAALDAKGYESPGLLKWNNRREGSKMKKPESSWRGEAVHDKLTDPVYAGTFIWGGRTLAKFANVQEKPEIKEQNHPAVFDAKTWAALQAERERRRANRNFDTSPRKGVDAFLFTSLVQCGGCGRPMHGYEDRAPKVPVKRYRCVSCKGRGVKCEGNSISESLLLLYVSHALEMYFCNETSIDRLRESMRRRVLPKGRKTTPKAIRSQLGASQRHKAELLQTLMAVGRIDDAQLRDETVGRIEAELLTVRERIDALQESLDAASTPVAQLEERIESAIAESQKAYADLSGAIAEGRPEARDLMRRVIKRHGITLHSKRDGREYVLEKGVIDITQDLPGTSGSGLEVISITFTRLYCSTREAERILGVSGATFNRWKRAGKVTPVQGGGHGQRTAYLMSDIETLAAERGTA

SEQ ID NO: 9573 - protein, 625 aa, Unknown
  Description of Unknown: Integrase B9574 sequence
  cd00338,PF13408,IPR011109,IPR038109, PF07508,Coil,PS51736,G3DSA:3.40.50.1390, IPR006119,IPR036162,PTHR30461,mobidb-lite, PS51737,IPR025827,PF00239,SM00857,G3DSA:1.10.10.2600,SSF53041
MAKPEVSELAVVYARYSSHSQGEQSIEGQLSNARDYAAAHGYTIVHEYVDRAKSGRTDNRAEFQQMLKDTAKRQFSVIILWKVDRFGRNREEIAINKMKCRKNGVRVEYVAETIPDSPEGVILESVLEGFAEYYSLQLSQNIRRGRAESAEKCQSLGGNRPLGYKTGPDKKFIIDENTAPTVKMIFTMYADGKTVTEIVDKLNEMGLRTLRGGPFTKNSLHSILKNKKYIGIYEYQGREIMDGVPRIIEDDVFNKVQEMLKINKRAPAKTWSRADYILTDKLFCGKCGALMFGESGTSHTGAKHNYYICSNKKRFRSCDKKAVRQADIEDTVLNATHELLQDDELLDYIVDRTWEYYLAQDNSQEELRNLQRQLAQTDTAISNLIRAIEAGILTEETKKRMDELTQQKADLKASIADREIARGFHLQKSHIAFYLRSLRDADWSDKEAQKRLIQTFVNAVFVYDDHITLTYNFSGDKSTITLRDMQRFEDGEEFGCRASRSTIMWRQKCLLRKARLYRAFLLPKRRFFSVPKRRCKFPAGTVPSPGGLRPGAKRGLTNRRSGGRVRVIQKPMSKRSTRRGAFQRAAGGGMAAGEAAANGLYEGGEKAITACNTRRHPRPLSRRSA

SEQ ID NO: 9574 - protein, 623 aa, Unknown
  Description of Unknown: Integrase B9575 sequence
  cd00338,IPR011109,IPR038109,PF07508,Coil, PS51736,G3DSA:3.40.50.1390,IPR006119,IPR036162,PTHR30461, PTHR30461:SF3,PS51737,PF00239,SM00857,G3DSA:1.10.10.2600, SSF53041
MSDLRRNPLYYLRSNKDLQDLPRRVAIYARVSTEHEAQLYALENQVDWYNEILARHSNWTLVEQYIDRGITGTSAKKRPSFMKMIDDAANEEFDIVITREVSRFARNTVDTLQYTRELKRNGIEVYFVEDNIWTFDPDGELRLTIMATLAQDESRKTSLRAKAGQRTSMEKGVFFQNGSILGYDYNKYDRTLTINEEQAETVRMIFDLYNQGLGVRKIQWELEKAGRKTARGSDLWSASVISRVLKNKIYCGYLVWYKQFVPDFLEQKKVNNHGEKEQFEVLGSHEPIITLEEWQKANDRLNARKSTDGKQTAKRKPVDVWTKKLRCICGRGFNRRAWHKDAKNGKEYYGYTCYNVVKSGSAKTRANKGLTMEGVCTTPSVSRWKLEAMALYIFRTMSINKDHIIEVATRMIDSHIKDGESDLEKNKKTIKSLNLELEKLEKKIDNIIDMRTEGEISKEVFLSKKEQFEDRVKEIEAQLDELNTDEETQDYSKQIALWKDCLEQMLNYQDADKIPEYVIDAMVDYILVDGTTFKWKFRFMPDEYDLTVEGNRESNGVLIDNKSGEKVSSFAQCFTGSNKRRTKIERWKVAEYLFTKDIAIKYMNKRPQDRIHKWYDILIEIYF

SEQ ID NO: 9575 - protein, 621 aa, Unknown
  Description of Unknown: Integrase B9576 sequence
  cd00338,PF13408,IPR011109,IPR038109,PF07508, Coil,PS51736,G3DSA:3.40.50.1390,IPR006119,PTHR30461, IPR036162,IPR025827,PS51737,PF00239,SM00857, G3DSA:1.10.10.2600,SSF53041
MKAALLLRVSTEQQDLDSQKNDLKPIAEGFGYDIPDSYIFGEHITGKDDIRVSERKSITRLKEACATGEIKAIFIYEVSRLSRSSIDGRSFVRDFVEMKIPIYFKDRGIWTLDRTTLEEDPTTKMVVGMFFDFAEQELKTLKSRTMRGRRNSASKGLATGGYINYGYKKDVETGKTVIDETEAPFVLDMFEKYSTGKYSLSALTRYANTLGFDTRYKKNSTSGTFKNASGFSKSTDNIKWNVGVISSMLKNKIYIGETYFQEIKKEVPAMVDKEVFDKVQQKLVLNPKFLEKTRNHTHLLQKKVICGHCGNLMSGHLDTSGKSGSYLCTSYTSTKEKCGNTTFNYFRFEALVWDFIKNNSFVFANLDEEEKAKKITELEAEKQPLFEIISLRERYILIEKQKVANLLDVVKQGIFSINDIAKDKIAIDKSINDYEREISKARSNISLIDNRIDLIKNSDFSADSITKIESDRVQMKKVINDVVDNIVVYKIDNNSVVLQVNMYDYPVYNILLNQRSKRIFKYWFIEDFVATFLKGKDRPATLKESDNFYFSNPTDLAGSSYWEYYVFDEMCAILEHSGLYSEYYPAVEYTNPKSKKTDVIPEDETEFREYMSTKFGTEFED

SEQ ID NO: 9576 - protein, 619 aa, Unknown
  Description of Unknown: Integrase B9577 sequence
  cd00338,PF13408,IPR011109,IPR038109,PF07508, Coil,PS51736,G3DSA:3.40.50.1390,IPR006119,IPR036162, PTHR30461,PS51737,IPR025827,PF00239,SM00857, G3DSA:1.10.10.2600,SSF53041
MTRCLIYARQSSGDNEQSESVDLQVARLKALAASRGWDVAGEFTDLDISGKCYPDTTDAVALSRLDDAFQEWAAGRRDIYRKGLGELLGRLDGIDAILVWDITRLMRPLRGSHLESYIVQSLKRHGVKVIQLDGGEVDFSSFENSLVVTLTSMINDNQLKIMREKQMGAYKAMRDRGMQCSGPAPVGYRRINGTMEIDDAGAQIVRDAYTLYLAGEGVSRICRRLNEVHRFTVMPSNLKQLLKRPIYAGLAYNSSGELIKALPSLPIISEADWKRAQAMMATGKRGYVRKRINALSGLMRCGYCGGAMNVVSVPKKKGGNALTTKCNRVDQGVATCDLCRVAGVRYRGDDVENEGVVEIPLSPFDRHAAKSLATVGVDPEWQSIGLHEALMPLVALALLDTIREQSDREEIADKAANIELRLARMHESRGSIAALIKDGLLSLDDARTQLEELNREEASAQAELTDAIALLSGTTEDDLARAYSMINMIQEGTLPTSTYRVLAHKAIRKVSCRASCVTVELADGNSFTVEKIRRAGVMTMPPVRMDLVPLSDGSHRLEVSYYYSSYFAGKDSLPSILMDAGRIKIYSIGRNMPPEGKDGLKSKLVREGWERDRNDGLIQ

SEQ ID NO: 9577 - protein, 618 aa, Unknown
  Description of Unknown: Integrase B9578 sequence
  cd00338,IPR011109,IPR038109,PF07508,Coil, PS51736,G3DSA:3.40.50.1390,IPR036162,IPR006119,PTHR30461, PTHR30461:SF3,PS51737,PF00239,SM00857,G3DSA:1.10.10.2600, SSF53041
MNKIPIFEEIDLMLLRKSRSDNIKEPIEITLKRHEEQLQELCIKTTGKPVKEENIYREIVSGGENIKDRPDFLRLLRRLENGNIKRVWCVDPERLSRSGMYGAGDVLKIFDVTNTLIATLDQTYDLKNPMDKKYLEMRMIQSAEYRNYAKDVMNRGRHKSVRDGYYIGSSAPFGYKRKQLHDEQDRFILEPHEEESQTVILMFEMLLEGVGTSNLANHLNKYKYKARKNEYWTPAMVRNIVTSEVYCGYNTWEKFKTVEEIINGEVVKKRKLNDKYYVYKGKHKALISEEEFKNVQEILKSHPSSKLGGNKNASNPLAGVVFCKKCGRHMIRRPYNEKHLKNGFRKYKYDKQELLDFMRSSKEKSNLSLSQIAKKMNISRDTVKGWFPTNIDKFYDGKNLANHWYQLKEVLEIKDSKWDKIITTYNKKVKQNDSLICLTPFCDNVSSELQLVEKRLLQALEIQLNDFRYYVDNYEQEIIKEAKSNAKTLNKIEKQIEDLKKELKNLRRSYNREEFTYNEYIEDKNDIENELKEIEKTKEEILKDTNQDKIIRYKKAIPIIADCLKQYDKLSIQEKNDLLKDIFIKVEYEKNEGGRWNKEAIDKFTLTPHLKILIDETE

SEQ ID NO: 9578 - protein, 617 aa, Unknown
  Description of Unknown: Integrase B9579 sequence
  cd00338,IPR011109,IPR038109,PF07508,Coil, PS51736,G3DSA:3.40.50.1390,IPR006119,IPR036162,PTHR30461, PTHR30461:SF3,PS51737,PF00239,SM00857,G3DSA:1.10.10.2600, SSF53041
MDNYITSLDRNRPRNIAFYGRVSTEHEAQLSALQNQMQWYDDQLKFHPNWNLVEKYIDEGITGTQAKKRPGFLRMIEDSKKGKFDLIVTREVCRFARNTVDTLVYTRELKSKYNIEVYFVDDNIWTMDGDGELRLTLMATLAQEESRKTSDRVKAGQKISRENGSLYGNGNILGYDRVGNTYVINEEQAETVRMIYDMYLDGLGSMKIAKSLSVQQRKNASGDIKWSAERVMRILKKSTYTGVLAYGQSHSNNYLEQKRINNLDRDSYMYQKVNIPVIIPQNKWDDVQKIIARRTKSVGDKLSGKKDVKEFWSKKLLCNCGSSFRRNKWRTNKTGEAVYGYQCQRQLNYGSKQFREKNGLDTDGYCGIRMVADWKLDMMAKMVIEHIWKNKGESVILALKMISENYEEDVKPNKKNIKETELKIEKLQKRLQNLIEMRADGEISKEEFAESKNTINEQISILNSELTIDEVESDEPESIEKKIEVIKQAMNEVIDFSQPKLPKYIIDKFISKVLVLDNNKFRWYINLGNDYDKNSDIYLDTQVEGRKNNYSAQILSNDDSLSSVHSSTGSYRRNKGEIINLNFVITYKMAQDYRKSIGKYLRKNQWSDAIIDVAVEL

SEQ ID NO: 9579 - protein, 617 aa, Unknown
  Description of Unknown: Integrase B9580 sequence
  PS00397,IPR038109,IPR006119,PS51737,PF00239, G3DSA:3.40.50.1390 ,PTHR30461,IPR025827,SM00857,G3DSA:1.10.10.2600, SSF53041,IPR011109,PF07508,PS51736,IPR006118, cd00338,PF13408,Coil,IPR036162
MNQYAEKELSGLVFQTFEQLAINGYIGDPSGEDAYGYLRVSTDQQADENRAGLPRQIERIHEISKEKRKRISWDRIVADDFSGFDFEHRPQLQKLLKETINPNTRRANVIVMEQLDRLSRQADWHQGYLLEKFIKDRGMEVIFWKSFGSRIERVVMGAISQDGMEDAQGRMKDGKKRKAKNKKVTASVRAYGYERVDPDGKFSERTQRETHYKIKDDESIWIIFIFNEIAIKGTSARQVAKMLNEKSVLCRNSKAWEASDITRIIHNPLYKGMFTANRYREYKMEVVENGVSRLINKTEMRPESEWIYVPVPPTVSEEMWELANNMLSKNKQMSPRNQKKYIYILSGLIKCATCGYTLVGDVKTVKAGTNRMKETKTYRYYRCTSTTAWRKKNYKMECNQKSISVEKLEETVWSVIRKVIYEPEILLQAMDAEYNSISNQQIIDTIKHLENEINKLEKHLAKDYELYRNDYLTAQEFGEKKRLYELDINNKSREIEQRNNQIITQDKLEQRKEFILGLSERAKQYDYGKNAPTNIKQTLIKSIVETIYVNSNEGWVTITGQIKGTWSLIDNNALHIVKQSLERMLYNRETLRFKIHYWIKDGITSSITLLSSDPNLD

SEQ ID NO: 9580 - protein, 616 aa, Unknown
  Description of Unknown: Integrase B9581 sequence
  cd00338,IPR011109,IPR038109,PF07508,Coil, PS51736,IPR036162,IPR006119,PTHR30461,G3DSA:3.40.50.1390, PTHR30461:SF3,PS51737,PF00239,SM00857,G3DSA:1.10.10.2600, SSF53041
MNIYEIMNQMRVERKRIEDFQLRVVIYARVSTQKEEQDGSVEHQISHFKEMVERNQNWSLIKIYTDRVRAESAENREQFQQMVDDAYNGEFDLILTKEVSRFARNTIDSLTYTRDLLRHGVGVFFYTDNICTVDPDSELRLTIMSSMAQDEVRKLSERVKFGHKKSIESGHVLGNSRIFGYTKVNSKLIIDEREAEMVRLIFETYATGEYGLRYIEQLLWDKGYRNRNGKKIHHNTLSGIIQNPKYKGYYCGNKVKIIDYRTKEQKFLPPDEWVIFKDESGEIVPAIVSEELWQKANVIFTERSNKVKELDRSAKKTSPLSGKIMCGVHNTPFWRTSYSHRLHKDKSIYQWICREKKRGKSCYCTTIAIYESELYSILGELITRLIPNIDTYLDEFVKTYNETKAMKSVKTDVGTMESAIDAVNQKLERLTRKKDKLFDLYADDIIDKNEFKDRNASLVSEIEELEKQLAEFRKKDEDTDDDVVSSIHSLKLLFHKILQKDNESYVINEDYINYFSELIIDKIIVYPVDNSSMNLEICLKVGSEEVEYKRLGRSSGHTFKKMMPKQRTIQERKGNQFCSPNNNQIGIPLISYETNVKRELRYRQKYCLKYLITVAL

SEQ ID NO: 9581 - protein, 616 aa, Unknown
  Description of Unknown: Integrase B9582 sequence
  cd00338,IPR011109,IPR038109,PF07508,Coil,PS51736 ,IPR036162,PTHR30461,IPR006119,G3DSA:3.40.50.1390,PTHR3046 1:SF3,PS51737,PF00239,SM00857,G3DSA:1.10.10.2600, SSF53041
MYCYENNVAKPRNVVVYARVSTEHEAQLSALENQKDWYKPFLAQHPEWEVVGMYVDEGITGTSAKKRPQFMKMIEDAGSGKFDLILTREVSRFARNTVDTLQYTRELKSKGVEVFFINDNIKTFDGDGELRLTIMATLAQDESRKTSIRVKSGQQTSMENGVYYGNGNILGYDRVGKELIINEEQAKTVRMIYDWYLDGVGMRAIQFRLEQAGRLTSMGKTRWHQSNISKILKNSFYCGIITYHKEYTPDYLIQKKIRNFGDIELTQVKGTHTPIVTEEEFNRVQQIMGSRTSVMTNNVTGKRKELGKKPYGDVWTQIMECECGHKFNRKVWHKVNGVNQYGYQCYSSLRTGSVETRKRKGLPLEGICQTPMIPGWKLQMMVKHIFNTFISNKAEVLSLAESILEAHINDTPPENDNSELIARKISEREKLNKRLDNLIEMRADGELSRDLFKKKKEEIESAINKIDDELERLQPAEEPEENIDSEEKIKILKYYLEQSVIPLEDENLPEDIIKAFIKKVVAGKDHFDWYLRFPGDDDEPQQLTMSGKRKSSAVISSLCTTLHRQLLAKEGNNRIDKLIKVQEFVIDLPQAKAYLYSFSTKHRIYNWEDLNITVYL

SEQ ID NO: 9582 - protein, 613 aa, Unknown
  Description of Unknown: Integrase B9583 sequence
  cd00338,Coil,PS51736,G3DSA:3.40.50.1390,IPR006119, IPR036162,PTHR30461,PF00239,SM00857,SSF53041
MSIKLYFIQKYVILEDMEVLGVYARTSRDSGDFSTIDQQVKAGIDFANHNNMKYKVFQDKGFSGYKIDDSEDKDPFANRPAFSEMIEAIKLGTINAVWVWEHSRLSRNQYASAVIFNLFLKHKIRLYEKDKEYDLYDPNVQLLRSMLDAVAQYERQLIVRRTTRGLYNAIDSGKRSYTSFFGYRKTVKNEKGNYLWEAVPSEIAQLKEWFKRFKNGESLRSIIVSEADFKDTTRYKLTRTSQLSRYMQHFDYTGYTLNTKGLDYLKKFDNFEIDSLQVLQNPDYWVKSSAYPIEIFTREEWIENKERLRVHRGKRKEAKNRKAEKALGTGIIQCALCGSKYFHQIQIQKRNGKEQHYLYYFHHKTIAGACSQKPKSIVQHKIDTILKTFVLYNILASDGETKFLKEQLFQEEIEKKAIKEKLKTLKANRKKLEIQKNKLKKALEAAEDVGTITVLAKQIDNAEGAISEADKNIIDAEIDLENKNADMEKTQAQLLYYSAKDLLIQFFEKWNIEEQRNHLLRVVDSATLNGTKLTIISGGVTYIFNTTKHYQFPQSMYQELLEKGGKNIDYLISHHKEELTDEEMYIATMRRILLSGIVNGLSSFDMISKRIVF

SEQ ID NO: 9583 - protein, 428 aa, Unknown
  Description of Unknown: Integrase B9584 sequence
  cd00338,PF13408,IPR011109,IPR038109, PF07508,PS51736,G3DSA:3.40.50.1390,IPR006119, PTHR30461,IPR036162,PTHR30461:SF3,IPR025827, PS51737,PF00239,SM00857,G3DSA:1.10.10.2600,SSF53041
MQVTKLPSLPQLPKKRKVAAYARVSSGKDAMLNSLSQQVSYFSSLIQSNNDWVYAGVYVDEAITGTKDDRTEFQRMLQDCKEGKIDLIITKAISRFARNTVTLLKTIRELASMNVEVYFEEQNIYTLSSEGEFLITILASYAQEEARSVSENQLWRVKRSFENGLPWGAYLYGYKVIKNKYYVVEEEAKVIKLMVELFLQGNGKGKIATMLNEMGIPAYYGGKWHPTTILGILRNYDYTGNLLLQKTYTKDYISKKTMKNKGEKQMYHVEGSHEAIIDLDTHLKIQIELQKRNEIFTDRNNHSIYKGKIKCGHCGKSMLRKVSNWRTFWTCATFQRKGKEGCIAKRIDEEELLNILNEIQNSTKYDIETEIKEIIVYPDYTLKVIFNDGYEVNANWTKRSRSKSWTPEMREAVSVREKERWSKVLWQR

SEQ ID NO: 9584 - protein, 613 aa, Unknown
  Description of Unknown: Integrase B9585 sequence
  cd00338,IPR011109,IPR038109,PF07508,Coil, PS51736,G3DSA:3.40.50.1390,PTHR30461,IPR036162,IPR006119, PTHR30461:SF3,PS51737,PF00239,SM00857,G3DSA:1.10.10.2600, SSF53041
MNDVAWTQTEPGLQQQIYRPSVQLEKTFIPARPKINIYESGRVFRVCAYCRVSTENDEQLSSFELQQSHYRQLMGNHPNWNLVHIYADEGISGTSLKKRDDFNRMIAACEAGEYDLIVTKSVSRFARNLVDCVSIARKLKSQNPPIGIFFETDNFNTLSEGSELMLSFLATFAQEESVKKSESMNWSLQQRFKDGKLLTPAPLGYKKPKDSSGHYIKYAPLEIVESEAEVVRFIFNAFLSGRTTKEIACLLNDIGFPTKTGGKLWYDGSISYILQNERYCGNILTWKTFTSDMYEHKHRKNRQDRDQYLYTDMHEAIVSIETFESVQVLLENRKHHVRGPLPAMQVIGSGIFRGYIPINHHWVNEDTASYYEASNSTCNKLEMRRIKRNLLSVFDFEGYQVVRGQFMAAHAECPSISITGTRITFNIYCVRKFNTVPYIQLLLHPSERKLAIRPCDANDIHSIRWRPEIGKPVFAKTIKCQYFSSALFQIMNWNPDFLYRIRGAWATRGNAQIIVFNLENAVPYVSIEQKCDSSPKPHKNKIPLCPEEWSDNFGENFYDHRVQYGFYFFAADWDAQADSVPVPGFNKTTNLSAEKLKESLENLKTKAGSLDGT

SEQ ID NO: 9585 - protein, 612 aa, Unknown
  Description of Unknown: Integrase B9586 sequence
  cd00338,IPR011109,IPR038109,PF07508,Coil, PS51736,G3DSA:3.40.50.1390,IPR006119,IPR036162,PTHR30461, PTHR30461:SF3,PS51737,PF00239,SM00857,G3DSA:1.10.10.2600, SSF53041
MYQYGYQAPKQRKVAVYARVSTEHEAQLSALENQKDWYKPIIAQHPEWDIVRMYTDEGITGTSAQKRPQFMKMIEDAGDGEFDLILTREVARFARNTVDTLQYTRSLKAKGVEVFFINDNIKTFDGDGELRLTIMATLAQDESRKTSIRVKCGQQTSMDNGVFYGNGNILGYDRVGKDMVINPEQAKTVRMIYDWYLDGVGIRAIKFRLEQAGRLTAMGKSNWHESNISKILQNSFYCGIITYHKEYTPDFLEQKKIRNFGEIELTKTRGTHEPIITEEEFERVQEMMAKRRKELPNTGAGKRRQIGEKQPGDVWTELLICECGHKFNRKVWHRVEDDVQYGYQCYSSIRTGTVTTRLRKGLPIDDVCKTPMIAGWKLQMMVKNIFREYLHNTAEVLALAEAMLERHIDDEEPQTDNNRLIEQKQAEVEKLNKRLHSLIEMRADGEITRDIFKAKKQEVEDRLLAIQNELNQLQPQEEAIDDATHDEKIKILKFYLEQSVNPDAMENIPEDVIRAFIVKVVVHENSFDWYLRFSPDKPPKSLCIDGKRKTTAKVSSLCSPQHRLLLTKVGKSNFVKVQEFSIDLGQAKAYLYAYSTRHRIHKWNDIHISVFI

SEQ ID NO: 9586 - protein, 612 aa, Unknown
  Description of Unknown: Integrase B9587 sequence
  cd00338,PF13408,IPR011109,IPR038109,PF07508, Coil,PS51736,G3DSA:3.40.50.1390,IPR036162,IPR006119, PTHR30461,PTHR30461:SF3,IPR025827,PS51737,PF00239, SM00857,G3DSA:1.10.10.2600,SSF53041
MNKATEPPHKRAVTYSRFSSDLQNERSIADQQALCERFAVRSHLTITKHYQDKAKSGASMNERAGLRQLLDDAGHGHFDCVIVEALDRLSRDQVDMLMIYKRLAFLRVEILTVNEGAATQITVGIRSLISSIFLKDLGDKVARGQVGRVMEGKIPGAVTFGYRLVAGKPGEREINPEEATIVRRIFEEYAAGKSPRAIACGLNNDDIPSPRGKRWTGTAISGGGADGMGLIANPIFIGQTTWNKRKSTINPETGRTVRRRTEKHLTIDVPQLRIIDQALWDACTSVKANRSNRKNGGNGVARLVLPRKSWPLAGLVKCGTCGGDMHLRGHSKSANGKTFRGIRCATAFGDERKCDHRRSYDLDRVQRLTFESVHKILSNPKHLDLFMRCYDREFKAAQRQASNGLQKGEKRLAQIEAGLMRLVGALELGSMPADIINERIQKLEAERVAIREQVDICAADAEPSRAHPATIRRWLTELEAKLGNLDAPGKKTLSEGLGGLVADVIVHPVARGEEYRVEPRIYRTALTSRPSPGLARPSAQIAREYGVDQNSSKYSQCSQSVTLAEAAEAISGRGPGFNTTPSNCDNAKSKTADLTISPFRKDVISLGISKVA

SEQ ID NO: 9587 - protein, 611 aa, Unknown
  Description of Unknown: Integrase B9588 sequence
  cd00338,PF13408,IPR011109,PF07508,Coil, G3DSA:3.40.50.1390,PTHR30461,IPR036162,IPR006119,IPR025827, PF00239,SM00857,SSF53041
MKAAFLIRCSTKKQDYERQVKDLTRLAKRFGYEYGDSTIYGEHITGKDDATKRDRLSIQHLKEGAEEKKFDVVLVSEVSRMSRDPMSGRMYIRQLINMEIPVYFRDIDTWTIDPQTGRKTRDAETIIGAAFDAAWKYLKSMKTQIASGRRDELDNNCMSIGQPFFGYKRFGGRDKAKKNSWIVDEDAAEVVVDVFNEYLKDGATLKSTALAITAKYGEKFGKNFSIGTIEHILTYESYYTGIKKVNLTDPDTEDVDVFEVEVPTIINKALYDAATQKRATNRTVTDPYPKQKTYVLSKLLKCPNCGHSLTPRKKSDAHSGIRLQNGKPAVSWCCMSGITNATDCKSRITISNEKLEAVIWGLVKKELIGFANLNTEDRMAKIEEMEQKIANIKADIANYEAQKAKMDKDIKNAMKLYMEAPDDDIREMMKDDYYSTLTRCKNEKADCDSKIEGLKEKKDMNEKFLVSLRQPTLPDDAISKAEADPEEMRRLVKELIEKIYPYRIESYVSPATHRVMKNGVVLLEVYAIDAIYYILFDGNQRNNKTAYYISSHFATFQNGKSKYEAYDEGEYFVIPNADMVMETEELVETATFNEMMEICETNGWEIDYTYK

SEQ ID NO: 9588 - protein, 609 aa, Unknown
  Description of Unknown: Integrase B9589 sequence
  IPR038109,IPR006119,PS51737,PF00239, G3DSA:3.40.50.1390,PTHR30461,IPR025827,SM00857, G3DSA:1.10.10.2600,SSF53041,IPR011109,PF07508, PS51736,mobidb-lite,cd00338,PF13408,Coil,IPR036162,PTHR30461:SF3
VKTVKKIEVTRPVLPTRKKVAAYARVSMETDRMMHSISTQVSYYNELIQSNPEWEFAGVYADNFISGTAIDRRPEFKRLLDDCEAGKIDIILTKSISRFARNTVDLLETVRHLKELGIEVQFEKEHINSLSDDGELMLSLLASFAQEESRSISENARWAIQKRFEKGIPNGHFRVYGYRWEDDQLVPVPEEAEIVKRIYQNFLDGKSRLETEREFAAEGITTRDGCRWVDSNIKSVLSNITYTGNMLLQKEFIEDPITKKRRKNKGQLPQYFVENTHEPIIDMKTFQYVQDEMARRRELGALANKSLNITCFTGKIKCGFCGKSFMHNTRKNRAQFTTTYTDEDGMYTTWVCGSRKQKQKGDPCKAKEIPDKILKACCAEVLGLDEFDDDVFAERVERIDVPDGGTLVFHFYDGTEVTKEWKSTAKQDCWTDEYKDRQREWVRNYMAKGDGRFSPFTTRIKCGCCGGSCRRQVQGSSDGKIAYWRCSGSGATYCGIRGIREPELMEIAADLMGIPEFDGDAFRERVDHITMVKSGLLEFTFTDGHTEEAEYSTKRKMPGWTAERRAAFEARPKRQVTEEQRKAMSEHMKQIRRERHWNSKGKSKQSQQP

SEQ ID NO: 9589 - protein, 608 aa, Unknown
  Description of Unknown: Integrase B9590 sequence
  cd00338,PF13408,IPR011109,IPR038109,PF07508, Coil,PS51736,G3DSA:3.40.50.1390,IPR006119,PTHR30461, IPR036162,PTHR30461:SF3,PS51737,IPR025827,PF00239, SM00857,G3DSA:1.10.10.2600,SSF53041
MISPPPTAMPCCEYYRMSTLDQDDSISQQQREVAKLRKQHQYNTRHQFIDEGWSGDDDYRPHFQEMLTQIERSDNPFRVILCWDLDRFSRANPLEVLSQFNLLRKAGVNVHTCQQGYFDLQQVDIAQLVILAVESEQNHKYLQKLAVGTSRGMLSAFRAGKWTGGDAPYGFVLEDQRLVPVDREVELVREIFHWFVNLRLAYGQIADRLNARRIPSPRGKKWHRNTIKKMLANEIYIGDRRISKNWTGKHAKIQNGEITKLAGDELQKIAAEKEKIMQRRVKDAKIGLERKTKPRVCRQNSEDEGNYQVGFLDYQVVTPEIFCVARERIAQIREEKFRPKKGAMPLTGIACCGHCGHKLSGLDTSSRRTLANGTEKVYRRYVYRCCGAQNTGSHHNYSVSADLLHSVVAMKIRQCCLNPRAIERLVDDLRRQFEQPSAADDPERLQAQIRAIRNEIRRQQDRATRAPETIWSAIDREIRKQEGLLRDAEQRLQAAKRRAGSSVAASEYSRRVAAYLGDLGEQFASCDPRRLREEFQRILGRVTIWAAPGTLSPERRQKEGRTESRRWQLDRGEIEVRLSVPTENYGSPYAPLPTIVLPFDASDVACAA

SEQ ID NO: 9590 - protein, 608 aa, Unknown
  Description of Unknown: Integrase B9591 sequence
  cd00338,IPR011109,PF07508,Coil,G3DSA:3.40.50.1390, IPR006119,PTHR30461,IPR036162,PF00239,SM00857, SSF53041
MAKAVARTKAYSYVRISSKGQIEGRGIARQFAAAQEYAAKHGLELDEQLKDVGKSGFRGDHVKFGALGGFLRLVKDKQIPVGSYLLVESLDRLSREDVLIAQAQFIEILSAGISIVTLIDGMHYHKDKDFTQLIISLTYMSRANNESQEKSKRIKDVIRNRKLDALAGKPRYNHHLAGWITQTRIGDSKDYEFTLNEKAKGVLRAFELYDSGMGAWSVAKALNTEGHPVLRPKQNVDAKWKEAQVQLMLRNEIVIGTYQASETIDGKSVPLGDPIRNYYPAAVPDDLFWRVQAKINKPKPVGRLGRRYSNLFARNTSCSGCGRILRLSKGGGPNRRISYFSCMQKALVDGHPCSGKFFPYDTLEHAILTYATDFYEAAATEMQVPEKNKQKLEKQLAEAKTYLARIDNERKNTLAMSGEDLDPEDKAELLNNVRALRTKVEQQKVYIGELEAQLLNSQDKRDELKSVMDQIQAERAKWKTAPDDEVMQSRSRISAMLREFVTTVEVDFEAQEAIVWVGGYTSAYKFDRDGNLIGTFFLMPSLMPELYPHVIDRTPSGRIRQIRKVNEDIERKPMTDADMIDFMQSMGWKADRIDMALKASKRIREALA

SEQ ID NO: 9591 - protein, 607 aa, Unknown
  Description of Unknown: Integrase B9592 sequence
  cd00338,PF13408,IPR011109,IPR038109, PF07508,PS51736,IPR036162,PTHR30461, IPR006119,G3DSA:3.40.50.1390,PTHR30461:SF3,PS51737, IPR025827,PF00239,SM00857,G3DSA:1.10.10.2600,SSF53041
MRCLPLQHSTLFGYGQAKAPALVRCSAGETWSAAQNRTKRILCLQGSVYHTPCIWATARKGSVFMPRKKAPAAEAPRLVAYYRYSGGSRQTEQSIEGQRRDCEAYARAHGMTILREYVDRHISGKTDDRPAFQQLVADSAAHTFDAVICWKTDRLARNRYDSAVYKKKLRDNGVEILYAAESNISGAEGIIIEGLMEALAEYYSAELAEKARRGMRESALKGKALGSSRPLGLTVDADKHYIIEPTGAEAVRYIFEQYAAGLSSSSIVERLNAMGLRTSHGGPFNKSSINRIIQNEMYRGVYVSKKFDVRIEGAIPAIIDNDLWERAQKMFERNRQSRTPHASRADYILSGKLYCGECGCLMKGVCGRSSGNGQMYHYYACPGRSIGRACTRKNIPQDELEAMVVNAVADLLLEPALLEQIADAIVELQQAEAARPDPEKQALEKSLSDVRSKIQNILTAIENGTSSAALSARLADLEQQESTLSYQLSSLTAKKPLTFTRDQILFLLQQFRVSPSERTKAYCRRLVDTFVDHIELTNTELILYFNLSDETIDKNKKAPRSNHSEESSTEKRLVHLAHQQANYSLYAASGYFSLVEHQFSARLWRTA

SEQ ID NO: 9592 - protein, 607 aa, Unknown
  Description of Unknown: Integrase B9593 sequence
  cd00338,PF13408,IPR011109,IPR038109,PF07508, Coil,PS51736,G3DSA:3.40.50.1390,IPR006119,IPR036162, PTHR30461,PTHR30461:SF3,PS51737,IPR025827,PF00239, SM00857,G3DSA:1.10.10.2600,SSF53041
MPRKKKLQEVGGLRLVAYYRYSNGGQQTEQSIEGQRRDCEAYAKAHGYKIVHEYIDRHISGKSDSRPAFQQMISDSDSHLFDAVICWKTDRLARSRYDSIIYKTRLRKNGVKILYAAETVVDGPEGIIIEGLMESLAEYYSAELAQKLRRGQRESALKCIALGGNRSFGYDIGPDKHYCINEKQAPAVRYIFEQYAAGATAADIVRELTARGYRTSRGNPFNKNSICRIITNEMYLGVYKYADIRIEGGVPAMIDRELFNRCQTQLAFNRAHGGGKGAPRADYVLVGKLDCGLCGHAMKGASATGHTGSKHYYYTCTQHVEKKCPKTSIEKNYLEQIIVDGVAKYVLTPEKISQIVDCMMELQAKEQEPKGNPEKDALEAELAECRRKQNNILEAIEEGGSARLAARLRALEEQEAQLTFALGEINNAPAPPQFSREALTFMFEQFRREEDEVDEEYRRRILDTFVSSILLYEDRAEVKFNITDQKTGDFERVILPISANKKPPEDDDIPSNSEGSTALRLVEHQGVEPWHRSPGLSHFESLKLLDEAGPLRLSLAAEGILATSKKARHTAICRQKSAAFCEMTLEKAFFTQAVSGCISGVVVLDVR

SEQ ID NO: 9593 - protein, 607 aa, Unknown
  Description of Unknown: Integrase B9594 sequence
  cd00338,PF13408,IPR011109,IPR038109,PF07508, Coil,PS51736,IPR036162,PTHR30461,IPR006119, G3DSA:3.40.50.1390,PTHR30461:SF3,IPR025827,PS51737,PF00239, SM00857,G3DSA:1.10.10.2600,SSF53041
MAKRIPGAFICARYSTDNQSQDSIEVQAEACAKWCAQHSVQVLGIFADEAVSGMKETRPQYEEMMRRLRLGEATMVVIYDQSRLFRRMTSWFLFREEMTSLGVKIISVTQPLVGLDIRDPANFLMEGSSALFNQMWALQSRQKTMAKMRFMARNGQYTGGKPALGYEVVDGKLQICEEEAAVVRRIFREYADGRSYRDIIAGLNADGIKTKRGNAFGSNSLHDLMHNEKYIGTLVYGQSPYREDGTRNTHAKDGEDPIRIEDAIPAIIDKETFRIVQERMAQNKRQQGGRPPKNREYPLRGKVFCAACKSAMTISTSKGEYYYYRCTGKKRLHNCEASPISVDQLERTVAIALRNVLGAPSEVNGLIRILRDQAEQITAGSVERLATLLEQEREIQKQLDNAIDAILSGLTSTALKEKITALEKRKAEINVDLNALKRSVDAASIPEHRLREILDYIIRSDNAALMSIVYRVEVSEDAITIWTLLDSDPTGHIDTAQEGVTITPGTSFAVPKKQIPIRVSAFLLCRGTRIINSNSPVGCWAMGRAPSPPYEVFPSGNTSATSPFRPVPLLKHLLCFLFFWYGERGENDIMRMSGGHSLDPGSTGSTP

SEQ ID NO: 9594 - protein, 607 aa, Unknown
  Description of Unknown: Integrase B9595 sequence
  cd00338,IPR011109,IPR038109,PF07508,Coil, PS51736,G3DSA:3.40.50.1390,PTHR30461,IPR006119,IPR036162, PTHR30461:SF3,PS51737,PF00239,SM00857,G3DSA:1.10.10.2600, SSF53041
MRVENNQPRNIAIYARVSTEHEAQLYALDNQIDWYEIILQSHPNWNIIHKYIDRGITGTSATKRPQFMQMIKDAESKEFDLIITREVSRFARNTVDTLQYTRQLKKIGIEVYFVEDNIWTFDADGELRLTIMATLAQDESRKTSLRVKAGQRASMEKGVFFQNGSILGYDKIGNNMVINPEQSATVKLIFDRYNSGMGVRKIQWELESLGRKTAKGSTKWTASVICRILKNKFYAGYIVWYKQFVPDFLEQKKINNHGEKEQFEVLGSHEPIVSLEDWELAQRRLEQSSQIVNKGRKVGAKPKTGLWTNKLRCSCGRSFNRKIWHKDKKDGSIQYGYQCYSSIKSGSVATRINKGLPLDGICKSPAISEWKLEAMALYIFKDFTFNKDRIIQLGMREIEKALRSVNNNDNKEQINSLKNELDKYNKKIDNLIEMRTDGEISKEQFTAKKKDFEIEINRIEKEIESISDKQDAIKDIPQLLSEFKANLTSMLNEPIVDKVPEYIIDAMVEYILVDENKFTWKLRYPSDKYYLSIDGSKKQHTVSESPSLRQCLTGCNTRNAEQAVNNISFTNDSILILFDKKMVQQYGNLKPTDRIHRWYDIVIEIIF

SEQ ID NO: 9595 - protein, 607 aa, Unknown
  Description of Unknown: Integrase B9596 sequence
  cd00338,PF13408,IPR011109,PF07508,PS51736, IPR036162,IPR006119,PTHR30461,G3DSA:3.40.50.1390,mobidb-lite, PTHR30461:SF3,IPR025827,PS51737,PF00239,SM00857, SSF53041
MEGVLEPAAAYVRGSTLMQKDGYSPEVQRASIADRAPRDGYYIAIEDEDWESGHKVTRKGYQRILDAVRAKKVKAVYVFMFDRWGRDGVEWLARAQELRRLGVILISVQEGKEEGGLISFVRAGMAQEESHKIARRVIGPRRAAAWAGQYMGETPFGYKRLYPEWDGKGKRPAGRLVPDPATDWIVAELYRRYAAGEGSLRVLAGWMQADPRVPPPPGGAQRWNGGEIRNILRKVVYKGCVSYDVHPSGRFERAAEGTAFVRPGTHPAIVDPDLFETVQRRLVDARSHSAYRSQRKDGPPPAVLAGLLRCHVCGGLVIRSHRHERGQYICLRRQRAVDVCASRGYNVDLADDAIIREISRLRGHPWTAQTDRRLTTARRLDDGATVRQALADERARLERHVRRFGDRDDEPTRAERDAHRVVTAEIAVRIEALAARCDEARKTIVPLPDLRMAHELLRHISIRDAAMDCVAKGDGARLRQLIKGWVSSATLVERWPDINSTWLRFEVDWSPVARALMGAGLLTLEDAPGHPEPDSDAAALAREEVARRHRESALRWYHETKKPRLLADPIAHEAAREAGRQSSRRLYQRRKQQERPKDTEENETSPL

SEQ ID NO: 9596 - protein, 607 aa, Unknown
  Description of Unknown: Integrase B9597 sequence
  cd00338,PF13408,IPR011109,IPR038109,PF07508, Coil,PS51736,G3DSA:3.40.50.1390,IPR006119,IPR036162, PTHR30461,PTHR30461:SF3,IPR025827,PS51737,PF00239, SM00857,G3DSA:1.10.10.2600,SSF53041
MEQMFSSPSSIKRVCAYGRVSTKHEEQESSLETQHLLFNRWIETHKSQGYELVNEVYEQKTGTLVTKRPKFQQMIEDAKQGEYDCLLFKDSKRFSRNIEDFLVIVRELNVHNVQIIFITEGLVVSNETDRTNLALLGAMSENYSNALHSNLQTSLRMKFNSPLGRVPGDVYGYKRVKGDSSQAIIIPEQAYIIRELFNRYADGEGIASIAQDFIDRDIRTYRGGKMSMFALRRYIRNPLYKGLLVMNKYSKPSVRDKRVQNNSEDWVYRERPDLQIVDTELWDKCNSIMDKNKKKMDEYTNGKIGYKPNILSNKLLSKVVVCGCCGRNYNRKESHHKDSSKRYIYLMCGYKKYNKKNQANLQVCTNEQVIRLDYMTKILSEVIKSILESSDSLEDQVQAKIANILKERNRKSDSLSTEKSLKEAEERLKRIVELYKDGLVGKDEYREARDKVKELKSLSNVHSVQISKEMIHELTDKFIGNLSNIISESLVDEGGVDTKAFNRLFDKIVINDGQMDIIFKALGSKQVEPIELKLADLQNVQVFVPIVDNQLSSCKSLVQREKRHKKAKWTADRTSEFIQLGSEDFNGKLTNQVIIGKRKMKIRVYIV

SEQ ID NO: 9597 - protein, 606 aa, Unknown
  Description of Unknown: Integrase B9598 sequence
  cd00338,IPR011109,IPR038109,PF07508,Coil, PS51736,IPR036162,IPR006119,G3DSA:3.40.50.1390,PTHR30461, PTHR30461:SF3,PS51737,PF00239,SM00857,G3DSA:1.10.10.2600, SSF53041
MKRKIAIYARVSTEHEAQISALENQIQYYDEILKKHPEWELYERYIDEGITGTSIGKRDSFLRMMSDAKDKCFDLIVTREVSRFARNIVDTLQQTRTLKQYGVEVYFTDDNIWTMNDEDGELRLSIMATLAQNESKKTSMRVKAGQMISFKNGVFYGNGNILGYDREGKNLVINPTQALTVKRIFELYLQGNGIRKIQFIMEQEKRKTSLGKTKWSASNIARILKNPFYCGRIEYRKQYVPDYLTQKKINNHGEIERVITKGTHDPIVSEEDFDKVQEIFKTKTTKKDNKKYGKPLADNVWVRKLKCKCGHGMNRKINYVSKITGVKTYSFQCHDQIHTGTIKTRLKKGLSIDGICDNKSFPEWKLEVQADFIFRKLLSNKQEIYETAIEMLESSVAVDTHIQDKKQKIENHIQSIDKLRARNDMLLDMCTDGDISRETFKKKTELNNQNIHELEEKIKLIRKQIKENDTQEDLNKRIECLSAFLKMKCFSKKEKIPESIIEKYVEKIIFYKDDFEWYLRPTIGNVDFLSIDAKNMKKGTHELEKTMCYVPSSTGSDCRRRKIDKRKYFYFTTLIVTRDDVNEYMKYHAEYTKANRFKDIVCKIYI

SEQ ID NO: 9598 - protein, 604 aa, Unknown
  Description of Unknown: Integrase B9599 sequence
  cd00338,PF13408,IPR011109,IPR038109,PF07508, PS51736,G3DSA:3.40.50.1390,IPR006119,IPR036162,PTHR30461, mobidb-lite,PTHR30461:SF3,IPR025827,PS51737,PF00239, SM00857,G3DSA:1.10.10.2600,SSF53041
MSKNGTKPAVGYIRMSTDKQEDSPARQRRDIEALAERLGYRTISWYEDHGLTGTESANRPEFRRLLNNAKGGKFQAVLLSEQSRMSREDVFDAMVHWKLLRDAGVKIVTCQRGELDFSNLGGVITAIVDQYGARDESVKLAQRVASGQRLKAKQGQRIGGIVFAYDRDVFDDAGKHVKRIHFRDRFRKPPTWRTKLVPSDDHNAVAGVQWAFDSIRQGQSIGYVMKGLNKRGLTTTHDNPFTFTTTINLLTNPAYAGVLRVGKYSRGKFSSVAEDGMIVVENAHEPIVDPEVFEQVQQVLLDRKSRTPRARPEQYVLSRIVTCQHCGIRMYGVRRSKRDKHVAFYQCNPSPGVMPYSPNCPHPAVRADRLEAFVLEMIRERLLDTGVEQQIRDAILRAKRKDATKVSRDERRLGDLRRKIDRGTENLALADRDDFLAISKLLTRWREEEAELVEQIERRGRELEPLPDALRVLARLSEVPGNLAKADRAKLAHAIRQTVASISIGVRDATSGEIAYRELHGELQFHEAFGLRPIAIPDEVIGQRRIWREIGELARRAKHPIRLADVCELIGSSCPSRACHNMRRAEAAGLVRKVGKNGGWVSAK

SEQ ID NO: 9599 - protein, 604 aa, Unknown
  Description of Unknown: Integrase B9600 sequence
  cd00338,PF13408,IPR011109,IPR038109,PF07508, Coil,G3DSA:3.40.50.1390,PTHR30461,IPR006119,IPR036162, PTHR30461:SF3,PS51737,IPR025827,PF00239,SM00857, G3DSA:1.10.10.2600,SSF53041
VTSTRKPAAKNSALRLVDDVMSGAVATGSNACAIYNRYSTDLQDPRSLVDQETQNREQAKRKQLSVHGIYNDAEMSSRTLHGRTGYARLMDDVRAGKFRTIIVESMDRLSREGGSIYTMFQTLQHYGVEIIESGNGGKVITLTEIAVYALTGTFFMKTLTEKVRRGMTGRVKDGLVMWKPPYGYRFKQGEKKLEVVTEQATIIVRVFNEYAAGLSTRSIAERLRNEDVRSPSGKPWTHEAIMGGMSKALGGRRSGIIGNRTYLGQLHWGVGRYSLDPATGNRVARPPTEEPLVIDAPELRIVSDDLWRAAHGRADARAAKNNIVGLKDRRVRQAISRNDRPLADLVHCGGCGAHMILAFGRGDGRYRCSSAHKGFGCSHGKSYDTKTVQSAVREYLSDKFNDPDVIKIQLKAFTDGWNDHAADARKKLGKTQKRLAGIEAELTRVQTGYVKGILAEEDVKRIAQPLMVERAHLRERETSAQSDIKPIGLHPKAFDYCQTFIRQLPADLDDMSVDVRMAFRNVVGRVVVKETAPRAPYDVEVELFSEALTGGFNLTPQAACHTKLLAEQGLAKSDNVGSGSPQPTLSYQRPRLVSLGAWRERRAA

SEQ ID NO: 9600 - protein, 603 aa, Unknown
  Description of Unknown: Integrase B9601 sequence
  IPR038109,IPR006119,PS51737,PF00239,G3DSA:3.40.50.1390, PTHR30461,IPR025827,SM00857,G3DSA:1.10.10.2600,SSF53041, IPR011109,PF07508,PS51736,mobidb-lite,cd00338, PF13408,Coil,IPR036162,PTHR30461:SF3
VDIFSTRQLLRTMSIYDIPLRVTFYARVSSESDEQLNSLGNQVSYYENLIKKNSAWTFVPGYIDEGLSGISTKKRENFHRMVSDGKDGLFDLVITKEITRFARNTLDSIQYTRQLLSYGVAVFFQNDNINTLDEDSELRLTIMSGIAQDELRKLSSRVKFGHQQAIKSKVVLGNSRIVGYKKDNKRLVIDDEQAPMVRLLFEMYATGEYSLKQLENILWDKGYKNTKGNKISHVTLSNIISNPKYKGYYVGNKVKVIDMFTKKQKFLPKEEWVMFKDETGEIVPAIVSEELWDAANQVLNKRSADVKARQGICNHDNLFTGKIFCTCCNMPYYRKESQDRDGNKNSRWVCSGKIRNGKQSCKSFAIYEKDIQPLLYDVFKDTKADADQIINEYIRLYSEMTKNSEIPNLIAEQEKIVTNAKRKKDKLLQLNVDGMIDDADFRSMMSECSKEMDEARIKIVELKEKTYDSDSFNEKVKEIRRILMDAQKDAGSGVIDKQFVDKYIDKIYATPINDSSMRLEIKIFTGEVTEMLLSKLKGSTGNTTDESQKPDKSPENTGDSDDDDSMGNTFLNKIPIRTILRIATGHYVNGKLSSIEYGASIRT

SEQ ID NO: 9601 - protein, 602 aa, Unknown
  Description of Unknown: Integrase B9602 sequence
  cd00338,Coil,IPR036162,IPR006119,PTHR30461, G3DSA:3.40.50.1390,PTHR30461:SF3,PF00239,SM00857,SSF53041
MLPTHSPVPMLAVAYSRWSSASQTTGTSMARQSADPEAYCRARGWQLWDGKAYSDAGVSAFAGDHLADGDLGRFLADHRAGRFGGQPVALLVEDVDRFSRSFPLAVLPVLTDDILNAGITLSLLSYDRDYSRESIRANPIELQELLMRLSAAHEFSERLSRRVAFAHDQRCQQIRAGRPVAPGQAPSWIDLGPAGWRFTSYADVVRRVLELSLHQGATTIARLMNQEGVPSPGAVIAARQGRARPILWSYSTVEQLITSPQIHGARPMRAPGHAAALRAWKEQVAQARRQGIPPEQWPARPRQQWAEPQPGYFPALLTPDEHADLLSAIARRRPKACGRTDQHRWIGATLTRCVCGETMGATGTTSSLSQGQQRRYLYLRCRGVGRGNRCTSPMVALTMAQSALLVRLTGDQFAAMLEAAAGGDRTQALAQAIARQEATDRRVHQLEQQHAAGEQALADEADATVVAVLARRAAALDVKLADARRVLAEARSDVAQLQAAPSLTALGAEAREQICTVLARFAGGADTVADRRMVWAHLRALGISIVIDAAARRMGLAIGDGEPDWQPLDRELAGEALGQGATGAVFFAGDEDGLGAGVEWRA

SEQ ID NO: 9602 - protein, 602 aa, Unknown
  Description of Unknown: Integrase B9603 sequence
  cd00338,PF13408,IPR011109,IPR038109, PF07508,Coil,SSF46955,IPR009061, IPR036162,IPR006119,G3DSA:3.40.50.1390,PTHR30461, PS51737,IPR025827,PF00239,SM00857,G3DSA:1.10.10.2600,SSF53041
MITDSKRRDARRKRVILYLRMSSDQQDTSIDIQRQRLQDRLAKENVEIVGEYVDEGCKGWDDRRQHELALKAIERGEADAVAVYQQSRFTRKKPLKAMADFARLEEVGAEFFTIDNGWVSLDDIGGLVGVMVKSHQDHQFCHDLSALVYDGHRDVAEKGLHVTGRPPLGLAVNDDRQYILGPTEERRLVRTIFDLYERLGSLRQLVIELNGRGKRTRDGAKWSRATVERLLKNPKLKGVYVWGAEANPKRENRKFRKRREPILKRTNHPAVIEPKQFDRVQRKLTRNKRQTTPSGARKLFTMTGLARCGYCGAAMHGTSLRNQLKSLRYACRRHGSEGSCPGCDHSNSVRQGDLLDVVITLLEAHFLSPDRLDAYRERALEFLQAEFVDPKELKARAVRLKTQVRRAREEYEDLVEESDDRDEVRSARQRWRNKKQELAEATAMLESGCIDEAEIESQVDAELAEMTADYSEIRRAFDEEDTESLRRLFADLIADEGLRVWAGHDGDAPKGSQYWIEKVEVDLKSRSDLSQSITSPGQVWTLSVTPERLLGSDDVIEILDVSRRTFARWMERGWLSPVERRQTGRPLKFRHAEVMEAARLHG

SEQ ID NO: 9603 - protein, 463 aa, Unknown
  Description of Unknown: Integrase B9604 sequence
  cd00338,PF13408,IPR011109,IPR038109,PF07508, PS51736,G3DSA:3.40.50.1390,IPR006119,IPR036162,PTHR30461, PTHR30461:SF3,IPR025827,PS51737,PF00239,SM00857, G3DSA:1.10.10.2600,SSF53041
MARNITVIPAKEKKIATNAPLATSHIRLAAYCRVSTDQEDQLHSFEAQVQYYTDYIESHKEYDLAGIYADEGISGTNTRKRKDFQRLIQDCEDGKIDLVITKSISRFARNTQDCLTYSRKLKALGIGIIFEKEHINTLDASGELLFTILSSLAQDESRNISENCKWGIRSKFKKGEMHIDASTFLGYDKDDNGKLVINEEQAPIIRRIYDEFLWGKNPQQIAADLERDGIKTGRGNTKWHTTTVISILTNEKHKGDALLQKTYTADFLTKRQVKNHGEVTQYYVTDSHEGIIDKETWSAVQEELQRRTDYMEKHHLQKYSYGDAWSPFIGRVYCGKCGDSYGRHSWKTRNRVQWQCKNHRDSGVLTCDNRHVFESDLEKGFVLAFNAIYSDKDAFIKAKEEQVATGSPLAKVRARQMIELIGQPPLEGFIPEMAQLIIDEVIILGAKEYKFRFLDGTVKKMKV

SEQ ID NO: 9604 - protein, 601 aa, Unknown
  Description of Unknown: Integrase B9605 sequence
  cd00338,IPR011109,IPR038109,PF07508,Coil, PS51736,G3DSA:3.40.50.1390,IPR036162,IPR006119,PTHR30461, PTHR30461:SF3,PS51737,PF00239,SM00857,G3DSA:1.10.10.2600, SSF53041
MRTDDSKKRNIVIYARVSTEHEAQIYALDNQMDWYDIILQSHPNWNIVAKYIDRGITGTSATKRPQFMKMIEESTDGTFDLIITREVSRFARNTVDTLQYTRQLKKVGVEVFFVEDNIWTFDPDGELRLTIMATLAQDESRKTSIRVKAGQRASMEKGVFFQNGSILGYDKAGNDMVINEEQAETVRMIYRLYNSGMGIRKIQFELEKAKRKTAMGKYNWSCSVISRILKNKFYAGYIIWYKQYVPDYLEQKKVNNHGQKEQFETVGTHEPIVSLEEWEMAQKRLASSRVENGGQSNVKQGVDIWCRKLKCICGHSFNRRQWHKDSNNGKKYYGYQCYSSVQTGTVKTRLNKGLPIEDICTTPTVSGWKLEAMATMIFKNLVVNKDGIVELAVNELNKHLKCDEEHKDVILSLRNNLDKYNKKLDNLIEMRMDGEISKQIFAEKKHAIELEIANIESQISEIDNTDEDTLSISDRIDLLKTCIEELLDYDIEDKVPDFIIDSMVECIIVDDTTFKWKLRYIPDQITTTINGTRKNHEIHLIQPNNSPYFANGNTGSNTQSAVNSIKIADILFTKELAMKYMNKRPQDRIHRWQNLSVQIYI

SEQ ID NO: 9605 - protein, 601 aa, Unknown
  Description of Unknown: Integrase B9606 sequence
  cd00338,PF13408,IPR011109,IPR038109,PF07508, Coil,PS51736,G3DSA:3.40.50.1390,IPR006119,IPR036162, PTHR30461,PTHR30461:SF3,IPR025827,PS51737,PF00239, SM00857,G3DSA:1.10.10.2600,SSF53041
MPQKFKIDLSMLTPEEQQQFRDDPTTLTKGEVDVALYLRFSSERQKEQSIEGQLRDCIAYCKRKSFRIVAIYVDRATTARKDVEKRVHFQEMISDSAHHLWNFVVVWKLDRFARNREDSAVFKMRLRKNGVRVKSATETISDNPEGIILESVLEGIAEYYSADLSQKITRGLRESAMKGHCVGGHVPLGYKIEDHRLVINPETAHIVQEAFQLYANGESVAEICRIFNGKGYRTAKNSEFNRSSFKSIFKNVRYIGTYIYKDIEKENAIPAIIDKDLFETVQRRLSLAADAPARGKAKVDYLLSGKLFCGHCGAAMHGESGTSKTGAIHNYYTCYSRKRRKGCNKKPLKKDFIERVVAKDAMALLTDDVIEELADMAMSQADRDLKENTRIPELSARLTEIEQGINNITNAVEKGIASDALLNRLTELEKEKKDLTSQLREEEKYIYRIDRDQVVFWLTKFQGGDIEDEDCRRRIIDLLVNSVTVWDEPDGYKITTAYNLTSCKTKTFRVSNNADSPSGGGFGFGELSSTKAEPDEPRGRLALLLSLQSIWSAESSFWSVRSTRKNKKEATAQDCSCAVASLCFFIAITDFVIIYQNPARF

SEQ ID NO: 9606 - protein, 600 aa, Unknown
  Description of Unknown: Integrase B9607 sequence
  cd00338,PF13408,IPR011109,PF07508,Coil, G3DSA:3.40.50.1390,PTHR30461,IPR036162,IPR006119,IPR025827, PF00239,SM00857,SSF53041
MAQKLYSYQRWSSAVQADGTTKARQTKSAEEYAQKNGLEIEEIVDAGVSGFKSANTNENGALGQFLRAVDEGLIACNSVLYVEALDRITRSEIDTALELFLGILRRGITVVTGMDNKVYTREAIKGNPVDLLTSILMFSRAHEESKTKQNRTNGNALALIDRFIKQGLPVNIKSIGSHPWWIDDSGSMYEAVKTHPVLWACAQFAIENFMEGLSVFKVTQMLNEKFPHYYKGKAWAMANIRKLRINKAVYGVREVTVGGKTYVLPNYYPALITEGQFLRLQQIRTTTKYIGKVGEGRVVTNADGSTKIIAEKNNINLLAGMKLFRCGHCGGTMMAMRHGDTIRYLCEKGRGNNHDCKTWSMPGMLVEHTLMLVTTIAYMDLQKKGQGDKADYTQQITAMESTISGYSIQINKATKLAIALDDVDVDELADTIRELKRKRDNAIIELEVLQRKQLLANDSTFESTMMDFFKYVQYKVIQDPLHEYRSKLRDVVYSAIGDVRAWKHDRRLFISFQIKGNEGYYNFSAGNTPYDWGCYVGALPFSQHELEVANEEVPEHALDRVRERYAELHAVNMMMLRHAKELLSHVGYPELDSKMFWPRK

SEQ ID NO: 9607 - protein, 599 aa, Unknown
  Description of Unknown: Integrase B9608 sequence
  cd00338,PF13408,IPR011109,Coil,G3DSA:3.40.50.1390,PTHR30461, IPR006119,IPR036162,IPR025827,PS51737,PF00239,SM00857,SSF53041
MTKKRCVIDNSQGAIVGYLRKSDVKFPAKSTVEERRKIVEDLKRFRTSELIQDAANAGVGPITEWYCDMDISGTGKYLDKRTDFLRMTQRAKEGKIRVVVTRDLSRANRSLVNNEIWIEELKRCNVQLIAEDLPQTGSESVNKLSRRNLGAFYEFMAERTGELIRSHHFTEVSEGRWVGRTIDMWGLRYNPETKGYDYDPFTADRAIFVYETFNTCLGVAGATAREMNRLYQENAPRATLSPRGSEWATDMVLDFVRLSVYRRKAYYTLWADIGGRRERESSISVDMPHLIPEVIPPDIVAETDRFLEERAPWREELQQRQKAGRLEHTYTGLLKCGDCGANMVTLKNPDGRGGKGEIRWVSWLCQNAAMGECVHPRKISTQQYRLDALIKRAILLAFDLSKEEQQAKKRPARSRVARGTENMDRQLAEIDRRIAAAEQMYEGGSIGYTWEKLQSRLGQLTEERNRLLALKTVDEPEKISTATLTPKQWREMRERIDLIWDSDEICFDKSKSAYLRTLGLRADVVVSVRAPKRRRAGNERQYPGPVTVRVHVEALGRTDERAIEISETEEEFKAYAHWRASFGNMGGRPRKKPVGISDG

SEQ ID NO: 9608 - protein, 598 aa, Unknown
  Description of Unknown: Integrase B9609 sequence
  cd00338,PF13408,IPR011109,IPR038109,PF07508, PS51736,IPR036162,PTHR30461,IPR006119,G3DSA:3.40.50.1390, mobidb-lite,PTHR30461:SF3,IPR025827,PS51737,PF00239, SM00857,G3DSA:1.10.10.2600,SSF53041
MRKINKIEPLMPTLPSRKKVAAYARVSLETERLQHSLSAQVSYYSELIQSNPEWEYAGVYADDGITGTKSTRAEFQRLLQDCEDGKIDIILTKSISRFARNTVDLLETVRHLKELGIEVRFEKERINSLSGDGEVMLTLLASFAQEEVISLSNNVKWGTRKRMEQGIPNGHFRVFGYRWEGDQLVIVPEEAAIVRRIFQNFLDGKSRLETEREFAAEGITTRDGKRWVDSNIKVVLTNVTYTGNLLLQKEYIEDPLTKKRKKNRGELPQFYVEDTHEAIIDKETFDYVQAEIARRKELGAFANKSLNITCFTSKLKCCHCGCSYVRNQRSNRTKHTSTYDDTIVAWGCGTTKKKGGRCSNKDIPERVLREACATALGLDEFDEDIFLERVDHIQVLEGQVLEFHFYDGTTALQEWVSTAKKDCWTDEHKDRQREWMKNYMANASDGRFCEFTTRIRCEHCGSTFRRNTQPSKSANGGKMHYWRCPTSGDCVTTGIREDRLKDITASVMGLAEHDADAFKEQVEYISVSDDMKLTFHFFDGREPVVQYNTKRQGTPWTEERHKKFSESMQGKYTEERREAMSQRMKQIRSEKHWSSKRK

SEQ ID NO: 9609 - protein, 597 aa, Unknown
  Description of Unknown: Integrase B9610 sequence
  cd00338,IPR011109,IPR038109,PF07508,IPR036162, IPR006119,PTHR30461,G3DSA:3.40.50.1390,PTHR30461:SF3,PS51737, PF00239,SM00857,G3DSA:1.10.10.2600,SSF53041
MTATRPGQGTAGIQATTGATSLYGGLEPAAAYTRISDPRKQRDNHSVEVQRAAIERLAAQLGCVVIQWEQEERKGRHIDRGGYQRILETARRHEITRILVFSFSRWGRGPLERVMRGDELDKLGVELWSVQQGRDKPGFMRYGHAGIDEEAVRQLAANVRPARRAAAESGTFMGPTPRLGYTRLYPAWTGAGKRPAGELVVDEATAWIVRALYARYDPLHEGHARGAAVSCRSLARWMNTDPRVPAPRECAAWADHHVRAVLRSVVYKGWVSYDKTPQGAYERAALDGSDYYAGPGRHEALIDPAQWQRVQERMDTIGHAPGQARRRHVWLGADLLRCAGCGAVMRANVPATIPHHKGSYLCRTRGRGTGACATPGYRMDLADAALVAQVARLRGRPWTREAARRLGEARPGQRPADVSRIQRDITATRLTLRDQAAALAALGADIDPAAISAFRALAAETGARLAALDEQRALATRSAPPLADLRALYTEVTRQDLTVGLARLDYAHDPEDRALVRRLLTRLVASAVVVERRPERHARWLRVEVTWTEGVRDLLDAGLLTLDPAPEPPVFATPMELRTAAQRRWRERKQTGAIAEE

SEQ ID NO: 9610 - protein, 596 aa, Unknown
  Description of Unknown: Integrase B9611 sequence
  PF13408,IPR011109,Coil,PS51736, IPR036162,IPR006119,PTHR30461,G3DSA:3.40.50.1390, PS51737,IPR025827,PF00239,SM00857, cd03768,SSF53041
MAPKQSAAKRRVHLVPLSPVVRASQDVPYGRVSSDIQHDSQTIETQKRILRKDITSRDDPNLPVGEQRKLVDEFWDDPCSGTIPFEDRPEGKRLVRSICARGDIDCDGSCGGTGIVIDTVWVTKLDRLARRLLILIEIEKFLRLHRVGLKCLEHNIDTSSPTGALIFTILGAIAQWEHGVILERTANGKRTKTVEGRHMGRKSLGLKTDEQGYLVIDDALVGQTGKMAYQIVQEVFANIIDGSSIEREAERFGITPRRIHLMLHNPRYRGEGGMYWDGNWIAAERNKPPQLVSPEDWELAQEKLADHKRFAARNRKREYIVSSLMICHEPKDNGTPCGRVFVARTAKGKYAYYCCYRKGCTAHPIRGNDVETAVWTAVRERLVNPDAWLQRALEQGGQTDKVRELRSELSVVIDKLSKLSTQRLSVARQTDEGVYTEEESRARQAEIREQVESLTDRKTTLEIQLRLVNKSQATLRRSGLQSVDIGPELDRIEAWCESSDPEEVHRGRTQKTALIRSRIERIEVRNGSGGQRLTIFWNEDEHADELSLTPRGSAQALCNEQPILIVTELDLPAPCGQGRRTDLETLSSEEASGILA

SEQ ID NO: 9611 - protein, 596 aa, Unknown
  Description of Unknown: Integrase B9612 sequence
  cd00338,IPR011109,IPR038109,PF07508,Coil, G3DSA:3.40.50.1390,IPR036162,IPR006119,PTHR30461,PS51737, PF00239,SM00857,G3DSA:1.10.10.2600,SSF53041
MKAVILTRVSTKEQEEGHSLPAQNTRLSDYAKRKGLEVIKTFQIIESSTRGKRKEFMQMIEFCKQQTETIAIIADAVDRVQRSFKESVMLDDLIRQEKIELHFFREGMIIGKKSSSTDIMRWDFSVMGAKAYVLQLSENVRRSLDYKLKNGERAGVAPCGYENFTDENGKHSIRPKEPDATKVRRLFELYSIGGTSAHQLARIANDWGLTSYSGRKLTTTSIFHILGNPFYYGEMLAKGKLHRHVYEPLVSKTLWDKCQEQKALQGAKPFKHGELPFLYRGVFTDYYREIVCPCEVKKKKFIYVVCYKENGTRLYIPEHEIDNQIISILNRIAIPEEMIQHFKEHIKEAKEAEIAFRDTELARLKAEITKIEGRLEKLFNMRLDDEIDKQTYEDKRDEMNLKKSRLEKEIKAHGVADDGFNEIVLDLFDLVNHVGDAFSMGKSIENKQLLLHFIFKKLVLKEGNVGYELNPPFCYMEIDTDFKSGGGSCEPSGNTGFSTDSVENSGLQKMASANRVFSCKNNGLQSKLQPVFSLAALAGQSSNDIITRLRAHRAEVLAIKEQLEFVLIAHDARPYFAFLTFVVFQFNFVHYHFLSK

SEQ ID NO: 9612 - protein, 596 aa, Unknown
  Description of Unknown: Integrase B9613 sequence
  cd00338,PF13408,IPR011109,IPR038109, PF07508,G3DSA:3.40.50.1390,IPR036162,IPR006119, PTHR30461,PTHR30461:SF3,IPR025827,PS51737, PF00239,SM00857,G3DSA:1.10.10.2600,SSF53041
MKYEDPKRYRQWNVEDLVMVTEEQHRKLHGKQFLEDVRNRTMRAFVLCRQSGGVNDPEESLSLDVQEAACVKLAEDRGITVKGIFKEASTSGRLYPVGFENIAAQDMIYNQWCGETKKIGQYRKGLGEILNRLNDVDYIICYDITRLYRPLNGSYLSNIVNQLLQFNKVKVLTIKEGEIDFSRFQDTLISSLTSQINSEQLLIQREKAKAGQKRIKDNGEYYAGFSKTIGFTSTGKKNIVIVEHEAKVVRKIYYYFLVDGLSLNEIVRRIGSEYPDVFPKCWTNTIKNILSNPIYAGYMRNSEGELIKSKQTNGIVSLDEWMNVDKILSARKLTNYRHKTTWLPLTPFVYCGQCGEKMHAHKGANEKNVYSCRRHLRDGKQPCKNTIMVSFDLSQGNGLIETIKPLLLAEAIKRMHKEDDEKIKTSLNEIDLALADIKKKAQKFTEMYTASTMDESIYENAMKELKTKEGSLIRRKTELEMSLNGDTSQFDWVKLMMKFKGDSLTEAEYTLLASSMLKKILIYKDFIEVKTAYGDVTIPRQRIYKWRLCLNYDLQMKKKEALIYYYHGKARIISAKERESAKMFAVLSNVKLFSID

SEQ ID NO: 9613 - protein, 595 aa, Unknown
  Description of Unknown: Integrase B9614 sequence
  PS00397,IPR038109,IPR006119,PS51737,PF00239,G3DSA:3.40.50.1390 ,PTHR30461,SM00857,G3DSA:1.10.10.2600,SSF53041, IPR011109,PF07508,PS51736,mobidb-lite,IPR006118, cd00338,Coil,IPR036162,PTHR30461:SF3
MAAAPHATTRLVAIYVRVSTDEQAAHGYSLGDQQARGAAWITSQHTPGHPTVLAGAYADEGYSGATRHRPGLRRLLADAEAGRVNTIVFTKLDRLARRLTLLLELWDRFEEMGCAIVVLDESIDTATPVGRLVRNVLGSIAEFERELIAGRMRHGRLAKARAGHVWKAQCPYGYRYLPKEAGIRAHGVLLIDEEEASAVRLIFDLAAGGMAQSAIAAELGRRGVRPRRGGAAWKQGTISDLLRNRTYMGDAIYNQRAAVTPKRPTKDVEQRRREKSAQTYRPEEEWIHVPAPAIVDPAVWHAVAARRAGNVAAATRNAKRVYMLGHGLLRCGVCRPDPADGRRLSMVGHMRRAWYRYECSDAWRTGRVAGDTGDTDETTVCKHYVAGPLIEERVWAAVMEMVAAPALLAHDPAPDGREGEASAEARVGHPADDGAGLRLAAVRRQHDLLVDNLGQATTPAQIAAMLTQIEALDHRRQDAERAAIAEEARRQDAAAHRAAAALARDVCRDIARTAVAAPPAERAALLRVLVDEIVVYADHADVRGALTRGAGHPLRVQLQREAANNSITGREVARIGGGADGVLGEERAVRGDVGR

SEQ ID NO: 9614 - protein, 594 aa, Unknown
  Description of Unknown: Integrase B9615 sequence
  cd00338,PF13408,Coil,IPR036162,PTHR30461, G3DSA:3.40.50.1390,IPR006119,PTHR30461:SF3,IPR025827,PF00239, SM00857,SSF53041
MYAFHDTRLISIAVRSHTAVSASFRQIPIHLTVMVTASVVKVDKMNNSQITFPPGSSVVAYLRDSGGDEQDLSVAQQQNVVEKWCTEHNITLSRVFSDVATPGSSTIGRSAFKQMISHFHNVNCADKGVIIWKFSRFSRDIDDAQFYRADLRRRGYIVYSIQDNIPDTTDGRIYEALLDWMNNKFLEDLSVDVKRGLHHIVREYGAVPGTPPRGFKREITTIGIRRDGSPHKVSRWVPDPEWWNICRRAWELRSTGVPIRQIHKELHIFGSMQSYTTFFTNRIYLGELHYGEITIPDYTDPMITKEEWDAVQFLNRKNSVEYDPMKRNQNPHHPRRISSSFLLSGLIYCVRCGSLLNGEVLRFKNGQYLMYYHCGNAHRNLDCNARRIPKAAIEKVVIDRLREYILDPALIAERDREYAIAHSGERDKIHEEQKKVKYEISELQRKMDNISRQIADDPSPSRTLMTLIKELEQQEQKKIDELERLRSIENRETVFIGSPANYARLSEKFTTELVSGDPERIKLILRGLIDRISAERDGDYIRGMIYFFNPELGEDNSTSSDELYMSMNQSHRRGSSYTHINVYNVDFCTTLPHK

SEQ ID NO: 9615 - protein, 593 aa, Unknown
  Description of Unknown: Integrase B9616 sequence
  IPR038109,PS00397,IPR006119,PS51737,PF00239 ,G3DSA:3.40.50.1390,PTHR30461,IPR025827,SM00857 ,G3DSA:1.10.10.2600,SSF53041,IPR011109,PF07508,PS51736 ,IPR006118,cd00338,PF13408,Coil,IPR036162,PTHR30461:SF3
MARKNPKTLDAARLLSCVLYIRVSTKLQVEKGESIDAQRFELTRYAENHDMRVLGEYVDAGFSGKNVQGRPQFRQMMDDIIKAQPSKRPAYVLVFKLSRFGRNAADTWNSLQTLQDYGVELCCVKDGIDSGTSMGKAMLSIAAVFAEMERDNIRTQTMSGREEKARKGYWNGGQAPFGYRLVDKGNKFKELEVDEDEAKVVRRIFEMYACENKGSMAIATWLNNHGIKKKPRGNARMDTFSSGTVQRMITNPVYIGKIAYGRRRTETIEGGETHVVKSDGYEMHDGQHDAIIDDATWAAAQALVGTRKPNMKTHDDGHVNMLNGLLVCPVCGRKMSSKPNRGKLKKDGTRGKTTWAYYCPHTSKARGASCTFKSQYPQECVDAEVVQLVSLASRSDAFVDALRRRIDDATDIEQLKEDIERIEGEKAANDKRMRMLMTQIDSLDPADRSYERKFNDLQRRLDDLYDRDAGLSDALEEAQAKMTTAEKRMDGERRLLEELDRIPELLEGADEQTRFDLIHEAVSEVHILPDKNPRKERVVANVTFKCPVRFFWEEIPGVANAYTPMTPDSLGENDFRDDEAHVETIVLLQRETL

SEQ ID NO: 9616 - protein, 592 aa, Unknown
  Description of Unknown: Integrase B9617 sequence
  cd00338,IPR011109,IPR038109,PF07508,Coil, PS51736,G3DSA:3.40.50.1390,PTHR30461,IPR006119,IPR036162, mobidb-lite,PS51737,PF00239,SM00857,G3DSA:1.10.10.2600, SSF53041
MMVRTYRRRSKNDEGKQQFSLDVQAAGCDELIARLGLADQPRKDYVDDGRAGDDFLTRTGLRQLLADAQRGDVIVCRDQSRLGRDAIEVTLVVRDLVHDRGCRLYYYATSQEVQFANAIDQATTFIQGTGHQMELEAIRSRTREALRSRVRNGQIAGGACFGYKLERKSDAAGRKHTIAIVHEAEAPIVRRIFAEYLAQRGIRSIAHQLNAEGIPAPAAGRRGSGSWAPGAVRTILLNPRYRGIYVHGRIKKLRQGSGVVRVKAEPHELITVEIPEWRIVDDETWFAVQSRFTTRGPQPRSAIANGAKYALSGIARCQCGGAIVCTRVRAPRGSRCVKTYSCHRNHQRGSAVCPITIHQPIEEVEGLLLDHLRDHVLNDEMIALVLDEIRAEIKAQIPQREADLAALEAELSAVTTEQKRLARAVAMSDEIPELMTELKQRMSRMKNLEAQIAAARRTPAELAALSNEVETSVKERLADVRAALADRRDLRDLLLGLFPRGLMFSPARTPDNSRAVWKLSGPAVYKVLSRRTPSGTPFRGGSDNSNYSDGLDGPAEPALSNPSGDPNGIRRLRPTHGDSSEDKRLQWFRRLS

SEQ ID NO: 9617 - protein, 592 aa, Unknown
  Description of Unknown: Integrase B9618 sequence
  cd00338,PF13408,IPR011109,IPR038109,PF07508, Coil,G3DSA:3.40.50.1390,IPR006119,IPR036162,PTHR30461, mobidb-lite,PTHR30461:SF3,IPR025827,PS51737,PF00239, SM00857,G3DSA:1.10.10.2600,SSF53041
MSRNRFRDPEKTLARYDEQDSQKHRPLAGRIAALYERVSGDRQAKEASIETQDSYLRQYCQHHDIFIYDTYKDDPAKSEVPMAERAEGHRLIEDAKRDCFDLVLVHSICRWSRYPDVYKQAQGTMHKLGIDLDCPSEHLSWDSPGESFASDVRLRSSQLVRDIIDKATSDGKYTWAAKGAALGAAPHYGYLPIPAPEWGKNRKRLVIDEQEAAIIRRIFDLLVRQRLSCRQIAALFNQEGVPLPSASPKWDGFRNHVSARKCQGRWSASRVSQIVRDRLFLGQCLYGGTDQRRPVLRLVPAIIDAETFALAQLRLAENSKRSSRNSKRCYLLSGKLRCATCNAAYTGVTENNGTKAKARGWTPRPIYRCQGYQRKFDGQDTQCPFYRLPAVALEDDLWETLVNYLEHYEDRLTELRDEWRNDSQSRGRAACQRDELFRRQRRLEEEETDALRGKSRLGFDLTREQARQILDTVREEKKQLDIKISELDALLLHLDQRQAHVETAEEYIERYRANIREVLDPKMRQEIVAVFLESALVKPGPSGECLVTYRFYTHEALSEHTSIAKAGSRPRFINWCVEVVRILLYGRQRTKG

SEQ ID NO: 9618 - protein, 592 aa, Unknown
  Description of Unknown: Integrase B9619 sequence
  cd00338,PF13408,IPR011109,IPR038109,PF07508, PS51736,G3DSA:3.40.50.1390,IPR036162,IPR006119,PTHR30461, mobidb-lite,PTHR30461:SF3,PS51737,IPR025827,PF00239, SM00857,G3DSA:1.10.10.2600,SSF53041
MPNLRKIEAAVPAIREKKKVAAYARVSMQSERMLHSLSAQVSYYSGLIQKNPDWEYAGVYADDFISGTNTVKRDEFKRMLADCEAGKIDIILTKSISRFARNTVDLLETVRHLKDLGVEVQFEKERIRSMDGDGELMLTILASFAQEESRSISDNVKWGIRKRMQNGIPNGHFRIYGYRWEGDELVIVPEEAEVVKRIFRNFLDGKSRLETERELAAEGITTRDGCRWVDSNIKVVLTNVTYTGNLLLQKEFISDPISKQRKKNRGELPQYYVEDTHPAIIDKATFDFVQEEMARRRELGALANKSLNTSCFTGKIKCPYCGQSYMHNKRTDRGDMEFWNCGSKKKKKKGTGCPVGGTINHKNMVKVCTEVLGLDEFDEAIFLEKVDHIDVPERYTLEFHMADGNVVTKDCLNTGHRDCWTPERRAEVSMKRRKNGTNPIGASCFTGKIKCVSCGCNFRKATRNCKDGSKVSHWRCAEHNGCDSPSLREDLLEQMAAEVLGLDAFDAAAFREKIDRVEVLSSSELRFCFKDGRTVSRNWQPPERVGRPWTEEQRAKFKESIKGAYTPERRRQMSEHMKQLRKERGDKWRREK

SEQ ID NO: 9619 - protein, 525 aa, Unknown
  Description of Unknown: Integrase B9620 sequence
  cd00338,PF13408,IPR011109,IPR038109,PF07508, PS51736,G3DSA:3.40.50.1390,PTHR30461,IPR006119,IPR036162, PTHR30461:SF3,IPR025827,PS51737,PF00239,SM00857, G3DSA:1.10.10.2600,SSF53041
MAQRKVTAIPATITKYTAVPIGSKRKRRVAGYARVSTDHEDQVTSYEAQVDYYTNYIKGRDDWEFVAIYTDEGISATNTKRREGFKAMVADALAGKIDLIVTKSVSRFARNTVDSLTTVRTLKEKGVEIYFEKENIWTLDAKGELLITIMSSLAQEESRSISENTTWGQRKRFADGKASVAYKRFLGYDRGPNGGFVVNQEQAKTVKLIYKLFLEGLTCHAIAKELTERKLPTPGGKAVWSQSTVRSILTNEKYKGDALLQKEFTVDFLQKKTKKNEGEVPQYYVEGNHEAIIDPATFDYVQAEMARRMKDKHRYSGVSMFSSKIKCGECGCWYGSKVWHSTDKYRRVIYQCNHKYKGGKPCSTPHVTEDQVKDAFVRAVNILLSEKEELSVNVQMVIAMLCDSAELEKRQTELKEELEVVVGLVERCVAENARVALDQDEYTQRYNGLVSRYEAVKAQFDEVTQAVADKADRKKLLEQFLHTVEGQAPVTEFDERLWSSLVDFVTVYSEKGIRVTFKDGTEIQV

SEQ ID NO: 9620 - protein, 591 aa, Unknown
  Description of Unknown: Integrase B9621 sequence
  PS00397,IPR038109,IPR006119,PS51737,PF00239,G3DSA:3.40.50.1390 ,PTHR30461,IPR025827,SM00857,G3DSA:1.10.10.2600, SSF53041,IPR011109,PF07508,PS51736,IPR006118, cd00338,PF13408,Coil,IPR036162,PTHR30461:SF3
MTMRKDIDPEARKAALYIRVSTKYQAEDGDSLPMQRDELPKYVQYALGITDFVIFEDAGYSAKNTDRPDYQRMMARVRQGEFSHIVVWKLDRISRNLLDFASMYAELKRLGVIFISKNEQFDTSTAIGEAMLKIILVFAELERNMTSERVTATMISRAQAGQWNGGKVPFGYEYDKASGTFSFNEAEKRIVLRLYDKYETLRSLLQVAAYLNENGLFNRSGIPWNPTTVRLILVNPFYVGTYRYNRLNENQKTFTQKSKKEWVLIPDHHPAMIPEERQNRIIDILSSNDRVTNLHKSYQRKNIHIFGGLIECGACGNLFQSSVDRPRAESGWRPSVYLCSRHRRFKDCENKYVSDITIGPFILNFISNYIRASRNIGKDASLDILERKLLRGDWFPGTRIDRQSLEDIRRSFLLAKYGIDGPEAFQLSQEQAPRPDDREMLAAEVKRLERAMSRLKSLYMFADAQMTEQEYVQENNRLAERLADVNAKLEELDRHPETNPASGGLDDEIFFEQASFLSITEELLSRRFVDYEKLIRTLDKNTLKLFINSVVKKIVIFQGQTLRLELKNGISIKFLYDGQTPDTDKEPVTAL

SEQ ID NO: 9621 - protein, 591 aa, Unknown
  Description of Unknown: Integrase B9622 sequence
  cd00338,IPR011109,IPR038109,PF07508,Coil, G3DSA:3.40.50.1390,PTHR30461,IPR036162,IPR006119,PF00239, SM00857,G3DSA:1.10.10.2600,SSF53041
MSVRAAIIVRLSREDLNQPGSAEEKVARHLAIAQDLAKRHDLPPIQTEDIYTESGISGRRLSKRPDTLRMLDRCRTGYYTHVVTAYQSRILRGDKRDEADVEDAFLDGCITLITSESVICFDDTYEASNALVFEIRAAADRNYLRDISKKLKESNRQRTLLGRRSGGMAPYGYFWKTAAYDQRKQIDAAHHEVVGELEITDLSAAIRYAQSVPELQPFDAAKYLEVARRTAGPDGNLLPGVVCSSGEYAVLCEIFARIRCEGYTQIVRALNQRGIPTAGASRFREGFAAMVWHDSTVRTIIRNFHYSGFPAHTVTTDRKGRKVKLPTEKHILPNEEQMYPHPIRLPDHRALLEQITARATPGSVRPQGPSLLTGLLKCSQGRPCRANSTSYQCRCDRETERHLGSGIRRDPANRVAISVLREALSEMPTSSAPAANQRPQQTSELITIDREIAGKKRDLADLQRHAATFARSGGADAFAATISALRQEIGEAERKYKAILSNAQTRQAAEALSALNKLRGIDFEEFWSAATIVQQRSILRLVIAELRIVPQPDKGRRVRTITITVQPWITPYYNPGAIKLVGTRRKIERHI

SEQ ID NO: 9622 - protein, 591 aa, Unknown
  Description of Unknown: Integrase B9623 sequence
  cd00338,G3DSA:3.40.50.1390,PTHR30461,IPR036162,IPR006119,SM00857
VDRDLGFKAGTIWSFERVSHIIQAKGAGLARQGCDALDWCDRYGLELADERALSDPGKSAYHAKHMRKGSPLDRFLEMADRRLLGTNPVLLIEAVDRVSRMKSRKALEGVFLRLINADVTIVTIEDNNFYNKEKIDGDGAALIMLVLKCQAAHEYSLRLARRQEYNWEEVRKQLASGVVSRKKQNAPCWVSWDEKRQRWELNEKAVAIAKAMELLKNYGYSQTAKVLNEEGHKPMKASMWTASNLSSMIRASHQIYGAVAIKPKGAWKPLKRGPNGELKDGSGKYYDPRAQQGVVRGAAQEPKEIVEGVFPPVLPKREVEEVISIIAARNRTQNRPGPNTKMHWIGRGLTRCVCGGSMSTCVGGHPPNALIRYIACRSRMNSEVCRRPYLPMRDILAIVLSRINLNSLLQLSGNGNAEGEAVNLRSQVDRLVLKKEQVVTERLNIQESIGRAAEIGGPAFDSIFSTLQHRIADKDQEERSVDIQLADIRAKLSRNENPLALEAVETIIEPLKFDLINGTSSQEQRHQANAALKQLGIGIHIDSEALLLGLSIGEGEIDWQPIDFSAAYELLAEGGHSLTTVTTEEGVTLTE

SEQ ID NO: 9623 - protein, 590 aa, Unknown
  Description of Unknown: Integrase B9624 sequence
  PS00397,IPR006119,PS51737,PF00239,cd09607, G3DSA:3.40.50.1390,PTHR30461,IPR025827,SM00857,SSF53041, IPR011109,PF07508,PS51736,mobidb-lite,IPR006118, cd00338,PF13408,Coil,IPR036162,PTHR30461:SF3
MKSKPKAVIYLRVSTPAQMKQDKLSLENQREKTTKHCNDEGFELSHEYMDAGLSGSKDDRPKLQELLAAAKRREFQHVVVNDITRFGRSASDLLRNVNKLRDSGINFHSVKNRLDLASAQGRFFFHILVGMAEMEAETLKIRMGEVKLAKLRLKRIILGKLAYGYRWNDETEQIEVNGKDEDGNYTGEAAIFLRIVKMYVDLNKSLQDIAIAFNKEAIPSREGRKWHSGTLKNFFAQDKTIYCGSTKIKIREEIEGEDGKKTREIVEEVEFECEPLLTRDQWQKIQDRMASGRVDRSGRPMVGADRFILRNLIKCGVCGNRVGPRHITNGQTYYACHWKSAGAKHREENDNHPRCTLPHIPSKKLDQFVYGYILFLLQYEEDPEAESSFYKGLVSDEQYDNRIKELEQEIQIHRDSLARNERGLSNTRKSKEAPGFRDFEGYNKEVNQYLDTIALIKSQIERLAETIKEIRKARADQEQFREIAQSEAIIDIRDKLYDLPNEDRHRLVAGLLDGDIVITPPTPDAKLDRNSTSDIKDWVKFKIRPNMAILQDILGIPGGDDDPGGGIDGGSNNCCSDEQHLLPHAQRVGP

SEQ ID NO: 9624 - protein, 590 aa, Unknown
  Description of Unknown: Integrase B9625 sequence
  IPR038109,PS00397,IPR006119,PS51737,PF00239,G3DSA:3.40.50.1390 ,PTHR30461,IPR025827,SM00857,G3DSA:1.10.10.2600, SSF53041,IPR011109,PF07508,PS51736,mobidb-lite, IPR006118,cd00338,PF13408,Coil,IPR036162,PTHR30461:SF3
MPNVVTYCRVSSDEQALKDLSIPAQRKALHRWVDERDEIELADEFVDEGESAYAPADKRPGFCRMIAYCRKHPVDFILVHKLDRFSRNREESILFKSLLRKHGVMVKSITENYDPETPQGFLYEGMIEVINQFYSMNLATETMKGMRENAERGYHNGGQSPYGYRSERSADASGREHTRLVLGPDEEVATVREIFRLAVDENRGAKTICHMLNKRGVPGPRSPNWSQSSVGNVLNNRVYVGDSIWNKRNSKTGNAKNADDWIVNENTHEPIIDRELFMRRKEMAAQRTFNLRSSPRRAVKYLLARLIRCDHCGGLFVGRRQKKRSRKDGEPYDLYRYRCNTYVTKGKEVCPSIGLHCDWIEGEVIDIIRREICSPERLAALQELVHKKIEARRSRYGKDPRELERKMADIDRRIQNYFRAIGDGVDAKTCKEHIARLEADKAEVEEEAELLRQDDYYRRALELNLSELERFAAAFKDDFRDLPMAVQRRVILHFIEEIRVVDHEVVRVTVKVPFDENGVRHLTDELQVPPDGGGSSALSASSKAGLLFGPARGILDQAEARQEALLGPARGAKFSPDGFAVGWVYWKPRR

SEQ ID NO: 9625 - protein, 524 aa, Unknown
  Description of Unknown: Integrase B9626 sequence
  IPR038109,IPR006119,PS51737,PF00239,G3DSA:3.40.50.1390, PTHR30461,IPR025827,SM00857,G3DSA:1.10.10.2600,SSF53041, IPR011109,PF07508,PS51736,mobidb-lite,cd00338, PF13408,Coil,IPR036162,PTHR30461:SF3
MAKTVTTIPATISRFTSSPINENKKRRTAGYARVSTDSEEQNTSYEAQVDYYTNYIKSRDDWEFVEVYTDEGISGTNTKHREGFKRMLADALAGRIDLIVTKSVSRFARNTVDSLTTVRQLKEKGIEIYFEKENIWTLDSKGELLITIMSSLAQEESRSISENVTWGQRKRFADGKVTVPFNRFLGYDRGEDGNLIVNPEQAATVNLIYSLFLQGMTPFGIASKMTADGVLSPGGKERWNAGSVRSILTNEKYRGDALLQKSYTVDFLTKKKKVNEGEIPQYYVKNNHPAIITPDVFDMVQRELARRGQSRGRHSGIHLFSGRIKCAQCGNWYGSKVWHSTDKYRRTIWRCNHKFKNDEICTTPHLTDEEIQNFYLSALRKLLADKDEIIAAFELAQDGAFDLSALTAERDELQNELLVVSELMHQCINENAHIALDQADYQKRYNGLTDRFDKAKTRLEAVTGEISDKQARQATIEAFLDELKRLDGVTEFQHALWYSLADFMTVYSKDDVWVTFKDGTVIQA

SEQ ID NO: 9626 - protein, 590 aa, Unknown
  Description of Unknown: Integrase B9627 sequence
  cd00338,PF13408,IPR011109,IPR038109,PF07508, Coil,PS51736,G3DSA:3.40.50.1390,IPR006119,IPR036162, PTHR30461,PS51737,IPR025827,PF00239,SM00857, G3DSA:1.10.10.2600,SSF53041
VEQRPGHLRLIVRGTARCPRTGKAGITEMAATTRIHRRDQLDPTSNVRTQLGNDEIVGMLMPSAIIYAHFSTTEQSKGYSLERQQTLGTAFAVDHGWSVEATITDEGRSAFHGTNRLEGSALHQFELEARNGLHRDKVLVVENIDRLSRQGAKAAAQLIWGLNEHGVDVATYHDGTIYMASSSGDLLDVFKLIMGAQQSHLESANKSKRTRDTWTNRFKKMSEGTQKKPVPHTPHWIDKVEGGMKLNPRRTALLNEIYDLYIDGVGIHRIVTLLNDRGEPRWSPEKSERVKNGWFYSYIYRLLTKRTVLGEYVTMDGKTVAPDFYPQAITAEKWNRAQAALGMRKGNQKTSKANFNRNLLQGIVVCEQCGGGAHFRHTTDTPQIYIDRMGLPRSYARKTYRRLLCDRARRKHECDNKTVLNYDVVEATVLNEMLPRLVEKRSETDLVIKLRERIAEQIRLREADQARLANLIDILADGGSKAILARVNVLEAQIEQQTASIESATKELAIERSKPSSDDDVLAIESLRAELTSEDDAIRTYARGRVNMTLRRLIGRIAITNVDTFKIEPDELSSWHFNHEGGMLEGQYIP

SEQ ID NO: 9627 - protein, 589 aa, Unknown
  Description of Unknown: Integrase B9628 sequence
  cd00338,Coil,IPR036162,IPR006119,G3DSA:3.40.50.1390, PTHR30461,PF00239,SM00857,SSF53041
MLGVPYSRISSAGQVSGLGLDRQAAAPRSYCAARGWTLWEGEAYSDAGRSAFDGSNLEAALGRFLSDLRAGRFGPGPVALLVEDLDRFSRSFPLAVLPVIIDDMLNAGVTIAVMAKGRDISRASIRENGMELHELLFWLGSAHEFSSRLSRRLSHVHAVKRDRIRTGAPTAAGSAPCWISLTDGCWQFNSYAATVRRVLDLVREHGGGRVASILNSEGVPPPAAARQQRAGAAARPRLWSSSSVLNLIGQPAIYGARQILAPGYRDEVRAWKEARALARRQGIPADQQPPHPRRQYEPPQLGYYPALLSQAEHEALLLAMRGRRQQQLGRTDLMRWIGGGLTVCSCGAAIVATCSTRSNGQPSSYLRCQARFKGGDCRQPFTPLRLAQAALLTRLAADDYLAMLEARGGASRATAHSQALAQRDAAAQALEQAQAVVAAGEQAMASLDDPAVLVVLARRQAAAALQQEQAQQELAAATLALQQLQGQRSIEALGAEAQQTIRQLLATFSAGAETVEDRRLVHGHLRRLGLRIHVDGQGRALGLQLGGGPIDWQPLDQELAGQALAAGVTGAQFFIGDADGLGAGVEWPA

SEQ ID NO: 9628 - protein, 589 aa, Unknown
  Description of Unknown: Integrase B9629 sequence
  cd00338,PF13408,IPR011109,IPR038109,PF07508,Coil,PS51736, IPR036162,PTHR30461,IPR006119,G3DSA:3.40.50.1390, IPR025827,PS51737,PF00239,SM00857, G3DSA:1.10.10.2600,SSF53041
MRCYTLYDSTPCLLREKCTMNIYYVREKLRNCSIYDIELNVAYYARVSTEKVEQQASIKHQEEHFEELIHSNNRWKFAGSYIDDGISGIHADKREEFQKMLRDAKLGKIDMIITKEISRFARNTLDSIQYTRELLSYGVCVWFQNDGINTIDDDSEFRLTIMAGVAQDEIRKLSSRVKFGHAQSIKNGVVLGHRMYGYSNNQGKLELVPEEADMVRMIFQDYASGISTPRIEKKLWDMGYRSLKGGKINRDVIKNIIRNPKYKGYYCGGKVKVIDMFTKKQEFLPQSEWVMFKDDGSRVPQIIDEATWEKANAYLRERGEAIKSRRTSFKNENIFTGKLFCANDGAPYWMKQHYIRGKEDVRWVCSYKIKNGAASCNSFGLAESELKEVIAELINKSSENIDSILEEYFEILQSSIKNIPDNINEITRLEKQIDLLKQKREKILEYNLDGKISDDEFVSRNKEYVKQIKQTESHIRELQNTKSPEPVEIQLNAIKEQLKKFKGVTQKDINRQIVNELFEKITVEPLAVTCATLTFQLRSGSLEKWGFPLSRSDDMIFTLHSEQHKIFSRKTCIKTQDMVFFKYKYLLAL

SEQ ID NO: 9629 - protein, 523 aa, Unknown
  Description of Unknown: Integrase B9630 sequence
  cd00338,PF13408,IPR011109,IPR038109,PF07508, Coil,PS51736,IPR036162,G3DSA:3.40.50.1390,PTHR30461, IPR006119,PTHR30461:SF3,PS51737,IPR025827,PF00239, SM00857,G3DSA:1.10.10.2600,SSF53041
MAKSVTTIPATLSRFTAAPINSTKKRRVSAYARVSTDNEEQLTSYEAQVDYYTNYIQGRDDWEFAGVYTDEGITGTNTKKREGFKSMVADALDGKIDLIITKSVSRFARNTVDSLTTIRSLKEHNVECYFEKENIWTFDGKGELLLTIMSSLAQEESRSISENCTWGQRKRFADGKVTVPFKRFLGYDMGPDRNLMVNPEQAKLVKRIYGMFLQGQSPFQIATALTKEGIPSPGGKDHWNASNIRSILTNEKYKGDALLQKSYTVDFLTKKKKMNEGEIPQYYVRDNHEAIIPPETFEMVQALMATRKKGKNRLSSVSIFSSKIKCADCGSWYGPKVWHSNDAYRKVIWQCNHKFENQKCGTPTLTEDKIKELFLRTANKVVDQKEQFIAIYEQVLMKSLDTTALESELSELEAEINIAAELIEDCINENAHVALDQTEYQKRYDALVARFDKAKARHTEVTDLIAERKSRKHQIESYLKELRSREPLTEFRETDWLAMVDYITVHSKDDIRVTFKNGTEIKG

SEQ ID NO: 9630 - protein, 589 aa, Unknown
  Description of Unknown: Integrase B9631 sequence
  cd00338,PF13408,IPR011109,IPR038109,PF07508, Coil,PS51736,G3DSA:3.40.50.1390,IPR006119,IPR036162, PTHR30461,PTHR30461:SF3,IPR025827,PS51737,PF00239, SM00857,G3DSA:1.10.10.2600,SSF53041
MRCYTLYDSTPCLLREKCTMNIYYVREKLRNCSIYDIELNVAYYARVSTEKVEQQASIKHQEEHFEELIHSNNRWKFAGSYIDDGISGIHADKREEFQRMLRDAKLGKIDMIITKEISRFARNTLDSIQYTRELLSYGVCVWFQNDGINTIDDDSEFRLTIMAGVAQDEIRKLSSRVKFGHAQSIKNGVVLGHRMYGYSNNQGKLELVPEEADMVRMIFQDYASGISTPRIEKKLWDMGYRSFKGGKINRDVIKNIIRNPKYKGYYCGGKVKVVDMFTKKQEFLPQSEWIMFKDDGSRVPQIIDETTWEKANAYLRERGEAIKSRRTSFKNENIFTGKLFCANDGAPYWMKQHYIRGKEDVRWVCSYKIKNGAASCDSFGLAESELKEIIAELINKSSENIDSILEEYFEILQSSIKNIPYNKNEISRLEKQIDLLKQKREKILEYNLDGKISDDEFISRNKEYVKQIKQIESHILEIKNTKSPEPVEIQLSAIKEQLEKFKGVNPKDINRQIVNELFEKITVEPLAATCATLTFQLRSGSIEKWGFPLRRSDDMILTLHSEQHKIFSRKTCIKTQDMVFFKYKYLLAL

SEQ ID NO: 9631 - protein, 589 aa, Unknown
  Description of Unknown: Integrase B9632 sequence
  cd00338,PF13408,IPR011109,PF07508,Coil, PS51736,IPR036162,IPR006119,PTHR30461,G3DSA:3.40.50.1390, PTHR30461:SF3,IPR025827,PF00239,SM00857,SSF53041
MSDAHIKPGTVAYSYIRMSTDQQLKGDSLRRQAELSRQWAEQHGLVLDDSLRDIGVSAYKGKNRKEGALGRFLDMVETGRVRPGSYLLVESLDRLSRDQVLEALSLFLEIIRSGITIVTLADNQTYSQETVGNDWSKLIISLTIMARAHEESQRKSERVSQAYASRLARAWQGEYNMSCAVPYWIDAKRINRDRIEYTLNEHAATIRRMYELAANGLTRHAICVVFNSEAVATLRAGDHGWNAAVINRILDSRESLGEYQAQRRADGKRTLVGEPIPGYFPAVVDEALWMAARANKRKTATNRGRKGDRFTNLFIGLGRCVHCGGTMTYHRSTQGQVRNSLKDRAYSRAYYSCSNRRRGKVCSGPHKAFHYDAIERAILDNVGEFRLSEILRIRRESSPVAALDRKIAALQRKLEDASRRESNLLNQLEDADEALPLIMARIKERQREKVELEKEISLLDREKIEAELSLVETASEADIRKMRREWGYADDAQAYIMRARVHAALSSFIDFINFDASRCAYEVIILNNIRVYQFEDHKLAAKIDLSDQIGAREDGLIDPTVLASNGVDREVRPDRIEAALKLRRAQPEA

SEQ ID NO: 9632 - protein, 523 aa, Unknown
  Description of Unknown: Integrase B9633 sequence
  cd00338,PF13408,IPR011109,IPR038109, PF07508,Coil,PS51736,IPR036162, PTHR30461,IPR006119,G3DSA:3.40.50.1390,PTHR30461:SF3, PS51737,IPR025827,PF00239,SM00857,G3DSA:1.10.10.2600,SSF53041
VAKVTTIPATISRFTATPINERKKRRTAAYARVSTDSEEQLTSYSAQVDYYTNYIKSRDDWEFVSVYTDEGITGTNTKHREGFKRMVADALAGKIDLIVTKSVSRFARNTVDSLTTVRQLKEKGVEIYFEKENIWTLDSKGELLITIMSSLAQEESRSISENCTWGQRKRFADGKVTVPFKRFLGYDRGPDGNLVLNKDEAVIIRRIYSMFLQGMTPHGIAARLTADGIKSPGGKDKWNAGAVRSILTNEKYKGDALLQKSYTVDFLTKKKKVNEGEIPQYYVEGNHEAIIQPEVFELVQQELKRRKQGRGPHSGVHLFSGKIRCGQCGEWYGSKVWHSNSKYRRVIWQCNHKYDGEEKCSTPHLTEDEIKAMFISAANKLIGKKTAIISPLRASLDIAFDTSALEAETEKLQEELMVASDLIQKCIYENAHVALDQREYQKRYDSLTARFDIAKARLEEIETAIADKKSRRAAIESFLGTLAQADLMGKFDPVLWCGLVDHVTVYSKDDVLFTFKNGQEIRA

SEQ ID NO: 9633 - protein, 588 aa, Unknown
  Description of Unknown: Integrase B9634 sequence
  cd00338,IPR011109,IPR038109,PS00397,Coil, PF07508,G3DSA:3.40.50.1390,IPR006119,IPR036162,PTHR30461, PTHR30461:SF3,PS51737,PF00239,SM00857,G3DSA:1.10.10.2600, IPR006118,SSF53041
VTDTPSDRSLGATDTVCYLRVSTEEQARDDRASLSQQREACTQLAGVVRRTVGAWFVDAGASGGSAKRSGFQALVAFCRAHPRKLMAPGFIFCLNHSRWGRFPDPNDATWWMQEMKHVGWHVRFAEGGGLEGTPVAPIMDAVQHTQATAYREALRANCVRGWRSTAAQGYWQNEAPFGYRREAIGLRGRRVLQIGQQKSKDERAKLVPGPDEEVTLVQFLFREYAKGAVGCDRLAHHAMARYREKKWSKQVVRHILTNPAYVGDVVWGRRETGPEGLSQRRDRAGWVTTSDAHPALITRTLFARVQQRLQANQKQTRLSTGGYPLSGLLVCAHCGDPMIGGGGPKGPEGDPDRYRMYRHASISNARPGQDSPALRCFARMATVPKRLVEPAVIVAIGDILGSSRFRLLLERACDRVLTRFTTKAEPHRNQLERRREKLLDERARLVKLASSGVLTEEEVAPPLHAMRDQLAVIDQELQRAQFAERRVDALGGLRAELLEQAAHFVSVATSASGPELRELIRPWIHSAVVDREQNVVKLAIAPLPIEAGFRLSTTGLGPDSRAEKEVVPLIRRILPLPPARSLRRKRLA

SEQ ID NO: 9634 - protein, 588 aa, Unknown
  Description of Unknown: Integrase B9635 sequence
  cd00338,PF16793,PS51736,G3DSA:3.40.50.1390,PTHR30461, G3DSA:3.30.70.1790,IPR006119,IPR036162,IPR039459,PF00239, SM00857,SSF53041
MDTNAYIAYFRVSTPRQGVSGLGLEAQRAAALRHIGGSQLIAEYTDVESGKRHENRPQLKAALEHCRRIRATLLIATLDRLARKVHFISGLMESGVPFVMADLPNATPFEIHIRAAMAEEEGRKISERTKAALAAAKARGVKLGNPRLDEARARAAEALKKNRVSDSTLRLMLDLRANMTLRQVAAQLNAYQFKGPRGGRWHASTVHRTLLRVTTEALNDGLTQKRFDATVNPRNNATALECSHGTTQERNRACAQTSHLQDREMATIPPVFSPSAGRGPKTGGMPMPSEIREAERMLDLFTSVGARDFVVTKTDVEQKLKWGKTYSAPELRRLLPAMVRTAEIRHPHQLATGETVMAGENLIIRPTGPDAVFVQLDDLSAEQLDRVRPAAFIIHATSPGNHQCWIAVSGVSKLESKDFIRRVRKAVGGVDGAASGATRIAGSENFKLKYGPDYPMVQIVSGVPGRVMTPERLQDMGLLAEPEPIKEVHFAPPRVSTISGRQWPSYEKALAGAPPNSEGTGPSRSHADYWFCFLAQQRGHGLQETAEKLLEFSPNARERAARGDTGYALITAQNAASAVERGRNRARA

SEQ ID NO: 9635 - protein, 587 aa, Unknown
  Description of Unknown: Integrase B9636 sequence
  cd00338,Coil,G3DSA:3.40.50.1390,IPR006119, IPR036162,PTHR30461,PF00239,SM00857,SSF53041
MSARRGRGGLIPLTDEFVAYAYKRVSSDDQEKDGMSLPVQDKELLAEIARHETWTFGGSFQDVQTGTNPTRADYQRMLAAARAATAAGKRVVITVVRQNRLGRDGEEALRAWKEFDRLDAQLWATRDGGHLADPLMYGVRAILAEHDVRQISENVKGTFAEIRANGWLKPGRPRWGYRWEPATTEQRQLQGSPMVVPVPHPIEAEYVRELFLRRARGETIRALSTWVRSLPVAARGEVRRHNGSMSPRELSVSAVKDVLDSPVYIARNPEPGQDALDAPVGKWEPLCDDVAWRAIHPRTGARENVVSTSARGQYVLTGFLFCELCGARMCGQLQRGARRVRPGRRDTISSDTRVYICTSRMAGASHGTKPCYRTIKADLIEGQILGILGTLLDALKEPGVREAVRKAARDLESRDAATGDARRLRNAEQDRAALVAERVGLTRTLSAGIITGEAYAEAVAVISAGIDAQAAEIARLTALQVGQQRRMAERPAVDVILDTAEDWAWMLREGAVEDQRAFLKLVLERATPKRLKPGKYQAGMHYTGLGWQVIELGAAVLPLLGRVEDVQRVWAHCTASTRPDEALAAAS

SEQ ID NO: 9636 - protein, 587 aa, Unknown
  Description of Unknown: Integrase B9637 sequence
  cd00338,PF13408,IPR011109,PF07508,Coil, IPR036162,PTHR30461,IPR006119,G3DSA:3.40.50.1390,IPR025827, PS51737,PF00239,SM00857,SSF53041
MDAIIYIRWSSLEQTKGDSYARQINRCTKFCADKGYNVLETVVDEGRSAYTGENILTGNLGKLVERFERREVPEGTLVVVEQLDRLTRLPALEVVGWLTRVFPTGIKFVTADRGTMVSRAAMEADQLSFMSLIFDSFRSHGESKRKSDLLLDSWQNRRKDVVEGKKRNITGVCPAWLRWDKEVNEFVVITDPDPHLDRRLIIQRIFDERDAGVGHAIIARKLNEDGIPSWGVGKRKADGWHPSYVYKILHNPAVIGEFQPRSRRKGEVTGTKMGQPIPDYYPQIISPAQFERVSASKQVMNVGGGTKGRVNLLAGLVYCGVCNQRMIYLKKANAGRARTNPKTGTVTIDKSEGVYLKCSGAHRGHRCDHKAAFNYHWIAEAVLDNLLNSALRDVHFEQRSVMIQLADQLASARRELERFEAQAQTALDMTLDPAFKHDQRVKQRYIDVGRQADQQRELVNALDEKLSLSKGQVSPAEHLNRVASVRTSIDSEDEKVRDAARTKVMDAFQRLIDRITFKPDRTVEVSALEGSLGWQFDDKGKLVNRFDLTVGLNEDRLRNGLLRRDNVDRQDIAQQIEEMQKRRLEAL

SEQ ID NO: 9637 - protein, 585 aa, Unknown
  Description of Unknown: Integrase B9638 sequence
  cd00338,IPR011109,PF07508,Coil,G3DSA:3.40.50.1390,IPR006119, PTHR30461,IPR036162,PTHR30461:SF3,PS51737,PF00239,SM00857, SSF53041
MPTVQPAADGRAVKTIGVLVRNSTAKQVGNYRSEAQYDLGPRVEQRGYAVRYYDEQGTSGADLTKRKKAMQMLDDLKAGQIQGIAAYDFKRLTRDEFGMDGATIARRIVEAHAIFQTWDREYNLRLDDDLLQFQFGCFIAGIDWRNIRNTLWSGTFKKLEQEPHYMKTPLGYRNVADDRGKSHVAKNPEHQHVIDALARAFDECDSLAQVARRLNTEGPGRPWFRGRGGTSTHWNVFGLRYILRNTIYTGTFTFGAGLKERSTVWDRFALDPATSTPKDFLQFCPELAYWSIAQVRRWRRKFDKPANARVMKNGSVHALSGVLHCVACGSRMISHGIGKYACSALGSGKGRGGLDCPAPQILTESIVLQVLRRELPNVLVDAQDLAARARTHILEHAPSAAAQRLDFLQERLMSLSDSLTDENTPASALKAVIARIAQTETEIAALRDQVADEEDARLGDEELARTCEVLLRTNTLEVIDHMRPEQQGRVYSMLFAQVRIETQGFAAGRQWRLHSYTARLLDEPRISDWAPWGRLPNPMSKDDAPKDVLVFVDRDERTLATDISERVYVDYLPSLRELAGVLTPA

SEQ ID NO: 9638 - protein, 585 aa, Unknown
  Description of Unknown: Integrase B9639 sequence
  cd00338,PF13408,IPR011109,PF07508,Coil, IPR036162,IPR006119,PTHR30461,G3DSA:3.40.50.1390,PTHR30461:SF3, IPR025827,PS51737,PF00239,SM00857,SSF53041
MSAPRLLRGRTAPLDDVTIARIYGRVSSDEQEKDGVSLADQLATNRRYCASNEFVIGGEYQDVQSGMKAARADYQRLLADVRADRAEGRRAAVVVKFQDRLGRNLLESAKVYDELQKLGVEVHVAESGRAPSEDEYILRAFVAHIESRNIRARTKSAYRHLAEKGWHRPGQLPWGYALRPRTVEERADDAPQNVMVIDPVQAAYVRDAFARVAAGTSIREVARWVATLPDVARGGRKLTYNTVRKLLSAPVYVGRGGGPDHEEPEAVLERPAGRWEPLVTEDTWRQVASQRRLAGKMPNQASGEFVLSGLLRCARCGERMQGRTRPLPSGPRREYCCSSALVLGTEHIARPCWYTVPADPIEDEVERTISGTLKAAGEPTARRAIIRDLQAQAAAPDADALGQQIRELEMVRTRTQDRMHNLTIQLTDGVVDAEAYKDSAKRLRDQLDATTRTLEDLRRARPRAAAIGPLDALLGSCAGWARVLASGDVAAVRAVYGLLLEDVTPMRVARGRYQVDPTPTESGMVLLEAAVVALRQERSGGAKRLLIRLVAVGDRASSRHPTLTMSALLGAQSENFSTLLCPTGT

SEQ ID NO: 9639 - protein, 584 aa, Unknown
  Description of Unknown: Integrase B9640 sequence
  cd00338,IPR011109,IPR038109,PF07508, PS00397,PS51736,IPR036162,PTHR30461, IPR006119,G3DSA:3.40.50.1390,mobidb-lite,PTHR30461:SF3, PS51737,PF00239,SM00857,G3DSA:1.10.10.2600,IPR006118,SSF53041
MSGRGSSPPRRTRRSAIGYVRVSSPGQEENCSLDTQEAGVRAYCDREHLHLLAVYEEAETAIEEELGARPVLTDVRRRLREGEADTLVVFKVDRVFRNQYQPAHLLPELRLNGCGLEFVKERFEDTAIGRFSLGAMAFAAELEAEAIKERTMRGRLDSLTKHGRLPPAPRALYGYRFVFGRNHRGDEIIVGYAEEPATARVVRRIYADYLAGQTLRGIATALTREGVTAPSGRSNPWSYVTVRDRLVNPRYTGEATGWRHERRRTPNGKPGWRYRPEAEQHPLPAGTVPALVSREDWEAVQRRLPQNRAQASRNNRAPDAALLRGGLVRCAYCRRQDAAELGRVMVVANANRHRGAMYRCVAVRPDGRQCTNSILVDVLDGLVWGHATALLARPEHVGEHFAALADADPTAGEVAGIEAALRESRREQGNLQAALGRLTPEAQAGVVALLNRKAAEVASLERSRAAILGRRAVWHAERDRLAAAQALVRGMAEALGAGGEVALLAAALAPAKRQELVRALGVAAEVRRPAEPYPNGLRVALTQTLSPGDCGKNGLSFTTQEPATASPLVLRWADLPPLALPAAA

SEQ ID NO: 9640 - protein, 583 aa, Unknown
  Description of Unknown: Integrase B9641 sequence
  cd00338,PF13408,IPR011109,IPR038109,PF07508, Coil,PS51736,IPR036162,IPR006119,G3DSA:3.40.50.1390, PTHR30461,PTHR30461:SF3,PS51737,IPR025827,PF00239, SM00857,G3DSA:1.10.10.2600,SSF53041
MDIYNIANELKLSHKTIHDIPLRVTFYARVSTTREEQEGSIEHQISFFTEMIQNNHNWTFIPGYVDRIRGESASNRENFMRMIEDGKNDKFDLILTKEVSRFARNTIDSLTYTRELLRCGVGVFFQNDGICTIDTDSELRLTIMSSIAADEVRKLSERVHWGQKRSIENGRVMGNNRMYGYHKSDCKLVIDEAEAEMVRLIYQLYATGDYSTRKIEKILYERGFRSRSGTKIFHGVISGIIQNPKYKGYYCGNKVRIVDYRTKQQKFLPEEDWIIYKDETGEVVPAIVSEELWDKANAVFQERSQAIKVRGRSFKDKSPLTGKIWCGADGSAYWRTSYSNSIKMGSPIYQWVCSSKKKDGAASCKSFALMEWEVYYILSNTFKSLVDDIDTYVSEFLELLKATDPTKDVQKDILALTAKIDQCKTKKDKLLEIYMDDAISKAEFKAKNDDFNRKIEEYEGEINDLKELKSDTAMTSRKLHEIEKSIKGIYQSDDEVIPKAQLDDLIKTVLDKIEVYPDTEDSMILKIFLKTGSETSVTHSKDLRCSGHIKHMIKPQQQYIFKRNSIKRQHHEFQIRYDAEIYI

SEQ ID NO: 9641 - protein, 583 aa, Unknown
  Description of Unknown: Integrase B9642 sequence
  PF13408,IPR011109,IPR038109,PF07508,Coil, PS51736,G3DSA:3.40.50.1390,IPR006119,IPR036162,PTHR30461, PTHR30461:SF3,PS51737,IPR025827,PF00239,SM00857, cd03768,G3DSA:1.10.10.2600,SSF53041
MKAAIYSRKSKFTEEGESIENQINMCIHYLKNILNIDEYEIFEDEGFSGGNTNRPKFQKLMKEIKSKKFTHLICYRLDRISRNVADFTGTLEILNKNGVSFISIKEQFDTSTAMGRAMMNVSATFAQLERETIAERIKDNLRELSKTGRWLGGPAPLGYESIEVENNDQQGKNRKKHILQINENEINIPKIVFELFLQHRSFQKVSRLLESQGIYSRKGSVFSRELVKQTINNPVYCIADKKLMDYFKNTGCEIYGMQNINGTNGIMPYNRRKENGSFNSIDNWLISVGEHSGIISSDVWIKCQQINKLIKEKASNRQCTSQDALLSGLVVCAKCNSGMAPRQHKNGKYHYRYYSCNLRNKAADRCDNDSLNAYDAEDYVVKRLKALTPNEVIEKYKELQKKQYVKMDNENIINEHLKEIESNKKAISNLVMKMVYLENDMDILEPIKLEIKRLKDRNVELENLIEKLKSQNVEIIDTFESLDEILTRLDNFHKFYDYIELFEEKQALIRSLVKFITWDSETRKIDIILVGSDKNRTQSACPPLSDSSRRNGPCRNNCYNGISTYGKRNYRRDKKSRTCWALC

SEQ ID NO: 9642 - protein, 583 aa, Unknown
  Description of Unknown: Integrase B9643 sequence
  PS00397,IPR038109,IPR006119,PS51737,PF00239,G3DSA:3.40.50.1390 ,PTHR30461,IPR025827,SM00857,G3DSA:1.10.10.2600, SSF53041,IPR011109,PF07508,PS51736,IPR006118, cd00338,PF13408,Coil,IPR036162,PTHR30461:SF3
MKSVSKHERLNGHSNPLVGPVLRVAFYVRVSSEEQAERATARNQVDFLRKKYAPNFEPDSLEPMQFVGMFVDDGWSGALPLEDRPEGRRLLELVHARGVDLVVCYRLDRLGRKLTVLLDANVAFERFDVAIMSATEPFDTRTPIGQFLFQLLGSMAQLERETIRERVTMGRDRVARDGKFINGPVPIGYAVEDERLVPSDRKVPQLGGITEADLVRTLFQRAAEGESAAALTVWLRAMGVPSTKRYMRRDGTEKEETYPEWNAARMQDLLHSTTYYGDRALRYSGSVIHQDVPALVDRATWDRANATLTGRLTRFNSGQNEGYVYLLSGKLFCSECGNRMLGNYQRRQRGDKPRLYYVCSSARSPRARRTENSCQSARNHDGWALEAFVLEQIDEYVANPDHFLNILREQIRERRGTTQQQDEHVRALRQRLAGYERGKQTLLTMVSRNEITREDYLAQIAASAEEANVVRHELELAEAEDNLSAVIETRLLESVRVLHELREQWAAARKADDRVALRAMVQGTLREMRVAADRAVHLAFSFTAPSSRENNQSHYHLLYREDSAAVGLLDLELGFTLGLGKSA

SEQ ID NO: 9643 - protein, 582 aa, Unknown
  Description of Unknown: Integrase B9644 sequence
  cd00338,PF13408,IPR011109,IPR038109,PF07508, Coil,IPR036162,IPR006119,PTHR30461,G3DSA:3.40.50.1390, PTHR30461:SF3,PS51737,IPR025827,PF00239,SM00857, G3DSA:1.10.10.2600,SSF53041
MDGPPSAMEGEGTRISAIKPGAALARTRCACRCYNRKMKNKTAVIQVRVSSKRQADKELPLESQLQRCQDLAKRLGTTVTRVFVEKGQSGWSGPRPVFEEALQYCEKTLPDYFITWSTSRFSRNQEVSISSRARLERVGTEVAYASFDAGADPDTRFLSIGFRELMDEYKSREISKDTKRSMARNAQNGFWNGGRVPFGYMLHRTESGRQRLVINNIEARVVRKIFSMRLSGKGSLLIARELNENHEYNRNAGWNKSSITNVLKSEAVHGCVAYGKRTRPSRRLLPRDQWIIVKSHEAIIDDETWNKVQVLISESTPTQGSGSPRSKFIFSGLMRCGQCGGSLQIETARNSAGTTYAYYNCRNALKNGTCDNRRITANELDNFLIDAVVGRVLTKRNMEQIFHDMQKACGAFTKEQKTRIVTLNIEIRELQRRNEKLMATIEEHNSEIADMSLLVNRMNVNNARIQSAVAEIEEIESCPVPEISLTAEEVGKLSSFCRKVIKTTRNPEKTRGFLKAMIERVIIRDATAEIYYRPELLMRKQNVHSSGWLAPRDGHTLNTRGRIIKSKRFVINLPERWHRKVA

SEQ ID NO: 9644 - protein, 582 aa, Unknown
  Description of Unknown: Integrase B9645 sequence
  cd00338,PF13408,IPR011109,IPR038109,PF07508, Coil,PS51736,IPR036162,IPR006119,G3DSA:3.40.50.1390, PTHR30461,PTHR30461:SF3,IPR025827,PS51737,PF00239, SM00857,G3DSA:1.10.10.2600,SSF53041
MGLFMSTKKRAVIYARFSNEDLQKKRSIDDQLALCRVHAARKDLEVIAEFTDHGKSGTTMSGRDGLYEMMQAAKRGEFDTVVMESLDRLSRDRADLPALHKRLLFSKVSIETVNEGEATHIHVGIRSMVGSMFIADLADKCRRGATGRVREGKFPGARVYGYRCIPGKPGEREIDPEQAAIVLRIFREYAAGKSPRKIAGDLTREGITSPSGSPAWSNQCLTGGRLRQGMIGNRLYVGEIRWNRTRVSTNPETESKVRRATPAEDHMVVAVPHLRIVPQKLWDAANAVRSQRAIQKFGPGGKPVRAPVIARKEHLLAGLLRCGDCGGAMRIYATSATKGTRVACAGAKDRSTCEHTKTYNLETLERGILECMRVRLAEPELLKESLKAFHLEWAKQRKHCLTEHTALKRRLVEIEASTTRFVSALERGSMPEKQIMDRLQALETERVGVAERVRLLDGQTNVVDLHPTAMTAYCASMDKLHAALEANRDDAEARQAFRTLIDSIVVHKTEERAPYQFTPYHRMEALMGADLFPASRSVPEIIRENGGKTRSIIAKSPNPDLAEANPDLRGRIYTLGRYRMAA

SEQ ID NO: 9645 - protein, 582 aa, Unknown
  Description of Unknown: Integrase B9646 sequence
  cd00338,IPR011109,PS00397,PF07508,IPR038109, PS51736,IPR036162,IPR006119,PTHR30461,G3DSA:3.40.50.1390, mobidb-lite,PTHR30461:SF3,PS51737,PF00239,SM00857, G3DSA:1.10.10.2600,IPR006118,SSF53041
MRAALYIRVSTDRQASEGISLDAQTERAAAYCASRGLTIAATLREEGQSARKLRLEQRPAGRELLRLIASGAISHVVAFKLDRIFRDNIEALQRSKEWDAAGVHLHILDIGGDTVDTGSASGRLYFAMLSAFAQHESDQTSERVRSSMRQIASSGRSPANRPFGYARADRALVPDPITAPIVREMFMRAAAGASLVELVRWLHSEGITTRNGNARWSISSVRWVLSNPIYVGDVVWGDMIVPGAHEPLASAEDFLLTQEHIASRAPTRGRSSAHYTPLLRCGQCGGRMALTGSHGPSADRYYYCVQRKRYRPPLHPQARIGERLLVAMLFRHTELLIADADLPSAAQRAAARLSSAPPSPRGAAVPAAAVSAPPSPRGAGVPPADVSVPPLPRGAGIPPADVSVPPLPRGAGVPPADIASAATVPPLPPFPQTPKAYGEGGQGGLGSSTPSSLRSELTALALQRQQNMRMLHAGAITEDDLAALNAPLMAQEQALRASIATSASSSDLTSVAVLIAAAETLLPDLAAASIPEQVATFRRLYPLIELLPGVLRFHALPALGIEPIDRPILPRYCPKHGTPLPF

SEQ ID NO: 9646 - protein, 582 aa, Unknown
  Description of Unknown: Integrase B9647 sequence
  IPR038109,IPR006119,PS51737,PF00239,G3DSA:3.40.50.1390, PTHR30461,IPR025827,SM00857,G3DSA:1.10.10.2600,SSF53041, IPR011109,PF07508,PS51736,mobidb-lite,cd00338, PF13408,Coil,IPR036162,PTHR30461:SF3
MAAEPGPGRRGDAYLRKSPGSSASKTEISLERQLDDIKARMEADGVTLGMIHEDVHPRWELWERPALSALRERIKDGLVDVVYAWDTSRLATGIEHQAILLEEGDRFGCSYRFVTEQVDRTTPLGKAVWLMTSTFNEIERERIRDRTQGGKRKHLERGKMLFYAKPNYGYRWANAAHTCWVVDADEADVVRAVFRDVVGGATLSDVALRLTGAGVPPPGRAQTWQTSTLAEWLHNPAYKGAPAVYRTERVRRDGRWIRLRRDPEHWLALNPNSVPALVDPEDWALAQLALTRHRTQAPRGMAPDRQTEFLLRGGLATCAHCGRPLHALTVPRKRDYAPEKVIYRTYACASVSRKRAQKVAGADDGFPACPSPVRVRAEALDLAVWRGVLEHLQSPPPADGGAAEAARAQREHADAARAVRAAERVMANTATELVLAETDEERETLRGLQRTQAAVLRAARGRHEKAVRDLAAVAQAREQALALFVAFTERGRDLEGLIPGRVGLVQYQTMRAILGTSGVGVVVWHKDAPAGPPDRGAGRYAVRPYEAVPWPTVSGSSCGPGSSTPHYPDPDRLARLVRALAG

SEQ ID NO: 9647 - protein, 582 aa, Unknown
  Description of Unknown: Integrase B9648 sequence
  cd00338,PF13408,IPR011109,IPR038109,PF07508, Coil,PS51736,IPR036162,PTHR30461,IPR006119, G3DSA:3.40.50.1390,PTHR30461:SF3,IPR025827,PS51737,PF00239, SM00857,G3DSA:1.10.10.2600,SSF53041
MTSKLLNIKNALNAGISIFDMKLSVTFYARVSTDKDEQLNSLDNQVCYFKSFIEGNPNWVYVDGYIDEGISGKSAENRASFMRMIRNAQDGMFDLIITKEISRFSRNTLDSIKYTQQLLDCGVGVYFQSDNINTLMPDSDLRLTIMASIAQEEVRKLSERLRFGYKRAIEKGRVLGQDNLIGYDKKDCVLTINEDEAAIVRRIFEIYIEGKLGIRAIARQLEKEGIVGPESGEMLSYGTMKGIITNPKYKGYYCSRKTVSIDFRNNKPIHQDPSQWIIYKDDTIPPIVSEEVWDLANALYRERGENAKAHSQASQNRYPFSGKLVCAEHGTCYHRHVYSSKKNGDQEVWNCKMYRLKGRKDGCESPTVYTHELQAILNNVYKTLYENKDAVIEGLLDLYSGVGETNYLKDMEKTQKELSQLERKKEKLWELLLEGFVSKKDFQVQNDKLLVQIEPLQKRIAEAQKAIDAEKLKEQRLIILRKELELEYENTEDSPFGQNNAFLDKIIVHKIDGDKRHVRLEIFLTIGRKYTAEIDRNAENAPFISLYEIGIWHSEMISIFTRWKDAYKGSFFFTYETSVVIS

SEQ ID NO: 9648 - protein, 582 aa, Unknown
  Description of Unknown: Integrase B9649 sequence
  cd00338,PF13408,IPR011109,Coil,PS51736, IPR036162,IPR006119,PTHR30461,G3DSA:3.40.50.1390,PS51737, IPR025827,PF00239,SM00857,SSF53041
MQPNELPPEVISLIRFSTAEQVGEGKAGIDGQRQVNQSSAAYHGLKIRREMVVVDVSGKHVKDDPQFQALFKELEDPTLAGVVTSEQSRIVRPESFDDYPILGHFQRNKKLIYTPTGRIDPNTPEGRMALTVGGMMSGEELHNLRSRFARGKATKRLEGKHVGGNQMLPKTVRFVRERNAEGVKTGKSHWELVPLEAERMKRAFQLLLEGHSYETIAEMVGGWTGSGLHRAFMNPIHIGIRRCEWTVGAEYLPEPTVKNPTPKKRRYLIKRAAPLDVPTRQELESGAKPPVVEPIISLADWDRAQEIIAARMSHWRKGKLKNEGRDRGVATGIADCSCGMPLYMKYGSRGSHTDAYICKSRHPRGKGCGMKSIKRIDLDAAIAQTIMMLADASFVMSALEAALALQVAVPDPARVQRELALAKLESGRKEMIVMVRKGEMTRDEFREQMGALEMEVRALEALVPAPAPKVDARQLVELVVAVFTEFAFLAFVQQREVLRGAVRSIIVDGHARAITTVTIDGGYLGRGANSVLHSRAQYGINSIPDLTIRFPEPFMIPDTYVDRRTANGHHPASIASRWESVQ

SEQ ID NO: 9649 - protein, 581 aa, Unknown
  Description of Unknown: Integrase B9650 sequence
  cd00338,PF13408,IPR011109,IPR038109, PF07508,Coil,PS51736,G3DSA:3.40.50.1390, IPR006119,IPR036162,PTHR30461,PS51737, IPR025827,PF00239,SM00857,G3DSA:1.10.10.2600,SSF53041
MKTKDKQAEPKKAAIELIRVSTEQQAEEDRGGIPAQKLACRDIATEYNLQVKWTIEIEGVSGAQVMRSPGMRELLRICATGLCHGVIMREESRLVRPGSFGDYMVLGILQTNGVKIYLPDGVIDFSTPHGRLWASMKFGMADHERAVIRERTTSGRRSLRSAGKWVTGGDHVPYGFKKDPKSKQLVVDEAKIEKVKWIFNEFISGNTNILGIARYLGFNRDRVQYILRNPVYTGYNVIRRTVDPELNVYREDGRLRYQRFKYFDQEEQERIRLAGFENGGPISEEIFEQVQRILKIREEFSTSRGKWSTNDQYVYRGRLRCSFCGGLLQTQKQRHTTNHSLSYLYYRCGNAERGRTITPASGEPFACKSPNVSKDKIETELDKAIKNLANPEFVEKLFSVEIGSESEEEISSKRRALEEEISNLESSINRLQDLYVDGRIDRKVFAEKDDKLQAELKATKRMLNGMTSRKEPVDTDKFLDLLKPLLEWDYLNNEAKRKLLASIGVGFQVAVYAEKNRKDVRIRIDGFWISVAGMDGNLIDIASRRASDVAENKALFSTTDNEATPYFGHEIGSNQIYLSLQ

SEQ ID NO: 9650 - protein, 581 aa, Unknown
  Description of Unknown: Integrase B9651 sequence
  cd00338,PF13408,IPR011109,IPR038109,PF07508, Coil,G3DSA:3.40.50.1390,IPR006119,IPR036162,PTHR30461, PTHR30461:SF3,PS51737,IPR025827,PF00239,SM00857, G3DSA:1.10.10.2600,SSF53041
MKTRARTVTTSTTASYQTNIAASYERVSTVAQAEFGYGLKVSGRDVDDMAREHGLDLPQEFRFIDGVDQNASGTDWTLPALNAMLDLAKAKRFTTLLVPATDRFTRDTPKGLTLTAQLASYGVRVIWGNLPQIEDTDGHPMKRYIRRRMESDAFQLAELEREMITFRTARARHAKAKDGRVVGNGPPPFGYEYRRADDQKHKVNGLVEVAQEALIVRQLFERARTASTTRLQRWLDSQNIPTPRQMRGLRGAPSGGWNYGTIAEILNNAVYVGCYRYGDQEIAVPPLVDRATFDAVQKGLALRYRRPSGWWKKKLEREDPFVLRGLLECGHCSKPGQPQILHAQEKVVARRRYYWCANKFASRVKDGQQTCPLPGIRAEVLEDWLWHAVVSAIANVDEFDASLQASQERRDAELHERADRLAAIDQEVARYQRRLDRAVAKLLDDDFEDEDERGSVERNRDDSKRLLARLRADREREVAETRPAGLSAEDVIAFRQLLRHLNTDGLDKATPSERREVLELLGIRGVVRVASDGADAVLVQESPQRWARIDWDGEIRLQSEQSFKKLRLVCNPTPRFVLLAA

SEQ ID NO: 9651 - protein, 581 aa, Unknown
  Description of Unknown: Integrase B9652 sequence
  cd00338,PF13408,IPR011109,IPR038109,PF07508, Coil,PS51736,IPR036162,IPR006119,PTHR30461, G3DSA:3.40.50.1390,PTHR30461:SF3,PS51737,IPR025827,PF00239, SM00857,G3DSA:1.10.10.2600,SSF53041
MEDFYKIKEALKIMPITQIPLRVVIYSRVSTDSEEQLTSITNQKTYYKKLIENTPKWTLIEEYVDEGITGTSTKKREAFQRMISDGIEGKFDMIITKSVSRFARNTLDSLQNVRILTAHGVGVWFHSDGILTFEADGELRLSIMSAFAQGESEKKSEAVRFGLQESIKRGTVFGFDNMFGYRLHGGKLEIDEAEVPMIQKIFELYATDRYSMNQIEKILYDDGYRNHNGNRISHATLSHIIRNPKYKGVFAGRKVRKKDLFDDRVEMLPQNEWVIIDGEKGRSIVPPIVSEELWAKANRVLEARSIDVKTRQNKCNHPNLLTGKLWCVHCNLPYHRKASKTSNTVLNSAWVCSGKIRNGTASCPSIYLYENEVKQCLYELFIEDDFDIDDYIDQYIKLVSEASSSEKNTNRQNELEKELALIEKKKTKILEFNVLGQVSDQDYIAQNNALNEEYQRKSEELVNVRLALDTKKRTEEDFEKMRGALQQLKGRKNIDFIDPTFVRTYIERIDVSMIDGRTMNMDVILKTGDKISRILKKNLSSVNRRKHIYTGRRLTFRRKTPYGRGSHEIPIQINICFFSLN

SEQ ID NO: 9652 - protein, 581 aa, Unknown
  Description of Unknown: Integrase B9653 sequence
  cd00338,PF13408,IPR011109,IPR038109,PF07508, Coil,PS51736,IPR036162,IPR006119,G3DSA:3.40.50.1390, PTHR30461,PTHR30461:SF3,PS51737,IPR025827,PF00239, SM00857,G3DSA:1.10.10.2600,SSF53041
MEDFYKIKEALKIMPITQIPLRVVIYSRVSTDSEEQLTSITNQKTYYKKLIENTPKWTLIEEYVDEGITGTSTKKREAFQRMISDGIEGKFDMIITKSVSRFARNTLDSLQNVRILTAHGVGVWFHSDGILTFEADGELRLSIMSAFAQGESEKKSEAVRFGLQESIKRGTVFGFDNMFGYRLHGGKLEIDEAEVPMIQKIFELYATDRYSMNQIEKILYDDGYRNHNGNRISHATLSHIIRNPKYKGVFAGRKVRKKDLFDDRVEMLPQNEWVIIDGEKGRSIVPPIVSEELWAKANRVLEARSIDVKTRQNKCNHPNLLTGKLWCVHCNLPYHRKASKTSNTVLNSAWVCAGKIRNGTASCPSIYLYENEVKQCLYELFIEDDFDIDDYINQYIKLVSEASSSEKNTNRQNELEKELALIEKKKTKILEFNVLGQVSDQDYIAQNNALNEEYQRKSEELANVRLALDAKKRTEEDFEKMRGALQQLKGRKNIDFIDPAFVRTYIERIDVSMIDGRTMNMDVILKTGDKISRILKKNLSSVNRRKHIYTGRRLMFRRKTPYGRGSHEIPIQINICFFSLN

SEQ ID NO: 9653 - protein, 580 aa, Unknown
  Description of Unknown: Integrase B9654 sequence
  cd00338,IPR011109,IPR038109,PF07508,Coil, PS51736,G3DSA:3.40.50.1390,IPR006119,IPR036162,PTHR30461, PTHR30461:SF3,PS51737,PF00239,SM00857,G3DSA:1.10.10.2600, SSF53041
VTKLQLVRPSPILRGAIYARYSSDVQNDRSIERQNADLEKAAPRLNLKLDKRLYFEDRGQSATTLFDRPGLTRGLLGAVERGLVDVVLVEHTDRLARKGADSYWLFEQFKFYNVKVYTLKGEVTDIQLAFESYQNQADSEKTSFRVHSGHNDAAREGHICGPSAYGYVDVVGKPGEKDKNPREAEIVNRIVREMAGRKPPRQIAADLTRDGIPAPKGGAWTFQTVVKILQNELYVGVYVRNKVRKIRNPNTGNRVPRPSAPDDILRVDMPRLRIVDQALWDAAQKVRQERAHIYGGKRGTDRGTTARRLHPFAGLFRCSQCGGKMIICGSTRTGDRSIACSAAWWSKSCSHGKSYSLTRLTKHATEKMHAHLTDPDFVKERAKEREKELARLDREVNGERAAAQRELDRVDLRMKKIVRLIEDDEGDDVPPEVQARYKELRVEQRGLQQRLALLDAASHTPLLPSAVKALARDVDTLHTMLLDTPDDPACRMALGNLIERVVVHPTGYKEAYDVSLYARHAAYSGALPLFPHARDINPVRKQALARTDIDHAMVPSLSISDRPILLGRWREDASHQVKVA

SEQ ID NO: 9654 - protein, 580 aa, Unknown
  Description of Unknown: Integrase B9655 sequence
  cd00338,PF13408,IPR011109,IPR038109,PF07508, Coil,G3DSA:3.40.50.1390,IPR036162,IPR006119,PTHR30461, IPR025827,PS51737,PF00239,SM00857,G3DSA:1.10.10.2600, SSF53041
MTTPAYIYARFSSMEQGKGTSLKRQLEGARDFIKLHTDWDYPFDDPQAQQERDFTDQGKSAYAGVHREPGGALYELERKAAAGHFKNGAVLVVENLDRLTRQGWEEALKILSNLTLAGVTVHTIHSGKVWKAGEKPDMGQVITVIVEAEADHKQSDDKSKRVRKAWDLKIAAIEDGDRKAFSKHLPAWLDIDPKTGFTIANSHRASLVREIYQLYVEGHGLPAIVRTINARKEPSWARGKRRGDGWNTAYLHKLLKNRAVLGEFAPKSRKHSEPSHHAVSKGIVIPDYYPQIVPTDLFNKAQAAKASRKFTGGAEESRLRNLFAGLASCSECGSKMYYQLEQRKDRMVPHTTKHGEKRLYIVRTDRSSYRCNSNRRSAGCTNKTRIRYEHLEQTILDVLLNSALDNKSFALPDRIAEIENSIAENERRIGHMEGQTRNLTDNLAVRFSEALANRLGDLEDEIAAEKKKVEALRHELAGVSGSASPEQHIARVREVRGSLEDKDPDTRYAARVKVIHALRGIIHSMTCYPDKRTYVHTDLFSLRINQDGTYDVLDVIEEAQRHRMELPAQVLAQLQRVEEG

SEQ ID NO: 9655 - protein, 580 aa, Unknown
  Description of Unknown: Integrase B9656 sequence
  cd00338,PF13408,IPR011109,IPR038109,PF07508, PS51736,IPR036162,PTHR30461,IPR006119,G3DSA:3.40.50.1390, IPR025827,PS51737,PF00239,SM00857,G3DSA:1.10.10.2600, SSF53041
MPEKIINCAIYTRKSTEEGLEQDFNSLDNQYEFCTNYLKSLNDPALQLLPARYDDGGYSGGSLNRPALQRLLADIQCGLVNRVIIYKIDRLTREIRDFFKLLDVFEKYNVEFVSVKENQYYNTTTAIGRLMVNMFLVFAQFERENAGDRIRDKIATSKAKGMWMGGCPPYGYDIGDRCLVINETEAQNVRFIYQTFCNTHSLADTTDALNSGGIRTKRYTTRQGRTFGGRKYSVKTVQRILQNPLYKGMVAHRGKQYPGQHAAIIDAVQFDMVQAVFAAHKEKRETRRPKMPSSGGERETAALTGLIYCGCCGSAMTPSYCCKGEIRYHYYRCYRRASKLEDKCPINQIRTSEIDRVVMEQVLAILKSRDFFVQYISHHHEFDVSTAFALFNSLDDVWNSLFETEKRRILRELLAKVTIYKDKIVLDVKKAGLAGVFAELSQNNRLAEVEYKENETFQISVAYRATRLANGAKIIVPATAKEESRFNGSLRLARQIAKGFAWRKMMESGLSLQELTASAKTNERDIRFAMRLSMIDPAIVESVLSGKSPEFLTYAFMKKHPIPLLWSDQRKLYGFEERKQ

SEQ ID NO: 9656 - protein, 580 aa, Unknown
  Description of Unknown: Integrase B9657 sequence
  cd00338,PF13408,IPR011109,IPR038109,PF07508, PS51736,G3DSA:3.40.50.1390,IPR036162,PTHR30461,IPR006119, PTHR30461:SF3,IPR025827,PS51737,PF00239,SM00857, G3DSA:1.10.10.2600,SSF53041
VRAALYTRYSTEDQSSTPAQLAGCRRRAEAEGWPVVATYSDEAISGDDHRRPQYQAMLAAARDRSFEVLIVEDLSRLARDSVESELAIRRLEHWGVRVVGLFDGYDSTHRGRKLLRGMRGLMNDLALDEIRDRTHRSQRDRAEKSLSAGGLPYGYRAVDAFDGTKRVGRTREIDPARADIVREVFDRFAAGESLRVIANDLNRRGLPSPGAGWNRERRASDGLWRVSALHSMLGNEAYAGRYTWNRTQWVKDPETKKRERRERPKADWIVREWPELRIVDEDTWQRVQTRMGQRATLYGQPKGGRARYLLSGLLRCGECGGAYIVAAHRPVRYGCATHRQAGAAGCSNSRLVAREVAERLILADVRDQVLSPEAVALAVRVMREEAKAASQPGPDPEVEAVDRDIEAVERLRREGVLSPRAAAAALEPLRAQRAAMATRATSVVAGAFGAESDYVAVAGALWEAITGDDVDEAREALRGLLGTVRLVVEGEELVAEMAGGAIPLRRAVGGSTGLVAGAGFGASFSRVRLVEPARSPHSNAPRGDRNAEIRAARAAGASFAELARRYGISEARVRQLCGSR

SEQ ID NO: 9657 - protein, 580 aa, Unknown
  Description of Unknown: Integrase B9658 sequence
  IPR038109,IPR006119,PS51737,PF00239,G3DSA:3.40.50.450, G3DSA:3.40.50.1390,PTHR30461,SSF53784,IPR025827,SM00857, G3DSA:1.10.10.2600,SSF53041,IPR011109,mobidb-lite,cd00338, PF13408,Coil,IPR036162,PTHR30461:SF3,IPR035966
MNAQHPLPPGTPVAAYLRDSGGEEQELSLAQQETEIRAWCQSQGFALTRIFRDEARPGSSTVGRTGFQAMMRHFRSGQAPEKALIIWKYSRFSRDIDDAQFYRADLRRRGIQVISLHDQIPQGPAGRLYEAALDWMNQQFLADLSTDVKRGLRHIVAQYGCVPGTPPRGFRRVPIHIGKRRDGTDHTCHRWEPDPDLAPLIRQAFEMRAAGTPVSQIHAKLHIYRALNAYTTFFRNKLYIGILEYGSETYENYCEPIVPIETWQTVQRIMDDHAARFGKRHPRRVNSPFLLSGLAYCGRCGAPLYGHVTTRPGKGRDEAYRCSRAKRKAGCNAPRIPRHTLEQAVLESLTQHILTPENLAQIQQAHRAAIQRQQTERKSQIRALHKQKRSLQQRITNITTAIAQAGPLPSLLTELKELETQKAVIEAQLQALQRLQPEIPELTPAEITQISQKLIHYIQQATQEEKRQLLRGLIAKIIVSREGDHIEGTIQYYTPFAQPPPPFPPTPRGPDPTAPTPSGMLPMYFSPVGAHGGLFRPPFCFLVQFFRLYSSFSPGANAMPRLGILTGGGDAPGLNAVIRA

SEQ ID NO: 9658 - protein, 580 aa, Unknown
  Description of Unknown: Integrase B9659 sequence
  cd00338,PF13408,IPR011109,PF07508,Coil, PS51736,IPR036162,IPR006119,PTHR30461,G3DSA:3.40.50.1390, mobidb-lite,PTHR30461:SF3,IPR025827,PF00239,SM00857, SSF53041
MTDAPKPKAYRYHRFSTPEQDSGTSLERQRRATQKLVSEKDWEEVEVIEDKGLSAWKGDHLRVGGLGRFTDRVAAGEVEPGSFLVIENLDRLSRAKLKNARRWIEDINEAGITVAVCSPPLLLDEEAMSGSNMGTMILYLMEASRSGGESNRKSDMLLGAQERRMSKARDGIIYTSRMPAWLSGVKDGKFEIIEERAQVVRDIYEWCAEGYGFQAITKLLNDSVEPWTKPHKKSTATWKPGYIRDILTKPHVEGEYHRRTGDARKLTGEVIDYYPRVVPADLVARARTALRERSTSTSPNQHEARNLFTGLLKCGHCGDTMVRVVSRAAGREYEHLKCLRFNNAGMPIAGDDDEVNARRCINSTYYRYDAFERAALGQILHLALDSTYFTRPDLTAPLVVEVAQLSKDLEVMQAKQRRYMTWIEEDDEATEAKDMLREMRPALAALRLKLDEAKLALERARGNVSPEEHLRRVVEVQDAIYSEDNETRQSARRKVAEAVRSVVSVATFRRDYVEKKRTPVREAILAVAGGALAFKFGNDGTLLAKVDYTSVMGQFGSTNSGAEDVVPDIRRRTQSAAKNV

SEQ ID NO: 9659 - protein, 579 aa, Unknown
  Description of Unknown: Integrase B9660 sequence
  IPR038109,PS00397,IPR006119,PS51737,PF00239, cd03768,G3DSA:3.40.50.1390,PTHR30461,IPR025827,SM00857, G3DSA:1.10.10.2600,SSF53041,IPR011109,PF07508,PS51736, IPR006118,PF13408,Coil,IPR036162,PTHR30461:SF3
MRNKSLAGRANNRAERPRKVAIYIRVSTTHQIDKDSLPMQRKDLIAYCELILGIEDYEIFEDAGYSGKNTDRPAFQEMMQKIRSGSFSHLLVWKIDRISRNLLDFAEMYEELQSLRVTFVSKNEQFDTSNAMGEAMLKIILVFAELERNMTSERVTATMISRANQGLWNGGRVPYGYSYDAETSVFSIIQDEADVCQLMKTDYFEHKSIIHTAKLLNDRKVPTRSGALWSPTAVWKILSSPFYAGIYRYNHYKGTENRTINPEEEWVLVPDHHPAIFTLEEHEKICDIMDTNKRMSNLPGQKHRAKNVYAFSGILYCGKCGSKLVSTPGRLQADGFRTTTYSCPKKRKTHECDNPSVNDLIVGEFVINYILNMLNAKSSFSSINSPAELEERLLYGGSFKDVQHISEDGLNEFYNLLSRYGSDSSYVFAVKHPRKKKAAVNPEVEALRKDKEKQERALKRLQDLYLYSERAMTEKDFIIQKNEISSRIQDINTRLGMVTHDANSTLSDEDFVRQASHLLITKKLIGRDYIYYKALAQTVSPDVLKIYMETILDSVYVIDGRVSSIVFRNGLTHTFIYQK

SEQ ID NO: 9660 - protein, 579 aa, Unknown
  Description of Unknown: Integrase B9661 sequence
  cd00338,IPR011109,IPR038109,PF07508,Coil, PS51736,G3DSA:3.40.50.1390,PTHR30461,IPR006119,IPR036162, PTHR30461:SF3,PS51737,PF00239,SM00857,G3DSA:1.10.10.2600, SSF53041
MRLGVVTGMDVHAGVYGRQSLRRANKSEVSTEDQLKKGVARARELGASSIATYEDLGISAFSGAERPDFERMLADCRAGRLNVVIVYYVSRFSRLEVADALPVCQELLNLGVTIVSLTEGTFKRDNIMDLIHLIFRLDAAHQESKNKSVAVKSAKATAKELGGWSGPAPYGFETYEDVMTRTGQDGRSRSIVIKRLRPNKEECAIVATHVFAPVIAHMDTPYDPGYMRFHPGSVSGVTTNLNRLSIPTRGAKVGKERAASQWDRKTVGRILQDPRFIGYMAEPVYDKEARGRKVTGYRVIRDDDGHPVKAPWDPIVDPGEFWRVQEWLQGRRTSSANNKGDSLLSGLGLMRCLCGATWKATRYPATKTHPEGQRAYRCNIGQRDTQVHTGTPTIGMDALDNYVANRIFSLIRAAEDDEDALLILAEVQERYSRKLETPETSGERQTLLTERAEVRQGLEELYDERDAGGFRTDIGRRRFLKSETALAERLEGLDKRLEELEAGKERPLPLAQWQAWGEDPTGPGSWWSKRTLEERREFVQLWIKSITIRPLARPRVAEPLSRRVRIEWHRPTEELGAVA

SEQ ID NO: 9661 - protein, 579 aa, Unknown
  Description of Unknown: Integrase B9662 sequence
  cd00338,IPR011109,IPR038109,PF07508,Coil, PS51736,IPR036162,IPR006119,PTHR30461,G3DSA:3.40.50.1390, PTHR30461:SF3,PS51737,PF00239,SM00857,G3DSA:1.10.10.2600, SSF53041
MNILEMRDLLLNQGKTIYDLPLKVTHYSRVSTEFKAQETSLKNQEYYYKELIKNTPNWEYIDGYTDDGVSGTSTVKREEFNRMIEDGLNGKFDLILTKEVSRFARNTLDSIFYTRELLKNGVAVYFENDNINTLYPDSEFKLTIIASLAQEESRKTSQRVKWAKRRAIEQGEIFLPPNMHGYRKVDGKVEIVEEEAEMVRRVFELYCQGLGFRLIGRQLAKEGYLNGGGNEYGISTLRKIITNPRYKGYYTGGRYETVDHITKKVIEKDPEDWVMYPAPDIIPPIVSEEVWDRANEILEEKRKRVHIKHETSYQNKYKYSGKIYCKKHDAAFHRSLYRYKTMPDKEVYQCSIYRLHGKKVCDSPTIYTTELDAIMACIFKTIFKNKDNFIDELLTMIEKHLQGDDFSKDITRTINKIEKIKERKDKLLDLVLNDLITEKEFRQRNDEFNQEIDVLEKELEKYEHLRKAKRSSKEQLKLMEEFLNKEYDLDKNMPDELIDTFLDKIYVEKDEKIDDLINFEVYLKTGQKIPVYFRKDISLCLATHIDRHKMMFEFPRTKNNRKVDPVRIRVVDIRLNIAV

SEQ ID NO: 9662 - protein, 578 aa, Unknown
  Description of Unknown: Integrase B9663 sequence
  PS00397,IPR038109,IPR006119,PS51737,PF00239, cd03768,G3DSA:3.40.50.1390,PTHR30461,IPR025827,SM00857, G3DSA:1.10.10.2600,SSF53041,IPR011109,PF07508,PS51736, IPR006118,PF13408,Coil,IPR036162,PTHR30461:SF3
MEVYIMAYNAQNKTGARVAIYVRVSTLHQIDRDSLPMQKQDLLAYAKLMLNTDDCVIFEDAGYSGKNTDRPKFQEMMSQMRAGAFTHLLVWKIDRISRNLLDFATMYNELKALGVTFVSKNEQFDTSTAMGEAMLKIILVFAELERNMTSERVTATMISRANNGLWNGGRIPYGYDYDYETHEFSVNEEESKVVILMHDMYEQERSLVRVVRELNERGYRSRAGNLWSPVSLLIILRNVFYCGDYRYNMLKEGDRQKVKDESEWVTVENHHVAIIPKDQKERIMATLDSNSKLCKQRNIYKSSKHTHVFGGLIYCGSCGKPLGSTPGNLTRDGWHYSKYTCPTRRKSVTLCTGKSTSDPIIGEFVFNYILNMLNAQNDFDKINSPEELEKLLLIGDTFAYIDHIESNGLNDLFNVLSSGTVKGAVFGKGASLPTRKATVEPEVARLRNEKQKTERALDRLRSLYLYADEAMSEAEYMIQKNKLEETLEDINDQIGMMNTDSWQQSVSDEEFIQRASEFIIAQKLSGRKYVNYKRLAMSVDSEVLKNFVVSIIDSITIQDGLVSNIVFKNGLCHTFIFR

SEQ ID NO: 9663 - protein, 578 aa, Unknown
  Description of Unknown: Integrase B9664 sequence
  PS00397,IPR038109,IPR006119,PS51737,PF00239, cd03768,G3DSA:3.40.50.1390,PTHR30461,IPR025827,SM00857, G3DSA:1.10.10.2600,SSF53041,IPR011109,PF07508,PS51736, IPR006118,PF13408,Coil,IPR036162
VKKTAEELLNTIKVAIYIRVSTHWQVDKESLPVQRQDLISYCKLILNTDNYVIFEDPGYSAKNTDRPDFQRMMARVRTGEFTHILVWKIDRISRNLLDFAAMYQELKELGVTFVSKNEQFDTSTAIGEAMLKIILVFAELERHMTSERVTAAMLSRATNGKWNGGKVPFGYKYDKGAQEFVIDEAEARVVKLMYDLYDEQRSLLVVSKELNDRGYRSRKGSLWSPVTVGNLMRSPFYIGVMRYNYRDESGATFTFKPEDEWIMIEEHHPQIVTHEQWNRVVDTMKSQRRGQPGHGKSFNRGNVHIFAGLVTCGYCGSLMRATKDRVRADGSRPSIYNCASKRTGSDCPNKYISDLTIGPFVLNYIANIIRARKSFGVSTSIETLEKKLLRGDTFKDVIHIGRPGLEELYRHFQGTRGVEQNFMASPGATASNTEEERDLLLAEKHRKERALNRLKALYLYSEEEQAMSEAEYIVERKRLLDSLEGIDARLAEIDEALAQQIKLSDEEFIQKASYFIMAQQLTEKRQIDYTRFMRKADPQIVKNFIQNVCANFCIKSGRVTSIRFKNGIEHQFFYRDPE

SEQ ID NO: 9664 - protein, 578 aa, Unknown
  Description of Unknown: Integrase B9665 sequence
  cd00338,PF13408,IPR011109,Coil,PS51736, IPR036162,IPR006119,PTHR30461,G3DSA:3.40.50.1390,IPR025827, PS51737,PF00239,SM00857,SSF53041
MTPRKENESFDRIPVVALIRVSTEEQATEDKGGIPAQQDAIKRIAQQHDLDIRWTVQIEGVSGAVVMQSQQMKEVLRIVRGGVCKGIVMKEESRLMRAENFEDYAILQTLQQHGVKIYLVDGVMDLSKAGDKLFSHIKFAFAGYERTIIRDRMLGGKKAKRRRGEWVAGPNSVAFGLKLVKDGKINRLQVDDASIHRVQHLFQLFISGVTSFGKLARETGISYYSIPYILENEIYAGVHVPRKTVDPNRNVYRDDGSLRYQRRLVVPVTERERIQVLDNPPISPEVFAQAQWLLKLKREMRWKRTQETEDLYIYRGFLRCAECGMRLTTVKYLNKQANNFRADYYVCRAAHGAARANGTWQIKPASCKTRRIRREVLEPMLDDLVVRRFANPNFLLELIEAHSVAETQAAVTKTIERLHLEIEEADRAIERNQEMYIRGKISQAVFDKNDHNLQLEKRTSEVELAKLRPNVEQITPEMWVPIARQFQRWPKVAPQQKKVLLAAIAPIFIVGGYAGEKYHDTVVKVKGCHVNLTGEHLSVESDKSAEGEGSEEEDVLVDIGSRLYSGRDVNQSSIYIPF

SEQ ID NO: 9665 - protein, 528 aa, Unknown
  Description of Unknown: Integrase B9666 sequence
  cd00338,PF13408,IPR011109,IPR038109, PF07508,Coil,PS51736,IPR036162, IPR006119,PTHR30461,G3DSA:3.40.50.1390,PTHR30461:SF3, PS51737,IPR025827,PF00239,SM00857,G3DSA:1.10.10.2600,SSF53041
MPKTTKKITTIPATLTRFTATPITEQKKRRVAGYARVSTDHDDQFTSYEAQIDYYTNYIKSRDDWEFVDVYTDAGITGTSTKHREGFKRMVADALAGKIDLIVTKSVSRFARNTVDSLTTIRQLKENGIECYFEKENIWTFDGKGELLLTIMSSLAQEESRSISENCTWGQRKRFADGKVTVPFNRFLGYDRGPDGNLAVNREQAAIVQRIYAMFLQGMTYNGIAQQLTDDGILSPGGKPKWNTSAVKSILSNEKYKGCALLQKTYTVDYLTKKKKVNEGEIPQYYVEDNHEAIIDPDTFEMVQREMEKRGKGRKYHSGVHTFSSKIRCGECGSWYGSKVWHSNSKYRKVIWQCNHKFDGDKHCSTPHLTDDIIQQAFLSAANKLLATKDTVIADGREMMALLFDTTDLEREQEELQQETQVVSDMVQQCIYENAHVALDQAEYQKRYDGLTERFEKAKARLDAVTAEIHQMQTQRASIEDFLKAFAAMPDELTEFTLESWHGLVDYGTVYAVDDIRFTFKNGQEVKA

SEQ ID NO: 9666 - protein, 503 aa, Unknown
  Description of Unknown: Integrase B9667 sequence
  PF13408,IPR011109,IPR038109,PF07508,Coil, PS51736,G3DSA:3.40.50.1390,IPR006119,IPR036162,PTHR30461, IPR025827,PS51737,PF00239,SM00857,cd03768, G3DSA:1.10.10.2600,SSF53041
MNNRIDAIYARQSVDKKDSISIESQIEFCKYELKGGNCKEYTDKGYSGKNTDRPKFQELVRDIKRGLIAKVVVYKLDRISRSILDFANMMELFQQYNVEFVSSTEKFDTSTPMGRAMLNICIVFAQLERETIQKRVTDAYYSRSQRGFKMGGKAPYGFHTEPIKMDGINTKKLVVNPDEAANIRLMFEMYAQPTTSYGDITRYFAEQGILFNGKELIRPTLAQMLRNPVYVQADLDVYEFFKSQGTVIVNDAADFTGMNGCYLYQGRDVKPSKKNDLKDQMLVLAPHEGIVPSDIWLTCRKKLMNNMKIQSARKATHTWLAGKIKCGNCGYALMSINNPVGKQYLRCTKRLDNKSCAGCGKIITSELEAVVYQQMVKKLEKHKTLTGRKKAAKANPKIAALQVELAHVDSEIEKLVDSLTGANNVLLSYVNVKIAELDGRKQELLARIAELTVEAISPEQVSQISGYLDTWENVSFDDKRRVVDLMITTIAATSDSLNITWKI

SEQ ID NO: 9667 - protein, 528 aa, Unknown
  Description of Unknown: Integrase B9668 sequence
  cd00338,PF13408,IPR011109,IPR038109,PF07508, Coil,PS51736,IPR036162,IPR006119,G3DSA:3.40.50.1390, PTHR30461,PTHR30461:SF3,IPR025827,PS51737,PF00239, SM00857,G3DSA:1.10.10.2600,SSF53041
MPKTTKKITTIPATLTRFTATPITEQKKRRVAGYARVSTDHDDQFTSYEAQIDYYTNYIKSRDDWEFVDVYTDAGITGTSTKHREGFKRMVADALAGKIDLIVTKSVSRFARNTVDSLTTIRQLKESGIECYFEKENIWTFDGKGELLLTIMSSLAQEESRSISENCTWGQRKRFADGKVTVPFNRFLGYDRGPDGNLVVNREQAAIVQRIYAMFLQGMTYNGIAQQLTDDGILSPGGKPKWNTSAVKSILSNEKYKGCALLQKTYTVDYLTKKKKVNEGEIPQYYVEDNHEAIIDPDTFEMVQREMEKRGKGRKYHSGVHTFSSKIRCGECGSWYGSKVWHSNSKYRKVIWQCNHKFDGDKHCSTPHLTDDIIQQAFLSAANKLLATKDPVIADGREMMALLFDTTDLEREQEELQQETQVVSDMVQQCIYENAHIALDQTEYQKSYDGLTERFEKAKARLDAVTAEIHQMQTQRASIEDFLKAFAAMPDELTEFTLESWHGLVDYGTVYAVDDIRFTFKNGQEVKA

SEQ ID NO: 9668 - protein, 578 aa, Unknown
  Description of Unknown: Integrase B9669 sequence
  cd00338,IPR011109,IPR038109,PF07508,Coil, PS51736,G3DSA:3.40.50.1390,PTHR30461,IPR006119,IPR036162, mobidb-lite,PS51737,PF00239,SM00857,G3DSA:1.10.10.2600, SSF53041
MVRAVTYGRQSHKSETDSQASPLMQKEKGIAYINSQDNWKHVGHYEDVGLSGYDPNVYRPDFERMMEDARQRKFDVVVIYMLSRLTRQGAAEALKIQEELAQHGVAIVSTQEPFINTSDDNPFGVAFFALIAGLAHQESKNKSKFIRDAFAELKAKGSHSTGPVPYGFDAESVQVDGVTIRVLRPGETSDEEIGPKSTPADNVMHIIQEAERGVKENAIAYALTEKRAKTPLGSLDEEAAKARREAASKRRKGGASDTADYEWSSTVVRRILRDPRLAGFAIGPVDPKTKRRQILRDENGQPVRPHEGFITPKRWYDLQAILDGRKRERVVDRAGTLTFLGSWGVLRCGLCDSGMTVSNTDSTYVCNLRRSVGTVGKHVLRIRQEDADAIVASRLWTKVASLDPEDDDDIAILAAAAERFAVQGADPEAAAELAEQEAQLAHVQQSMKDLYADRDEGLYEGKTGRQAFKDTIRKYQQHEARCMARIDELKAAATVATRLPIDDWFADSDEGNPFEPGGLWDRWDVADKRAFLSLFVDSVSVGPAGTKRGSRLERAEKRIEITWASPAEDEEDNESVTG

SEQ ID NO: 9669 - protein, 578 aa, Unknown
  Description of Unknown: Integrase B9670 sequence
  cd00338,IPR011109,PS00397,IPR038109,Coil, PF07508,G3DSA:3.40.50.1390,IPR036162,IPR006119,PTHR30461, mobidb-lite,PS51737,PF00239,SM00857,G3DSA:1.10.10.2600, IPR006118,SSF53041
LTIQRRPSSSDPPPPGTPAALYIRVSTGRQAAADRHSPDVQRTRLLALAVREGWPVALVRQDVGRRHNLTREGYQDIIAAVRKREIGVVLVYMHDRLSSGIEWLSRLQEFDALGVPVVSEQEGASERGMLRFVRAGMQYEESLRLARRVGPARIAGARTGTHMGRTPYGYRRVYPQRQDATARPAGQLVPHEPEVRVVRDLYRWYLDGASTWSLALRLNEETVAGRAIPAPHGGGLWGETAVYTILRSPVYAGRVRYGQRPSGAYEPGDPVDVFVAEGRHEAVVDEEMWRAVQARLSAGNRRGPLGTRSGPRLGSGLLRCATCGAATIFCAAPRPDPSKPRRAGMYECGAARRGAARCQGVAINARAVHAAIRAELGRLTVVDRAYRPRRVAAEPDRARQTTARLTAEIATAERDLDAINRSAALTGELSAEQVASWRRLAGEAETHLMAARAQLQGVGQQGAVHRQTRDQVRQVITAALPAALRDADDDELIPLTRLLIRSACVMERVPAINTRWCRLDVEWSPLVVAMMADGDVTLAPPEPTPTRTARQEDDRLKARRYRERRRTQAVVTPTETSG

SEQ ID NO: 9670 - protein, 528 aa, Unknown
  Description of Unknown: Integrase B9671 sequence
  cd00338,PF13408,IPR011109,IPR038109,PF07508, Coil,PS51736,IPR036162,PTHR30461,IPR006119, G3DSA:3.40.50.1390,PTHR30461:SF3,PS51737,IPR025827,PF00239, SM00857,G3DSA:1.10.10.2600,SSF53041
MPKTTKKITTIPATLTRFTATPITEQKKRRVAGYARVSTDHDDQFTSYEAQIDYYTNYIKSRDDWEFVDVYTDAGITGTSTKHREGFKRMVADALAGKIDLIVTKSVSRFARNTVDSLTTIRQLKENGIECYFEKENIWTFDGKGELLLTIMSSLAQEESRSISENCTWGQRKRFADGKVTVPFNRFLGYDRGPDGNLVVNREQAAVVQRIYAMFLQGMTYNGIAQQLTDDGILSPGGKPKWNTSAVKSILSNEKYKGCALLQKTYTVDYLTKKKKVNEGEIPQYYVEDNHEAIIDPDTFEMVQREMEKRGKGRKYHSGVHTFSSKIRCGECGSWYGSKVWHSNSKYRKVIWQCNHKFDGDKHCSTPHLTDDIIQQAFLSAANKLLATKDTVIADGREMMAMLFDTTDLEREQEELQQETQVVSDMVQQCIYENAHVALDQTEYQKRYDGLTERFEKAKARLDAVTAEIHQIQTQRASIEDFLKAFAAMPDELTEFTLESWHGLVDYGTVYAADDIRFTFKNGQEVKA

SEQ ID NO: 9671 - protein, 578 aa, Unknown
  Description of Unknown: Integrase B9672 sequence
  cd00338,IPR011109,IPR038109,PF07508,Coil, PS51736,G3DSA:3.40.50.1390,PTHR30461,IPR006119,IPR036162, PTHR30461:SF3,PS51737,PF00239,SM00857,G3DSA:1.10.10.2600, SSF53041
MLATSTLPIDPPSGEWEYLLPKTIRRNALYRRVSGDDQERGSSLSDQFDAFVTRVGQDGGVFKEEHIFTDVRSGDGKYWRDREGIQALLAAAKRHELDFVYVAALDRFGRDYAVQEFLIQELKYYGVTLISMKKDEQTEGRNDPSSVLARTFFGMMAQEELKRIKDRTHLGIRGRVTKKGALLAGRRPLYGYHWADKEMEWDGQLITVPKACYVIYEPEAKVVRYVFDLALKRTPIRRIAIMLTEMGVPTPDGKQLWRPASLHNLLRHQGYTGQAVAWKHHYEYVPGQGVRKTVKDKSEWVSVEGCIPPLIDLSTYEKIQEILVRNKETAPRNNKHPLDALCRSGIAICGYCGHNLIAFTDAHKKSPSYICAIKIRGYHECRGVRATTFAVDGAAWTKAKEIICHPELIEEELKKRRVEDPVSGSLHAAETLMKDVTEAIINLTKAMEHTTDPTTIMILTQRLEELAKQKASYENQYDQVMRYRINWEDAMRALDDFKAWCDEVRPHLCSPDFEPTYQEKREALEMIGIRVAVFGKDQKQRYRVDVEPSEIMNKFSIVSRTSYTCDHNQPLLSYFVEG

SEQ ID NO: 9672 - protein, 577 aa, Unknown
  Description of Unknown: Integrase B9673 sequence
  cd00338,IPR011109,IPR038109,PF07508,PS51736, IPR036162,PTHR30461,G3DSA:3.40.50.1390,IPR006119,PTHR30461:SF3, PS51737,PF00239,SM00857,G3DSA:1.10.10.2600,SSF53041
MTKKRAALYARFSSDLQKDRSIDDQLALCRAHAIRKDFDVVTSFVDRAKSGASMNNRDGLWEMMSAAKRGDFDVIVMESLDRLSRDQADLPALHKRLVFSNVAIETVNEGEASHIHVGLRSMVGSMFLRDLADKCRRGATGRVREGKFPGARVYGYRCIPGKPGEREIDPEQAAIVVRIFREYAAGKSPRIIAADLSREGIISPSGTAVWSNQCLTGGRLRQGMIGNRLYIGEIRWNRTRIHRDPDTELEVRRATPAADHMLVPVPQLRIVPQKLWDAANAVRSQRAIQKFGPTGKVTRTTSAPARKEHLLAGLLRCGECSGNMRIYVTSATKGTRVACAGAKDRSTCEHTKTYHLETLERGILECMRTRLAEPELLKEALKAFHAEWVKQRKHCLTEHATLKRRLGDIEASTVRFVSALERGTMPEELIITRLQALETERTGVAERMRLLDADTTVVDLHPTAMTAYCASMDKLHAALEANRHDAEAMQAFRTLIDSIVVHKTEDRAPYQFTPYHRMQALIGADLFPASRSVPEIIRENGGTVRFASAKPANPDLAEANPDHRGQICTFGRYRMAA

SEQ ID NO: 9673 - protein, 577 aa, Unknown
  Description of Unknown: Integrase B9674 sequence
  cd00338,IPR011109,IPR038109,PF07508, Coil,PS51736,G3DSA:3.40.50.1390,PTHR30461, IPR006119,IPR036162,PTHR30461:SF3,PS51737, PF00239,SM00857,G3DSA:1.10.10.2600,SSF53041
MTKKRAALYARYSSDLQKDRSIDDQLALCRVHAIRANLEVVTTFVDRAKSGASMNNRDGLWEMMQAAKRGEFDVIVIESLDRLSRDQADLPQLHKRLEFAGVKILTCNDGETTKMHVGIRGLVSSIFLSTLADTVRRGHAGRVSEGKFPGARVYGYRCITGKPGEREIDPEQAAIVLRIFREYAAGKSPRTIAGDLTREGITSPSGTAVWSNQCLTGGRLRQGMIGNRLYIGEIRWNRTRVFKNPETEAEIRRATPAEDHMIVAVPHLRIIPQKLWDAANAIRRERAVQKFGPSGRVLRAAPVLARKEHLLAGLLRCGECGGKMRIYATSATKGTRVACAGAKDRSTCEHAKTYHLGTLERGVLDCMRARLAEPELLKEALKAFHLEWSKQRKHCLTEHTALKRRLMEIDASTTRFVSALERGTMPEAQIVARLQALETERVGVAERVRLLDGQTNVVDLHPTAMTAYCASMDRLHAALEANRDDAEARQAFRTLIDSIVVHKTEERAPYQFTPYHRMEALMGADLFPTSRSVPEIIRENGGKTRSIIAKSPNPELAEANPDLRGKIYTLGRYRMAA

SEQ ID NO: 9674 - protein, 577 aa, Unknown
  Description of Unknown: Integrase B9675 sequence
  PS00397,IPR038109,IPR006119,PS51737,PF00239, cd03768,G3DSA:3.40.50.1390,PTHR30461,IPR025827,SM00857, G3DSA:1.10.10.2600,SSF53041,IPR011109,PF07508,PS51736, IPR006118,PF13408,Coil,IPR036162
MKKVIGYVRVSTDKQDLQRQKVLITKYCESMGYSLVRFIGEKVSGAKSERSGLAELLTVSKDEADLIVVSELSRISRQDDIMNVISQLNSIRVNGLDLYILDTNTAINAADNMDGLEVMKLVFKAVGNADERRKITERMRTGRYTKLVKNPYAYVGGQIPFGFKTIDNPNYNEKSANDKEPKTILIPDEEQVKVLEMMFTKIANGFTLHRLAKYMIDNGMTYFKSKKFVSYQGIISEIIHNPIYKGERQYSGETFIIKPVINVELFEAANEALNSNRWMVSTSNNHFNPLKGILYCSCGRSLYFTNCKDYNYYKCSKKLNDAKEVICNNKGLRAETAFKAIWIAARTLLYQDKFNIKTTEKENLLQNDINIVKSALVTFKNEVKAKESEKEDIINKIQNLTNLSLISVFEKKFDSLESEIAELNEKITKKEIELNKLESKYNEIKQISIDEKLDSLDLEAKSELLHKVVEKAVWYSDTLRKGFLDVTYKNGYREVIMIQTDKTHRLIMQLPSTFTLNPLTRKVGAMMMKPTANKFSLEQEYTEYSFKEFLDNFGEVEEWIIEREIVNGFTQKKGSRK

SEQ ID NO: 9675 - protein, 577 aa, Unknown
  Description of Unknown: Integrase B9676 sequence
  cd00338,IPR011109,PF07508,Coil,PS51736, IPR036162,PTHR30461,IPR006119,G3DSA:3.40.50.1390,PF00239, SM00857,SSF53041
VKNQQKTAYSYVRFSTPRQQHGDSLRRQTEATESYCAANGLTLDRTLNLKDLGVSAYHGKNAAAGKLGKFITAVESGKVQPGATLVVESIDRLSRAEVLTALELFTRIINLEIEIVTLIDGKKYTKASVNGNPMDLMFSIMVMSRANEESAVKSHRSRANWTAARTKARENGKCKPGNCPFWTTPNATRTAYDVIPAKMSIARRIIDAAIAGYGTYSIAKTLNADGIANPTGKTLWSAHAVEHLLKSKTLIGQYQPRDITGKPIGEAVKAYYPAVCSEAEFYRIAASRKAPAAIAKGRTGTGVSNLFTGLLTHQPTNSSMRILVSRGKRLIPSAAHAGKVTWDSFGYAAFEDAFLRFVSEIEINTAPRSSKVAAIETELGMVSETLARLQNELNQNGNVDAFIIAAKNWTSRKEALTNDLENERAKNATPAVSTADISAMYAAMSKMPEDQRTAARLQLRSAIAAVVKQIDMAYETVRCVTIAAVRVTLANQTSRFFVIRYASRGADARKCQNGGPVTQIAGTSAIGHADFIPADLMATVRAMHTELADHKTVTPAEFGLALNAVWDAPPASKANAA

SEQ ID NO: 9676 - protein, 577 aa, Unknown
  Description of Unknown: Integrase B9677 sequence
  cd00338,IPR011109,IPR038109,PF07508, Coil,PS51736,IPR036162,PTHR30461, IPR006119,G3DSA:3.40.50.1390,PS51737,PF00239, SM00857,G3DSA:1.10.10.2600,SSF53041
MIKKTRKLSHDEKIVEKRKQLAEKGKVAAIWTRVSSADQYKQNYSIDTQKAACREYCERNNIRIKGYFGGENESAKFAGEKFLDMIGTVGENPEYNTIVVFDFDRFSRNSIDGITYKSTLKRKGITIESVNQPIDTNNILAEQIENILIIMADIDNAMRRHKCHDGMVACIKRGELYSRPPFGYDSRKEGKRHIITINEDGKTLKKAFEWIVEEPEISQAEIIRRLEARGLNISKQKLSQCLHNSFYCGLLEHRYLNGEIIKGKQEAMISESTFYKVQDILAGNNKNYQQAEETPEFPLKMHVFCAKDNHALSGYTVKKKGLKYYKCGVKGCGTNVSAKELHSKYAEILNGLNVPESLLPIYKRVIERKFKEKENDNLISKNAIEKNLSTLKTKLKKAKMRFLTEDGIDNDDYNEVKSDLETKIANCEKELKDCSRDLSNLAEYTDVAFKIASSLGSTWGEMDFKVCQKIQNLAFPKGIKWDGEKRCYRTDGMNEFFRQIGLQRGSARGEGIKKTGTDYSMSVLVAGEGHFTGIFGDSYPQLKAVQGRRTGSFGANLAHATAPSGRFPSTNMLIVLH

SEQ ID NO: 9677 - protein, 577 aa, Unknown
  Description of Unknown: Integrase B9678 sequence
  IPR038109,IPR006119,PS51737,PF00239,G3DSA:3.40.50.1390, PTHR30461,IPR025827,SM00857,G3DSA:1.10.10.2600,SSF53041, IPR011109,PF07508,PS51736,mobidb-lite,cd00338, PF13408,Coil,IPR036162,PTHR30461:SF3
MRRPTSQIGRRSVPIGVGTMPGNTAEGTIAMPRKKIAQTKDRNSTIAAAYARFSSDRQREESIEIQLEAIRKYCEGHDLTLGPVYKDLAMSGTNDRRPDFQRCLRDAERGLFGTLVIYKQDRFARNVEDSKRNMRRLRAAGVRVVSVREGELEDTPDGFLRESIGEIFAEYYSRNLSVLVKDGMRKSAEQLRTVGVRIYGYSVDESDHFVIDPEQSFYVSEIFRLYLAGTSGNEICAWLNSEGQRTLRGNRWDVRTLSNLLGQRAYMGVYHFGDIEVEGGMPAIISKETFAAVQELRKRRQSMKRCKQVNDYVLTDKCYCLDCGRAMCGTAGTSSSGKKYTYYGCMNKGGCRKRVSSQLVEDAVIDAIVEVLQDDEAKDAIVADMLEWSAMQPQMAEEWREQIQADKKRRDRLVAAVADGLPASSVMDAMKEIEDEIAALEAKVAREEAEMSATMDAESARAFLDSFLLGSRENVEYRKLLADSFIDKVFIDKRNAVVIFNLGLADEEQGYTLEDIQGIRDDLEFARRKCAYMKTCEPADKSGVRTSAIWWAKIRSLRTLKLYSRARTYAIGLPLAA

SEQ ID NO: 9678 - protein, 576 aa, Unknown
  Description of Unknown: Integrase B9679 sequence
  IPR038109,PS00397,IPR006119,PS51737,PF00239, cd03768,G3DSA:3.40.50.1390,PTHR30461,IPR025827,SM00857, G3DSA:1.10.10.2600,SSF53041,IPR011109,PF07508,PS51736, IPR006118,PF13408,Coil,IPR036162,PTHR30461:SF3
MKKNFKMPGSGSETPIRVAIYVRVSTVYQIDKDSLPMMKQDLTSYCKYILNTDDFVIFEDAGYSGKNTDRPAYQKMMSQIRQGLFTHLLVWKIDRISRNLLDFANMYAELKDLGVTFVSKNEQFDTSTAIGEAMLKIILVFAELERNMTSERVTATMINRASNGVWNGGRIPFGYSYDKPTQVFSIDPEENKIYNFMVETYEDTQSIVHTSRRLNEAGYRSRNGNMWSPVAVWTILRNPWYKGVYRYNYYKIPGRKAIKDESEWVIVENHHPASIDPDRFDRIQATLDKNARYRNTPGRKTAQKNVHVFSGLVWCAECGSAFTASPGKLHVSGYRPSKYGCPNVRKTKTCHAKYTSDVVLGEFLLNYILNILNAQKQFAYIHSTDDLQKRLLHGSTFSSVDHVDPDGLASLLNMLEKCSGSDPVLLKRPRSKPKMDPELKRMMADQKKQQRALDRLNDLYLYSDDSISEREYLVRKQQITDRLQEINEAIGMMSQEPWMRTMNDEEFIRQASSFILTQKLADKQYIYYENLAESLDPEILKNFFVSILDSIILRDGRPETVVFRNGLSHTFTYKDS

SEQ ID NO: 9679 - protein, 576 aa, Unknown
  Description of Unknown: Integrase B9680 sequence
  PF13408,IPR011109,IPR038109,PF07508,Coil, PS51736,G3DSA:3.40.50.1390,IPR006119,IPR036162,PTHR30461, PTHR30461:SF3,PS51737,IPR025827,PF00239,SM00857, cd03768,G3DSA:1.10.10.2600,SSF53041
MLAAIYSRKSKFSEKGESVENQIKLCEEYGNYLGIKEFKIYEDEGFSGGNVERPQFQKMLRDAKNKKFDMLICYRLDRISRNVLDFSQTIEELKKNNIEFISIKEQFDTSTPMGRAMMNIAAVFAQLERETIAERIKDNMLELAKTGRWLGGTAPLGYKSEPMEYSDSNGKAKKMYKLVQVPEEIELVKLIFTLYLDNKKYSSVATHLCKNHYKGKNGGEFSKGTVEQIIGNPVYCIADEHILNYFKKQGSTMCGELNGINGLMTYNKREGGKKDNPVSEWIISVGKHKGIVSSDIWLKCVEINNQNKQKASPRSGTGNKFLLSGLIVCGCCGSGMASWSHLNKKTDLTERYYRCNLKNRAATRCSTKMLNAYKAEDYVISHLKSIDEETFIKNYKAISKDIELKNNIGTEIASLKKHIEENNSIIKGYMRKLAVEEDADIISMMKEDIKALKEDNLTTQYKINKLEATDLTIIISSHEQLEDIIDRLRNFKKFIDFCEDVESKRKLILSVVENIIWHSESEILEVNLIGSGKKLTRGAVQSRNLCFGNSSRWDYYQNTNINTNPLLINFKKNPSK

SEQ ID NO: 9680 - protein, 576 aa, Unknown
  Description of Unknown: Integrase B9681 sequence
  cd00338,PF13408,IPR011109,PS00397,PF07508, PS51736,G3DSA:3.40.50.1390,IPR006119,PTHR30461,IPR036162, PTHR30461:SF3,PS51737,IPR025827,PF00239,SM00857, IPR006118,SSF53041
VRAVVYARVSSAIQRDRETIASQLRVLPEYIARQGWTLAAPATTYVDDGRTARAGHLEARLGLAALLRDAGARMFDVVVVVDVDRLTRSEDLAERGAILGALQRAGVKIATSTGQLIDLSTSSGDLMSSLNAFFAAEWVRKHRERIKAGKDTAIARGRKPAGPTPYGLAYDRSSGAWSIDQVTGPIAVEIVTRVADGESCVAISDDLDARGVPGPRGRTTWNRASVYRIVRGRHLIGEFVANKARRQVIAVPRLIDVATFERAQEALGASRRRGLRRTRHDYLLEGLGVCGVCGAPMLIRSATPQRRGRMSPAAYVCRNRKFGRPSIRNGAAACRAPIVVCAEADAAIWSTFIAELAEPELAAAVVAERARGADDGATWAGDAAAAERHLARLEKVETVVMSRFRRGAVSEGALDAELAAIGRERAAVRAQLATAELAIARTVATRVRLEDAESALRRLREVAATAPAPLRAEVLRTFVDRGGVVFERGRLRLAMSVAFAAAPSEERRSGAQLVLVNGPGSRTVDVVPLRVRALAMLSRRACGMCGRELEHDANRRREFCSNVCKHAAWRRVRTAA

SEQ ID NO: 9681 - protein, 576 aa, Unknown
  Description of Unknown: Integrase B9682 sequence
  cd00338,PF13408,IPR011109,IPR038109,PF07508, Coil,PS51736,G3DSA:3.40.50.1390,IPR036162,IPR006119, PTHR30461,PTHR30461:SF3,PS51737,IPR025827,PF00239, SM00857,G3DSA:1.10.10.2600,SSF53041
MIAAIYSRKSKFSEKGESVENQIKMCEAYANTIGIEKFIVYEDEGFSGGNVERPQFQKMMKEAKSKKFNYLICYRLDRISRNVSDFTQTIEELKKYRIEFISIKEQFDTSSPMGRAMMNISAVFAQLERETIAERIKDNMMELSKTGRWLGGTPPLGFKSESVKYNDSNGKDKKMYKLIEVFEEMKIVKLIYNLYLEKKGFSAVANYLCKNYYNGKNGGEFSRQTVQQIITNPVYCVADSLAFEYFKNVDATIYGEPCLNGFMVYNKREGGKKDKPLNKWIFAVGEHPGVINSNDWIECQKINEHNKSKTSPRVGTGSKFLLASMITCGCCGSGMASWSHNNKKSGKMEKYYRCNLKNRASNRCNNKMLNAYKAEDLIIESIKNTNVELLIKNIELHKKEVETTDSAVIEVMRIKKEIEQNNKIRQGLIRKSAFMDDDPETIEMFKQEIFEMKKENIELESKIKAIEIDSVTLEKMNEKNISVDEIIASLTHFKTYINYVDDVEAKRELILNMVESIVWYGESETLEVNLIGSGKVLPRGTVLARNLCYGSKSRRNNYQNTSMNTNALIVSLSTKK

SEQ ID NO: 9682 - protein, 575 aa, Unknown
  Description of Unknown: Integrase B9683 sequence
  PS00397,IPR038109,IPR006119,PS51737,PF00239, cd03768,G3DSA:3.40.50.1390,PTHR30461,IPR025827,SM00857, G3DSA:1.10.10.2600,SSF53041,IPR011109,PF07508,PS51736, IPR006118,PF13408,Coil,IPR036162,PTHR30461:SF3
MNKIIDTLNTQKAAIYIRVSTHHQIDKDSLPLQREDLINYAKYALNIDNYEIFEDAGYSAKNTERPSYQYMMSKLRTGEFSHLLVWKIDRISRNLLDFATMYEELKTLGVTFVSKNEQFDTSSAIGEAMLKIILVFAELERNMTSERVSAVMLSRATNGQWNGGRVPYGYNYDKSTKQFSIHPIEGNHIKKLYDLYLETQSMLAVAKYFNEHGINTKTGNNWSPTTIGKILASRFYLGEYQYNLHKDGIGGAGVASLKPEDEWITVKDHHPAIIEIEQWDKCAEIRACNHRNSNAPKRYRRKNTHIFAGLIICGECGSTYQATIDRARTGGYRPSIYLCSRRKQYSDCQNKYMSDITLGPFILNYISNIIKANANMGKTTTPDMFKKKLLRGDVFKDVKDIAPSGLNEMYNMIVSKKFNSDPFTSAVNRDESQPDFASERELLISEKRKYLRALDRLKTLYLYNDNAMAEKDYIIENKNILDNLKRVDERLEEIEKNSSQNFTITDSEFIEKASYFIISQELSNQRYINFNSLIQHIDTNVLKNFIQSVIKKIVVWDGRIISIQFKNGIEHDFLY

SEQ ID NO: 9683 - protein, 519 aa, Unknown
  Description of Unknown: Integrase B9684 sequence
  cd00338,PF13408,IPR011109,IPR038109,PF07508, Coil,PS51736,G3DSA:3.40.50.1390,IPR006119,PTHR30461, IPR036162,PTHR30461:SF3,IPR025827,PS51737,PF00239, SM00857,G3DSA:1.10.10.2600,SSF53041
MKKAAVPSCSPRTAVAYARYSSAGQRDVSIDQQLADIRAFAKREGFTIVHEYADHARSGFKNTSARTAFQTMMSAAESGAFDTLIVWKVDRFGRNREESAVFKGRLRRHGVKVLYAMEPIPEGSAGVLLEGMLEATAEWYSRTLSENVTRGMTDNAMRCLYNGTRILGYTRGADGRYAIQPEEAAVVRNIFDLYRSGYSAARICRQLNDQGLRTSHGKPFSEEGLLRIISNERYTGVYIWGSIRVPDGMPAIVEKSAFEEAQRMKKKTARHVEQGAVDYLLTGKAFCGHCGAAMIGDSGTSKDGTRHYYYTCQARKARKGCAKKSVTKDYLESTVISFVLDHVLSDDHIESLADAVMALQEEEMKSSPLAAMEAEYAETKKKIDNINDAIAAGIWNSSTSARLKVLEDAAETLRVSVETLRYSQSQLLSRDRVLFFLRRFTKGNRNDPLLRRSIIETFINAVYVFDDHLDLVINNCEGNQRFPLESLPDPGPSCSDILASGVPAVTHPNTQVTIFRIAV

SEQ ID NO: 9684 - protein, 575 aa, Unknown
  Description of Unknown: Integrase B9685 sequence
  cd00338,PF13408,IPR011109,IPR038109,PF07508, Coil,PS51736,IPR036162,PTHR30461,IPR006119, G3DSA:3.40.50.1390,PTHR30461:SF3,PS51737,IPR025827,PF00239, SM00857,G3DSA:1.10.10.2600,SSF53041
MFNIQGKKAVALYRVSTERQTSKEDKDIPAQRELVHKFIEQEELILIKEFVEGGVSGFKTKISERDAIIEIKNMADNKEFDVLVVYKSDRIGRTTDESPLVVRYLNNKGVRIFTTEGSELKTETQLDKLMTYLSFWQNETESIKISQRATDYHIISTEKGKYRGGGEKALPFGYTVIPEGDVNLKGKKIGKVVIKEDEAEIVKLIYKLSIENNMGGRAIAAYLNENGYRKYARNGNGWNYTTINRILNNVFYKGYMHMHSKLKNQDFLSEKIEELVIIPEEIWEKNQQVLASRKKESSKETKGSSKSRVLLSGLVYCGHCGSKMHVWANYKYKKDEYGQTIAKVEDYYRCKSKYVKNLNKCDGQTSYFSNRIDRIVERETLDFMNELSKRKLTEKFKQDLLDDVQTLTKQKKDIQKSIEEKQKDLLELKKNIPKAMRNEYILSLSELKEAKDLIENELTELFNQDNIVDKKLKEAKAALKEYAIIDESMISFVDRYNKADFITKKAILNSVIDRVTIYKTNIDIKYKVAIIVYKENSIENSGGEMYTDGSPYEYKTQPQNFIINVTRNVKFSIAS

SEQ ID NO: 9685 - protein, 574 aa, Unknown
  Description of Unknown: Integrase B9686 sequence
  cd00338,PF13408,IPR011109,PF07508,Coil, PS51736,G3DSA:3.40.50.1390,PTHR30461,IPR006119,IPR036162, PS51737,IPR025827,PF00239,SM00857,SSF53041
MPSVQKTGKGNTPRPWVIYTRVSTDDQAQTGTSLETQEAGCRSLAKAYGHPIAEVICDDGYSAATLKGGRRKGLEALNKRPGAKRLLAMIEAGSIGGVIIHKLNRLVRNARQLLELIELMEERGVAFASVNDRIDTGSAMGRMFLTLLAAIDQLESEQISERVVAVLQYMRSQGRWAGGNVPAGMMVEVRGKDRYLVPDPTWGPIVGKAWPMVIAGASLRKVADWFTTQEVPLKSGKRWSMPAVSRVLSRRLYIGALVDQETFDRAQAALASRISPEKRKREADEAGETEERTKAVLVSGRVWRLQDIARCARCGSAMIGVTARGHGGEYAYLRCLGKVRRGREHCGGRDLPAQPWEDAVVERLVQYVTGSNDLADRIAAIVAQHQAEAAPLRATRDAASLERDRLREQLGKAMDMILAGGSVARAFAPKVQELQDAIEALDRRIATADGRLMAAELQADHVAAIAEALREEITHLPEQPLEVQKRNLAQVVEHVELASGMPGRIVLVLPDLLGEPPPIPGHQGSEAAAAAGGAQVRSKLAKWLRRGNAERTKESISIPLVVEEFRQPRKGGGI

SEQ ID NO: 9686 - protein, 574 aa, Unknown
  Description of Unknown: Integrase B9687 sequence
  cd00338,PF13408,IPR011109,IPR038109, PF07508,Coil,PS51736,G3DSA:3.40.50.1390, IPR006119,PTHR30461,IPR036162,PTHR30461:SF3, PS51737,IPR025827,PF00239,SM00857,G3DSA:1.10.10.2600,SSF53041
MNVYRTREILKTCSIFDLKLKVAFYARVSTESEDQQVSIHHQDEYYRNFIAQNKNWVFVGAYIDNGISGIRTEKRDEFQRMMADAKTGKIDMIVTKEITRFARNTLDSIKYTRELLMYGVCVWFQNDNINTIDEDSELRLTIMSGIAQDESRKLSNRIKFGHAQSIKNGVVLGARIYGYIKKDGKLTIDPKTAPMVKEIFEKYSTGEWSTSTIEKYLYKKGYRNYKGGKLSRDNIKKIIKNPKYKGYYCGGKVKVVDMFTKKQEFLPEDEWTMYKDDGNHVPQIVDESVWNKANVIMQTRSDAIKSHRTSFKQNNLFTGYIFCGDDGAPYWMKQRTTRGREDVRWVCSYRIKNGAQSCNSFGIHEKELKIMLADLINKSGDIQAAIERYISLVEKNIDFSNDGAEINRLKNMILQLEKKKDKLLDLNLDGIITNSEYLEKNEKFKNEIQDISNKLSELESKEEANKDSHLKLKEIGKILNDLQGIGPEDITKAVLGEFLDKIIVNPKRPQECEILFFLKTGDVKKKSIIERDEQSCSEYFFLNKFSERHAVFYRKINYVDGCEKEFNYTYAFAI

SEQ ID NO: 9687 - protein, 574 aa, Unknown
  Description of Unknown: Integrase B9688 sequence
  PF13408,IPR011109,IPR038109,PF07508,Coil, PS51736,IPR036162,G3DSA:3.40.50.1390,PTHR30461,IPR006119, PTHR30461:SF3,IPR025827,PS51737,PF00239,SM00857, cd03768,G3DSA:1.10.10.2600,SSF53041
MKDNKAGFDGRITALYTRVSTGYQIDKDSLPFQRKELKNYCVHVLHLSPDEIEVFEDAGKSGKNTDRPAFQRMMKKVKAGKVARVVVYKIDRISRNLVDFSLMYDDFKENDATFISLNEQFDTSSAIGEAVLKIILVFAELERKLTSERVTGVMIGRAQECKWNGARVPFGWAWDSESEKPVHDEVESQIVRLMYNMYEETKSTSKIRDYLNENGIETKRGGLWTTKTVGDILHNPINRGDYRYNYRHSARGKKKPDEEVVYIPDVFPPIVSGEQFDRVAAQMKKNYESRHLNGFSHSKKHIHVFAGLLRCVECGAYFQVSNYDKPRLNGFRPTGYRCYTRTQNRKCDARGASDVVVGAFVFNLISNIVAVSKDRKKYAAGGIEEIEARLLTGKAFSDVARIDGGSLNDIYDALRGVSSSSSSYIPAPLPQSSSNGASIEKKQKEAAKITRALDRLKKAYLFDDDAMDEREYMTTRAELEENLTRLNNEIADAQDEAFVNVSELSFVTSASEFLLSYKVQSGEEIIYSDFAPVVGDEALRKFVTLLIARIDIKQARVACVAFQNGLEIRFIYKA

SEQ ID NO: 9688 - protein, 574 aa, Unknown
  Description of Unknown: Integrase B9689 sequence
  cd00338,PF13408,IPR011109,IPR038109,PF07508, Coil,PS51736,G3DSA:3.40.50.1390,IPR006119,IPR036162, PTHR30461,PTHR30461:SF3,IPR025827,PS51737,PF00239, SM00857,G3DSA:1.10.10.2600,SSF53041
MGKKQKTNGGDAVIYARYSSHNQRDVSIEQQVEACRKHAAELGLTVTATYEDRAISGKTDKRPSFQRMMRDAEQHKFAYVLAWKSNRIGRNMMQALVNESRLVDCGVKVFYAEEDFDDNAAGRFALRSMMNVNQFYIENMAEDVKRGLYDNAKKGLVNGSLPLGYKRGADGKPEIDEPKAAIVREIYTRVAAGELFASIAADLNARGIRTARGREWNKGSFHVLCHNDRYRGIYMYGDIRIPGGMPRIISDELFYDAQEAYGMKKDNRYGRARHGAENYLLTGKLYCGHCGSYMVGISGTSKTGEMHYYYACQKHRLEHTCEKKAIRRDVIENAVARVIMMYCLDDETIDFIVDSTIAYFKQKDHELHIEAMENELAAVQQAISNLMKAIEAGIITPTTRTRLLDLEEQQAKLSAKINTAKAERVEIDRDDLIAGLQLFRTGDIKNKKFLAKLFNTFLLAVYLYDDNRLKIVFSFTGNHNNIEIPLELDNDCPDSESGPYETEVRMSHLECRKNSGTPPSSGGAEKGDGCSGGRFVRTAPLPPHSKCTVRTLGSNVTIQMVGSVFVLYCEIPTR

SEQ ID NO: 9689 - protein, 574 aa, Unknown
  Description of Unknown: Integrase B9690 sequence
  IPR038109,PS00397,IPR006119,PS51737,PF00239,G3DSA:3.40.50.1390 ,PTHR30461,IPR025827,SM00857,G3DSA:1.10.10.2600, SSF53041,IPR011109,PF07508,PS51736,IPR006118, cd00338,PF13408,Coil,IPR036162,PTHR30461:SF3
MASLYKEEAGTPLLKVAIYIRVSTSHQIDRDSIPMQRKDLAAYSELILGTSNYVYFEDAGYSGKNTERPAYKEMMERVRKHEFSHVLVWKIDRISRNLLDFSEMYLELQKLRVVFVSKSEQFDTSTAVGEAMLKIILVFAELERKMTSERVRATMISKASSGEWNGGKIPYGYSYDKETATFSIVEEEAAVCRILRDDYLKFHSIIHSTKLLNDSGYKSRSGKPWSTTTCWKILSSPFYAGIYRYNRYRGTEHRTINPSGEWVLVPDHHPAIFTVEEHEKMAAFLADNSRRMNTLDTYNYKRNTYVFSGLLFCDSCGSRMLPQTGRKHKDGYNPATYYCAKTKKTRSCDNRGVSDSVVGEFVLNYILNMLNAKKSFSFIKSPEALEERLLSGSSFSEIVRLEESGLHEFYNLLSNYSSDDSFVFSMKKPKKRKASVDPEVSSLRKERERQERALKRLESLYLYSDNPLSEREFILRSAEINDKIEAVNKKLGLISTEASSVLSDEDFVRQASHILVSSLLRDKEYVFYRNIATNTSPEVLHDYFASIIDSVRVYKGRVMSIVFKNGLTHKFLYE

SEQ ID NO: 9690 - protein, 573 aa, Unknown
  Description of Unknown: Integrase B9691 sequence
  cd00338,PF13408,IPR011109,IPR038109,PF07508, Coil,PS51736,IPR036162,IPR006119,PTHR30461, G3DSA:3.40.50.1390,PTHR30461:SF3,IPR025827,PS51737,PF00239, SM00857,G3DSA:1.10.10.2600,SSF53041
MAKVKLPDKPRVAIYTRVSTLHQIDKDSLPMQRQDLINYARLILNTEDYVVYEDAGYSGKNTDRPKFQEMMQQVRLGMFTHILVWKIDRISRNLLDFATMYSELKQLGVVFVSKNEQFDTSSAMGEAMLKIILIFAELERNMTSERVTAAMLSRAANGQWNGGRVPLGYDYDPETKTFTINESEAAVVKIIHDKYEQERSLVSLARYLNGHGYRTRTGCTYSPSTLLIILRNVFYCGDYRYNVLKDGDRQKRKKESEWITVKDHHPAIISREQKDEIARILKENRRLECERRGIYSKKKNVHVFGGLVICGNCGHAMTSTIRPADQDGIRWSVYVCPTKRRSEYLCKGRATSEVVLGEFVFNYILNMLNVQKNFDSINSVEDMEKMLLSGSTFRDVDGIERAGLDDLYNMLASGLTEKAPFDSSVEVRKKPVVSDIELENLNTEKTKIERAAERLQSLYLYSDDSISQKDYIIQREKLMSQLAEVNEQIGMVMSNADEKDVSDEEFVHAASKFILTQKLEGRTYIYYKRLATTVSREVLRSFVMSIIENITIYDGRVQTIVFKNGLSHTFILK

SEQ ID NO: 9691 - protein, 573 aa, Unknown
  Description of Unknown: Integrase B9692 sequence
  IPR038109,PS00397,IPR006119,PS51737,PF00239, cd03768,G3DSA:3.40.50.1390,PTHR30461,IPR025827,SM00857, G3DSA:1.10.10.2600,SSF53041,IPR011109,PF07508,PS51736, IPR006118,PF13408,Coil,IPR036162,PTHR30461:SF3
MAYNAQNKTGARVAIYVRVSTLHQIDRDSLPMQKQDLLAYAKLMLNTDDCVIFEDAGYSGKNTDRPKFQEMMSQMRAGAFTHLLVWKIDRISRNLLDFATMYNELKALGVTFVSKNEQFDTSTAMGEAMLKIILVFAELERNMTSERVTATMISRANNGLWNGGRIPYGYDYDYETHEFSVNEEESKVVILMHDMYEQERSLVRVVRELNERGYRSRAGNLWSPVSLLIILRNVFYCGDYRYNMLKEGDRQKVKDESEWVTVENHHVAIIPKDQKERIMATLDSNSKLCKQRNIYKSSKHTHVFGGLIYCGSCGKPLGSTPGNLTRDGWHYSKYTCPTRRKSVTLCTGKSTSDPIIGEFVFNYILNMLNVQNDFDKISSPEELEKLLLIGDTFAYIDHIESNGLNDLFNVLSSGTVKGAVFGKGASLPTKKATVEPEVARLRNEKQKTERALDRLRSLYLYADEAMSEAEYMIQKNKLEETLEDINDQIGMMNTDSWQQSVSDEEFIQRASEFIIAQKLSGRKYVNYKRLAMSVDSEVLKNFVVSIIDSITIQDGLVSNIVFKNGLCHTFIFR

SEQ ID NO: 9692 - protein, 573 aa, Unknown
  Description of Unknown: Integrase B9693 sequence
  cd00338,IPR011109,IPR038109,PF07508,Coil, PS51736,IPR036162,PTHR30461,IPR006119,G3DSA:3.40.50.1390, PTHR30461:SF3,PS51737,PF00239,SM00857,G3DSA:1.10.10.2600, SSF53041
MTQRAALYARFSSDLQKDRSIDDQLALCRVHAQREKLKVVATFADRAKSGATLFDRQQLWELMQAAKRKEFDVLVVEALDRLSRDQEDLPGIYKRLEFAGVKIRTCNEGETTKLHIGIRGLVSSLFLSDLGAKVRRGHAGRVREGKFPGAVTYGYRAITGKPGEREIDPEQAKVVIRIFTEYADGRSPRKIAADLTRNGIPTPADAAAWNHQTFIGGRYKRGIIGNPLYVGKIAWNTHTTIINPDTGKKAKRAAPAEDHITVDAPQLRIIPQELWDAANAVRKNRGAAKFGPGGKLAGRVTSNKEHMLSGLLRCECGSHMRIANTSRSGGSRVACAAAHQHQTCDHSKTYDLNTLQTEILACMREQLTDPKRIQIAVRAFHDEWATQKRKVTGNVTTMKKRLADIGTATNRLVDALEKGTMSTDTIVERLNNLETERVALAERLRVVEAQNGDNVIELHPRTLQAYCEAIDKLHLSFANDQDHAANRSAFRNIIDSIIVHQTAKRAPYEFTTYHRVEALMGMELFPKTRTAQEVLKDQGVVCSELGNPENPGLPLSQQQKGRIIAFGRWRAAA

SEQ ID NO: 9693 - protein, 573 aa, Unknown
  Description of Unknown: Integrase B9694 sequence
  cd00338,PF13408,IPR011109,IPR038109,PF07508, Coil,PS51736,G3DSA:3.40.50.1390,IPR006119,IPR036162, PTHR30461,PTHR30461:SF3,IPR025827,PS51737,PF00239, SM00857,G3DSA:1.10.10.2600,SSF53041
MANGLIKNHNQNLQLKRVAALYRVSTKKQLDENDIPMQERACRNFVAQRSDWKLVKEYYERGVSGFKVSANKRDAIQQAKEDAEKKIFDVLLVFMFDRLGRRDDETPFVVEWFINQGIEVWSVIEGQQKIEQHTDRLINYLRFWQSSGESRKTSERVNEKHRQMVEDGIFRGGGIPYGYKTVESGKVNKRKKPLLKLVIDEEEAEVVKLIYSLALNEGYGQLRIAKYLNEQGILTRNEKKWGAPTINVILKNPIYKGVMKYEQGEKSVYSKPIPELQIINETSWDKVQDLRKHKNPNNKEKHNSTPISTKGKLLFIGMARCGVCGSRLTSTYFTNKYKSKTTGEVVTYSYSASYRCSGKLQGKEKCTGQATFSAKKIEGIVLKQLDIYLDRLAQVDLTSEIQRLKQKHANKDEQQLKEIHRKLEVLYEELAVLNNEVPKAIMGKSAFNPELLSNLIKQKEVEISENNQKLEELQERVKSKNIRETELIELQQHIPIWKDVFNSASVERKKVMLSYLIDEIYVSKKEVNVKLKIDIEDFIKSTCETSYSGRAPYTTFTGIKSLIEEQLIFALGS

SEQ ID NO: 9694 - protein, 572 aa, Unknown
  Description of Unknown: Integrase B9695 sequence
  cd00338,PF13408,IPR011109,IPR038109,PF07508, Coil,IPR036162,PTHR30461,IPR006119,G3DSA:3.40.50.1390, PS51737,IPR025827,PF00239,SM00857,G3DSA:1.10.10.2600, SSF53041
MAYRKITDIKDTIGMRAVFYARVSTAEEEQLNAIELQIEENRGCIKDHGWKLVGEYIDRSKSGTMVKGRDDYQRLYEDLYEDLFDIVVIKDQERLQRNTLDWYLFINRVVQTGKLLFMYMDGKFYSPDDALITGVRAIIAEEFSRNLSKKLHNYHDHRIEKARQGQEIALQGSGNVYGWDKKDGKYYINPEQAKVRRLMCEGIMARKGSTLIAKELNEAGYRNTVGKLWKPMDIPKFVYDCKNVGTMIINKERHDFESKQTIKLPKEEWVYVENALPPIVTQEEWDLICKIHEERVIATGSDRRGKKTSGYSFSGKLVCGICGAPYWRKQRVSKDEYWVCSTKQTKGRRTRKRDSTMGKAGEINPLGCDNENISYNSLMEIMGVVSERLQANTDTIKHDMINWLTKLRKQLLEANGGHTEADLQRELSRKSKLLDAYLDGILNKQEYQKKAEELDERIIQLKAETEKNKANSGDIAEIDKVLANIDEEVSRYVDGNEKLKVEYLLEHLEQVQIFPDKVIVIVPILSEGIVVEKAQYVSREKCSKIHTESMIHYLEDYMYCTRKLGLYVQLVA

SEQ ID NO: 9695 - protein, 572 aa, Unknown
  Description of Unknown: Integrase B9696 sequence
  cd00338,PF13408,IPR011109,IPR038109,PF07508, Coil,IPR036162,IPR006119,PTHR30461,G3DSA:3.40.50.1390, IPR025827,PS51737,PF00239,SM00857,G3DSA:1.10.10.2600, SSF53041
MAYRKITDIRDTIGMRAVFYARVSTAEEEQLNAIELQIEENRGCIKDHGWKLVGEYIDRSKSGTMVKGRDDYQRLYEDLYEDLFDIVVIKDQERLQRNTLDWYLFINRVVQTGKLLFMYMDGKFYSPDDALITGVRAIIAEEFSRNLSKKLHNYHDHRIEKARQGQEIALQGSGNVYGWDKKDGKYYINPEQAKVRRLMCEGIMARKGSTLIAKELNDAGYRNTVGKPWKPMDIPKFVYDCKNVGTMIINKERHDFESKQTIKLPKEEWVYVENALPPIVTQEEWDLICKIHEERVIATGSDRRGKKTSGYSFSGKLVCGICGAPYWRKQRVSKDEYWVCSTKQTKGRRTRKRDSTMGKAGEINPLGCDNENISYNSLMEIMEVVSERLQANTDTIKQDMINWLTKLRKQLLEANGGHTEADLQRELSRKSKLLDAYLDGILNKQEYQTKAEELDERIIQLKAETEKNKANSGDIAEIDKVLANIDEEVSRYVDGNEKLKVEYLLEHLEQVQIFPDKVIVIVPILSEGIVVEKTQYVSREKCSEIHTESMIHYLEDYMYCTRKLGLYVQLVA

SEQ ID NO: 9696 - protein, 572 aa, Unknown
  Description of Unknown: Integrase B9697 sequence
  cd00338,IPR011109,IPR038109,PF07508,Coil, PS51736,IPR036162,IPR006119,G3DSA:3.40.50.1390,PTHR30461, PTHR30461:SF3,PS51737,PF00239,SM00857,G3DSA:1.10.10.2600, SSF53041
MNNYIASLDRNRPRNIAFYGRVSTEHEAQLSALQNQMQWYDDQLKFHPNWNLVEKYIDEGITGTQAKKRPGFLRMIEDSKKGRFDLIVTREVCRFARNTVDTLVYTRELKSKYNIEVYFVDDNIWTMDGDGELRLTLMATLAQEESRKTSDRVKAGQKISRENGSLYGNGNILGYDRVGNTYVINEEQAETVRMIYDMYLDGLGSMKIAKSLSVQQRKNASGDIKWSAERVMRILKKSTYTGVLAYGQSHSNNYLEQKRINNLDRDSYMYQKVNIPVIIPQNKWDDVQKIIARRTKSVGDKLSGKKDVKEFWSKKLLCNCGSSFRRNKWRTNKTGEAVYGYQCQRQLNYGSKQFREKNGLDTDGYCGIRMVADWKLDMMAKMVIEHIWKNKGESVILALKMISENYEEDVKPNKKNIKETELKIEKLQKRLQNLIEMRADGEISKEEFAESKNTITEQISILNSELTIDEVESDEPESIEKKIEVIKQAMNEVIDFSQPKLPKYIIDKFISKVLVLDNNKFRWYINLGNDYDKNSDIYLDTQVEGRKNNYSAQILSNDDSLSSVHSSTGSYR

SEQ ID NO: 9697 - protein, 572 aa, Unknown
  Description of Unknown: Integrase B9698 sequence
  cd00338,PF13408,IPR011109,IPR038109,PF07508, Coil,IPR036162,IPR006119,G3DSA:3.40.50.1390,PTHR30461, IPR025827,PS51737,PF00239,SM00857,G3DSA:1.10.10.2600, SSF53041
MAYRKITDIKDTIGMRAVFYARVSTAEEEQLNAIELQIEENRGCIKDHGWKLVGEYIDRSKSGTMVKGRDDYQRLYEDLYEDLFDIVVIKDQERLQRNTLDWYLFINRVVQTGKLLFMYMDGKFYSPDDALITGVRAIIAEEFSRNLSKKLHNYHDHRIEKARQGQEIALQGSGNVYGWDKKDGKYYINPEQAKVRRLMCEGIMARKGSTLIAKELNDAGYRNTVGKPWKPMDIPKFVYDCKNVGTMIINKERHDFESKQTIKLPKEEWVYVENALPPIVTQEEWDLICKIHEERVIATGSDRRGKKTSGYSFSGKLVCGICGAPYWRKQRVSKDEYWVCSTKQTKGRRTRKRDSTMGKAGEINPLGCDNENISYNSLMEIMGVVSERLQANTDTIKHDMINWLTKLRKQLLEANGGHTEADLQRELSRKSKLLDAYLDGILNKQEYQKKAEELDERIIQLKAETEKNKANSGDIAEIDKVLANIDEEVSRYVDGNEKLKVEYLLEHLEQVQIFPDKVIVIVPILSEGIVVEKTQYVSREKCSKIHTESMIHYLEDYMYCTRKLGLYVQLVA

SEQ ID NO: 9698 - protein, 572 aa, Unknown
  Description of Unknown: Integrase B9699 sequence
  cd00338,PF13408,IPR011109,IPR038109,PF07508, Coil,G3DSA:3.40.50.1390,IPR036162,PTHR30461,IPR006119, IPR025827,PS51737,PF00239,SM00857,G3DSA:1.10.10.2600, SSF53041
MAYRKITDIKDTIGMRAVFYARVSTAEEEQLNAIELQIEENRGCIKDHGWKLVGEYIDRSKSGTMVKGRDDYQRLYEDLYEDLFDIVVIKDQERLQRNTLDWYLFINRVVQTGKLLFMYMDGKFYSPDDALITGVRAIIAEEFSRNLSKKLHNYHDHRIEKARQGQEIALQGSGNVYGWDKKDGKYYINPEQAKVRRLMCEGIMARKGSTLIAKELNDAGYRNTVGKPWKPMDIPKFVYDCKNVGTMIINKERHDFESKQTIKLPKEEWVYVENALPPIVTQEEWDLICKIHEERVIATGSDRRGKKTSGYSFSGKLVCGICGAPYWRKQRVSKDEYWVCSTKQTKGRRTRKRDSTMGKAGEINPLGCDNENISYNSLMEIMGVVSERLQANTDTIKQDMINWLTKLRKQLLEANGGHTKADLQREISRKSKLLDAYLDGILNKQEYQKKAEELDERIIQLKAETEKNKANSGDIAEIDKVLANIDEEVARYIDGNEKLKVEYLLEHLEQVQIFPDKVIVIVPILSEGIVVEKTQYVSREKCSKIHTESMIHYLEDYMYCTRKLGLYVQLVA

SEQ ID NO: 9699 - protein, 572 aa, Unknown
  Description of Unknown: Integrase B9700 sequence
  IPR038109,IPR006119,PS51737,PF00239,G3DSA:3.40.50.1390, PTHR30461,IPR025827,SM00857,G3DSA:1.10.10.2600,SSF53041, IPR011109,PF07508,PS51736,mobidb-lite,cd00338, PF13408,Coil,IPR036162,PTHR30461:SF3
MARKTTPTAKGLAATYSRVSDPNDRKEASLETQEAAQVALLESRGYVVPPEYRFREKFTGMESIYDRPVLGRLRDLIEAGTIRAMASYDTDRLARDSRHLITVVAENEKCGAETLFVKCDHAAKGRIGELILYMKGFASALEWDAILDRTTRGRQRILDRGQFVGGGVVKYGYVWCKEERRRTANPETAGHVRRIFAAVADGMSLQALAAALDREGIPTPYAYAGRAGADSAWWPTCLRRLIRDRTYLGIATSGKDEPSPRGGRTAGGRARRRPRPESERTVLADGRTEALVDRETFDRANRAMAAGNTRRGKPAVEERHLLSGVVYCGACGARMTPTSFLDRRPGATHKRRRSYRCFSYRLKDAPRCNRVCGADKLEAAAWAEIRVKVLEPGWLEREAARVAADDGADRYRADLAAAEARRARIGEDVRRLLDAQLANTSRLMGEALEDKLRTLDAQAEDLDRHVEDLRGRIAAAGGRGRLIEGFMAAVGRVRDLAREGRLDAAQRRMIVDLLGARVIAPATPGDRVRVELPFDTRSATRAHSSCRMSPSGTTRDGVIVLESQAEASMAAV

SEQ ID NO: 9700 - protein, 572 aa, Unknown
  Description of Unknown: Integrase B9701 sequence
  PS00397,IPR038109,IPR006119,PS51737,PF00239,G3DSA:3.40.50.1390 ,PTHR30461,IPR025827,SM00857,G3DSA:1.10.10.2600, SSF53041,IPR011109,PF07508,PS51736,IPR006118, cd00338,PF13408,Coil,IPR036162,PTHR30461:SF3
MASRIAEKLAAKKAAIYIRVSTHWQVDKDSLKVQRRELIAYVTLVLGITDYVVFEDPGYSAKNTDRPEYQAMMDRIRTGEFTHLVVWKIDRISRNLIDFAAMHDELQSLGVTFVSKNEQFDTSSAIGEAMMRIILIFAELERKTTAERVTAVMLSRASDGQWNGGRVPFGYSWSKETKTFSIVPEEAKAIRRMAELYEQYQSLLYVAKYLNDAGIVTKTGGQWTPTTVRTILTNPWYIGQYVYNVHSDGKGIEKRDSDEWITVENHHEPILNEDVFCRMRFLLTRNKRGGVPSHKTYVRKNIHIFAGLLRCGQCGSNMTANLDRRRANGFRPSQYACGRRRRKGTSCTNKYISDTTLGPFVLNYVANIIRASKNSSEATTPEVLERKLLRGEAFEDVASVSTDALGQLLDAFRSAGDAVEYRPQIAFSGDDNSIHEIDTLRARRRKLDNALARLNALYLYDDEAMPEKDFVMQRGQITKQLEEVNARIEELQNQESSEELGDDFIGKASYYIMANKLIEDRYIDYEKYIRAIDPSIPRSFLQQIIDHIVVNDGRVTSITFKNGATHTFTYKT

SEQ ID NO: 9701 - protein, 438 aa, Unknown
  Description of Unknown: Integrase B9702 sequence
  IPR038109,IPR006119,PS51737,PF00239,G3DSA:3.40.50.1390, PTHR30461,IPR025827,SM00857,G3DSA:1.10.10.2600,SSF53041, IPR011109,PF07508,PS51736,mobidb-lite,cd00338, PF13408,Coil,IPR036162,PTHR30461:SF3
MERIITRVPVQNSQALRLTKVAGYARVSSDKDAMLHSLAAQVEYYQKLILENSEWMYAGMYADEALTGTKRNRPAFQRMLCDCREGKIDRIITKSISRFARNTLDLLDAVRELRAMDVDVYFEEQNIHTTDGDGELLLTILSSFAQEESLSASENQKWRIQKNYREGKPVTTIWIYGYRCHKEIYTVIPEEADVVQMIFTDYLSGLGKNAIMRKLTALNIPTRTGGRWTETSVMQMLRNEKYAGHLLLQKVFITDHITKQTKQNRGVLPKYMVKDHHEAIIDADIFEAVQREIAIRSSRTKGKQGNNASVFTGMIRCLRCGSHFHRKVANGGSKYARQTWACPTYINRGKHFCNAKRIPEDILIVQCCEVLGLPAFDEDAFRKTVAEILVPADGQLLFKLRNGTEKHTIWQHPSRSESWTDEKKAEARVAAGKRNAHA

SEQ ID NO: 9702 - protein, 572 aa, Unknown
  Description of Unknown: Integrase B9703 sequence
  cd00338,IPR011109,PF07508,Coil,G3DSA:3.40.50.1390, IPR006119,IPR036162,PTHR30461,PTHR30461:SF3,PS51737, PF00239,SM00857,SSF53041
MSVIGVLIRNSTAKQVGNYRSEAQYDLGPRIEQRGHTIRYYDEQGTSGSDLTKRKVAMQMLDDMKAGVIQGIAAFDFKRLTRDEFGVDGGTIARRIVEAHGQFHTWDREYNLRLDDDLMQFQFQCFIAGLDWRNIRNTLWSGTFKKLEREPHYMKTPLGYVNVADDRDKKHVAKNPEHQHVIDALARLFDECDSLGEICRRLNAEGPARPAFRGRGGESTRWMVYGLRYILRNTIYTGTFRFGVHTRQRSTVWDKFALDASGAPRDFEQFRPDLAYWEPARVRRWRRKFDKPANTRTMKSGNKQALPGVLECETCGSRMIGFGAGTYACSAKGVGRGTDGRPCRRPQKLREFVALRLLREELPNVLADAQGLAESARANLLEHSAPSAAKQRLAFLEERVAYISQQMLERAELQQATALLDRITQAQLEIATLKDQVLDEDEARLNDEEVAAVCDLLLSNPIALIDGMSPDRQGRVYSMLFANVRIETRGFGGGRQWRLRSYTARLVDEPRVTPEAPWARCPHPRTKYPDGERPVLIFSVGVPGRGATDISARGYVDYLPSLVELAGALSLG

SEQ ID NO: 9703 - protein, 570 aa, Unknown
  Description of Unknown: Integrase B9704 sequence
  cd00338,PF13408,IPR011109,IPR038109, PF07508,Coil,PS51736,G3DSA:3.40.50.1390, PTHR30461,IPR006119,IPR036162,PTHR30461:SF3, IPR025827,PS51737,PF00239,SM00857,G3DSA:1.10.10.2600,SSF53041
MNIYYVREKLRNCSIYDIELNVAYYARVSTEKVEQQASIKHQEEHFEDLIHSNNRWKFAGSYIDDGISGIHADKREEFQRMLRDAKLGKIDMIITKEISRFARNTLDSIQYTRELLSYGVCVWFQNDGINTIDDDSEFRLTIMAGVAQDEIRKLSSRVKFGHAQSIKNGVVLGHRMYGYSNNQGKLELVPEEADMVRMIFQDYASGISTPRIEKKLWDMGYRSFKGGKINRDVIKNIIRNPKYKGYYCGGKVKVVDMFTKKQEFLPQSEWIMFKDDGSRVPQIIDETTWEKANAYLRERGEAIKSRRTSFKNENIFTGKLFCANDGAPYWMKQHYIRGKEDVRWVCSYKIKNGAASCDSFGLAESELKEIIAELINKSSENIDSILEEYFEILQSSIKNIPDNKNEISRLEKQIDLLKQKREKILEYNLDGKISDDEFISRNKEYVKQIKQIESHILEIQNAKSPEPVEIQLSAIKEQLEKFKGVNPKDINRQIVNELFEKITVEPLAVTCATLTFQLRSGSLEKWGFPLRCSDDMIFTLHSEQHKIFSRKTCIKTQDMVFFKYKYLLAL

SEQ ID NO: 9704 - protein, 570 aa, Unknown
  Description of Unknown: Integrase B9705 sequence
  cd00338,PF13408,IPR011109,IPR038109,PF07508, Coil,PS51736,G3DSA:3.40.50.1390,IPR036162,IPR006119, PTHR30461,PTHR30461:SF3,PS51737,IPR025827,PF00239, SM00857,G3DSA:1.10.10.2600,SSF53041
MNIYYVREKLRNCSIYDIELNVAYYARVSTEKVEQQASIKHQEEHFEDLIHSNNRWKFAGSYIDDGISGIHADKREEFQRMLRDAKLGKIDMIITKEISRFARNTLDSIQYTRELLSYGVCVWFQNDGINTIDDDSEFRLTIMAGVAQDEIRKLSSRVKFGHAQSIKNGVVLGHRMYGYSNNQGKLELIPEEADMVRMVFRDYASGMSTPRIEKKLWNMGYRSFKGGKISRDVIKNIIRNPKYKGYYCGGKVKVVDMFTKKQEFLPQSEWIMFKDDGSRVPQIIDETTWKKANAYLRERGEAIKSRRTSFKNENIFTGKLFCANDGAPYWMKQHYIRGKEDVRWVCSYKIKNGAASCDSFGLAESELKEIIAELINKSSENIDSILEEYFEILQSSIKNIPDNKNEISRLEKQIDLLKQKREKILEYNLDGKISDDEFISRNKEYVKQIKQIESHILEIQNTKSPEPVEIQLSAIKEQLEKFKGVTPQDINRQIVNELFEKITVEPLAVTCATLTFQLRSGSLEKWGFPLRRSDDMILTLHPEQHKIFSRKTCIKTQDMVFFKYKYLLAL

SEQ ID NO: 9705 - protein, 570 aa, Unknown
  Description of Unknown: Integrase B9706 sequence
  cd00338,IPR011109,PF07508,Coil,PS51736, G3DSA:3.40.50.1390,IPR036162,IPR006119,PTHR30461,PF00239, SM00857,SSF53041
MKLQPFVISYARYSSTAQREGTSLERQAEYAQRWADAHGMTLNTTLRDQGISAFKGKHADKGELGGFLRDVEDGKVPRGSVLVVEGLDRLSREKALKAMGQFAAIIDKGITIVTAKDGMTYNEQTIRANPGNLFMSLGVMIRANEESETKADRGRSAIRLRAKAWIAGDRTLRTIKGGFPPAWLRRKGDTFELHPDHAHATRTAIDLYLAGAGMVGVAAALTERGLMLTPRGSHVAQVERLLRNQALIGEHVVEVREPDKPVERYVLEGYYPPLLKVAQWHELQDAIKARALPTFSTKGTIPHVLTGFGATVCGYCGCAVIGQVLTRRPGTQIHDEAGRLRDPYRRLRCAHVSRSDVTCLVGGHSVTAAPFERAVMEFCSDLMNLRGLHGGSGDAAARVALDAAKERAAKLTQQLDKLTDLILEADDKRTVATFAKRAAALEADKAVAVEAVDAAQRALARVSRSDLNSVEAKFRKLTKGVIAQEVEARQQARQLIADNFEQIVLFSKGIRPSETPAGVAHLVLRARGGVERILQIDAEGKWDAMSETYLPSGKAAAKQAPKRARKTTAA

SEQ ID NO: 9706 - protein, 541 aa, Unknown
  Description of Unknown: Integrase B9707 sequence
  cd00338,PF13408,IPR011109,IPR038109, Coil,IPR036162,PTHR30461,IPR006119, G3DSA:3.40.50.1390,PTHR30461:SF3,IPR025827,PS51737, PF00239,SM00857,G3DSA:1.10.10.2600,SSF53041
MKDHYSSPPPGLPERSRVWAYLRDSGGPSQEQSVDQQDQEIIAYCKRHNLVLARSPFRDVARSGGSVVGRDEFMSMIDLSEDESTRPQAILIWNFARFARDYNDFVYYKATLNKRGIIVHSLTDQIPVDDFAGRIVETVISLANEEKRRQTSRDVRRGLKSLVSKGYAPGVPPRGYMAIKVTIGEKRDGTPRIVSKWEPDLVLSEYVKIAWQMRTRGKSYREITTATKGKLYTSLNSWHSFFRNKAYLGIGKSGDLEIPDHHEPLITWDVWEAVQKLQGAHPLHGKKGQLNHPRRVGNPTIFSGFTYCLECGAMMTHSTGNKKHPWNHYICGRKDRHGVAACKSRRVGAVNAEKQILANVLTHVLTPEYLSEVIAETKKQFDSTAELERQIKSSIRRIEDLDLAIQRTLNAIEKTGSAAAQERLKQREAEKQQTKSELDRLNLQLATAQTEITPEAMLVVLAAWRSQFERLQESGNVREIKAWLMQFVSRIELGYNKARIFYTYPMIDLLSAADNSRNAFPLCGGTYIIRGNKSIMVEWSK

SEQ ID NO: 9707 - protein, 569 aa, Unknown
  Description of Unknown: Integrase B9708 sequence
  PS00397,IPR038109,IPR006119,PS51737,PF00239, cd03768,G3DSA:3.40.50.1390,PTHR30461,IPR025827,SM00857, G3DSA:1.10.10.2600,SSF53041,IPR011109,PF07508,PS51736, IPR006118,PF13408,Coil,IPR036162,PTHR30461:SF3
MIDNINSRKTALYVRVSTVYQVDKDSLPHQKKELTAYCSHVLHVPDDLIEIYEDAGVSGKNTDRPGFQRMIADIRAGRVENVVVHKIDRISRNLVDFSLMYDEFKKYRVTFISLNEQFDTSTAIGEAILKIILVFAELERKMTSERVTGVMIGRAEAGLWNGARVPYGWKWNAEAKLPEHDEAEAPVVRKIFELYLQTGSTSKVRDYLNGNNIKTKRGGWWTTKTVADILRNPINCGDYRYNYRESSHGALKDPKDVVYIRDTFPAIVPRETQEEAVALLESHKLAVNQPGFVHQKDIFHAFAGHLVCGSCGSHMTVVKKDKTRNSGFRPSTYVCAAKRNKRTCTAPGTSDVTVGPFVFNYISALARAAAMREEIRSADELERILLSDETFRDVAGLGSEGLTELYALLTGEHPDGYEYRPDQLTGSAADRMDEARQLREQIERSTRALDRLKKLYLFGDDSIPEKEYLETRAELEGERVKAENALRALNVSMATTVPESAFIRSAASFLIAHEIQKGGHIDYPTFAAAVGDKGIRDFVDLTVDKVTVSGKRVDAIRMKNGITHKFIYK

SEQ ID NO: 9708 - protein, 569 aa, Unknown
  Description of Unknown: Integrase B9709 sequence
  cd00338,PF13408,IPR011109,IPR038109,PF07508, PS51736,IPR036162,IPR006119,PTHR30461,G3DSA:3.40.50.1390, mobidb-lite,PTHR30461:SF3,IPR025827,PS51737,PF00239, SM00857,G3DSA:1.10.10.2600,SSF53041
MRAAIYARRSTDEHQAASLDVQLDEARRYIARKGWTQDPEHVFVDDAISRAEFKKRPALIAMLVAAEAQAFDVVVVRDETRLGGDTNRTCLLIQDLLDADVRLFYYYSDEEVRLDNAVAKFLVTARNFASELEREKISQRTHEHLKSKARSGFVAGSRVFGYDHERVVSGGVPHVEYRINEREAEVVRTIFRLTADGMGLRMIARELNDRGLPSPRAGKRGTGSWSVGSIWGMLRNERYIGRLTWGRREKTYRKGTKVRIARAESEHTHVDAPQLRIVSQDLWDAVATLLAQRQHLQGPRGPRASRIPDNLLTGLARCAECGGPISSRNGKLGQGTVKYYHCKYHHDRGNKVCSNKTRRPAASVDAVVIRWLQESVLSERLIVDVVAEVKARLRAQSSDETSEVPGLEANAKRLRAEVGRLAAALAVSDTPPAAIVSLIGEKEGQLRAIDQRLAVLRAGPASITRQLDGIEAAARTRLGDLRGLLGRHPREGRQVLEQLLDGKIKVSAVETTDGPRYLLEGAAMLAPLLGVEGGTPPLFASSAGSEQQGTAKTPGESEGRMVVPLAEVA

SEQ ID NO: 9709 - protein, 568 aa, Unknown
  Description of Unknown: Integrase B9710 sequence
  cd00338,IPR011109,IPR038109,PF07508,Coil, PS51736,G3DSA:3.40.50.1390,IPR006119,IPR036162,PTHR30461, PTHR30461:SF3,PS51737,PF00239,SM00857,G3DSA:1.10.10.2600, SSF53041
MMPRVVLRRRSSNSSRQWPCAMPGRTMQPKGPGTVKRAAIYARYSSDKQNELSCRDQVDLCRAWAEHQGLSIVEVYTDEAVSGASTVNRFGLSTLMRDARSRRFDVVLCEAMDRLARHQADTHAIRRDLAFQEIEIMTVQDGTVTALHAGVKGLLSELYLADLAQKTRRGQSARVRAGAAGGGRSYGYVPAAKAGDMAISPAEAAVVNRIFAEYVAGATPREICAGLNRDRLAGPRGGRWSASTINGSRSRQNGILSNRLYIGEIVWNRQRFIKDPATGKRISRLNPESEWIMASVPHLAIVAPDVFAAAGQLKASKGGVRPHYARRPPFALSGLLQCGCCGGTVGSRGGDLLGCVGNKERGDCSNGRTLKRQELERRVLTALANHLAAPALISSYVKRYHQEQLRVRRSERASEGDYRRRHTAVRAEIERLVDAIVSGTPAAAINDRLAILEAERLSLEQRLAAIDRDAAVVEFHPRLAEKYGRLVAELQNGLTGSDANKETIEKVRQLIDRIVIRPTPRKTPVEIEVHGLLAKLLSISSGGNPRLLGGMLVAGTRISQSPQFLIVA

SEQ ID NO: 9710 - protein, 568 aa, Unknown
  Description of Unknown: Integrase B9711 sequence
  cd00338,PF13408,IPR011109,IPR038109,PF07508, Coil,PS51736,G3DSA:3.40.50.1390,PTHR30461,IPR006119, IPR036162,PTHR30461:SF3,IPR025827,PS51737,PF00239, SM00857,G3DSA:1.10.10.2600,SSF53041
VDASRSLSKKKAAIYTRVSTQWQIDKDSLQVQRRELIAFADLVLGITDYEVFVDPGYSAKNTDRPDYQRMMERLRTGEFSHLLVWKIDRISRNLLDFANMHAELKSLGVAFVSKNEQFDTSTAMGEAMVKIILVFAELERQVTAERVTAIMLSRADSGKWNGGRVPYGYNYDTEEKCFTLNQYEHRIYLSMCDKYEETNSLLATAKWLNSNGYRTRQGLEWSPVAINKILRNVWYIGSYKYNVHSDGKGVAKRDEAEWIVIENHHLPALSEARFERIQLSLTRNRRGGIKVGTARMNKNIHIFAGLITCGECGHNMSATLDRRRADGWRPSIYSCYKRRLDKSCGNKYISDIIIGPFVFNFIANIMQCREKINPKTPLPVLAKKVLKGSPFLGVAICDEDLVKLKKMILSTVSGVEFKPEDVFAGTEKQENKLDILEERRRKTEIALNRLKSIFLFGEDAMSEAEYIIERKKLLDELEETNKGISELKQNDEEAALSEDDFLRKASYFVMAEKLLNERFVDYEKYIRGIDPQIPRMFIRSVIKNIEATGGKITSLQFSNDVTIRFVYS

SEQ ID NO: 9711 - protein, 568 aa, Unknown
  Description of Unknown: Integrase B9712 sequence
  cd00338,PF13408,IPR011109,PF07508,Coil, IPR036162,PTHR30461,IPR006119,G3DSA:3.40.50.1390,PTHR30461:SF3, PS51737,IPR025827,PF00239,SM00857,SSF53041
MSNAAETGYAIVYVRCSKDEQTKGDSIPRQNALAEQRAAELGLTIQARYADEGVPSFRGQNFRTGKLGELFEAARLGKFPENAYLLVESEDRLSRKGTNSFFKIWFALLGFGLKICLTAKGEVATPDDDDPTGVIMRAIGSSKGHIESRDKSGRILTAMQAKRDAARSGTAKFSGNAPGWFIPVYDNPPGTKHRKVISFDLHTERVAIVQRIFKMSASGVGEHSIARLLNDDQILSFGATPWHRQSVRNILESRAVLGEYQPGIWRTEITATGKERGFSEPEGEPILDYFPRVISDAEWQAVKTIKARNKNSGGKKGKLFTNLFSGLLRCGECGGVVSYHKYRLRCMRAYRHAGCQNHEPIWYKTVEAALLDKIIDLLVSAKDAIEISSERQEIVNQIALLERQIDDKRRLLAGYVKRFESDPEAFPAVLLKGMTDAENVVDSLNATLSEAQQRLAIETGKVGPGEALAGIAALRDRAKSLDPSVAYLARAEIAGSLKDVLRLAIYQNDGSIYLQAGENENLRINIASDGRITVIGTGWQKLDQKMLQNVTKLSGSKWLGKFDLRKSE

SEQ ID NO: 9712 - protein, 568 aa, Unknown
  Description of Unknown: Integrase B9713 sequence
  IPR038109,PS00397,IPR006119,PS51737, PF00239,cd03768,G3DSA:3.40.50.1390,PTHR30461, IPR025827,SM00857,G3DSA:1.10.10.2600,SSF53041,IPR011109 ,PF07508,PS51736,IPR006118,PF13408,Coil,IPR036162,PTHR30461:SF3
MAYLKDFTARKVAIYIRVSTIWQVDKESLSVQRRELTAYAQMILGINDVVVFEDAGYSAKNTDRPDYQQMMSRLRMGEFSHLLVWKIDRISRNLLDFAEMYQELKELGVTFVSKNEQFDTSSAIGEAMLKIILVFAELERNMTSERVTAVMLSRAENGQWNGGRVPYGYSYDKTKKQLSVDPFQAQVVQRMYAAYEQNQSLIKVCSMLNDEGIVSSSGKNWSPVTVSTILKNPFYLGIYVYNVHSDGRGSKKKPESEWITFEEHHPAIVDKRLYDRVNFLLSRNRRGSVDKPKTYSKVNTHIFAGLVVCGSCGASFSATLDRRRADGWRPSIYGCSQRRRSKTVCQNKWISDVTIGPFVFGFVSNILRAQSKSITDPDILGKKLLLGKAFDLVDHIDSESLHQLSDLLKSNSNGIEYRPATVYAKSEKSDSQYEALTVRKTKLENALKRLKAAYLYGDDAMSEAEFLSDRNRLLRQLSDIEAKLAEVQQQEPDEMLVSSEFQTKASYFLMLQNLMGDKPFDYEKYIKDADPEIPKAFINTVAYKIEATDGRITAITFKNGITYKFHYK

SEQ ID NO: 9713 - protein, 568 aa, Unknown
  Description of Unknown: Integrase B9714 sequence
  cd00338,PF13408,IPR011109,IPR038109,PF07508, PS51736,G3DSA:3.40.50.1390,IPR006119,IPR036162,PTHR30461, PTHR30461:SF3,IPR025827,PS51737,PF00239,SM00857, G3DSA:1.10.10.2600,SSF53041
MRAALYGRFSTDHQRLESIADQFRVAERLVAEHGFSVVARFSDAAISGGTARRPGYQQLLAAARAGEFDAIVVEDVSRLWRNSAEQQQRLAELHDLGICVVGRDLDTRAEGSHFVGAIFGATNEHYRREIGRKTYRGQEGNAIARKPTGGKCYGYVAARDSVTGHIEVNEQEAAVVRRIFAWYSEGISPRAIAAKLNEESVPSPGSTWKRKSRRTAGWLASAIYGDQKRGVGILNNPRYAGRVIWGRMKWHRSYRDSARRRPVVLGKAAHEYQDERLRIVSQDLWDAVRARQALRSHILGTKVKNGLRKRAPGGGRPARYILSGLLRCGVCEAAFVLSNGDRYQCSSHVNGGACKNRISVRRDLVETRVIDAVKGDLADPEFIAEFERALRRAAGTPKAAPNHLERIHELHQEVTSLADAIAQGLLRSSTTLASRLVAAEAELEGLKAAAQAPKVRRLAPNVRERCRGILRRLQQTLDSDPERARAALVDAIGTRITLDPDHSGRFLWADVGLEPAPLLAVAGGSEIMVAGAGFNLKFPSACRSEKRPKTPALPRPGTLRCRAFSLQN

SEQ ID NO: 9714 - protein, 567 aa, Unknown
  Description of Unknown: Integrase B9715 sequence
  IPR011109,IPR038109,PF07508,Coil,PS51736, IPR036162,PTHR30461,IPR006119,G3DSA:3.40.50.1390,PS51737, PF00239,SM00857,cd03768,G3DSA:1.10.10.2600,SSF53041
MNEKKKIVALYTRVSTGYQIDKDSLPFQKKELTAYCKHILHAENTELFQDAGKSGKNTDRPAFLRMMKKIRAGEVSHVVVYKIDRISRNLIDFSMMYDEFKKYRVTFISLNEQFDTSTAIGEAVLKIILVFAELERKLTSERVTGVMIDRAMSGKWNGARMPYGWKWNTETEFPEHDPVESEKARTLYRVYDETHSTAKVRDYCYEHDIQTKRGGKWTTSTILNFLKNPMNKGDYRYNYRGSARGQKKPDNEVVYVPGVFPPLVDPDLWERVNAVIKENGKAIAHNPHVKKRVHIFTNGLLTCEKCGASFQVSTLDKKRLNGFQPSLYVCTNRRVYRSCDAAYCSDVLIGAFVFNYVRNLVQATKSRALIKSPADVERILLSGEEFDRIRNIDPADLDVVYQAIRGTIAPSKGLSYIPTPPDRGQKDETELSGLRAEASRLSRALDRLKKAYLFDDNALPESEYLSTRQDLTEQLTAVNNKIADALTDESYSEAAELSFVNSASSFLLSYRLQGSDHIVYSDFAAAVEKSVLKNFVNLIIDHIVIRESYPVEIVFKNGLRNRFVLKD

SEQ ID NO: 9715 - protein, 566 aa, Unknown
  Description of Unknown: Integrase B9716 sequence
  cd00338,PF13408,IPR011109,IPR038109, PF07508,Coil,PS51736,G3DSA:3.40.50.1390, PTHR30461,IPR006119,IPR036162,PTHR30461:SF3, PS51737,IPR025827,PF00239,SM00857,G3DSA:1.10.10.2600,SSF53041
MKRSNSTHKNTDPVNPARTKAVIYARYSSHGQTEQSIEGQLHDNHAWAKQQGVMVIGEYIDRAITGTKDARPDFQRMIEDAAKKQFELVIVWKLDRFARNRYDSAIYKARLKKYGVRVVSVKENITDAPEGIILEGLLESMAEYYSANLSQNVKRGLRESADKGNFCGGLIPYGYKVVDKKLVPDEKTAPVIRYVFEQYAKGVPKKEIIDELNRRGVRNRAGNPLTYTSFQHAMHMTTYIGEHVFRGKVLEGCATPIVTRDVFDKVQEILATHAKAPAAAKARIPYLLQGKIYCGICGAPMFGECGKSHTGAVHSYYSCYTRKRKHECRKKNERREGIEAFIIRQTMEYILTPSRMKEIARAVVKEYNKEFSSSRVEEIEKALSKIEKEQDKLVDALIDAPKVAHKKIYARMELLEAQKSEYEIDAAKLRVAMNLRLTEQEVIAWLQTFCEGNPEEEEFCRRLVDVFINSVYCYEDKIIVFYNIRGGQPVKYKALEEALKTPKTQEKSDPLKGSDLELQSGAGNYKSEPPAAPAFVFVSGTFGCVFPRVMTHETRKPYISLGTTIY

SEQ ID NO: 9716 - protein, 566 aa, Unknown
  Description of Unknown: Integrase B9717 sequence
  cd00338,IPR011109,IPR038109,Coil,PS51736, IPR036162,IPR006119,G3DSA:3.40.50.1390,PTHR30461,PS51737, PF00239,SM00857,G3DSA:1.10.10.2600,SSF53041
LTRKTVICWNISSRPLLHPYYNDCDSSKLDATIHNNYASYPLYGKTIIYKGMSNKCLIWVRASTDKQETESQLKETIEYATSLGFDEFEVIDKAGASAYKVNKLYLEMIDEMKSKILADPDIKAVVCWHLNRLARNESMAMDIKDFLVEHKVQLYVNEPTIKLFNNDGTINEGAELIFSLFATMSKQQVSELRLKVKRAKKRDKALHKYIGGNTVAYGYRINEDNYLEPDPETSKIVQDIFDLYGSGNYSYMTLAKEINERYGTDMNWHYMYSVLHNTKFYDGTMYPPIITELQYRKAEKQRNDTASRPMQSKRHTFANRIIKCPVCGKGLTANRRDYRCRIECKTGNRIGIPNMDGLLWTIASHLESDRLLNASAKDDYVEKQAVLASKIKSAEQSLAKGEKKAERGKKMALEGLIEIEEYKDILMQVENDQKDVKRKVDEWKSEIVEIDRLISEDGKDIQRILELSDRISYMDEEQMKEIVRRWVKKVTYTSDWVFTIETITRTYKARYVRYDRQYNRWFTLNNNPIATRALYRDKDGCSLGDVRISPVDIPITLAWLSGSEVV

SEQ ID NO: 9717 - protein, 566 aa, Unknown
  Description of Unknown: Integrase B9718 sequence
  PS00397,IPR038109,IPR006119,PS51737,PF00239 ,G3DSA:3.40.50.1390,PTHR30461,IPR025827,SM00857 ,G3DSA:1.10.10.2600,SSF53041,IPR011109,PF07508,PS51736 ,IPR006118,cd00338,PF13408,Coil,IPR036162,PTHR30461:SF3
MPRAKKAAIYCRVSTIHQVDKDSLPMQRSDMINYAKYALNIEDYEVFEDAGYSGKNTDRPAYQEMMERIKEGEFTHVLVWKIDRVSRNLLDFASMYAECKNLGVTFVSKNEQFDTSTAMGEAMLKIVLVFAELERNMTSERVMSTMNARATEGKWNGGRVPFGYSYDKETDSFSIREDEAKVVHEMKNIYLRLHSITGTAHELNAIGRRTRRGYGWTPQTVAIILRSPFYRGTYRYNYRNETKGTFTFKDQKDWVMCSKHHEALFTQEEYDNIDYWLTKNRRLQGKATHSQRKNVHIFAGLIKCGNCGDNYFASLSRTLASGYRPSMYQCSGRRQKALCDNKYVTDITIGNFVFNYISNMIRLKKAFSPRWQMRRICSTLLRGDTFREIKAISPATLASIRTTLIDNLTCTTEYQPIKNRHGPEAAKRKDENLQAELDKNTRALDRLKHLFLYADDAMGQAEFLQQKKALEDNITRIKGELDAIRKSSIFATNLSEEIFVQKAAQFFMNTALQKGRIDFEQLATQTEATILKDFVNAIVSRISVRNGKIIELEFTNGQIHRFEYSL

SEQ ID NO: 9718 - protein, 565 aa, Unknown
  Description of Unknown: Integrase B9719 sequence
  PF13408,IPR011109,PF07508,Coil,PS51736, IPR036162,IPR006119,PTHR30461,G3DSA:3.40.50.1390,PTHR30461:SF3, IPR025827,PS51737,PF00239,SM00857,cd03768, SSF53041
VLPTPGDLFFLAEAVNSTNKFYSVSDKSARVYFLYSFLGGETMRFFSYGRKSVFSDKSDSIDNQFRMNREYCESKFSGQVDSWQQFSDEDFTGANTSRPDLQRMLSFIKGGFCDVLVVYQLDRLSRDVRDFANIYALLEEHGVMFISIKENIDTTTPIGRAMMYVTVVFAQMERETIAARVTDNMLGLAKKGYWTGGNPPVGYVRKHIVVDGKKHCSIEVDPDGARYVTQIFDTFLAYNCSLQGMETRFKNQGIRTQSGKFFSTTQLHKMLTMPYCVEATPEVYDFYAAKGCIMDPGSPREMWDGSVGVIIYGRSTEKNKKHQAQPPEKWTVCLGKHKPFMPAEKWLAVQSRFTQNKCIKDAKWPVPLLKGVIRCKCGNLMQVSRKKKVDGTCSSWYYCRKRMRQGVDACDMSQIKCDLLDEKVLELFRGIAADPGLIQKFVKTKAPTDISDLKAAQARVSACERKIGRLAASLALAEDSTASKYIIAEMERLDVELGALKREASLAEMENHRATANAKDAKATAAEIAKLIHGLEGFDDKEKNAIARAVIQECTWDGERLFITL

SEQ ID NO: 9719 - protein, 565 aa, Unknown
  Description of Unknown: Integrase B9720 sequence
  PS00397,IPR038109,IPR006119,PS51737,PF00239, cd03768,G3DSA:3.40.50.1390,PTHR30461,IPR025827,SM00857, G3DSA:1.10.10.2600,SSF53041,IPR011109,PF07508,PS51736, IPR006118,PF13408,Coil,IPR036162,PTHR30461:SF3
MQNSSDKNINRVAIYIRVSTNHQIDRDSLPMQRQDLISYAKLLLNTEQYVIFEDAGYSGKNTDRPKFQEMMKQLRNGLFTHLLVWKIDRISRNLLDFATMYQELKELGVTFISKNEQFDTSTAIGEAMLKIILIFAELERNMTSERVTATMISRASNGLWNGGRVPYGYNYDPDKKEFKINPAEAEVVKLIHDKYEELHSLIRESRMLNERGIITRSGNLWNPTTLQIILHNTFYCGDYQYNVCKEGNRQKQKNKSEWVKIHNHHEAIISHEQKERIIALLDCNRRLNKKVVKSEKYVHIFSGLLYCGNCNKPMGASPSSKINGYQYSRYTCPTKRQLQCDSKSVSDQTVGEFVFNYILNLINSQRDFKSISSKNELQKHLLKGSSFNDIKSIDSDGLNDLYNVLLSGNINQDIYSNDVSFKKEDSSNLSRTKLLSEKQKLERALDRLTNLYLYSEQTLSEQNFLSHKMQIDDKLNEINDQLSFMESDDWQQSISDAEFIVKTSSFIISKKLDGRNYINYKRLATSIDKEVLKSFVNSVIDSIIISNGSIETITFKNGLSHTFIR

SEQ ID NO: 9720 - protein, 551 aa, Unknown
  Description of Unknown: Integrase B9721 sequence
  cd00338,IPR011109,IPR038109,PF07508,Coil, PS51736,G3DSA:3.40.50.1390,PTHR30461,IPR006119,IPR036162, PS51737,PF00239,SM00857,G3DSA:1.10.10.2600,SSF53041
MRDIKVIESKQSKGSKHIIKRVAAYARVSTKQEMQESSLDLQVRHYAKEIIFNPDYIFAGIYYDHGKSGTSMKKRDGLQALLKKVYAGHIDLVLVKSLSRFARNTIDALNVIRETRKLGVEFFFEKENLSSLDSTIDMILTMMAGLAEAESQQISSNITWGHRSRAKSGKVRISPLLGYDITKDRKYIINEMQAKTVKAIFQMYLEGKKISDILQHLQEHDFRKSKEDKYLNSQQIRNILSNEKYIGRMIFGKTFTKVDGREKKVVINHGEQPKYIINNHHEGIVDLETFNKIQEMIKEQKEKKKYKPRMDYSNYEKFAYSVPHEAYVLRKQKGTIKDADEQTTPYLHKSKVSGFYVKHVSKVLFRSLNALSRKFGRMEALFDAQVDDILSKQKQIKKLNQQEKLLENYMRQYYILERKTLKDKKDRMLLYELETLIIQESMNYTVLEDEYNYIEEHFNHALTIKKQIKELRYPTEELTPDIVNDIFEGFLIEDYDRYVAFINISNKPLTSETMKNAAANPPLHTGAYQTTGAYKTTGRHDAEIKWSIILM

SEQ ID NO: 9721 - protein, 565 aa, Unknown
  Description of Unknown: Integrase B9722 sequence
  cd00338,PF13408,IPR011109,IPR038109, PF07508,Coil,PS51736,IPR036162, G3DSA:3.40.50.1390,IPR006119,PTHR30461,PTHR30461:SF3, IPR025827,PS51737,PF00239,SM00857,G3DSA:1.10.10.2600,SSF53041
MNRAAIYARFSTDQQNEKSTEDQIKLCMEFAQREGLQVVATYEDKAKSGGSIFGRDGLFKMMQDAQERKFDVILVEAVDRLSRDMEDLAGLYKRMTFLGISIRAVHEGVVNTVLVGLRGLVGQLYREDNVHKTKRGMASLVDKGLSAGGRAYGYRPDPNQKGKLIIVEEEAEIIRRIFEEYASGKPPRKIAHDLNEEGVPPPRGTKWNASTINGNASRGHGILRNHIYAGKLVWNRVRMIRDPDTGKRLSRPNPPDQWRFKDVPELQIVPTELWEKVQELKRATANVPLHAQARKPKRLLSGLLRCGSCGAGMSIQGADKTNRKRIRCSAAVESGTCPDPKTFYLDTVENLVLDALAEELTNPEATAVYLKEYIEERKRLAKEIADNRAYYERQLAKVVGEMDRLLTLYQKSVVELDMLEAKMPQLRAERDRLRGLLAAQPEVPKTIDLHPMAVKKFEEQLKSLKKAVEAGVTEGDGESIKALREVIETVTVYRDDSKVGGVRVEIRGYLNPLVAIGDATKKAEKEVSDVTGKTVGSGDDLSGSGGLTHSESSLKVIRFCISRAA

SEQ ID NO: 9722 - protein, 564 aa, Unknown
  Description of Unknown: Integrase B9723 sequence
  cd00338,PF13408,IPR011109,Coil,G3DSA:3.40.50.1390, IPR006119,IPR036162,PTHR30461,PTHR30461:SF3,PS51737, IPR025827,PF00239,SM00857,SSF53041
MNNHSFPPGSLAAAYFRDSGGDTQELSVPQQESAFRAWCAQNGLIPGAIFKDVARPGSSVIGRAGFHDMIHHFRSGQAQEAGLVIWSYSRFAREFDDSQFYRADLRRRGFIFFSLNDAIPEGSIGRLFEAVIDWKNENFLEDLSRDTRRGLHDLVQTHGAIPGTPPRGFKREKIVIGKRRSGQDRIAHRWAPNPDELPRVRQAFAMRADGYSLAEIHAVTHLYGSINSYKTFYTNKLYIGILEFGDLVIKDYCVPIIDRPTWEAVQLVIDAFARHKNLSGQDGNPQHPRRHKSSYLLSGLVYCARCSSPLFGAPSKQHYKPDGTRNADYERYACARAYRRRDCNQGQFPKKILEDAVLSTLENYILLPDVLAEMQSREKEDRENLLSKLEEKRTEYKNILRGIRRRIANLTEAIAESGHTRALLEKLSGLEAEETALRSQMAEIERQANAPALDLGSSSQIDQTLQSLHAILDSGEHQAIQEMLRGFIARITVDRDENKIIGSITYYLPTIDNPGPSLPYETVSIPLTSLGAPLHRHSFTVSFTATMRRYNKKALLTGCFLLLI

SEQ ID NO: 9723 - protein, 564 aa, Unknown
  Description of Unknown: Integrase B9724 sequence
  cd00338,PF13408,IPR011109,IPR038109, PF07508,Coil,G3DSA:3.40.50.1390,IPR036162, IPR006119,PTHR30461,PTHR30461:SF3,PS51737, IPR025827,PF00239,SM00857,G3DSA:1.10.10.2600,SSF53041
MKNAYSYVRWSTLSQGETGRASQTRQTKTAKEWIRDYGKGEYVLSDEMFLDAGKSAFKGKNIAKDEYGKAKGELAKFIELVEENKISRDSILLVDSYDRFSRLPASKSLTLFMDVINSGIGLVFTGSFEKRIINSTMIDREPYILQFIVGELIRSTSQSEETSRKVKLAKQFLFANIKKGIVQRNNLPKYFTFIPNEPINPRCNIGKYVHNELTPIVKDIVDMLLNGKSLYAIADHYNEKKIKTFKGYEWSGNGISHILRNRLLFGEYKGVKNFVPPIIDLDTFDKIQNVLNQNQFTKGQRGKINIFRGICFCADCGHTMSVMASSHKGSSYRYLRCSHGAIGKHNECKNRLAFRLNDMEAEFFVNFLFKNPKQVITETDNRELKELNKTIATKQSRLNQINSEIDKLIGLLETLPMPELKTKLAKLNTERDTIKTELDSLNSKVSNIQDSPQMFDKLKKLLGKDSDYKPKFKADKDGVPIFERDELDTAIESVIESLKDEFTREGIRIMLPSLIGKITVDTNEGQFYVFNRMGKQIYESFHYESNRNCTTEWRRSLLKHKKAS

SEQ ID NO: 9724 - protein, 564 aa, Unknown
  Description of Unknown: Integrase B9725 sequence
  cd00338,PF13408,IPR011109,IPR038109,PF07508, Coil,PS51736,IPR036162,PTHR30461,IPR006119, G3DSA:3.40.50.1390,PTHR30461:SF3,IPR025827,PS51737,PF00239, SM00857,G3DSA:1.10.10.2600,SSF53041
MKRAALYARFSSDLQKDRSIDDQLHACQSVAKRENLKVVASFVDRAKSGASMFERDGLRELMNAAKAKQFDVVVVEALDRLSRDQEDMAGIFKRLTFWDIDILTLNEGLATEIHVGVRSIVSSLFLKDLGNKVRRGIDGVARDGKIPGSLAFGYRLVAGKPGEREIDPDQANTVRRIFKEFAAGVSPRAIAADLTRDKIASPNGTSVWNMQTIVNKANGIKRGIIGNQLYIGQLVWNTQRVSKDPETGKHIAKRGPEANVIRTAVPHLRIIDQPLWDAAQKIRDQRSAPTKAHERKVVARTQTMLTGLLRCESCGGLMHLSGRDDAGPRVKCSAAAANNTCQNTRSFNLAQLEQTVISGLHAMLADPERLARFEKGFMSQIEKRKPDDSELRETEKRLTHVSAQIDRVVNAIATMDTPVKQLTDKLDQLEADRAGLAERVRLLHAESAVIKLHPTAVKAYRQKLVQLLRSMTGTVATPEASAAFRMLFDSIVVHRTPKRMPYEVTPYARVGGALDANLSPPKRTSAQMLEEAGVSYCDNANKAKPLLAVQQYKVVCLGRWRQAA

SEQ ID NO: 9725 - protein, 564 aa, Unknown
  Description of Unknown: Integrase B9726 sequence
  cd00338,IPR011109,IPR038109,PF07508,Coil, PS51736,IPR036162,PTHR30461,G3DSA:3.40.50.1390,IPR006119, PS51737,PF00239,SM00857,G3DSA:1.10.10.2600,SSF53041
MADHIEMFKQIKKVAGFLRISTEKTDFEGKKINAEETLKNHTETMTTFFKQWGIELVLYSEVLSGGTDFKERKALQDILNDLKDEKQNFDAMAIIELERLSRDTYVSSIIKKALEESNAKLIVLEPFQILDMNNSSDSLMFGLASVIAEHNRKIASNRVKLNKLAMARQGLNSSGSVPYGYVRNPKTKKLEIETIETIDEKGNKIRVESDKPKVVRRIFQWHVQGMGQRSICDKLNEMGIPNRQGNKWVPQSLRYLLTCETYIGTLTAKSNQKIKGKIVPAEIVTIEHNHEPIIDDDIWEKSQRLRNAKRERSGVDQRSNDWNSKKNTSILDGLIYCGCESCNRKSTIKWYSSKNKFYIVKCTRFDAQHGKDCNNGGIAVGEVEQVIFQKILEYKQEVENKISSFESNDFASRNTELEEMKELLEKQLNQLKVSARSIRQQEIAYFQKRDETGIVDEFEEEMIAEDKQINHTKRMTVQQKIDEIILKLSQVPNVNEEIQHLNKKMDIIKELENRKDLTNKQVNSLLKQIILKVNYRRILPDNYVNLSFKEREKYSAELEIEYLD

SEQ ID NO: 9726 - protein, 564 aa, Unknown
  Description of Unknown: Integrase B9727 sequence
  PF13408,IPR011109,IPR038109,PF07508, Coil,PS51736,G3DSA:3.40.50.1390,PTHR30461, IPR006119,IPR036162,PTHR30461:SF3,PS51737, IPR025827,PF00239,SM00857,cd03768,G3DSA:1.10.10.2600,SSF53041
MNEQKTIAIYTRVSTGYQVDKDSLPFQKKELTAYCRHVLHAEKTELFEDAGKSGKNTDRPAYQRMMKKIRAGEISHVVVYKIDRISRNLVDFSLMYDEFKKYRVTFISLNEQFDTSSAIGEAVLKIILVFAELERKLTSERVTDVMIGRAMSGKWNGARMPYGWKWNEEKAFPEHDPIEAPNARRLYEIYEKTRSTAKVRDYCYDNGIQTKRGGKWNTSTICSYLRNPMNKGDYRYNYRNSARGQKKPEGEVVYLPGVFPPLVDPDLWDRVNAILDDNAIKSTTSDNPHIKKHVHVFAGGILRCADCGAAFQVSRLDKTRANGFKPSLYVCTSRRTYRACDAPGASDVVIGPFVFNYIANMVRATKSRAKIKDLDDLQDILLSGPEYESIDRMNREDLSIIFQAIKGSRSGPGATFVPSLPGSEKDVPEISGLRAEADKLSRAMDRLKKAFLFDDGGIPESEYLSTRADLQERLTAVNNKIADALTGDSYSEAAELSFVNSASSFLLSYRLQSGDHIDYSDFAATVDKTVLKDFVNLVIDRIIIKDSKVVEIVFKNGLRNRFEY

SEQ ID NO: 9727 - protein, 563 aa, Unknown
  Description of Unknown: Integrase B9728 sequence
  cd00338,PF13408,IPR011109,IPR038109,PF07508, Coil,PS51736,IPR036162,PTHR30461,IPR006119, G3DSA:3.40.50.1390,IPR025827,PS51737,PF00239,SM00857, G3DSA:1.10.10.2600,SSF53041
MKRAALLLRCSTNIQDYNRQKLELEKVASKFGLEVAKVFGEHVTGKDDIRKGNRKSVDELINACENDEIDVVLISEVSRLTRNFLYGVTLVDKFNRDYSIPIYFRDKRKWTIDVETGEVNLEFEKELRKAFEQAEEELASIRFRMASGKRDSAGLGQWFAGIPPFGYTRQKNGYLVKNEYAQIVKEMFDKYLEEGQALITTTRYIYGKYPDIKKLKSIGNTKFILNNRAYTGRAEANIYDEIDKVTDTFYFDIPAIIDEETYNKVQKKLANNRTTTPYPRATKYLLQKLVKCSICGAFYTRLHSNKRDTVHFKCTSDKNSLTGCKSQVYLNERIVNPIIWNFVKEQLFYVGKMNAEQRLEAIAGENDNKSKAIEEQEALKISYKEQENKLTRLEDLYLDNDIDKNRYKERKSKIEKELSSIKAQMDRLTDRIRLSDFNIKRFNSTDFTEQYFKEVEADLEKQMKVLREYVKGIYPLYIDKVYCFLKVDTIEGMFNIFYEPRKAQQKCAYFIKDALAQYHPDIRNFYTPNNTLLTDSDEVDAYYTLEEMKEICSRNGFEVRYRE

SEQ ID NO: 9728 - protein, 563 aa, Unknown
  Description of Unknown: Integrase B9729 sequence
  cd00338,PF13408,IPR011109,IPR038109,PF07508, Coil,PS51736,G3DSA:3.40.50.1390,IPR036162,IPR006119, PTHR30461,PTHR30461:SF3,IPR025827,PS51737,PF00239, SM00857,G3DSA:1.10.10.2600,SSF53041
MKTAVIYARYSSDLQKDRSIDDQILFCREIALRNGYSVADVFTDRAKSGASMFERDGLLALMSAAKKRDFNGVICESLSRLSRDQEDTAAIYKRLKFNDIEIVDASGVVSDVHVGVGGIVNSMFLKNLAVSVKRSQDALAREGLVPGRIAFGLRATGKKCEREIDPTNAAIVLRCFEEYANGKSIENINFELRQCEKIEMPRVNSEMLRNQIYIGKIIRNVTNSVKDPDTGRRLFRRGSVDNRIVVDAPQLRIIPQELWERVQHSLAASNKAHGWHGPRQHKFVNKDHLLLGLLTCATCGGAMYIGANNPDGAPRVKCSFGHRREGCDHRKSYSLKTLQDIVLSGIQAKLTDRKALLEMTRAYHDRWAERQKSVRGDLAKAKAELSRTEIQIDRIVTAISDSDSPVKALVSKLDALEIQRASLAQKVELIEADGNVVTLHPAAIDKFAASMETIHTALTGDLSVEQLSPFRAAFRNVFERIVVHPTTKQGQYEVTPYARLSAIIGLELFPKMRSTTEMLAEQGVTEIALSDGSRTRTVQKCKPEMITSPDNVIINLGIWKKAA

SEQ ID NO: 9729 - protein, 563 aa, Unknown
  Description of Unknown: Integrase B9730 sequence
  IPR011109,IPR038109,PF07508,Coil,PS51736, G3DSA:3.40.50.1390,IPR006119,IPR036162,PTHR30461,PS51737, PF00239,SM00857,cd03768,G3DSA:1.10.10.2600,SSF53041
MNENKTVAIYTRVSTGYQVDKDSLPFQEKELKAYCKHILHAEKTELFEDAGKSGKNTDRPAFLRMMKKIRAGEISHVVVYKIDRISRNLVDFSLMYDEFKKYRVTFISLNEQFDTSSAIGEAVLKIILVFAELERKLTSERVTDVMIGRAVSGKWNGARMPYGWKWNPEKEFPEHDPVEAPNARKLYEIYEKTRSTAKVRDYCYDNGIQTKRGGKWNTTTICNYLRNPMNKGDYRYNYRNSARGQKKPEGEVVYLPGVFPPLVDPDLWDRVNAILDDNSIKSTTSDNPHIKKHVHVFAGGILRCADCGAGFQVSRLDKVRLNGFQPSLYVCTSRRTYRACDAPGASDVTIGPFVFNYIANIVRATKSRAKISGPDDLERILLSGPEFKDIKYINRDDLDIIVQAIRGSVKGGATFVPSPPGSEKDAPEIEGLRAEADKLSRALDRLKKAFLFDDSGIPESEYLSTRSDLQERLTAVNNKIADALTGDSYSEAAELSFVNSASSFLLSYRLQSGDHIDYSDFASTVDKQVLKDFVSLVIDRIILKDSKIQEIVFKNGLRNRFIY

SEQ ID NO: 9730 - protein, 563 aa, Unknown
  Description of Unknown: Integrase B9731 sequence
  IPR011109,IPR038109,PF07508,Coil,PS51736,G3DSA:3.40.50.1390, IPR036162,IPR006119,PTHR30461,PS51737,PF00239,SM00857, cd03768,G3DSA:1.10.10.2600,SSF53041
MNENKTVAIYTRVSTGYQVDKDSLPFQEKELKAYCKHILHAEKAELFEDAGKSGKNTDRPAFLRMMKKIRAGEISHVVVYKIDRISRNLVDFSLMYDEFKKYRVTFISLNEQFDTSSAIGEAVLKIILVFAELERKLTSERVTDVMIGRAVSGKWNGARMPYGWKWNPEKEFPEHDPVEAPNARKLYEIYEKTRSTAKVRDYCYDNGIQTKRGGKWNTTTICNYLRNPMNKGDYRYNYRNSARGQKKPEGEVVYLPGVFPPLVDPDLWDRVNAILDDNSIKSTTSDNPHIKKHVHVFAGGILRCADCGAGFQVSRLDKVRLNGFQPSLYVCTSRRTYRACDAPGASDVTIGPFVFNYIANIVRATKSRAKISGPDDLERILLSGPEFKDIKYINRDDLDIIVQAIRGSAKGGATFVPSPPGSEKDAPEIEGLRAEADKLSRALDRLKKAFLFDDSGIPESEYLSTRSDLQERLTAVNNKIADALTGDSYSEAAELSFVNSASSFLLSYRLQSGDHIDYSDFASTVDKQVLKDFVSLVIDRIILKDSKIQEIVFKNGLRNRFIY

SEQ ID NO: 9731 - protein, 563 aa, Unknown
  Description of Unknown: Integrase B9732 sequence
  IPR038109,PS00397,IPR006119,PS51737,PF00239, cd03768,G3DSA:3.40.50.1390,PTHR30461,IPR025827,SM00857, G3DSA:1.10.10.2600,SSF53041,IPR011109,PF07508,PS51736, IPR006118,PF13408,Coil,IPR036162,PTHR30461:SF3
LPDIERTPLQNRAAIYIRVSTQLQIDKDSLHVQRRELAAYAELVLGIHEYEVFEDPGYSGKDTSRPAYQQMMTRIRMGEFSHLLVWKIDRISRNLLDFAAMYAELKHIGVTFVSKNEQFDTSTAIGEAMLKIILVFAELERKMTAERVTAVMLSRANNGQWNGGRVPFGYDWDSENKQFLINEKEADQYRYMCSLYEEKHSITKVCAEMNRRGIPTKTGGKWNTVGIHKILTSVFYLGTYRYNVHSDGKGIRKRDASEWIDIEGHHPALITQDRFRHIGYILKKNAKLSPRNRTTYQDKAVHIFAGLLTCGVCGKNMTATQGRRRASGYRPSIYGCASRRRNASSCTNKYTTDLYIAPDVFAVISGVLTVRDRLGTKAGALDIEKEILSRIPSACSIEGLSGLADSIQNGVTGMEYTPPTATAAKPPDDMQDLIARKKKCEASLKRLQTLFIYGEEGIAEKDYIIERKRIQDEISRIDDLLEETGDTEETLSEQEFRTKASYFLMINQLLGDKPKDTEEMLRLIDPKIPKDFVNTVIDNITVTDGTVETIRFKSGVSVRIHRR

SEQ ID NO: 9732 - protein, 563 aa, Unknown
  Description of Unknown: Integrase B9733 sequence
  cd00338,PF13408,IPR011109,IPR038109,PF07508, Coil,PS51736,IPR036162,G3DSA:3.40.50.1390,PTHR30461, IPR006119,PTHR30461:SF3,PS51737,IPR025827,PF00239, SM00857,G3DSA:1.10.10.2600,SSF53041
MTPAIYARYSTDLQREESIEDQVRACQRAADAAGLGPARVFADAGVSGASMARRPGLADLLDAVESGRVGAVIVESLDRLSRDQADLALIWRALKTANVRLITASEGEIRDDAAGIMQVGLRSIVGTLYLKDLADKTRRGIEGVVTAGRHAGPPPFGYRLKAGGQPGELEANPEQAALVLRIFTDYAAGLSPRAIAKALNAEGRPGPRGAAWRNTTIYGDPKKGTGILWNALYRGERVWNRQRKVKNPATGTARMVLNPQSAWVRIAAPDLALIDTTLAAAVEARREGASAPGQGNSASARACRPGRPLSGLMACGACGANMTLAGGEPRRYGCSAAKETGACGGVGYIRADIAEARLFAALKHQLLSAPAIKLAVDTYRAERARLKAEARAGQATLEARIARLARTEARLVDAFAEGRSPASVLDKAKAAETERLALEAELAEIAAQDTHAGRRGQVEELHPNAGAAYAARVERLQETLAGHPDTSETAPISARHRAEAIEAVRRLITRITVTRHKKSGETNLNVEGDLAALFNVSQASEKTVGAGARTGRVLTPVPWSFAA

SEQ ID NO: 9733 - protein, 563 aa, Unknown
  Description of Unknown: Integrase B9734 sequence
  cd00338,PF13408,IPR011109,IPR038109,PF07508, Coil,G3DSA:3.40.50.1390,IPR006119,PTHR30461,IPR036162, PTHR30461:SF3,IPR025827,PS51737,PF00239,SM00857, G3DSA:1.10.10.2600,SSF53041
MSDKLKVVAYARVSTSSKDQENSFENQKAYFEREIAKNPEWEFVGIYADKGLTGTSTNKRKQFLQMIYDAGIDIKEHKGEQVYIVSDRKPKFDLILVKNTSRFARNINVIELLRKLRQKGVYVNFLDIGKSTQNEADFVFIEMLMVFDENESRDKSRKVRFGQMEGAIKGVIMTTSKMYGYRKIDKFTLEIIPEEAEIIKFIFEKYAEGFGIRRIAQLLEEKGYKTREGKNFNVGTIKKMLTNPIYVGHVIRNRYTTGTIFVNKSYPRLLPKENWIIHKNKVPPIISEELWEKCQKIRESRINEYNLGKNTGTSLFAGKLICGKCGSPYHHNVDRYNSFYNCSLKKKKGIQACDNPNISEKRLIELVEEQIKNMLLLLNEKKEKIKELVSEIIDILQEKINSNNLKDRFDNEEFDFLELEELKNEKNKEKLLLELENITLKEEKLLDLYLDGGISKEVFEDKKKELENERKITEAKLNEHEYLKRMYENRINVLKKYIEWLDENLPNNIENINIKDYLEFIQRIIIYDKNNIDVKFSWELNFDTQTLLEFANNMGYNSIELGL

SEQ ID NO: 9734 - protein, 562 aa, Unknown
  Description of Unknown: Integrase B9735 sequence
  cd00338,PF13408,IPR011109,IPR038109,PF07508, Coil,PS51736,G3DSA:3.40.50.1390,IPR006119,IPR036162, PTHR30461,PTHR30461:SF3,IPR025827,PS51737,PF00239, SM00857,G3DSA:1.10.10.2600,SSF53041
MRAFIYCRFSSHKQQELSIEGQRDICQEYADKHNITVAGQYADRARSGKTENRADFRRLMRDAATGVVDCVLVWRYDRFFRNRAESALYRKQLEAAGVHLISVTEYIPEGSAGIITQGMIETVAEYFSAKLSEDVSRGMNKAAQHCQIVGRAPLGYRAGPNKRWQIDPVGAELVRRIFEWYASGRAMGQLAAQLNEEGHRTTNGTLYTRSSFNSILRNEKYIGVYSYGGEVRIEGGCPRIIEDELFFTVQRRLSANRHRPGAYKAEVPYLLSGKLFCGLCGAPMTGTAGTSHTGARHYYYICNNRRAKTCKKKNARLDLIEEAVLQSALDILTDENIAYISTEVERRCAENSDSAALLASLNAQLEEVQRRLKNIGNAIAQGIITETTKELLEEAEADRTALRQQIDRAKVQAALVVKAEAVACWLDGFRRGDRTDPDFRRQVFGALVHSVFVYDDYLKIIFNVDSAGAAVVPYEAAQAATPSEAPPGSYLDTLGAPKIALRKRKAIFIMIGALCECFRFAADFNPSQRLFLFCRRNSRTFSVRETVAYMQLPIKVSSKIIS

SEQ ID NO: 9735 - protein, 562 aa, Unknown
  Description of Unknown: Integrase B9736 sequence
  cd00338,PF13408,IPR011109,IPR038109,PF07508, Coil,PS51736,IPR036162,IPR006119,PTHR30461, G3DSA:3.40.50.1390,PTHR30461:SF3,IPR025827,PS51737,PF00239, SM00857,G3DSA:1.10.10.2600,SSF53041
MNPEYKPAVIYARYSSSSQTEQSIEGQLHDAYDFAQREGYTILREYIDRAQTGTNDNRPSFQKMIKDAERSDFQYILVWKLDRFARNRYDSAVHKHRLAQFGVRVVSVKENISDTPEGVILEGLLEAMAEYYSADLSQKIRRGRQESVRKGLFPGGPVPIGYTVENKRLVPDPRTAPVVTEIFTRYADGERIIDIVHDLNNRGFRAKRGAKFMRSTIVHILENKSYTGDYYFNGTIVRGAVDPLIDLETFERAQANKEKNRKAPAKNRTPESPCILLHKLYCGECGHKMTGACGKTKAGVQFRYYGCDGRTRFHTQCGMHVVQRKELHYAVCRIVSDLILYKNRRTLEALADSIMEVYLADLDTSELDVLETQYRQTERDLDKLVDSLITMPESVRPRIAQRMEELEAQKKDLEIKLAKKRAECSTTFSHEDFVKYLQVTFTDIESMDNQKFIIDRFVNSVYLYNDGRIVVYLNQIRGLPFLPPDDSIPGKGDVNRATPITPPPGIRKLAPFSRYSSLYTYAPTYVCKEEYSSPLLFFLHGRVGVIAWRYRLTKSDRQDPDE

SEQ ID NO: 9736 - protein, 562 aa, Unknown
  Description of Unknown: Integrase B9737 sequence
  cd00338,IPR011109,PF07508,Coil,PS51736, IPR036162,PTHR30461,IPR006119,G3DSA:3.40.50.1390,PS51737, PF00239,SM00857,SSF53041
MRYSKWDGSASKSSRIFEVLSKGTTSRVYGDAWSNCSGRRVRVKKVIELIRVSTLGQAADDRASIPAQRAVNRRTAQTFGLTITKTIEMTDVSGAAVLRTPEMQELLRLISAEEIHGVVVREFSRVMRPDNFSDYILFQAFQDTGTLLYLPDGPLDLNTKTGKLVAGLRAIIAGNELSEIRERIWVAKESNRRAGKHSQSPICLPFGVGYSREQGFFYKPEAERVREAYRLLLSGQHSYVDLAKLLGFTGQGARITLTNPIYMGWRVYDKKRDMRPGARRCSADGRQGDRKKIARDPDEVIRVKVIDPPLVSESDWKRAQEIIATKIRRHWRHRSGVTPQFTYNGFLICSDCEGSVYGMNCRRFYYVCSRRIRDRERCSAGYMGRDRLEQKLDGMFAEKFTDRTFITDLLRDVEAKSETTNARERIARLELEIRKLREKRTRVLDSFFEGLLSRAERDQRLADVDTRMRATEEALLREAPVPRVTARSLMTAFAPLFDWQYLNRESKRRILAVTVPEIHVANYSVRGVSVTSPSFFSDNESRIHAGSLIAEKPDRIFIPLNL

SEQ ID NO: 9737 - protein, 562 aa, Unknown
  Description of Unknown: Integrase B9738 sequence
  cd00338,IPR011109,IPR038109,PF07508, G3DSA:3.40.50.1390,PTHR30461,IPR006119,IPR036162, PTHR30461:SF3,PS51737,PF00239,SM00857, G3DSA:1.10.10.2600,SSF53041
MPPVDTPLRRPARCKRAIIYVRVSKAREVMYSPEQQIMRCEQYAKQHNIQIVDIVRDLNLSGRTFEKRKVIEIIERIQNGEAEIVLVWKYSRFGRSKLKNAVHIVLVEKAGGQVISATEGGNEKTNVGRLNRNIIMSVDEFYSGVMGDTWKDTHERRRNSGLPHTGKPRLGYMRCPKCERDEENPTKYKPCECGGVFVPDPERAWAVKEVYTRFTEGEGLRKVIADVASRGVTTTVDGAPLTWGHWTTALDSGFAAGWLRAKSEEAKEENPNGRRIDDYDVWVKGKHDALISEEIWQKYRKRRMARERLPPKAREPKHSLSGFIRCGGRNSDGELCLRVMTAARGGRKGEKYVVFRCPVHADTGACTGSSIGLITTEKIVRRWIRDNAKDDGRRQRALDEMLTSEQNAGELRHARARVAQLDEKRTKLASGWASGLLKDDLYRTLSEELDVELDVAHATVAKLERATTRIELGPEVFLPIAEQWDGLPPAAKNEALQHVVDHIISIPMPGRARTMARVVGLGEAYDYALPSRGVSRVRARRNASLAKTHQNASQSGVTPGEE

SEQ ID NO: 9738 - protein, 561 aa, Unknown
  Description of Unknown: Integrase B9739 sequence
  cd00338,PF13408,IPR011109,IPR038109,PF07508, PS51736,G3DSA:3.40.50.1390,IPR006119,IPR036162,PTHR30461, PTHR30461:SF3,IPR025827,PS51737,PF00239,SM00857, G3DSA:1.10.10.2600,SSF53041
MKQAGALIRVSTSRQLEGTSPEKQLEGVRALAVSQGFAIADVHAWTMAESGNLRERAGFRLALDAIGAGEIGRLYVFSIDRLGRNLLELLLFLRDLEDRDVECWEAQGGRRLRWDDFLVQIEGAVASKERQEIVRRSQDGLRRAISAGKFSGGIIAYGYRLNPVSKQLEIDPEESAVVRLIFDGTVGERLSTVEIADRLNGLGIPTRYAKDGRQIRRGKRAPEHTAGIWRAGRVRNMLKNPAYTGTWEWGKRSSKRPPSDRIVGACPAIVSVETFEAAARVLAVNRWRRERPADRPYLLRGLIRCGDCGLTYVGSASHVAGGKEKRYYRCNGATQWHKLGRAKCPSKSLVAGELEAVVWADIQAFVQRPEVALEQLRAVRAPLDATLGERLAEIDREIRELHRRERNVIRLAAESTQADPRALDDVLGEIRGSLASLEAYQSQLRARLQAGEALERELFGVAERLSRLQQAIDQADFSQRRRAVEELVKGIEVATRVEDGRKTPVVTITYRFDDLGGPPVPTSGLFSGELDRTSELAHVLTGAMEITREWGPGWRDRAIGP

SEQ ID NO: 9739 - protein, 561 aa, Unknown
  Description of Unknown: Integrase B9740 sequence
  cd00338,IPR011109,IPR038109,PF07508,Coil, G3DSA:3.40.50.1390,IPR006119,IPR036162,PTHR30461,PS51737, PF00239,SM00857,G3DSA:1.10.10.2600,SSF53041
MSNAKKTLSPYAISYLRFSSAIQGKGDSSTRQNASRDRWLKAHPEIPLKREMNDLGLSAFSGKHVATGDLGDFLALCESKEFRAETARRDVYLLVENLDRLSRERILKALAQLEGILASGVKVVTLCDGKTYDSKSLDNMSEVMMAICTMARAHEESANKSRLNSSAWAKKRKEAAEGKKGSAVNNPGWIRESKDGSLEVVPEAAKAIRRVFELACEGKSISAIRSTMNAEKHPTLGFFKTGKKSFWSFVTVKSLFTNRKVLGEFQFHKFEKDENGRYLQCSNGRRIRKAVGEPIKDYLPAIIDPATFAKARKILVDRPSQRGRKSPACLNLFTKVAFDRKTGETIQIHTGGGLTKAAIARGLKNAWTYMPAGIRVGARKGPNWVGWHLEELFFASITQALKVEGSVAGAEADLALAEEQLEEVKKTIKGLEKFLLDSIGKEDFDPSGMRDHLEAQQKVLKFKKEEIEKLKDEIHAGAGAIRLDPKQKDRKKLMEVIRANVQRIDLDCEKQEFRCVLMNGIEYEVKKVEGGWRIKSDHFDPGEKEVFDSIKQLRKIQKKAA

SEQ ID NO: 9740 - protein, 560 aa, Unknown
  Description of Unknown: Integrase B9741 sequence
  cd00338,G3DSA:3.40.50.1390,PTHR30461,IPR036162,IPR006119, PF00239,SM00857,SSF53041
MSAAKSSSPRLDAIGIVRVSDAGQEDAWGIPRQKTAIAAAVKAHNLNLVRTVVITDVSGRHAEADPDFQKIFADLKKGMHVVLAEQSRLFRPGTFRDYGILEHFRIPGALIFTPTARIDVRTREGRQSVLLNGMMSGEELHTLHDRCCGAKQEIREAGLHPGGNQILPRGVKFIRVRDENGKITEELWKHDGVDSERMRIAYRLLIQEDLPYTHIAEKIGGGWWSGSVKASFMNPIWKGYRLYKYEAKGEEFIPKNAKPDKNGKIKPRRKMTLKPAPELVKIDLPGIVTDEEWARAQEIIAQRETKHRKLKVKNYKRPRHLANGIGYCVCGQALYGRYGSRGPHLDVYACKTQFKGGAGCGMKKVKRTEMDAAIETMITVNLLTANYVIETVELVAEPAAADPGRAQREAALAAVRKARANLLDLRLTGDITKERFVARDRELETEERSLQTLLPMPKPKAKPVDLGAQIAQVFAEFAFLSFPKKRSLLHRAVKEIMLDGRTIPSVTLRGGFLDGVNSSLRSTTQSPIDSLSDVVIRFPKPIEIQRTYVDGRSAGKRWSA

SEQ ID NO: 9741 - protein, 560 aa, Unknown
  Description of Unknown: Integrase B9742 sequence
  cd00338,PF13408,IPR011109,IPR038109,PF07508, Coil,PS51736,G3DSA:3.40.50.1390,PTHR30461,IPR036162, IPR006119,IPR025827,PS51737,PF00239,SM00857, G3DSA:1.10.10.2600,SSF53041
MAYRRVKDLIDTIGLRAVFYARVSTAEEEQLNAIELQIEENRNVILKNKWKKVDEYIDRSKSGTMVKGRDEYQRLYEDMLEDTFDIIVIKDQERLQRNTKDWYLFIDRLVQTGKLLYMYLDGKFYSPDDALITGIRAIIAEEFSRNLSKKLHNYHANRIEKARQGLEIDLQGSGNVFGWDKKDGKYILNPEQAKVRRLMCEGIMARKGSTQIAKELNEAGYRNTVGNPWKPMDIPKFVYDCKNVGTMIINKEKHDFESKQVVKLPEEEWVYVKGALPPIVTEEEWDLICKIHDERVIATGSDHRGKGKKISGYSFSGKLVCGECGAPYWRKTKTSKEEYWVCSTKQTKGRKTRKRDAVGGKAGELNELGCDNENISYGALMDVMRIISERLQANTDVIKADMVNWLTSLKKQLQRGNAGFTEADLKREELRKERLLDALLDGVLTKEEYSKKALTIDLKITEIKKEMLSNQNSLEDIAEIDRVLANIDAEVATYLDENNQLKVDFILEHLQQVEIYPDRVVVMIPLFSEGMVVYKTQYVSGSKWCRKDYSYEGYSRNIKN

SEQ ID NO: 9742 - protein, 560 aa, Unknown
  Description of Unknown: Integrase B9743 sequence
  cd00338,PF13408,IPR011109,IPR038109,PF07508, Coil,PS51736,G3DSA:3.40.50.1390,IPR036162,PTHR30461, IPR006119,PTHR30461:SF3,PS51737,IPR025827,PF00239, SM00857,G3DSA:1.10.10.2600,SSF53041
VKRAAIYARFSSDLQSDRSIEDQVTLCQAKAARDGFKIVATFSDRARSGASIHGRAGIAELLAAAKAGQFDVLIVEELDRLSRSQADLASIYDRLTFVGIDILTVHGGAGRTDQIQVGIRGIVGALFLTDLAHKVRRGAAGNIRLGKHAGGLAYGYDTTPGQPGAWTINEEQAAIVRRIFTAYLAGERTPAIARSLNADGIKPPRGSYWQPGALTGSNNRHNGIMGNEIYCGRLVWNRVRMIKDPETGKRVSRPNPETEWQRAEVPHLMIVPPEVFDQAAALKASRGNLAPTHRRAPKALLSGLLKCGSCGGGMSIKGRDRGGVRIVCTTFHNAKLCANNRTYYLHHVEETVLSGLRRHLVDPRAIKHFLKCYHDERKRLVVEASRERPDLERRLGEATRKLARLTEAMLDSDAPVASFTTRIAELEREKAEIEARLAQMSEPVRVIALHPAAQEHYLKVVNDLAAAVRDRADRSAMAAPVRDLVDSVIVHRTLPGEPIRLTVNGRLAALIGQPVFPQGSLSGVKLVAGARYGIEPRVDVPVFAMEFFGARKMGRTAPHP

SEQ ID NO: 9743 - protein, 560 aa, Unknown
  Description of Unknown: Integrase B9744 sequence
  cd00338,IPR011109,IPR038109,PF07508,IPR036162,PTHR30461 ,IPR006119,G3DSA:3.40.50.1390,mobidb-lite,PTHR30461:SF3, PS51737,PF00239,SM00857,G3DSA:1.10.10.2600,SSF53041
MQLAAPPKDVTTAGSKAAQYVRMSTDAQKYSLENQMAAIAAHAARRHMSIVRTYADAGRSGLRIQGREGLQDLIRDVQLGRADFDCVLVYDITRWGRFQDVDESAYYEFICKRAGVRVHYCADEFENDGSLASIVLKNIKRVAAADYSKQLSKKVFLGQCNVVSLGYWRGGPAGYGLRRMLLDDRGKRRGILEYGEQKSLKSQRTILVPGPASEQKVVRRIFSAFVNEKKSRTQIAGDLNADGILNARGKLWTSLTISNTLKNEAYAGHLVYNRRSQKLGERQVTNPPDMWVRRNNAFKPLVAPRLFAKAQRRLAEVEHGRVLTDDQMLDRLRALLRREGRLSLKLMMTTKGIPHSKTYAQRFGSLAEAFRRVGYEPKSRYCFKETAAKADRLIASVARNIIAEVEKRRRSISFLQELHLLTISSSVTVSLTLARVVSDGERYAPPGPRWEVQRLKYKKSDLVLVIRLEPSQGGIKDFFLLPAANLPKTRDGRVRISTRVFGEFRCPTFAAVISALHQRLDGPQWSWPTIDPHMHPRPKKGVSARNKSPARGASRTGPEV

SEQ ID NO: 9744 - protein, 560 aa, Unknown
  Description of Unknown: Integrase B9745 sequence
  IPR038109,PS00397,IPR006119,PS51737, PF00239,G3DSA:3.40.50.1390,PTHR30461,IPR025827, SM00857,G3DSA:1.10.10.2600,SSF53041,IPR011109, PF07508,PS51736,IPR006118,cd00338,PF13408,IPR036162,PTHR30461:SF3
MKIAVVYIRVSTEEQSKHGFSVETQTNTCFEFAERQGYIIKRIFVEEGLSAGSLKRPEAQKLLKYCNESKNGINAIIVWRLDRLSRFCVDYHGTIRPILINKNIKLLSATEFNSDTIEGEYMRNIMMCNAEYELSLIRFRTKENMKTIARSGRRPAKAPIGYLNVDDEFTLHKKIIVDEVTAPFIKRAFELYSTGMYSFKSLGEQLYLEGFRHPKTGEKFPPRKFDWLLHNPFYIGRFEWSGEWYEGTHTPIVSKELFYRVQARFADVDRTKKHDVKFAYTGLIKCSECGCYLTAEFKRGKNKKGHYIYYHCANSKGVHKSLKCHREEKFDNTFANILETIHLEEKHIQHLKLLASDYLKEFMEYEERVVADLKQRIDVITKRIKNSYIDKLEGRIPAGMSEEEFNSLHKEWQEEKDLLLIRLNEANISSKHVYQKIEKVLTFANHLPELFLKAEPEEKKLIVTTMTKSVKFDGENLIVNLKDTFKALQNVKKCVLETCENDNLRTLKTLANTKKDPHSEGLIKNGARNGLLLEPLQLLYNITKSEECQEIIDNLLQLVA

SEQ ID NO: 9745 - protein, 560 aa, Unknown
  Description of Unknown: Integrase B9746 sequence
  IPR011109,IPR038109,PF07508,PS51736,IPR036162, PTHR30461,IPR006119,G3DSA:3.40.50.1390,PS51737,PF00239, SM00857,cd03768,G3DSA:1.10.10.2600,SSF53041
VKRGSFACAIYTRKSSEEGLEQGFNSLDAQREACEAYVLSQQHEGWHALATHYDDGGFSGGTMKRPALQRLLADVQARRLRIVVVYKVDRLTRSLADFAKIVEQFDACGVSFVSVTQQFNTTSSMGRLTLNVLLSFAQFEREVTGERIRDKIAASKQKGMWMGGMVPIGYRANGRTLEVDAADAALVGRLYSRYLALGSVRALKDELDRDGMVTPGRVSNGGRAYGGRPFSRGQLYRILASPVYLGKIQHKDQVHAGQHPAIIDMELWEAVQAKLLENRQGHRERQTSPSTSLLAGRLVDHQGRRLIPSHSQKRAKRYRYYVSEPLVTKNRDHAPDGLRLPAQELETVVVDALRHWLVDADAVLEALAGIPPARVQSVLAESHRLAKDLDEAAKQYAAIHRLVQQVVVESQSVQVIVQPMALLTHDATNHASGHQPTVTLAMPVQIRRCGLAMRLLVTGARPQRREPDTRLVALQAKAQRWLEQLTSGRATSIAAIAEAEDVTCSFATRVIYRAFLAPDIVRAILDGTQPPNLTSDALRQRVPLPIDWATQRQLLGFIPA

SEQ ID NO: 9746 - protein, 522 aa, Unknown
  Description of Unknown: Integrase B9747 sequence
  cd00338,PF13408,IPR011109,IPR038109, PF07508,Coil,PS51736,G3DSA:3.40.50.1390, IPR006119,IPR036162,PTHR30461,PTHR30461:SF3, IPR025827,PS51737,PF00239,SM00857,G3DSA:1.10.10.2600,SSF53041
VAKTVRTIPATISRYTAAPINSRKKRRVAGYARVSTDHDDQVTSYAAQVDYYTNYIKERNDWEFVGIYTDEGISATNTRHRDGFKRMVRDAMDGKIDLIVTKSVSRFARNTVDSLTTVRKLKDKGIEIYFEKENIWTLDAKGELLITIMSSLAQEESRSISENVTWGHRKRFADGKVCVPFGHFLGYDRGPDGNLVVNREQAKTVKLIYRLFLDGYTFHSIARELTSRGLETPARKKRWYPGTVESILTNEKYKGDALLQKRFTVNFLTKETKANEGEVPQYYVENNHEAIISPQVFDWVQEEIKRRREGRGRYSGVSIFSSKIKCGQCGGWYGAKVWHSTDKYRRTIYRCNDKFKSHCKTPHLTEDDIKEAFVRAVNQLIENKADVLDSITLLKERLTDTEDLEEERDRISTDLNLLADKIQQLIAENARVAQNQDDYDRNYNELVSRYEAAKTQYDKTCEAIQYRKARSRQMDSFIKELRNQDLIKEFDARLWGSLVDFITVYSKDDIRVTFKDGTEIRA

SEQ ID NO: 9747 - protein, 559 aa, Unknown
  Description of Unknown: Integrase B9748 sequence
  cd00338,PF13408,Coil,G3DSA:3.40.50.1390,PTHR30461, IPR006119,IPR036162,mobidb-lite,PTHR30461:SF3,IPR025827, PF00239,SM00857,SSF53041
MDLILSYLPPPSTLPPGSIVDSYRRDSGGMRQDKSTDQQLTELEAYCKEHNLVHRHCFVDEAKSGKSTAGRDDFNRMIETYEIPSNRPVGLLLWNYARFARDIDDAQFNKIRLRQWGITVHSLNDQIPEGDYGRVIEFLIDVSNEEKRKQTSIDAKRGLWDLVQKYGCVPGIPPRGFKREPVNLGPRRDKTEHIAHRWVPDPEWTPRIKRAFQMKAEGATLLQIHKETHIYNALNSYRTFFSNELYIGILHFGGHVVQHYCDPIVDLPTWDAIQKIQSLHANRQHVTAKNSLHPRRKSEAATYLLSGIGYCARCGSPLWGMSSKQRSGSYYYRYACTKAKRQRDCDLQPIPARALEALVISELTHWFEHPDNLRDLLEASQQFDAQFATRQKAAAKEIQKDLGAVRRSIVNVTDAISQLKNKKSKALLAKLESLESEETDLETRLEKVKTQTPVVPPPLTEEQILFLSKRLVTELNTKDPATQRRVLLATIHAVTVDRTGSYGYCHIDLKHRPRETQAPEEPGGQWYTVSISRAPVGAHLYRRSIEFEFTIATKKSHSV

SEQ ID NO: 9748 - protein, 559 aa, Unknown
  Description of Unknown: Integrase B9749 sequence
  PS00397,IPR038109,IPR006119,PS51737,PF00239 ,G3DSA:3.40.50.1390,PTHR30461,IPR025827,SM00857 ,G3DSA:1.10.10.2600,SSF53041,IPR011109,PF07508,PS51736 ,IPR006118,cd00338,PF13408,Coil,IPR036162,PTHR30461:SF3
LLILKGDQKLSTDNIMHLIGKINALIYARVSTTDQANKGFSIESQIERCKERAISKFGYKESEIIALVEPGGMGDDPNRPALNHALYLLEKGLGKKFIVLHPDRLTRDNTLQGVVSRRIWGMGVDIEFIEFEVNPHDPESMLMYNIQGSIAQYNKAKIHANSKRGRLAKAKKGEFPSFKRLYGYKFNTVTDLPEYNEEEKEILLEMKDMLLNKKMSSNEIAKELSRRGVAAPNGKTWYQATVSRMLQNEDYTGDFYYGKSKVVQINGKKKQVPTNKDEWILIKIPPMWDKATREQIIERLKSNFKGRSRATKDYLLKNKAKCGRCGGACGSGITSKTKSGVYKYYSCRAKTAKGYQNGKKVVSCEGKNWRVDIVDEVFWNWFIKLLKNPEKFLESFLEEASDQKKIDELKAKASRLEKQLGEIDEEIANYVILFGKGKIKESMFDQLSQPLEQNKEHIENEIKIINSQLAANKQTEDKKQKMIEYIGSFSKMIKNEITIEEKRQFLDFFIEKVTLFDDDHMEVVWKSSSLNNENSHVDFLNGEQGGEFINSHKRLNHIQ

SEQ ID NO: 9749 - protein, 559 aa, Unknown
  Description of Unknown: Integrase B9750 sequence
  cd00338,PF13408,Coil,IPR036162,IPR006119, G3DSA:3.40.50.1390,PTHR30461,IPR025827,PF00239,SM00857, SSF53041
AHPSDTIPIRGRFSIVSVMRCSLTGLVYSYMRFSDPRQASGHSSDRQAAYAAKWAAEHALILDESLSMRDEGLSAYHQRHVKSGALGVFLAAVEEGRIPQGSVLVVEGLDRLSRAEPIQAQAQLAHIVNAGITVVTASDGKEYSRERLKANPMDLVYSLLVMIRAHEESDTKSKRVLASIRRQCEGWLAGTYRGLIRNGKDPVWLRLVDGKWEEIPERVAAAREGLRLYLMGYGATKIIERLTEQNLSLTGRGPQALQIYRLIKQRALIGDKELTLGSESYQLPGYYPALLTKAEWDGLQLANSGRGRRKAKGPVPHILTGIGITVCGYCGRALVGQNIGTRNRDELGRIQNGHRRLHCTSYSHGGCSVGGSVSVYPFERALMEYCSDIVNLQALYGADRSAGPLAKLTKARQDLVDVDNKLEKLTDAMLASAEDGVPLTFAKRARELEAEQQRLQALVQEAERDLAATARTDIQGTDAAWKRLAAGVEAQDYDARLQTRQLVADTFERIVIYQRGVRPTEDKGPMDMMLLAKGGTARLLRIGRDGQLILAESLEQPTS

SEQ ID NO: 9750 - protein, 558 aa, Unknown
  Description of Unknown: Integrase B9751 sequence
  cd00338,PF13408,IPR011109,PS00397, PF07508,Coil,IPR038109,PS51736, G3DSA:3.40.50.1390,IPR006119,IPR036162,PTHR30461, IPR025827,PF00239,SM00857,G3DSA:1.10.10.2600,IPR006118,SSF53041
MKRVIGYIRVSTDNQDLERQRVLIRKYCENKGYSLLRIEEDYAISGTVSNRNGLNSILNITNSVADMVVVSELSRLSRQDDIFETLTQIHTIIRNVDLVILDEPDKVYEAGKTIILSDFLMLAIKAYGAADERKKIVSRMTTGKDSKVQAFPLMLTDSNIPTGFKAVPNPNYIKGATPKMLLVEDEERMQLVRDIFNYVANGLSLGKTAEKLNMLGYRTARNKPFYEQSIRTIINDSIYNGVRYWKGMKLELPVKFISDEIWNLAHKKVQENKNYSGEAQKHYNPLKGIIKCPCGQTSMYGRTSSCITYRCLDRIKMGIKSPCTNVGIKAETLIYAVWKDVRLRTLDETYQAKSNEKIAEIEAENIKLTQSIKEKDSETAKLQSDLKTVIDNVMASTNIAIVKALNGKADSIDSQIKSIETEKKAIDEEIASNNRRIADEIKSLSRKELDSLSLEGKGEMFRELLSKVVYYSVSLNSGFIVITYKNDLETIIAYHNRNKPFLWALPTTFRFNKVKRTVIVPTLPEQPKMTSFVLERITEKEYTFKQLQESFNLEEWKI

SEQ ID NO: 9751 - protein, 558 aa, Unknown
  Description of Unknown: Integrase B9752 sequence
  cd00338,PF13408,IPR011109,IPR038109,PF07508, Coil,PS51736,G3DSA:3.40.50.1390,PTHR30461,IPR036162, IPR006119,PTHR30461:SF3,IPR025827,PS51737,PF00239, SM00857,G3DSA:1.10.10.2600,SSF53041
MRKKFNIDLSMLTPEEQQQFHDDPTTLTKGEVDVALYLRFSSERQTEQSIEGQLRDCIAYCKRKSFRIVAIYVDRATTARKDVEKRVHFQEMISDSAHHLWNFVVVWKLDRFARNREDSAVFKMRLRKNGVRVKSATETISENPEGIILESVLEGIAEYYSADLSQKITRGLRESAMKGHSVGGHVPLGYKIEDHKLVINPATAHIVQEAFQLYANGESMAEICRIFNSKGYRTAKNSEFNRSSFKSMFKNVRYIGTYIYKDIKKENAIPAIIDKDLFETVQRRLSLAADAPARGKAKVDYLLSGKLFCGHCGATMNGESGTSKTGAIHNYYTCYSRKRRKGCDKKPLKKDFIERIVAQDAMALLTNDVIEELADMAMSQADRDLKENTCIPELSTRLTEIEQGINNITKAIEKGIASDTLLNRLTELEKEKKDLTSQLREEEKYICRIDRDQIIFWLTKFQGGNIEDEDCRRRIIDLLVNSVTVWDEPDGYKITTAYNLTSCKTKTFRVSNTGSPSSEGFGFGELSSTKSKIRTFVRRDRGSDFSCLQLVLSRNEFK

SEQ ID NO: 9752 - protein, 558 aa, Unknown
  Description of Unknown: Integrase B9753 sequence
  cd00338,IPR011109,PF07508,Coil,IPR036162,PTHR30461 ,IPR006119,G3DSA:3.40.50.1390,mobidb-lite,PTHR30461:SF3, PF00239,SM00857,SSF53041
MKSPVTAYSYERVSQPQQAKGRGLGRQSDAAAAWAVSHGLTLDTSLQLSDAGRSASKGHHLTKGALGRFLQLAQGGKLGGSPILLVEAIDRLSRQEPLDAIETILTGLVGSGVRIITLEDGAEYSRETLRSDPTKLLVLVVKMQAAYEYSARLGMRIRDSWDKAREQIRNGTIARPRQFCPAWCDWEPKQGYSLNAKAETARLIMQMLQDQGSYVVAQHLNGIGVPTFKGKRWTHANVREVATSPAIYGALRLNTKPGNGSPVEIYEGLLPAVVTKAEALAIRQQLAQRARSGAAGPITNTRWIGQRLTHCACGKRMGCTIGGSPGKRVYYLRCRHRENERQGCARPGMLLQAATAHLLTRLERPQLEQLIASCQQSDQHYNRQAMVDAAQQRCDELQLQHNNTLKAYKAAARSGVDLTAALQVQGEVEAELREAQQALRDAQQLLAQLEGVQGATEALEPVLELQRAFALGLDTSEQRRAVNLALRKMGLSITVDTSTAEIGLAIGDAPPQWQPIRQLDRSALYWGDKVQEKAGLVVAGREADFAAELSRCAGLEIT

SEQ ID NO: 9753 - protein, 557 aa, Unknown
  Description of Unknown: Integrase B9754 sequence
  cd00338,PF13408,IPR011109,IPR038109, PF07508,Coil,PS51736,G3DSA:3.40.50.1390, IPR036162,PTHR30461,IPR006119,PTHR30461:SF3, IPR025827,PS51737,PF00239,SM00857,G3DSA:1.10.10.2600,SSF53041
MEKKLERIKIACYIRVSTDKEEQIASLSKQHEFFEDIAKQHDYELVKIYADEGISGKQLKNRVEFQQMIVDARLGKFSLILVKDISRLARNTLDFLQVIRKLKKYNCDINFVNQGMKLQETSEVYLTILASLAQEESSKLSERVKFGKDITAKKGRVPNFVFGYDKVDNYTLTINEEEKIIVEKIFDLFVNEGYGSGKIAGVLNDLKVITKRTKKSQWHQVVVCQILRNRLYVGKVVNKQSQVVDFITGTRESIPLENQIIIDRPQFRIIDDIMFNRAQDILEGRRDTFHMMNKKESTKYPLSNLIRCSECGYAFRRMQRKYSTDGKTYKRWVDSLRNSMGKDACCNKVIIDEEELEDYIKLLIQQMFKNKTKIIKGVSARLKEIIKEKNKGTINNQKDIQVELDSLMKQKQKYMEMFQNEIIEMEELKDYTKGINDQISIHKISIHAVNNANEITLNIESIVKKYFDNMSNIIEEGEYTNEALKTLIKSIMIYPDGTIEVSLVISNEHNLNLILPLEQIDIPLENTVPNTNDNTHCTYKKERFKVVFQVEGISDKG

SEQ ID NO: 9754 - protein, 440 aa, Unknown
  Description of Unknown: Integrase B9755 sequence
  cd00338,PF13408,IPR011109,IPR038109,PF07508, PS51736,IPR036162,IPR006119,G3DSA:3.40.50.1390,PTHR30461, mobidb-lite,PTHR30461:SF3,PS51737,IPR025827,PF00239, SM00857,G3DSA:1.10.10.2600,SSF53041
MYATKGVRTMKNVFDITPQQTKPQRKKRVAAYARVSTGKDAMLHSLKAQIDYYHDYINQNPEWEFAGIYADEAKTGTKDSREQFQLLLKDCRAGKIDLVVTKAISRFARNTVTLLETVRELQCLGIDVYFEEQNIYTLSADGELMLTLLASFAQEESLSASENQKWRIRKGFEQGKASTCQMLGYRLVDGEITIVPEEAETVRRIFELYHQGYGMQKISNIINEEGHRTVKGREWRVSKVRSVLKNEKYTGDLLLQKCFVRDHVSKACVPNRGELPQYYVEEDHEAIVDKDIFGSVQALMAQRRAEYTHSKGHESAFSRKIRCSICGKNYRRKTTAYNVVWCCSTFNTKGKKYCASKVIPEATLQAAAAEVMGLHHFDEANFESQIDHIEACPDNLLRFVFVSGTVREYRWKDRSRRESWTDEMRETARKKALERSSANG

SEQ ID NO: 9755 - protein, 556 aa, Unknown
  Description of Unknown: Integrase B9756 sequence
  IPR011109,IPR038109,PF07508,Coil,PS51736, IPR036162,IPR006119,PTHR30461,G3DSA:3.40.50.1390,PTHR30461:SF3, PS51737,PF00239,SM00857,cd03768,G3DSA:1.10.10.2600, SSF53041
MPTKKRPAAAAGHRYCIYARVSPKGSSWAAQETSIGVQLQECRQYILDRVDPLAQFTEVADEFRSGKDLNRPGMQQILGDIESGRPSFDTLVVWQLDRLSRNLADAAPLFERLRDAGLGFVSIRQSYLSATGAMARFNLTQTIAIAQLEREMTSERISAKMHWIAQNGKVPWGIVPFGYRRRTDVKNTVEVVPEEAEVVRKIFAAYLSGVDRGDLSTLRRLQEEHRDRISDVKHVYRLLRNRFYVGEISYNGEVFRGEHEPIIERDVFDAVQSRLPGKKYHPARPGRRKYPYLLSGLVRCCCDPARHMRPASVKKKDKRYFYYKCTDSGCGCAINAEKLDAAVLEALRRVATDPEYIRECYDVCQRRIAEARRKQQPRITAALEERDTAEAELKHIDGMFMSGVISPANMDYWNEKLVAARERVEKAKREYADLVAALEPLEDQLKVSAVIKSLSAWATALDDAADDVALKRNLIEAMVFRVRCVKHGEFEIDLALDTISGKNKIGITSDVEVMPNGGEWWFSRHLNITLIVAIAVNKHYRKKEPRNGESLGTVAV

SEQ ID NO: 9756 - protein, 556 aa, Unknown
  Description of Unknown: Integrase B9757 sequence
  cd00338,PF13408,IPR011109,IPR038109,PF07508, Coil,PS51736,IPR036162,IPR006119,PTHR30461, G3DSA:3.40.50.1390,PTHR30461:SF3,IPR025827,PS51737,PF00239, SM00857,G3DSA:1.10.10.2600,SSF53041
MEKDAMKITKFPIDLSMLTEEEIDQFRQDPSTLFEGDTDVCLYLRFSSERQREQSIEGQLRDCRTFCKLNSYRITAIYVDRATTARKDVEKRVHFQEMIRDSEKKPWEYVVVWKLDRFARNRTDSALFKFRLRKNGVKVISATENISEKPEGIILEAVLEGMAEFYSADLSQKITRGMRESALKCHSIGGHVPLGYKIEDHKLVINPATAHIVQEAFELYANGETVADICRIFNTKGYRTAKGVEFNRNSFKSMFRNKRYIGVYTYKDIEVEGGVPAIIDKELFETVGHRLSKNAEAPARGKAKVDYLLAGKLFCGHCGGSMNGESGTSKTGAIHNYYTCYTRKRKHACDKKPLKKDWIEYIVAQDAMELLTDDTIQELADMAISQTEQDLRENTRIPELTDRMKETESGITNITKAIEKGIASDALMNRLVELEKEKKNLLRLLAEEEKYVCKIERSQIVYWLTEFKGGRIEDERYRRIIIDLMINSVTVWDEPDGFRITTAYNLTSCKSKTFRIAPSGEKGFGFEGSECTIERISEPYIVWGKIFVQTKRHPLP

SEQ ID NO: 9757 - protein, 556 aa, Unknown
  Description of Unknown: Integrase B9758 sequence
  cd00338,PF13408,IPR011109,IPR038109,PF07508, Coil,PS51736,IPR036162,PTHR30461,IPR006119, G3DSA:3.40.50.1390,mobidb-lite,PS51737,IPR025827,PF00239, SM00857,G3DSA:1.10.10.2600,SSF53041
MDEFAARPVADILARYSTDNQNPVTIDVQVEKCREWCERNGYQVGKIFSDEAVSGMKETRAGYEACMMHLGMGGAQLVVVYDQSRMFREFTEWFQFRKDVDMLGARVASVTQPMVGGDLKDPAVFINEAATAMLNHAQVLITRQKTIDALKHNAREGKSSGGKPPLGYDLDKDKKYVVNEHEAEAVRLVFQLFARGFSYGEIIDELNSRGYLTKRGQPFGKNSIFDLLKNEKYIGRLVYGATKAQADGRWNSHAKSKEDAIVVENGVPAIIEQELWEQVQSRIRTRKGAGGRYSAKREYLLTGRVFCGDCGASMVVMGSKASGYQYYECNNKRRTHTCKMKNVRTEWLEQTVAASIKQMLTEPANIEMLVDVARDQERQITTEYDTRRAELASRYTRVCHQLENGVNALLEGVVSSELKEKVRHLEEEKAEIEAETAELNQYKGYVGLDDATIRRCVENVAKVDINTSEGLKLILAVVSRVNIRTDTIEIKTLISMDGTDPDPTKSRPQHLELFPSESASGEKYHTTPENGSGHHCQQTRTCFCMRAGSGLFFVWT

SEQ ID NO: 9758 - protein, 556 aa, Unknown
  Description of Unknown: Integrase B9759 sequence
  cd00338,PF13408,IPR011109,IPR038109,PF07508, Coil,PS51736,G3DSA:3.40.50.1390,IPR006119,IPR036162, PTHR30461,PTHR30461:SF3,PS51737,IPR025827,PF00239, SM00857,G3DSA:1.10.10.2600,SSF53041
MVKIKYNGTAWQQSYGPGELAVVYARFSSHKQGEQSIEGQLAAAHAYAAARGYQIIHEYIDRAMTGRNDNRDEFQQMLSDCTKKQFSVIIVWKVDRFGRNREEITFNKYHCKKHGVRVEYVAENMGEGPESVILESVLEGMAEYYSLQLSQNIRRGNRENAKKCRFTGGRVPLGYKLDKDHQFVIDPDTAPLVRRIYAMYAEGQTITEIIDQLNAEGLRTGQGNRYTKNSLRTILKNEKYIGIYDFKNGEIRIEDGVPAIVDKEIFYKVQKLLAINQRAPAAKWNRADYLLTNKLFCGSCGAQMVGESGTSKTGAKYNYYLCINHKRGNTCARKAIRQDWLEPFVLTKTQELIMDDEVIQYITNNVWEYYLRQDQQRDKVTSLKAQIAEVEKAINNLMRAIEAGMPLTEMTKNRLTELDGQQQALNAAIAQTQLDGGFRLQKDHIQFFLEQFREMDFTDRKCQQRLIDVFVNSIFITDDELTINFNFGGDKSVIKFTDFKALSGENEFGCRALVSTINLSPPFCVNVQKTLLQKGGLNYLLKNDKNVLFSSILLPS

SEQ ID NO: 9759 - protein, 556 aa, Unknown
  Description of Unknown: Integrase B9760 sequence
  cd00338,PF13408,IPR011109,IPR038109,PF07508, Coil,G3DSA:3.40.50.1390,IPR036162,IPR006119,PTHR30461, PTHR30461:SF3,IPR025827,PS51737,PF00239,SM00857, G3DSA:1.10.10.2600,SSF53041
MCSFMSPTFVGRSKVHPTTLRDKEAMTAARVTRQQKYDQQALDQLKSRLPDGATFNGSIITLPVPPGTPKESLAAASLRVSKGRDTMISPEIQFDEIARHSKSKGLVLYRLFLDMHKTGREFEKRAVKQIVEEVKSGEYMNVVLWKWSRWGRNVRWSTVYLAMVEDAGGQVRSASEDIDPKTAIGKFTRTQLLAIAELESDLKSEDWRATHENRRTRGLPHSSAPRFGYNYEPDEGYTIKEDEAVVLKELYERFVSGVPMAVLTKEMNGRGILTRSGNAWTPTSLGRMLDTGFAAGFIRERSNPPAAINNKSTLKDFDIWRVGVHPTIVDPALFERYKAIRVSNASKPRRLVGGKHALSGMLLCGECGGTMVSIYNGRTNKHSWICGKRQRARRTGADGHIPVTISNRRALKLARAWVETNKKGETDMAGRVKKAATTPAPITNVDNLKARVDALKGERTELSRMKMKKQISQEDYDAFWAENNASLNQAEIDLDAARAAAPRVRTQGAVWETLSAVWDGAEPGELGRMLSSVLAAGVIRPGPYSEDKAVFVPAWD

SEQ ID NO: 9760 - protein, 555 aa, Unknown
  Description of Unknown: Integrase B9761 sequence
  cd00338,IPR011109,PF07508,Coil,IPR036162, PTHR30461,IPR006119,G3DSA:3.40.50.1390,PS51737,PF00239, SM00857,SSF53041
VANLATLLPEIKSLGDTPLERSIRDHAMARVKTAHAVAIGQPLFIFIETTWPTRPGMPQNAIILGRISDADDDETAGVEDQIEDQLDQCRRNGWGVGAIAIENDTSAYKTKKFHLPNGRIELRTDRPKFRAIVDRLYNRQNDGLIAHDLDRSVRDMRDLMDLIDVVQMSSPRIKVSSVTGSLRLENDADIAMAQVLTAMNNKSSKDTARRVSRAARRRAQEGKFHGGSRRFGFGLPTGEVDETKEPIIDQTKLVPEEAREIKTWAKAILSGASLASVVRDLNDRGVRPIRSDKWTSRTVKEILLRPSIAGLRDYRGQVLEGVKAEWPEIVTRETWEALVAKLGDSRRNSSPTNQPVWLVSCIAMCGHVNCKGQHHKMVVSGSVSARNNYRSYRCAFGKHNKIRADSLEKFVRDLIVERMARPDAGALIRPVATIDVEALAMQANELRVKLRKIRDLYEEETDMSIGEYRERRDSIKGRLDVVERHLVDASSIDPLSVLVGQEDVGARWDGLDIGRRRAIVERMMSITILSSERRGGRQPDGTYFDKSRVVIRWHV

SEQ ID NO: 9761 - protein, 555 aa, Unknown
  Description of Unknown: Integrase B9762 sequence
  cd00338,IPR011109,PS00397,IPR038109, Coil,PF07508,PS51736,IPR036162, IPR006119,PTHR30461,G3DSA:3.40.50.1390,PS51737, PF00239,SM00857,G3DSA:1.10.10.2600,IPR006118,SSF53041
MSKTVAIYVRVSTGKQADRDSIPFQIQECSNYVKHFLKTENFEVFKDAGRSGKNTHRPEYQRMIEKVKSGMISHVVVYKIDRISRNLVDFSIMYNDFKEHKVAFISLNEQFDTSSAIGEAVLKIILVFAELERKLTGERVRDIMMNRALEGKWNGARVPYGWDWDTKKQCPVHSDTEAEYARMMYRLYDECHSTCVVRDYCNAHDIPTKRGGEWTSKTVADFLRNPMNVGDYRYNYRKSARGKRNDPSEVIYVKDVFPPLIDRELYERVTHQMDLNTFGLGKDGRKVVSKKTHVFGGLVVCGLCGAFYHSDADVVRADGFRPSNYRCGAHNKKIHCKAKGTSDVKLGPFIFNYISNLVKASKSKKLLHSVSDLEQILLTGPEFEQVAGIADIGLDVTFDTIMHGFKPKRYTAAPYTVIRSGDSDALTAKRDKTIRALERLKKLFLFEDDAMSEKEYLMSKRELEGTLSDIENELSALEADTADTKYDDMSFISTASGFLIAHQIASGEHINYRELACAVDAKVLKDFVKRIVLLDGRVASIEFKNGLVHEFLYRE

SEQ ID NO: 9762 - protein, 555 aa, Unknown
  Description of Unknown: Integrase B9763 sequence
  cd00338,PF13408,IPR011109,IPR038109,PF07508, Coil,PS51736,IPR036162,IPR006119,G3DSA:3.40.50.1390, PTHR30461,PTHR30461:SF3,IPR025827,PS51737,PF00239, SM00857,G3DSA:1.10.10.2600,SSF53041
MDRIPGAFINARYSTDNQNPDSIEVQVEKCTEWCHRNNIPILGIFSDEATSGMKDSRPQYENMMMQLRQGIADTVVIYDQSRMFRKMTAWFAFRDELSALGVKVVSVTQPMIGKDLRDPTNFLTEGSMALFNQIWALQSRQKTVEKMRFMARNGQHTGGKPALGYMVENGRLVVCEAEAAIVRRIFQEYAGGYSYRQIIEGLNRDCLKTKRGSAFGANSLHDLLRNEKYIGVLTYGASPYREDGSRNTHKKDGANVIRIEDAIPPIVSKELFQKVQEKMAANKRQQGGRPAQKRDYPLKGKVFCAECKSAMIISTSKMKYDYYKCSGKKRKHTCISSPISANELESVVVDSVRQVLTPPENRKNLIRILQEERARIHAGAATTLQAIIVERRDVEKKLENATDAILAGLSSPTLLSKVRELENKKTALDAQAKSLKSSVDGSMIPDELLGGIIDHIVSSNEDASALLSIVSRVEVGINEITIWTIFDTDPSGEIDYTATGVSISPLIYPLAATGTDSPVTNTVGTASGVPYVHANFDRVGVDFFYYYTGIYPKYG

SEQ ID NO: 9763 - protein, 555 aa, Unknown
  Description of Unknown: Integrase B9764 sequence
  cd00338,PF13408,IPR011109,IPR038109,PF07508, Coil,PS51736,G3DSA:3.40.50.1390,IPR036162,PTHR30461, IPR006119,PTHR30461:SF3,IPR025827,PS51737,PF00239, SM00857,G3DSA:1.10.10.2600,SSF53041
MTTAAIYARFSSSNQRDASIADQVRNCQKWADRHGAKIIATYEDQAVSGVRQDRAGYNAIMDAAIVGAFNVLLVDDLSRLGRDMPEREKAIRRLEINGVRLIGISDGYDSSQGEMARRLQRGAKGLMDELYLVDLAAKTHRGLAGQVLQGNSAGGRAYGYISKPIEHATKLDAYGRPLVVGARKVINQDQAEWVQWIFEQYAAGRSCMWIASTLNEKGIKTLRGGTWSRSTLYGDKKRPGIGLLNNKLYIGLYVWNQSKWIRDPDTGKRRRIERPQDEWETQEMPDLRIIDQALWDAVKDRQIKSYIPHTVKRGGRPNQAKYLFSGMLKCDQCGSSYVMISKYSYGCSGARNRGKAHCTNKTAIPRKTIENTLLAGIKKDLSNKESLDLFIKETRLAITEMQAQDGRGALETELVAVNKKLENLTAAIMDGLRTETTLTALEKLESHKTEIQESISELEDLPSVSAMLPRAADIYRKKVADLGNNLNDIPAAQQAIRDLVGDEIRLKNSENGLVALISSAPFSALPLAGKTGGKTLVVAGARFGQRLHRPIKLAG

SEQ ID NO: 9764 - protein, 554 aa, Unknown
  Description of Unknown: Integrase B9765 sequence
  cd00338,PF13408,IPR011109,IPR038109,PF07508, Coil,PS51736,G3DSA:3.40.50.1390,IPR006119,IPR036162, PTHR30461,PTHR30461:SF3,PS51737,IPR025827,PF00239, SM00857,G3DSA:1.10.10.2600,SSF53041
MTKPSSTFPAGTRVVLYLRRSTDAHQEESLETQRTNGLAYCAARSWIVVDEFVDDAKSRAEFKKRPGLIRLLNHAKAREFALVVLRDESRLGGDMTRTGIVMQDLDDAGVGIVYYYTDELVSLDGAVDKFLIAARNFASELEREKISSRTYENLLNKAKAGRPAGGISYGYAIVNKSYVVKEPEAAIVRRIFAAYAAGAGQRTIARELNDERIPSPRAGRRGTGSWASSAVRAILMNPRYIGEARYNQTRKLYRGGTKIREKRAAGEHLTYACPAIVDRETFQRVSTRFRTNESFGSLPGASGAKPRYMLSGMSRCGECGGPITVARRKYGQTNTNVYVCGWRKDRGKSVCSNAIVERVDLVDARVAAALRALLTPDIITSAVRKVRSILAEQRAAAPAEGDRLRAEVDKLRREIDRLTAAIASTDAPPGALLQAVADRDSRLRQAELDLARVKAVGEPASRMLDELEFEARRRLHELREALADAGAGRRVLAALLAGERLRFESVDSRFAVRGMLDVSSLLRPDTSVPDCVASPAGFDTVRNALGPLQVPLAA

SEQ ID NO: 9765 - protein, 554 aa, Unknown
  Description of Unknown: Integrase B9766 sequence
  cd00338,PF13408,IPR011109,IPR038109,PF07508, Coil,PS51736,IPR036162,IPR006119,PTHR30461, G3DSA:3.40.50.1390,PTHR30461:SF3,IPR025827,PS51737,PF00239, SM00857,G3DSA:1.10.10.2600,SSF53041
MTRAAIYARFSSELQSDRSIDDQVVLCREYAARHGWTVTEAYADYAVSGSSVHGRFAFERLVADARAGRFDIILAEDLDRLSRNQADIAGLYERMQFAGVKLWTVGDGEISEMHIGLKGTMSALFLKALVLKIHRGMAGRVRAGKNPGGIAYGYRAVRMIDDRGEPVRGERSIDEQEAAVVRRIFADTLSGKTPREIAAALNSDGVPSPRGGHWNASTIHGSRKRGTGILRQELYAGRMVWNRQRFVKNPDTGRRVTRTNTAAQHQAADVPQLRIVDDGDWLKVQALLVARGGPHASHARKSPHIFSGLMRCGVCCGKYVSAGGSKYPRFICSRRKESGTCTNTRIVSARIIEDRTLAALERDLLDERLVAEVVREYTIERQRLKSSRRQHERRAANRLGEIDRAVRGLVALVEAGADPASVMPRLRELEGERAAIKAERPHPGREVIELHPGIGDRYRAIVRDLRASLGTRTADRKIDVIASVRSLVDRIVVYPHDDPAGRDLELVGQLAGLLGTAEQVVSGMMAVVAGEGFGRPHTSGRFQPVIIPFRSVAA

SEQ ID NO: 9766 - protein, 554 aa, Unknown
  Description of Unknown: Integrase B9767 sequence
  cd00338,PF13408,IPR011109,IPR038109,PF07508, Coil,PS51736,G3DSA:3.40.50.1390,IPR006119,IPR036162, PTHR30461,mobidb-lite,IPR025827,PS51737,PF00239, SM00857,G3DSA:1.10.10.2600,SSF53041
VEELDTRPVADILARYSTDNQNPVTIDVQVEKCREWCERNGYQVGKIFSDEAVSGMKETRAGYEACMMHLGMGGAQLVVVYDQSRMFREFTEWFQFRKDVDMLGARVASVTQPMVGGDLKDPAVFINEAATAMLNHAQVLITRQKTIDALKHNAREGKSSGGKPPLGYDLDKDKKYVVNEHEAEAVRLVFQLFARGFSYGEIIDELNSRGYLTKRGQPFGKNSIFDLLKNEKYIGRLVYGATKAQADGRWNSHAKSKEDAIVVENGVPAIIEQELWEQVQSRIRTRKGAGGRYSAKREYLLTGRVFCGDCGASMVVMGSKASGYQYYECNNKRRTHTCKMKNVRTEWLEQTVAASIKQMLTEPANIEMLVDVARDQERQITTEYDTRRAGLASRYTRVCRQLENGVNALLEGVVSAELKEKVRRLEEEKAEIEAETAELNQYKGYVGLDDATIRRCVENVAKVDIDTPEGLKLILSVVSRVNIHTDTIEIKTLISTDGTDPDPTNSRPQNLELFPSEGLSGEKYHTTPENGSGHHYQQTRTWSCMRAGSGLFFV

SEQ ID NO: 9767 - protein, 554 aa, Unknown
  Description of Unknown: Integrase B9768 sequence
  cd00338,PF13408,IPR011109,IPR038109,PF07508, Coil,PS51736,IPR036162,PTHR30461,IPR006119, G3DSA:3.40.50.1390,IPR025827,PS51737,PF00239,SM00857, G3DSA:1.10.10.2600,SSF53041
MATRRIHTNSETCVRVAVYARFSCDKQRDESIEDQLYEAERYCEKHGYMIVSVYTDYAISGRSDDRPQFLSMIEDAKAGAFDVVLVWKMDRFARNMQDQFFHEKILNDCGVRLESVKENISGNGIEASMSKGMHAIFAQIRSQQSAEDTMRGMVGKARKCQYLGYQWLGYTHDGDTITLDPATEGIAKAIHDRYLAGEAIKDIVQWLNTQGVTNRNGDPVGYQFVTGILKNWAYAGVYTWGKQKDDSGKPILDAYGLPIPLVRVENGIPAIVSQDVKERCLNRLGFRKHTNAKADYALSGKLFCSKCGHAMHGEMCRNKYGVECFRYVCRNKRRACTGVYWKDDVEHAIASSIRHALEDPALVELIAETFAEYQKSKRPTVSIEAAQADIKSLKRQRANLVKAVEDGMPFEHVKDRLEKIDAQQAGIERKIADLERTRNEITKADVLMMLSAIVDGARTDAEILGAFVYQARIYGDSAVAVLNLTDHETTPYEIDCAIRKLETAGKPTVSSIVSLVPPINRKTNPYAPVIYTDEGVPVILLENGIGFLVSLKAA

SEQ ID NO: 9768 - protein, 553 aa, Unknown
  Description of Unknown: Integrase B9769 sequence
  IPR011109,IPR038109,PF07508,PS51736,IPR036162, IPR006119,G3DSA:3.40.50.1390,PTHR30461,PTHR30461:SF3,PS51737, PF00239,SM00857,cd03768,G3DSA:1.10.10.2600,SSF53041
MKKVRCAIYTRKSSEEGLEQDFNSLHAQREACAAYILSQASEGWTLHPDEYDDGGLSGGTLERPALQRLMKDIEAGRIDIVVVYKVDRLSRSLLDFAKLVEAFDKANVSFVSVTQSFNTTNSMGRLTLNMLLSFAQFEREVTAERIRDKIAASKARGMWMGGNPPLGYQPNGRTLAIVEEHAGIVRRIFAYYLDLGNVRLVVGELSREGIIAPERTATTGRMTGGRPFTRGQIYKLLSNPIYIGEIHHKGQAHVGKHEPIIDRATWDSVQQMLAANLQGERSGSRAQSPSLLAGRIFDQHGEPLVAAHACKGKVRYRYYVNRSLQHDPDARSTDGLRIPALEIEAAVSRLLTEALDDPLSLLARAGIPLESNRLRMILNKAEQLAASVRSKQRAAIRDLIAKVTVQPHEISVELSVTALRAALAVGHPADTQTSIPLTSPVCLTRTGRAIRLVQRDGRPVSQGRPDPGLIDLLHKGRSWWQQLQTGTIDIATIARDEQVNDSWVSRLVRLNFLAPAIVEAILVGTQPASVTATSLRTANLPIDWDDQIALFGM

SEQ ID NO: 9769 - protein, 553 aa, Unknown
  Description of Unknown: Integrase B9770 sequence
  IPR038109,IPR006119,PS51737,PF00239, G3DSA:3.40.50.1390,PTHR30461,IPR025827,cd18688, SM00857,G3DSA:1.10.10.2600,SSF53041,IPR011109, PF07508,PS51736,cd00338,PF13408,Coil,IPR036162,PTHR30461:SF3
MQTIPIDLSALTPEERQQFADNPSVLSSDCEAVCCLYMRYSSDRQTEQSIEGQLRELIAYCKHHSYRVAAIYVDRAISAHASMDKRPAFQQMLADSARSSWKTVLVYKLDRFARNREDSAIARMRLRKNGCNVESAKEGISKNPEGVILEALLEGMAEYYSLELSQKVRRGMSETARKGNSTGGTTPLGYTVVDKRLQIDPMTAHLVEEAFRRYADGDTVAAICDDFNARGYRTTRGTKFNKSSFKNVFRNEKYIGVYKFDDVRTDNAVPRIISDELWRAVQSRLKASEQAPARGKAKVPYLLSGKIFCGHCGAPMVGECGRGKGGKTYNYYSCANRKKARLCDKKPVPKDWLEDVVAQDALDVLTDEIIEFVAEVAAQQSEEDIQKNTQIPVIRKKISEIENKIRNLTKALECASVAPDAIVERLAELEAQKKGLSTQLSDEERGVIPLTKESVVVYLKAVRENAVPLETQKAMLIEMLVNSVTVYDDEPGFLKFVTAYRLTQIPSKTYRVPTPAVSPCSDIGRVGSPLDANPNTITVVGMVFIQTRRHALP

SEQ ID NO: 9770 - protein, 553 aa, Unknown
  Description of Unknown: Integrase B9771 sequence
  cd00338,PF13408,IPR011109,IPR038109,PF07508, Coil,PS51736,IPR036162,IPR006119,PTHR30461, G3DSA:3.40.50.1390,PS51737,IPR025827,PF00239,SM00857, G3DSA:1.10.10.2600,SSF53041
MVQEKLRAVFYARVSTEEERQLNALEKQVAECKDAVLQKGWKLVDQYVDEGKSGTQIKRRDEYRRLFEDLENDKFDIVVIKSQDRLQRNTLDWYIWIDRLTTHGKRLYMYLEDTFYSPDNALISGIKAILAEEYSRELSKKINNSYKRRIEAAKNGEKISIVNNSRSLGYDKVNGELVINEKEADVVRMIFNMYASGEGLRAISNTLYDMGYRNRSGNEIDPTTISRMLSSEKYKGVYVINQRHYDFDTKKTVLNPKSEWVHIPGAVPAIVEPELWDRVQEIKGSKVQSIKNEKRGRNCGKSIFSGKIYCAKCGAKYWRSLENGYVKFKCSSYSKYGKIPGKGCDNKSFSENALYSILQSLSEQIVEVNTAEVRKSLLNWLESLRERLRASQGDDTIKEEIRKQTARKEKLTDAYMDGIISKEDYSKRYKELEKTLEDLKDKLLTLEVNEDLQSIEEVIQNIDKEMEEYLQTQSFNESRVEFLNQHLTKVTVNKDSFLLEFDLIGGAILTGKDFYLFVDNPRRDGQCRGDLYCTLWCGRKQCEPDGTGKAGKR

SEQ ID NO: 9771 - protein, 553 aa, Unknown
  Description of Unknown: Integrase B9772 sequence
  cd00338,PF13408,IPR011109,IPR038109,PF07508, Coil,PS51736,IPR036162,PTHR30461,IPR006119, G3DSA:3.40.50.1390,PTHR30461:SF3,IPR025827,PS51737,PF00239, SM00857,G3DSA:1.10.10.2600,SSF53041
MKKFPIDLSCLTEEEISQFQEDPYTLYNGDQNVAIYLRYSSTGQSDQSIEGQLRDCRTFCKANHYRIVAIYVDRATTARKDMEKRVHLMEMISDSAKQNWEYVIVWKLDRFARNRNDSAIMKMRLRKNGVKVLSATEHLTDSPESIILESVLEGMAEFFSAELSQKVTRGMRESALKCHSVGGHIPLGYKVENHKLVVDPDTAHIVQEAFSLYANGESVAAICRKFNSAGYKTAKNTEFNRSSFKAMFRNTRYIGTYTYKDIVIENGIPAIIDKELFETVQRRLSKTATAPARGKAKVDYLLSGKLFCGHCGASMNGESGAGRHGKVYHYYSCYTKKRKLGCDKRPLKKDYIEGIVARDALNLLTDQLIDEIADMAIRQSEQDLINDTHIPQLTAQLSEVEKSITNITAAIEKGIASETLMNRLVQLEHEKKTINKEIKAEEKFVYRIDRDQIVFWLSQFKYGNIEDENFRRRLIDLLVNSVTVWDEPDGYKITTAYNLTSCKTKTFRVEKNPAAEEATGFDFGESECTIERISEPYIVWGTVFVQTKRHSLP

SEQ ID NO: 9772 - protein, 553 aa, Unknown
  Description of Unknown: Integrase B9773 sequence
  cd00338,PF13408,IPR011109,Coil,G3DSA:3.40.50.1390, IPR006119,IPR036162,PTHR30461,PTHR30461:SF3,PS51737, IPR025827,PF00239,SM00857,SSF53041
MTIPPFPPGDRVAGYFRDSGGDEQDLSIERQVAEFRRWLAENDLHEGELFTDAAQPGSSTVGRAGFQSMLRHFRSGDIPETGLVIWRSNRFGRNTNESQFYKADIRRRGYIIYSLTDKIPTDRYGQVIEYLLDWKDQEFLETLSEDVASGLRHIVEAYGAMPGTPPRGFLRQPITVGARRSGQPHILHRWVPDETMIPLVRRAYQMLLDGASLIKIQTVTGLYPSLNSWATFFRNPLYKGVLHFKDLVIENYCEPVVDPLTWERAQRILDLRGGRRHLNADDPSLGAAEQARRIAQHPRRMASPWLLSGLARCARCSAPLNGHVILDHTYYECSRSVRRKDCNARKIPSAPLEAAVLDQIRKLLASPETLQAYQSDHLADYERAVSEFPARRQELVARLANLRRQISRLAAAVADHGHSPALLDKLTVLETQEYELKDELAQLDILLQARPEPLGPRRIQHLSERFEAILSTGSPEEQRKALAGWIPKLLVERQDKHSILVYMEVYVPPLPGPDPPGGRRKLTQHPPSAWGHLLVTLEITIPILRKQSVRLTS

SEQ ID NO: 9773 - protein, 553 aa, Unknown
  Description of Unknown: Integrase B9774 sequence
  cd00338,PF13408,IPR038109,Coil, IPR036162,PTHR30461,IPR006119,G3DSA:3.40.50.1390, IPR025827,PF00239,SM00857,G3DSA:1.10.10.2600, SSF53041
MYLPPPSTLPPGSIVDSYRRDSGGMRQDKSTDQQLTELEAYCKQYNLIHRHQFVDEAKSGKSTAGRDDFNRMIAEYEIPANRPAGLLLWNYARFARDIDDAQFNKIRLRQWGITVHSLNDQIPEGDYGRVIEFLIDVSNEEKRKQTSIDAKRGLWDLVNTYKCVPGTPPRGFKREPVNLGTRRDKTEHIAHRWVPDPDWIPRIKRAFQMKAEGATLQQIQNETHIYSSQNSYRTFFSNELYIGILHFGENTVKDYCNPIIDLSTWTAVQKLQSLHADRQNVTAKNNLHPRRKSESAPYLLSGIAFCTRCGSPLWGMTSGQRDGSYYRRYACTRARRRRDCDLQPIPARALENEVIKSLTHFFENPNNLQDLLEVSQQFDAEFVTRQKTIAKEIQKELTTVRRSIANVTDAIAKLKNKQSKALLAKLESLEGEETDLETRVQKVNSQTPVATPPLTEEQILLMSQTLVANFHTQDLTTIRGNILATVHQVRVDRTKSHGYCQITLKHRPRSSKTPEESGAIITASTVLPSVGAQSKDMLFSMSFYFIPASPLRG

SEQ ID NO: 9774 - protein, 553 aa, Unknown
  Description of Unknown: Integrase B9775 sequence
  cd00338,PF13408,Coil,G3DSA:3.40.50.1390,IPR036162, IPR006119,PTHR30461,mobidb-lite,PTHR30461:SF3,IPR025827, PF00239,SM00857,SSF53041
MNAHPFPAGSLVAAYFRDSGGDTQELSVPQQESAFRAWCAQNGLIPGAIFKDVARPGSSVISRMGFHDMIHHFRSGQAKEIGLVIWSYSRFARDFSDSQFYRADLRRRGYIFYSLNDDIPEGSMGKLFEAVIDWKNENFLEDLSRDTRRGLHDLVKNHGAVPGTPPRGFKREPITIGKRRNGQDRIAHRWTPNPDELPRIRQAFAMRAAGKTLAEIHVTTHLYGSLNSYQTFFTNKLYIGILEFGDLVIENYCEPVIDRITWETVQIFIKIFAKRLNLKAKSDNPGNPHHPRRINSRYLLSGLLYCARCGSPMFGATAPQRSGKICDRYACTRAYRRRDCNLMAVPQKAVEGAVLTTIREYILQPEVMQQHQQLLQNEHGRALEELDQKRAEINGLLGGVRRRIANVTNAIAESGHSRAMLDKLAALEAEETSFLAQLAGLERQAASPVPNLTSEQIIDMISNLSNTLETADLETAQRILRGFVNKIVVDRYETQVTGMIFYHYPLEDSSNKSPPDESSSVSLHPFPLGAPSHRHSFTAPFTAVIRSYKRKRP

SEQ ID NO: 9775 - protein, 553 aa, Unknown
  Description of Unknown: Integrase B9776 sequence
  cd00338,PF13408,IPR011109,IPR038109, PF07508,Coil,PS51736,IPR036162, IPR006119,PTHR30461,G3DSA:3.40.50.1390,PTHR30461:SF3, PS51737,IPR025827,PF00239,SM00857,G3DSA:1.10.10.2600,SSF53041
MKKFPIDLSCLTEEEISQFQEDPYTLYNGDQDVALYLRYSSTGQSDQSIEGQLRDCRTFCKANHYRIVAIYVDRATTARKDVEKRVHLMEMVADSAKQNWEYVIVWKLDRFARNRNDSAIMKMRLRKNGVKVLSATEHLTDSPESIILESVLEGMAEFFSAELSQKVTRGMRESALKCHSVGGHIPLGYKVENHKLVVDPDTAHIVQEAFSLYANGESVADICRKFNSAGYKTAKNTEFNRSSFKAMFRNTRYIGTYTYKDIVIENGIPAIIDKELFETVQRRLSKTATAPARGKAKVDYLLSGKLFCGHCGASMNGESGAGRHGKVYHYYSCYTKKRKLGCDKRPLKKDYIEGIVARDALNLLTDQLIDEIADMAIRQSEQDLINDTHIPQLTAQLSEVEKSITNITAAIEKGIASETLMNRLVQLEHEKKTLNKEIKAEEKFVYRIDRDQIVFWLSQFKYGNIEDEDFRRRLIDLLVNSVTVWDEPDGYKITTAYNLTSCKTKTFRVEKNPAAEEATGFDFGESECTIERISEPYIMWGTVFVQTKRHSLP

SEQ ID NO: 9776 - protein, 524 aa, Unknown
  Description of Unknown: Integrase B9777 sequence
  cd00338,PF13408,IPR011109,IPR038109,PF07508, PS51736,IPR036162,IPR006119,G3DSA:3.40.50.1390,PTHR30461, PTHR30461:SF3,IPR025827,PS51737,PF00239,SM00857, G3DSA:1.10.10.2600,SSF53041
VTANVTIIPPRKILGNTADKHKEKSKLRVAAYCRVSTEREEQATSYDTQVQHYTEYISRNPRWTFAGIYADDGISGTSTKKRIGFNEMIQDCMNGKVDMIITKSISRFARNTIDCLRFVRQLKDKKIPIIFEKENINTMEASGELLLTIMASLAQQESESLSQNVKLGLKFRYQEGKVQVNHTRFLGYTKNEEGKLIIVEKEAKVVRRIFREYLEGLSLRDIVNVLEKDGIKNGAGNLKWHTSNIKGILKNEKYIGDALLQKTITIDFINRVRIKNDGTEPQYYVKDDHAPIIPRDIFIQVQEEMIRRANLVSGENGKRKRVYSSKYALSGLCICSKCKDIYRRIIWNNRGVHSVVWRCCTRIKQGAKGCDASTVRETELQSVTVKAINMILQTPDDILEKLMKNIKQVLAFENTIEIDPIEKKIADRQVILMDRIKSKKDYTKIAAEIDELKDKEHKLLIVKAEQEDVKRRIKEMESFLKSEPKELIEYDASLVRKYIKRIEIYEDRFNVTFKSGISVNVNRI

SEQ ID NO: 9777 - protein, 552 aa, Unknown
  Description of Unknown: Integrase B9778 sequence
  cd00338,IPR011109,PF07508,Coil,G3DSA:3.40.50.1390, PTHR30461,IPR036162,IPR006119,PS51737,PF00239, SM00857,SSF53041
MPRLSSRVSGRTLTAADVQRRPRLRVLEEVQKPKKATLCVRISDARDYMDETGQRITDTEGVNLQITNGLEYADRIGWIIDKIRTENDVSEFKRKKVLQPNGRYALRTVRPDWQAVLDDLASGAQDGLLVIALDRSMRDPRDLEDLIDVVESRMPRIPVESVSGSLKLSSDAEVTMARNMVNYANLASRDTRRRVILRRIDQAEKGYWGGGRRPFGFGVPTGLKTPRGFPEFDVTRQVPAEVAEIKHAAESLLAGVSLRELAADLRRRNVATVTGGTWTSSSLRDVLLRPRNAGLSVYDGLILEGVLIEGVDEDHPPILERATWEAVAAILTNPQRRVGPGPAPRWLGSGLYLCGHPNCVGSNPRQTLIAGRSSGGGTRAYVCTGGKVHLARVAEATDEYVEGAIVLRLMDPDAVELCTPQPGVDTAALAAEANAIREVVADLGDLHQRRKITKAERERRTDELETELEGINRMLRGTAGTDPLAAIAGNPNAKELWADLPLATKRAIIRRVLRVTILPCKPGQPPGYKRGSRKNHVRPESIKMEWIVPDTR

SEQ ID NO: 9778 - protein, 552 aa, Unknown
  Description of Unknown: Integrase B9779 sequence
  cd00338,PF13408,IPR011109,IPR038109, PF07508,Coil,PS51736,G3DSA:3.40.50.1390, IPR036162,IPR006119,PTHR30461,PTHR30461:SF3, PS51737,IPR025827,PF00239,SM00857,G3DSA:1.10.10.2600,SSF53041
MPVRCVVYSRVSTDAQERDGTSLDSQERASIELAASRGWSVVRSIRDVASGFHLDREGIETLRGLLQRGEVDVVVAYAVDRLSRNQNHIGVLFDEIEQAGARLEFVTERFEDTAVGRFILAARAFIAEVEREKIAERTMRGKTERARGGRIPQGTGRGIYGYRYDSESGKRSVEPDQGATVRRLFEAFAEGRSCNRLADDLNAESVPAFGGGRWYPLTIRRILMNETYTGRTIYRRTQVQKVRDVARSRWVRRVTERDQEEWIEVEGATPAIISVELFERVRARLEDPARKERGHPSFDYPLRGRLRCEACGSAMVGQTLLKGRYHYYRCRRSYAGPRADRCQSPYVRKELLEEAVRAALVSVIADPARVLAEGKAEVGSDPTAGDRDRLDREIADVEAKQRRLVRLFTAGSLPEAMLAEESRALADRRARLEAERTDLVPLDAGRMTFEQVAARLPEALDAIRRWVEQADGGQLELLLDALNARITASRQQALIRGEVPLLESAHYRDLVTIERTSASPFRNDQIPTVPSLATNKSLLPPPLVSFQGVTSV

SEQ ID NO: 9779 - protein, 552 aa, Unknown
  Description of Unknown: Integrase B9780 sequence
  cd00338,PF13408,IPR011109,IPR038109,PF07508, Coil,PS51736,IPR036162,PTHR30461,G3DSA:3.40.50.1390, IPR006119,PTHR30461:SF3,PS51737,IPR025827,PF00239, SM00857,G3DSA:1.10.10.2600,SSF53041
MKLPIDLSCLTEEEISQFQEDPYTLYNGDQDVALYLRYSSTGQSDQSIEGQLRDCRTFCKANHYRIVAIYVDRATTARKDVEKRVHLMEMVADSAKQNWEYVIVWKLDRFARNRNDSAIMKMRLRKNGVKVLSATEHLTDSPESIILESVLEGMAEFFSAELSQKVTRGMRESALKCHSVGGHIPLGYKVENHKLVVDPDTAHIVQEAFSLYANGESVADICRKFNSAGYKTAKNTEFNRSSFKAMFRNTRYIGTYTYKDIVIENGIPAIIDKELFETVQRRLSKTATAPARGKAKVDYLLSGKLFCGHCGASMNGESGAGRHGKVYHYYSCYTKKRKLGCDKRPLKKDYIEGIVARDALNLLTDQLIDEIADMAIRQSEQDLINDTHIPQLTAQLTEVEKSITNITAAIEKGIASETLMNRLVQLEHEKKTINKEIKAEEKFVYRIDRDQIVFWLSQFKYGNIEDEDFRRRLIDLLVNSVTVWDEPDGYKITTAYNLTSCKTKTFRVEKNPAAEEATGFDFGESECTIERIFEPYIVWGTVFVQTKRHSLP

SEQ ID NO: 9780 - protein, 551 aa, Unknown
  Description of Unknown: Integrase B9781 sequence
  cd00338,PF13408,IPR011109,Coil,G3DSA:3.40.50.1390, PTHR30461,IPR006119,IPR036162,mobidb-lite,PTHR30461:SF3, IPR025827,PS51737,PF00239,SM00857,SSF53041
MTTPPFPPGDQVAGYFRDSGGDEQDLSVERQVAEFRRWLGENGLHEGQLFTDAARPGSTVVGRAGFQAMLRHFRAGDAAESGLIVWRSNRFGRNTNESQFYKADIRRRGYIIYSLTDKIPPDRYGQVIEYLLDWKDQEFLETLSEDVASGLRHIVETYGAMPGTPPRGFLRQPITVGTRRSGQPHVLHRWVPDETLLPLVRRAYQMLLDGASLIKIQTVTGLYGSLNSWATFFRNPLYKGVLHFKDLVIENYCEPVVDPVTWEQAQRILDLRAGRRHLNADDPSLDAAEQARRIAQHPRRMASPWLLSGLARCARCGAPLNGHVILDHTYYECSRSVRRKDCSATKIPSVPLEAAVLEQIRKLLASPEVLQAYETDHLADYERTIGEFPARRQELAARLGNLRRQISRLTNAIMDHGHSPALLDKLTALETQEYELNDELAQLDILLRAKPEPLSPRRIQRLAEHFEVILYKGSPEEQRKALAGWILKLLVERQDKHSILVYMEVYVPPLPGPDPPGGHRKLTQHPPSAWGHLLVALEFSIPIIRKQSNRR

SEQ ID NO: 9781 - protein, 551 aa, Unknown
  Description of Unknown: Integrase B9782 sequence
  cd00338,IPR011109,PF07508,PS51736, IPR036162,IPR006119,G3DSA:3.40.50.1390,PTHR30461, PTHR30461:SF3,PF00239,SM00857,SSF53041
MPPPLPVAQLLRVSTEGQADRLGLPAQETANGETCRRYGLEIVDTVRIVMSGADVATSPGMEQLLSLVESGRAKGIVVAAYDRLFRPERWSDLIVLQRLHDAGAGIWTPTGQIDLTTETGHIQATLYNLFAAMERRRIRERMAAGREEKRKRGDHCGFKHSIPLGLDWTEETGWSYTPEIARVAECFRLFLSGERSPEAIGARVGLGRTTVRYVLQNEAYTGWRVYDEKRGAEKLPCGDRRKVKRAEGEVLRVRLRDASGTPLPPVVSEEDFAAIQHHLEQGRLRSARANAETEGHFVYRGVLYCAVPGPEGDPCGCAFYHSAGARYTSGPRRGERKRFYHCRTINPRYGPPCGNPYLSEHLLDPVLDAALAGSLTDRALLRRALERFQTRAGAEAVSTPAFDAAALLARLEERRGRVLDAFVDGALTREERDARLARLDGERDRLLALGPVAPSPVPAARLSASDVLAVVRVFRRFHRRSYEAKRAALEAVRPRLFVDRYAVRGVWLDGRLFGATEASAGRNSGNLLQTVDAFATAPGLPRGGLYIPLAA

SEQ ID NO: 9782 - protein, 517 aa, Unknown
  Description of Unknown: Integrase B9783 sequence
  cd00338,PF13408,IPR011109,IPR038109,PF07508, Coil,PS51736,IPR036162,IPR006119,PTHR30461, G3DSA:3.40.50.1390,IPR025827,PS51737,PF00239,SM00857, G3DSA:1.10.10.2600,SSF53041
MLAEKKVQILKGRRSSANDVLRVAAYCRVSTDSEDQVNSFMAQMHYYYSFIQQAENMELVDVYADEGITGTSVAKRDDFNRMIKDCKLGKIDRIYVKSVSRFARNALECLEHIRILKDCGVSVFFENDGIDTQTLNSELILYIKSAFAQAEAVSGSKRVQTANRMRAENGEYVFMAAPYGYRIENNVLVPVPEQIAVVERIYKEYLAGNGVGKIVSLFNADPDIPDKPWRRERVRYILSNEKYVGDSLFQKSFTPSVLPFRNKRNHGEVDQYYISNTHTAIIDRELFDAVQEMVRRNKEEDAKKAKPKRYNFTGKIYCGYCGWAYKKRVQNGIVYWVCSHDGSAGQRCATKPISEEVFHKTFINFYNRLRFHENLILRSAVTRLTEVKRIITSMDSEIGEIDKQIGFLTERHKIYITLASENQIDEASFAEQCAMVEREINKYRNRRKKLLNEDEDERCIDEIRKLRDILSNAPAAIVEFDMNLFNAVVDKVIVEDESRLSFVLRCGLKLREAIAWN

SEQ ID NO: 9783 - protein, 551 aa, Unknown
  Description of Unknown: Integrase B9784 sequence
  cd00338,PF13408,IPR011109,IPR038109,PF07508, Coil,PS51736,IPR036162,IPR006119,PTHR30461, G3DSA:3.40.50.1390,PS51737,IPR025827,PF00239,SM00857, G3DSA:1.10.10.2600,SSF53041
LIIALPRQRIKGNAMARKQKPALRNRIAVIYARYSSSAQNDASIEQQVDKCQEYAKQKGFTITGTYADRAMSGRTDKRPEFQRMMKDAEQQQFSYVISWKSSRMGRNMMEAMMNDAQLRDCGVRCLYVEEDFDDTAAGRLALRTMMNVNQFHSENMAEDIMRGLEDNAKRCRVNGSIPMGYRKGEDGKFALDDSSAEIIREIFQRIAQGEIQANIAADLNARGITTKTGGRWGKNSFHNILNNERYTGVYIYGDIRIEGGIPAIINRDLYDRAQERVETMKTLVKSRRKRDNAEYILTGKLFCGHCKAAMVGASGTGKLGVMYYYYRCNNQAVAHTCTKRPVRKEKIELLVAASVREALLQDETVQWLADTFMRVKARLEAESDIGILQDKLKDVNATLGNVMKAIEAGIITETTKARLQELEAEKQTLTGQIDHERRLIPTFTRNQVVGWLESFREGDIEAPRTQKRLIKQFVRAVYLYDDHLHLVFDYNEDGEGIDIAIPDDIDTSSADLEGESVLIMPDLVYQTVLIRTPTIRLYGRVFLLSFFFEEQ

SEQ ID NO: 9784 - protein, 551 aa, Unknown
  Description of Unknown: Integrase B9785 sequence
  cd00338,PF13408,IPR011109,IPR038109,PF07508, Coil,PS51736,G3DSA:3.40.50.1390,IPR006119,PTHR30461, IPR036162,PTHR30461:SF3,PS51737,IPR025827,PF00239, SM00857,G3DSA:1.10.10.2600,SSF53041
MQRAVIYARYSPGPNQTEQSIEGQVRECTKYAELHDLRIVGTYVDRKISGKTDNRREFQRMIDDSEKHIFDVIILYHTDRFARNRYDSTIYKHKLKENGVELRYATTDIPKGPEGIILESIMEGWAEYYSAELSRKIKRGMRESALKCHSTGAGRCLGYRTAEDKSLVIEPEGAKAVQTVFDMYIKGKSHADICRYLNDCGFRTAQGKLFNKNSVTHIIRNKRYIGVYTYDDITIEDGIPAIISKDTFHLAQLEAARRKTAKRPKEPKAEYLLSGKAFCGHCQKPLVGVSGTGKSGNKWYYYYCQESRAKRGCTKRPVKRDWLEREVVERTVAEVLRPEVIQHIAKKCYDLQMEYRQDNSDVLFYELKLKDVRKAIKNTMHAIESGVKTKTLPARLQELENEEEALEAELAIAKASDFVITTDQIEFLLTQFAEPWACESEEEYHRRIIKCFVHKVFLFDDKLLIYYNVSRDGKTREQSEVELLEEALGEGFDKRSSGSTIKLHQKRCRCEKPRSFNDFRVFLRPFFEVGKKDIKNGFGKFDGPVPLPKAF

SEQ ID NO: 9785 - protein, 551 aa, Unknown
  Description of Unknown: Integrase B9786 sequence
  cd00338,PF13408,IPR011109,IPR038109,PF07508, Coil,PS51736,G3DSA:3.40.50.1390,IPR006119,IPR036162, PTHR30461,PTHR30461:SF3,PS51737,IPR025827,PF00239, SM00857,G3DSA:1.10.10.2600,SSF53041
MQTIPIDLSALTLEERQQFADNPSVLSSDCEAVCCLYMRYSSDRQTEQSIEGQLRELIAYCKHHSYRVAAIYVDRAISAHASMDKRPAFQQMLSDSARSSWKTVLVYKLDRFARNREDSAIARMRLRKNGCSVESAKEGISKNPEGVILEALLEGMAEYYSLELSQKVRRGMSETARKGNSTGGTTPLGYTVVDKRLQIDPITSHLVEEAFRRYADGDTVAAICDDFNARGYRTTRGTKFNKSSFKNVFRNEKYIGVYKFDDVRTDNAVPRIISDELWRAVQSRLKTSEQAPARGKAKVPYLLSGKIFCGHCGAPMVGECGRGKGGKTYNYYSCANRKKTRLCDKKPVPKDWLEDVVAQDALDVLTDEIIEFVAEVAAQQSEEDIQKNTQIPVIRKKISEIDNKIRNLTKALECASVAPDAIVERLAELEAQKKGLSTQLSDEERGVIPLTKESVVVYLKAVREKAVPLETQKAMLIEMLVNSVTVYDDEPGFLKFVTAYRLTQIPSKTYRVPTPAASSCSDIGRVGSPLDANPNTITVFGMVFVQTRKHA

SEQ ID NO: 9786 - protein, 551 aa, Unknown
  Description of Unknown: Integrase B9787 sequence
  cd00338,IPR011109,IPR038109,PF07508,PS51736, IPR036162,IPR006119,PTHR30461,G3DSA:3.40.50.1390,mobidb-lite, PS51737,PF00239,SM00857,G3DSA:1.10.10.2600,SSF53041
MPYCLYVRKSRADAEAEARGEGETLARHINTLLDLARRRHYEIGTIHREIVSGETIAARPIMQQLLSEVEEGLWEGVLVMEVERLARGDTIDQGIVAQTFKYSNTKIITPIKDYDPNDEFDEEYFEFGLFMSRREYKTINRRLQRGRIASANEGKYAGNIAPYGYERVKLEKEKGFTLRPIEEEAKAVQMMFDLYVNGEKQSDGSVRTLGVVLISKKLNELKIPPRKNKLWTGSTIRDILSNPVYIGKIRWNCRKSEKKMIDGKISVTRPKSDPSTWILTDGLHPAIIDEDLFSAAQQITQSNKMLPMPPDKTVQNPLAGLVECGKCGRQMVRRSYPNGSPDSLMCPYSTCSNVSSTLSTVEKHVLNFLQQWVDEYKLQWKEEKKIRNIKGLFDAKSKAITKLDEEIALLHKQLDNVYDLLEQGVYDTTIFSQRSGALKERIKSSEEEKCKLQTELEKEKKREEERKTIIPKVEHLLSVYDTLPTPKAKNDILKEVVEKIVYTKEQKAKKVKQPRKSRSKKAANEERKTEWIVSPDDFELVVFPALPTEKL

SEQ ID NO: 9787 - protein, 551 aa, Unknown
  Description of Unknown: Integrase B9788 sequence
  IPR038109,PS00397,IPR006119,PS51737, PF00239,cd03768,G3DSA:3.40.50.1390,PTHR30461, IPR025827,SM00857,G3DSA:1.10.10.2600,SSF53041,IPR011109 ,PF07508,PS51736,IPR006118,PF13408,Coil,IPR036162,PTHR30461:SF3
MANKVAIYVRVSTQYQVDRESLPVQRRELSAYSEYVLGINDYEIFEDAGYSAKNTDRPSFQQMMSRVRQHEFSHMLVWKIDRISRNLLDFAEMYAELKKLGVTFVSKHEQFDTSTAIGEAMLKIILVFAELERKMIGERVAAVMLSRASEGKYNGGTPPFGYTRDGTTIVVNEEERPTVERIYKLYLSGESTHSISKMLNNEGVSKRGATWCAQTVRAILRSPTYIGTMRYNVSDLEKSKIKPKEQWIIIEDHHEPIVSPETFNAVQEMLDNNRRGAHKLGDTYTSKYVNIFAGLIRCYYCGDNASAHTDHVRRKTGIRPCAYICARRRNAVGSCQNKSIMDSTLVPFIFTLVGNALRLRSSIPKNATIAYVKTKLLYDSFHEVMIADDIPDEDVVAISKMLKANLKKREYSPSILTGVHDERNALVEQKRKQETALERLHSLYLYGSSAMPEAQYIIEREAIQKEIEKIESQLKHIKEPPTNERLAESLSAMSDMLSNGIDYVKFVKTINPTIPKDFVNAIIDHIVAKDGKVESVVFKNSLTLHFIYKAP

SEQ ID NO: 9788 - protein, 551 aa, Unknown; identical to SEQ ID NO: 9720
  Description of Unknown: Integrase B9789 sequence
  cd00338,IPR011109,IPR038109,PF07508,Coil, PS51736,G3DSA:3.40.50.1390,PTHR30461,IPR006119,IPR036162, PS51737,PF00239,SM00857,G3DSA:1.10.10.2600,SSF53041

SEQ ID NO: 9789 - protein, 551 aa, Unknown
  Description of Unknown: Integrase B9790 sequence
  cd00338,PF13408,IPR011109,IPR038109, PF07508,PS51736,G3DSA:3.40.50.1390,IPR006119, IPR036162,PTHR30461,PTHR30461:SF3,PS51737, IPR025827,PF00239,SM00857,G3DSA:1.10.10.2600,SSF53041
MTSVPERPSIGGPPVYDIYKRVSGGGQEKHGASLDDQERDARALVADRGGVVRHVFEDVFTGLELWDRPDLQRMRDTWRRDPPDGVIVDVLDRLAREPDHQVVLLSEAEYYGVEVEFTHESYDDTPEGKLLRSIKGYVAKVEHTKIKERTQRGLRTRVAKGLPLPGVRVLDGYAWNEDRTAYVLDGPRATVVRRIYREFLAGSTLRRIAADLTASGIPTATGKAVWVYTTVSKILQNPRYSGYAVANRYKSERVAGSTSGRRAKRRVTLRPTEEHVPLPEGTIPPLVTSEEYAAVASRLQTNKAHAARNNPEPERYLLRAGHVRCGYCGGVMSGLRLSNGNYLYRCARASETRCYHGISAHLLDQAIWTRLERVLADPERIADELERAASEDPSEPDLAAIDREAGAIGPQLENLTRGLGLAGGDADVAAAIVGQMRLLSERKRTLAEERSRVLGRHAAAVAARERILALGAWCRRVGRRLEEFGYAERRLAVVAFGVEVTVWRADHEPRWEMRAGVPDGEEIVYPTPARSVHNTNLTLRWSADSALARVG

SEQ ID NO: 9790 - protein, 551 aa, Unknown
  Description of Unknown: Integrase B9791 sequence
  IPR038109,PS00397,IPR006119,PS51737,PF00239,G3DSA:3.40.50.1390 ,PTHR30461,IPR025827,SM00857,G3DSA:1.10.10.2600, SSF53041,IPR011109,PF07508,PS51736,IPR006118, cd00338,PF13408,Coil,IPR036162,PTHR30461:SF3
MNLCIVYVRVSTIEQKKGYSIPEQIESGKRKAYELGAKSDDEIFVFVDSESGEFLNRTEFTKALDLVENEEISYFICYDPDRFSRKTVNALIAHEMIEKHGTEIIYVNSSYEKTPEGRLFLQMKMIIAEYEKEKIKTRTMVGKLGKAKRKLLTHNPNLYGYDYDPITDTLSINEEEKKIILLMVDWIFEDKNVGYHTIARRLNNMPNVLPPRGKLVNKKENNGNAYNREEGIWYKATVKRILCNYTYTGTLFIQTVDAQGVKHNKFRSPDEKVKRTMKPREEWIGIQVPILIPIEVWEQLQGKLIERRNLKPGLAIENYLLRGLLRCGKCGNTLHGNRVKKKNGEGYHKYYVCTAKSPGIKGQLKCELPAINADKLEESVWNKIKGWILNPQTLEDIITNDKNNELLFKEKNHLEIKIKELNEEKDRLDLLFMKGKITEEKYDKLEGENKNTKIELLSRLKEIELELNNKDLNLQDIVQLRETLKEYQNDIDDLKYEVKQKLINGYVKTITIHSKNNKDNIITGKIPKKDWTKVTSLWKDDTTVQTFTVEI

SEQ ID NO: 9791 - protein, 454 aa, Unknown
  Description of Unknown: Integrase B9792 sequence
  cd00338,PF13408,IPR011109,IPR038109,PF07508, PS51736,G3DSA:3.40.50.1390,PTHR30461,IPR006119,IPR036162, IPR025827,PS51737,PF00239,SM00857,G3DSA:1.10.10.2600, SSF53041
MPDVRIIPSRQKKTAKKRMAAYCRVSSSSEEQLHSYAAQVKYYTETLTADKSCELIGIYADEGISGTSAKKRPRFMEMIEDCRAGKIDAVITKSVSRFGRNTVDTLIYTRELKGLGIDVYFEKEAIHSSSPDGELMLTLMAAFAESEAESLSENVAWGFRKKFASGNTRSLAVHNLYGIDRNEDSGEIVICEDEAAIVRRIYNDFLAGLSAQTIANNLDKENVPTRFEGSNWYNKTVINILKNEKYCGDVLFQKTYSPGALSRVKQNRGELPQYYVRDALPAIIDRKTWEITQMEYARRVKQSSGQPSPEYPFEGRIFCGVCGRTVVYCRFRARGGYIPWWRCSTKVTRLKRSDDMTHDDCRIPIDRPTQVFVQAWNLVVSKRLQYEPRLWRIAEKDNNELTRYHASVMLRLIDEIGKLDNFDYMLSLRTLDHMELQLDGKLTVVFLGGIRITI

SEQ ID NO: 9792 - protein, 550 aa, Unknown
  Description of Unknown: Integrase B9793 sequence
  cd00338,PF13408,IPR011109,IPR038109,PF07508, Coil,PS51736,G3DSA:3.40.50.1390,IPR006119,IPR036162, PTHR30461,PTHR30461:SF3,IPR025827,PS51737,PF00239, SM00857,G3DSA:1.10.10.2600,SSF53041
VTRAAIYARYSSDRQSEFSAEDQARLCRQLADREGWTIVGEFLDRAISGATRDRPELMAMMARAADFDVVLCESLDRLSRDQEDIAAIHKRLRFAGVDIVTLADGAVGEIHIGLKGTMAALFLKDLGEKTRRGQIGRVAAGRIPGGLSYGYEKVVALDARGEPERGLRRICETEAAIVRRIFREYAAGIGPRDIAKQLNADGVKPPRGDVWRANTIIGHRQRRNGIINNELYAGRIVFNRQRFIRDPETRKRVSRVNPPEEWLIQEVPALRIVDEATWEGVSRSSHRGPRMRAARRPKRLLSGLLRCGECAGPVTIIQANYWGCSHHREAGLCGNGRLLRNDRLEARVMAGLTERMLEPDLFDAYFETYYERAHQVLREHQRNLGQQKAELRELETKIKRLVDAIANGAAVDAVKEALNEAVARRDRIKADATAIDPSNVIPMQPKLAETYRERVRDLANSLTGEGVERAEARAMLRGMIEKIVLVAPATGEPKRDGSDIAIDIYGRLAEILTIADATKAPDQRSEAFVTFQLVAGARSRLCSALTTVRV

SEQ ID NO: 9793 - protein, 550 aa, Unknown
  Description of Unknown: Integrase B9794 sequence
  cd00338,IPR011109,IPR038109,PF07508,Coil, G3DSA:3.40.50.1390,PTHR30461,IPR006119,IPR036162,PTHR30461:SF3, PS51737,PF00239,SM00857,G3DSA:1.10.10.2600,SSF53041
MYKQFEINFTPEEVIDYLRKSRSDDPSLTVEEVLAKHEAILDEWAENNLGGKVPEENKYREVVSGETLKERPEINKVIKRIESPKIKAIKIVEPQRLTRGDLEDIGRIMKLLKHTNTLVITPNRIYNLQDEYDWDALERELKRGNEFLEYTKKILNRGRLLSVSQGNYIGNTPPYGYDKTFITEGKRKCPILVPNKEEADVVRMMFDLYVNQDMGCQSICNKFDEMGIKPPKGEHWSPAAMTKMLENIHYIGKVKWNHRKTLTIVEDGEFIQTRPVSKVGEYLIYDGKHEAIISEELFNAAQAKKGRNTRQKPNTKVRNPLAGLLWCKCGRAMSMRTYSQHNAEPRLLCDGQTHCKTGSCLYTDMIERVEEILEQCIKDFEVRLQSDEGNSLKLHANLVKNLEKRMKELQEKELSQWEAQSHPDPAQRMPAEVFKMLNERLLKEKEEVQQALCKAYESMPEPVDYEEKIVRFQDALAALRNPEADAATKNRLLKACIDRIEYHREKPVRIKSQQTRYYDSTTKKTRYKSPLKTGGNWTSPPIELDVKLKV

SEQ ID NO: 9794 - protein, 550 aa, Unknown
  Description of Unknown: Integrase B9795 sequence
  cd00338,PF13408,IPR011109,IPR038109, PF07508,Coil,IPR036162,IPR006119, G3DSA:3.40.50.1390,PTHR30461,PTHR30461:SF3,IPR025827, PS51737,PF00239,SM00857,G3DSA:1.10.10.2600,SSF53041
MKRVLCLYRVSTKGQVDPKDDIPVQRRECMDFIERHKDWVYLGERLEKGVSGYKVSVNKRDVLQEIRQMAERHEFEVLLVFMFDRLGRREDETPFFVEWLINHGIEVWSVNEGQQTIANRGDKLMNYIRYWMAGGESEKTSLRVKAAQTQMTADGIWRGGNKPYGYKLVHKGRIGKKNRQLYDLEIDEIEGPIIQELFHLVTVEGYGTLRAANFLNDKYPNPLKVWTAQTVRSILKNPVYTGRLHMNDTLSEPIESLRLVSDETMAFAQHCVTKRIPRKYQEIRQAENDAMPLGAKTKASVYGASMLSGLLYCAHCGHKLVGTYTQENRNGVMRHRAIYRDYYGAVKAKNCIGQQTYSAKKIEDAVLQIVRQYFQSMKQSVDEAWEERTRQKMRSSSTAKLKAAQARVDELEKRQELLKQEVFKSLNGQSAFSKDMLQTMIDEAAAATATAKEQLQACKSDTANEDLQMKQLKAKYQEIIDWADAFEHLRGDNQKMILARIIERITVDRNYNLTITFFITRDEFEAAMSQNEGLRIEQALSAPTLSFVAS

SEQ ID NO: 9795 - protein, 550 aa, Unknown
  Description of Unknown: Integrase B9796 sequence
  cd00338,PF13408,IPR011109,IPR038109,PF07508, Coil,PS51736,G3DSA:3.40.50.1390,IPR006119,PTHR30461, IPR036162,PTHR30461:SF3,IPR025827,PS51737,PF00239, SM00857,G3DSA:1.10.10.2600,SSF53041
MRAFIYCRFSSHKQQELSIEGQRDICQEYADKHNITVVGQYADRARSGKTENRADFRRLMRDAATGVVDCVLVWRYDRFFRNRAESALYRKQLEAAGVHLISVTEYIPEGSAGIITQGMIETVAEYFSAKLSEDVSRGMNKAAQHCQIVGRAPLGYRAGPDKRWQIDPVGAELVRRIFEWYASGKAMGQLAAQLNEEGHRTTNGTLYTRSSFNSILRNEKYIGVYSYGGEVRIEGGCPRIVEDELFFTVQRRLSANRHRPGAYKAEVPYLLSGKLFCGLCGAPMTGTAGTSHTGARHYYYICNNRRAKTCKKKNVRLDLIEEAVLQSALDILTDENIAYISTEVERRCAENSDSAALLASLNAQLEEVQRRLKNIGNAIAQGIITETTKELLEEAEADRTALRQQIDRAKVQAALVVKAEAVACWLDGFRRGDRADPDFRRQVFGALVHSVFVYDDYLKIIFNVDSAGAAVVPYEAAQAATPSEAPPGSYLDTLGAPKKALRKRKAFFIMIAALCECFRFAADFNPSQRLFLFCRRNARTFIVRETVAYM

SEQ ID NO: 9796 - protein, 549 aa, Unknown
  Description of Unknown: Integrase B9797 sequence
  cd00338,PF13408,IPR011109,IPR038109,PF07508, PS51736,IPR036162,IPR006119,PTHR30461,G3DSA:3.40.50.1390, PTHR30461:SF3,PS51737,IPR025827,PF00239,SM00857, G3DSA:1.10.10.2600,SSF53041
MIAAIYARYSSDLQSERSIDDQIAACMTFAAQRGLPAPTMNFADAAISGASMATRPQLLALLDLVRARRISIIIAEAIDRLSRDQADLHLIRRACDANNVKLYTISDGEVSGMVAGLQGIMAEAFLKNLAQKTRRGMMGVAREGRIAGGLSFGYRAIDGRPGERTIDEAEAGIVRRIYASYLAGRSPYAIARSLNAEGVAGPRGRAWKVNTIAGDARIGDGILCNELYRGRIVFNRRRYQKNPETGRRSSFLNPPAEWLIVEKPELRILDDDTFEAAMAMRRGLGSTPLQNRRKRPQRLLSGILRCAACGGAFTIINRDRMACSNAIAGTGSCDVRQRLPAAVAERRVIEGLKRNLLSPDAIAAGVRGYQEQRKAMRGEENARRHEATRGIEEARRRASRIADQLIDTPSPTLRTKLAEAEAQVTAFEAELAAIPPASIVELHPNAADAYKAVVATLETALSADAAPEIRQAVRGLLERIEAAPDAGAPDGWSLVIYGQLATLLALANEKTPGVSAGGLPLISSAIPSTVGLGAGAYTGRYSATVRLVA

SEQ ID NO: 9797 - protein, 549 aa, Unknown
  Description of Unknown: Integrase B9798 sequence
  cd00338,PF13408,IPR011109,IPR038109,PF07508, Coil,PS51736,IPR036162,IPR006119,PTHR30461, G3DSA:3.40.50.1390,PTHR30461:SF3,PS51737,IPR025827,PF00239, SM00857,G3DSA:1.10.10.2600,SSF53041
MNIQKTAPTPKLVTMIPADPQMTERDLRKKHLRVAPYCRVSTDKEEQLSSYEAQIEYYTEKIDANPDWTMVRLYADEGITGTSAKKRKAFLQMIRDCERGKIDLVITKSVSRFCRNTLDGLNYVRRLKRHGVGVYFEKENVNTLFMDNEMILTFMMSQAQAESESLSGNVRWGHQKNFKDGKVYYHCKTFLGYRWGADGQPEIDPEQAAIVRRIFSRFLLGHSVRQITTDLMADGIKTATGKTVWHDSVVQKMLCNEKYIGDALLQKTYIADLFTREKRVNNGELPKYYVHDCHPAIIDRKTFQKVQEELARRSSLKKTSSKAKTQLGKYCGKYVLSELLVCGECGSPYRRVIWTQKGVKRVVWRCQNRLEHGRKICKQSPTLDEGDIHDAVISAMNELFRIQAAKDAVKAGIAAVLAGEEQTMSLPAVELQIRNLQERQLELFQLIVSAGADCTDYDEELQQVNMAKTRLMAQKAELEKEQRGAAAFESRLEELDMALEQASGALTDFDELTVRQLVSNIKVLDKDSLLICFKDGTEITQAMQRRISA

SEQ ID NO: 9798 - protein, 549 aa, Unknown
  Description of Unknown: Integrase B9799 sequence
  IPR038109,PS00397,IPR006119,PS51737,PF00239,G3DSA:3.40.50.1390 ,PTHR30461,IPR025827,SM00857,G3DSA:1.10.10.2600, SSF53041,IPR013087,IPR011109,PF07508,PS51736, IPR006118,cd00338,PF13408,PS00028,Coil,IPR036162,PTHR30461:SF3
MRLKKIKVAIYIRVSTHHQVDKESLPFQRQELENYAKYVLNCEDYVTFEDAGYSAKNTDRPDYQNMMARIRSGEFTHLLVWKLDRISRNLRDFTVMWDELKEYGVTFVSKMEQFDTSSAMGEAMLRIILVFAELERKLTAERVLSMMLSRAEKGGWNGSRVPLGYDWNYEKKVIVINKEEAVLVQKIFNLYEKTGSSTLVAKLLKEQGEKTKRGGDWMGTTVLQILRNPIYIGIYRWNYREGGRGTKKDPGEVVINEDVIPAILEREQWERVQMQIDSNRKGEWSNRKKYTHLLVGLLKCGYCGKNYVGSRSTRAHKNGIHPTYYRCSMYARNRSCQNKGVSGFQVEPFIFDYLRALVKAEKAGDVLKEFGHPEVEYIDIPGPAGVYKGVDILASSQAATAAEEDPLKGLNVRKKKIETAIARLDDAYYFSEGVNAISKADYLVKRADFQQKLNQVDAEIAAASAKAPATNTKKMDIENFSRFLLLHDLYLAGDIKEVLYKLDKRVVRDFLDGVIKYIEVADQRVTKIAFYPPEGDEEVVHRFVYKDNP

SEQ ID NO: 9799 - protein, 548 aa, Unknown
  Description of Unknown: Integrase B9800 sequence
  cd00338,IPR011109,PF07508,Coil,IPR036162,IPR006119 ,PTHR30461,G3DSA:3.40.50.1390,mobidb-lite,PTHR30461:SF3, PS51737,PF00239,SM00857,SSF53041
MPYAPEYLHLVIPGPRFEAWLYGRNSENEFAGVAGVRDSVDDQLDTGRELCHRHDWLIVGEFKDSDLSASRHAKKIRGNYEDLIAAILNDPAPPGVRRIVVAYEASRYYRDLDAYLRLRKACMARDVLLCYNGQVYDLSRRDDRKATAQHAIDAEDEADAIQDRNLRTAVRQASAGKPHGRLPFGYAREYAHVGGRQRCIRQYEHPVQGPIILKAFQHIDSGKSVRSLLLWMNATPEAARPDGAAWSFSTIRALLTNRAYLGERAHQGSYTKATWDPILGLETPQGRAMFNRVSAKMTDPNRRTNRGTEVSHLLTYLALCGECGDHAMLCAQSRPDRVHVNLACEPLRHISMAEPVMNAFVEEALLAWFADKPVARAALFPTAENVTEKVDVAQRLVSAYEEQLAEARMLARTVNPATGRMRLSATSLADLEEQVQPLLEAERKKLRDITGVSPLVAQMLESQDPEAMWNGRPATDTEPELPGLTLEQKREIIRKVVTVRLYRAPKLGRNRADVSRIRLAFVGEPGFRDRPHRVRVPAPASVPGEGTG

SEQ ID NO: 9800 - protein, 548 aa, Unknown
  Description of Unknown: Integrase B9801 sequence
  cd00338,PF13408,IPR011109,IPR038109, PF07508,Coil,PS51736,IPR036162, PTHR30461,IPR006119,G3DSA:3.40.50.1390,PTHR30461:SF3, PS51737,IPR025827,PF00239,SM00857,G3DSA:1.10.10.2600,SSF53041
MKKFPIDLSCLTEEEISQFQEDPYTLYNGDQDVALYLRYSSTGQSDQSIEGQLRDCRTFCKANHYRIVAIYVDRATTARKDVEKRVHLMEMVADSAKQNWEYVIVWKLDRFARNRNDSAIMKMRLRKNGVKVLSATEHLTDSPESIILESVLEGMAEFFSAELSQKVTRGMRESALKCHSVGGHIPLGYKVENHKLVVDPDTAHIVQEAFSLYANGESVADICRKFNSAGYKTAKNTEFNRSSFKAMFRNTRYIGTYTYKDIVIENGIPAIIDKELFEMVQRRLSKTATAPARGKAKVDYLLSGKLFCGHCGASMNGESGAGRHGKVYHYYSCYTKKRKLGCDKRPLKKDYIEGIVARDALNLLTDQLIDEIADMAIRQSEQDLINDTHIPQLTAQLSEVEKSITNITAAIEKGIASETLMNRLVQLEHEKKTLNKEIKAEEKFVYRIDRDQIVFWLSQFKYGNIEDEDFRRRLIDLLVNSVTVWDEPDGYKITTAYNLTSCKTKTFRVEKNPAAEEATGFDFGESECRIVHKFYGTIYANKENGKLE

SEQ ID NO: 9801 - protein, 548 aa, Unknown
  Description of Unknown: Integrase B9802 sequence
  cd00338,PF13408,IPR011109,IPR038109,PF07508, Coil,PS51736,G3DSA:3.40.50.1390,PTHR30461,IPR036162, IPR006119,PTHR30461:SF3,PS51737,IPR025827,PF00239, SM00857,G3DSA:1.10.10.2600,SSF53041
MKKFPIDLSCLTEEEISQFQEDPYTLYNGDQNVAIYLRYSSTGQSDQSIEGQLRDCRTFCKANHYRIVAIYVDRATTARKDVEKRVHLMEMISDSAKQNWEYVIVWKLDRFARNRNDSAIMKMRLRKNGVKVLSATEHLTDSPESIILESVLEGMAEFFSAELSQKVTRGMRESALKCHSVGGHIPLGYKVENHKLVVDPDTAHIVQEAFSLYANGESVADICRKFNSAGYKTAKNTEFNRSSFKAMFRNTRYIGTYTYKDIVIENGIPAIIDKELFETVQRRLSKTATAPARGKAKVDYLLSGKLFCGHCGASMNGESGAGRHGKVYHYYSCYTKKRKLGCDKRPLKKDYIEGIVARDALNLLTDQLIDEIADMAIRQSEQDLINDTHIPQLTAQLSEVEKSITNITAAIEKGIASETLMNRLVQLEHEKKTLNKEIKAEEKFVYRIDRDQIVFWLSQFKYGNIEDEDFRRRLIDLLVNSVTVWDEPDGYKITTAYNLTSCKTKTFRVEKNPAAEEATGFDFGESECTKSPRNRLISMTFAFHKFRF

SEQ ID NO: 9802 - protein, 548 aa, Unknown
  Description of Unknown: Integrase B9803 sequence
  cd00338,PF13408,IPR038109,Coil,G3DSA:3.40.50.1390, IPR006119,IPR036162,PTHR30461,mobidb-lite,IPR025827, PF00239,SM00857,G3DSA:1.10.10.2600,SSF53041
MPADCPLPAGSTVAGYGRDSGGRDQDRSVLQQRAEIEAYCRDRGLALVRWFADEARPGSSVIGRDAFLEMIAWLRRLAPEPERRRSRRGDGRDPDAPDGVLFWSLARSAREQDDRAYFWADLRRRGYTVFSVTDGIPGGDLAPVVESLFAWQAEQYLQQLSREVTRGMRDMVTRRGPDGEYLNCWNNHPPPGFRAEPRTIGARRDGRPHVVRCLVPDRDGLWEPVRRAFALRAAGLSVRQIEAELGLGWSRQRYGHLFRNPIYAGRLEYGDLVIDGWIEPAVDPATWAAVQDICRNHDAFQRRARSRPRSAYPLSGLLRCPVDGAAMTGSSCRGPVPGAPPYRYYRCSHYGDGGACAHSRGLRADYLEPAVYGALARDVLTPEALRAALEGGGPAELNGARAELAAAEKRVADLERATGRLLEAIEGLGGEGQPVAVLAERLAARQAERLEAEAELRAARARLSGGCEPVPPEVLADFCRDAARVLEEGEPGAVRDLLEVIVVRIVARTDGTGEIHYRPLGELPGRAPAAVAPFHWFPGGRGFKRPAV

SEQ ID NO: 9803 - protein, 548 aa, Unknown
  Description of Unknown: Integrase B9804 sequence
  cd00338,PF13408,IPR011109,IPR038109, PF07508,Coil,IPR036162,IPR006119, PTHR30461,G3DSA:3.40.50.1390,PTHR30461:SF3,IPR025827, PS51737,PF00239,SM00857,G3DSA:1.10.10.2600,SSF53041
METKLIKVACYCRVSTKSEEQEQSFEAQQAYFKEKLSEKNNFELVEIYADRGTSGTDFHKREAFNRMLEDCGIIKKEVKVRETEIRKKYISIDYVVDADITPKFNLIYVKDSSRFARNTEVSRIITRLRDKGVYVYFEDLNKSTENQSEKMLLDFMFSMAEQESISRSDKVRFGNMQSAKEGTVRSMKLYGYTYIKEENSLRIIPEEAEIVKLIFDLRLQGYGGRAIATELDQRGIKNRKGNGWRGNTINSMLQNLVYCGKVVRNKWYSSRMYGKDIVELNTRDKWIVEDSEKVDKIIDEENFEKVQIMIEDNRQKVGRVQGKYHGRSEFAEKIKCEKCGKYYVRNTDRGRVFYNCSTKKQHGTKNCNNRNVQEYEIEALIDPYLISGEYKKITKKYIDMMIEKEKEKKATLYMSTNIEEVNQINMEIAEYKKKLSKLTEAFLDDDSEGANDIFKSKKTELSEKIKALEIKRNKLSATDEEKKDMLQSMDIFINYLQEQYNKCPEDITREEFINEYLYEIRVSENGALKLITQSENGYYKIIELMNED

SEQ ID NO: 9804 - protein, 548 aa, Unknown
  Description of Unknown: Integrase B9805 sequence
  cd00338,PF13408,IPR011109,IPR038109,PF07508, PS51736,IPR036162,IPR006119,PTHR30461,G3DSA:3.40.50.1390, PTHR30461:SF3,IPR025827,PS51737,PF00239,SM00857, G3DSA:1.10.10.2600,SSF53041
MRVALYARYSSERQNERSIEDQLGVCRRHAEARGWTVVTTFSDAAISGSTMANRPGLQALLAVAGGGAFDLVLVEDEDRLARNLEHQANIFNRLKHAGVGIATLSSDAIGILEVGLKGVMAELYLVNLGQKTRRGMRANAEKGLATGSRLYGYATASGGDMRIIEAEACVIRRILEYFAAGDSTREIAARLNTEGVPGPRGGPWNASSIHGSRQRANGILHTELYAGAKVWNRMEVRKDPVTGRRLPIMRPPAEWRRTDVPHLRIVPADLWDAVQGRLAAAGDSHPRALANARRGSLFGGLIRCGMCGASYTADGGGRLMCAGRRERGPAVCANTRTLSRAAIETRVLDGLRDRLVGREQAAIYVRAYHAARAAEARARVDERGPLERRRAELLRAIDRVVDAVAAGAATPRMMERMAAQEVERADIETRIAALEPVASAPVTLHPGAAQTYADIVGRLREHLADAGADQSSTESRQLVEAVRALVLKIVVTPRSLEPRAAVDIELHGDLARFLTPPGPAPRWGGQMVAGGGYNHAPPAVPVLIRLGA

SEQ ID NO: 9805 - protein, 547 aa, Unknown
  Description of Unknown: Integrase B9806 sequence
  PF13408,IPR011109,IPR038109,PF07508,Coil, PS51736,IPR036162,PTHR30461,IPR006119,G3DSA:3.40.50.1390, mobidb-lite,IPR025827,PS51737,PF00239,SM00857, cd03768,G3DSA:1.10.10.2600,SSF53041
MIAPVQDKKRKRFIIYTRCSTDDQAQGDYTTLDAQAHHCKNMMDAFGYELASFGDNGVVNDDGYSGKDLNRPGIQAILKDIHKTRSFDGIIFFRLDRLTRNPRDLYSMIDIFKAKEVDFLSVRENLDSSTAIGRVVIGIIGLLSAFERELTGERVKASAIARARQGKWVAGKPPFGYKQVKDGEPLPNGRQPHKNEIDETIAPHIRRIFELAADNKTLSEIGHTLIQNEVPTAKKQLWRKQTVAKILKNPFYKGTISYSGELHKGTHQAIVDDELWDKANRVITANLPGHRFKKIVKDYNQRLKGLLRCGKCGSSLVCTIAHSHNGNIFYYYECSRARQRLGCDTKRISATAFDEAVIAFFRRASKDQEIIVKAMGSAIKDNATKLDIYEKEIKTIQKKLDKAKKAAAKLLNLAIDKVISKGVTYSEKMDTYEKEVTVLEDQLSKALARRRAADMSIHSSEYLYSNLRFAMAHLDKAPAEAQITLLKALIKAIDVHDDHVIMRMHIGEPFEELTCQIDPKKQETLPVAVTSTEQGSPERQQWRRGRD

SEQ ID NO: 9806 - protein, 547 aa, Unknown
  Description of Unknown: Integrase B9807 sequence
  cd00338,PF13408,IPR011109,IPR038109,PF07508, Coil,IPR036162,IPR006119,G3DSA:3.40.50.1390,PTHR30461, mobidb-lite,PTHR30461:SF3,IPR025827,PS51737,PF00239, SM00857,G3DSA:1.10.10.2600,SSF53041
MRVALYARYSNDRQNERSIEDQFAVCRRHAEARGWTVVAGFSDAAISGAAMANRPGILSLLACAAAGEFDRVLVEDTDRLARDREHDAHIFKRLTYAHVIISTLTSDHVTAIESTFKGLMNELYLVNLSQKTRRGMRANAEQGLATGSRLYGYRSAPGGATAIVEAEAQVVREIFARFAAGETGRAIAGDLNARAIPSTRGGAWTGVQIVGNRKRGNGVLYTELYAGVKVWNRMTVVKDPDTGKRLPRMHPPSEWKRTPAEPLRIVPQALWDAVQGRKAVEGELHPGQISARRRGVLSGLLKCGCCAASYTSYSKTRLVCAANREKGAAVCDNSHMADRAAIEDRVLTGLRAQLASPEAAALYVRAYHAAYAEAAAAERRERAPIEKRIAELHRIENRYCDDVEAGRATQKGYERAIAAEQERATLEAKLAAIDAAEGAGSPAIALHPSAPARYAQLIDQLHATLATAGTDPDARPLIDAVQGLIIRIDLHPDAGAPNGFRINLVGDLAKFLDARAEQARRAVGGKLVAGGGNRHTPSPRMPVDIAA

SEQ ID NO: 9807 - protein, 547 aa, Unknown
  Description of Unknown: Integrase B9808 sequence
  cd00338,PF13408,IPR011109,IPR038109,PF07508, Coil,PS51736,G3DSA:3.40.50.1390,IPR006119,IPR036162, PTHR30461,PTHR30461:SF3,IPR025827,PS51737,PF00239, SM00857,G3DSA:1.10.10.2600,SSF53041
MPKKNEIPTEQSEGGIKAVIYARYSSSGQREESIEGQLRDCREYASKNNLLIVGEYIDKALTGRSDKRPDFQRMLKDSERGIFQVVICWKMDRFARNRYDSATYKYRLKKNGVRVVYAMEAIPEGPEGIILESVMEGYAEYYSENLSQNVKRGYYDSALELKTLGQRLLGYRKGADGRFEIDPATAPIVRRIFEEYAMGKRPKDICEDLNREGFRTLRGGLFNKCSLPRIIANEKYTGLYEYKDIHVENGIPQIISKDLFLKCNKILEGHRQAPAARREVGERFLLTGKLFCGKCGQPMTGDGGTSKTGKVHSYYICNGRRAHVCDRERIRKDDIEQNVISELIMLIHSDEFIDEVADLVIRYQERTKDTSVLNSLEAHLKDIEKRLENLTLAIEAGIDAATIKSRILALESEKADVEKGIAKELIKDPELDKDQIVFFLEQFRKGNIDSEEWKLSLVDTFLQAVYVYDDKFVITLNYSGSRNTITKKMVDKLAGGDFSGDVVSSSLSASSALNEDNLNPPRRFMFLSRKVFGISVPHILCIKNIKR

SEQ ID NO: 9808 - protein, 547 aa, Unknown
  Description of Unknown: Integrase B9809 sequence
  cd00338,IPR011109,PS00397,PF07508,Coil, IPR038109,PS51736,IPR036162,IPR006119,PTHR30461, G3DSA:3.40.50.1390,PS51737,PF00239,SM00857,G3DSA:1.10.10.2600, IPR006118,SSF53041
MKLITYLRVSTDSQDSGLEMQRAMTADFAMRFDHDIIEVFEDRAISGGIASREGFDRLKDYITKNGSKEFMVLIYDISRIARDVSIGEEFIKLCWKTQTKIITSGGDSYDFAQHSDRMRARMMFVFATADKEKKNEDSFNGMRRALESGRYIFQPKPGSIKGYRYEKIDKIKQLVPFEPEASIIKEALELYANDQLNTLVELKQWFEDRGLHFNKARNESIKFILTSPLYCGYVEYLPWGISKRKAVHEPLISEDLWDKIQSKVNGRNSRKLKHGTHDDVFFFRKFGMCPKCKNHLTAHTIYNRQGNAYKSYYCSTRNCELFKKHINGEKLENLFLELIKTTKFSKSQLETIRDTLICWINNQAEIKQNTAKTLNKELKNLDTQIKTELEQLKRVSNAFVFKSLENSIQNLENERNRKIKELKECEVDTETSRAVYLTQLDRSLIYLENLDKFWSLGDLAIKKLVYKTIFEGGLTVEIGDKGSLHLTPHFSCFYAFCRDLLNENSEWWSSVALKPNFNILSFYTISVEFCQNVSYIDQAKFDQILAL

SEQ ID NO: 9809 - protein, 547 aa, Unknown
  Description of Unknown: Integrase B9810 sequence
  cd00338,PF13408,Coil,IPR036162,IPR006119, PTHR30461,G3DSA:3.40.50.1390,PTHR30461:SF3,IPR025827,PF00239, SM00857,SSF53041
MSEAPFPLNSRVVAYLRDSGGEDQDLSVAQQQVFIQDWCIQNNLVLTTIFADVATPGSSTIGRDQFRKLIDHFHNPDCHDAGVILWKFSRFSRDIDDAQFYRADLRRRGYTVHSIQDNIPDTTDGRIYEALIDWMNNKFLEDLSMDVKRGLHHLVTTYGALPGTPPRGFMREPVAIGSRRDGSPHTACRWSPDPEKWDLCLQAWTMRARGISIRQIHKELHLFSSTSSYTSFYTNPLYLGELHYGDLVIKDYTTPMVTREIWDIVQELNQANSAGHSPLHRRTNDRHPRRENSTFVLSGLLHCPRCGSLMNGMSVRSRKSGLFEYYHCSNANSRLECDAKRIPKATVENAIIEKILEYVLDPRVIHERDKELALSQTDNVETVKKEIERVITRIKNNDRKRANLANRIAEANSPPASLMDLLGDLEKEKIELQQQLARMRSIQNKETVFIREPADIEKLSRQFQRILTSDDLEKRRSAVRQIVNRVAAERDGKFVRGIVSFYNPTDKKGGFMPMERSTVEAPYHRHKTYTFEFCVKIKQKSRSSAAL

SEQ ID NO: 9810 - protein, 546 aa, Unknown
  Description of Unknown: Integrase B9811 sequence
  cd00338,PF13408,IPR038109,Coil, IPR036162,IPR006119,PTHR30461,G3DSA:3.40.50.1390, PTHR30461:SF3,IPR025827,PF00239,SM00857, G3DSA:1.10.10.2600,SSF53041
MRLEPPPSTLPPGSTVWAYLRDSGGPTQDRSVEQQRQMVEEYCQQFGLVLVLPPFEDVHRSGTTTRNRNEFDYMMSLSASEHLRPMGLLIWNHARFSRGDPNEAQFFKSTLRARKIVIHSLTDKIPDGPFAPIVESIIEVANKQKAEEAAFGAWRGLRYIVKQGAVPGTPPRGLRRVPILVTSEQGVQRTAHRWEPDPRFERRIQHAFELRAAGKSLAQIHRAVHLFTSLNSYTTFFQNPIYIGTLKYGEMIIEKYCPAIVSKKTWNKVQALLTTNAGRKHLTSTADHPRRVNASYLLSGLIHCARCGAAMNGLTSRQKSGSDYRRYRCGNSKQRLDCAAKPIPAALAEKLVLTHIKKFFEDETNLVNLLSQFAENQAGHHAEANAAIASHRAELGTVRKKMTNTSNAIAELSGSVTLLKQLRALEAQETELIAKIRELENQKNTVIHIPTTAEARTLSEKIIDDLNDTDPVHVRQILLGLVYQILADRQGKSLVLQVILTFDKKKAPPSKSTVSINRVPVGAPIYRHSLIITYTIQNQGNPIPVK

SEQ ID NO: 9811 - protein, 546 aa, Unknown
  Description of Unknown: Integrase B9812 sequence
  cd00338,PF13408,IPR011109,PF07508,Coil, IPR036162,PTHR30461,G3DSA:3.40.50.1390,IPR006119,PTHR30461:SF3, IPR025827,PS51737,PF00239,SM00857,SSF53041
MTTMANVYSYLRFSSLKQAAGTSIDRQLDYAQRWAAENGLPLDESLTMRDEGLSAYHQRHIKTGALGVFLEAINEGRIPPGSVLVVEGLDRLSRAEPILAQAQLAQIINAEITVVTASDGKRYNREQLKANPMDLVYSLLVMIRAHEESETKSKRVKAAIRKHCEAWQTGGTMTMGRMGRPPSWLQWIDDKWSIIEERAEGIRIALDLFARGWGHFKITEALIERKLNLGQGSPNSNQLYRIIRNPALKGVKTLELDGETYELADYYPALVSATQWATLQEAMGRRSRACSSGPGKIVGMLTGTGIAICGYCGSAMVANNVTTRARADGSLSDGNRRLICSSSATRKPCPLPSSSSAAAIERAIMDYCSDRLNLRALLINSGDQSDTLRGRLAQLRSEGAKIGAQIDRLTDLLLATDETDTPAALIRKMRDLEAAQKESEKATRHLEQQLLALDSTPTPAAAEAWEALRHDVEAMNYDARIKARQLIADTFERIVVFSRGMSLDPQSQSIDVLLVAKGGGSRSLCLDRKTGRLLDGLRIGEAVTAG

SEQ ID NO: 9812 - protein, 546 aa, Unknown
  Description of Unknown: Integrase B9813 sequence
  cd00338,IPR011109,IPR038109,PF07508, PS51736,IPR036162,IPR006119,PTHR30461, G3DSA:3.40.50.1390,mobidb-lite,PS51737,PF00239, SM00857,G3DSA:1.10.10.2600,SSF53041
MTPLKRRQTRRDQDKRAQAAAQQAELTAVRPLVPLTEANPKRRTAMYLRISMDSDLLGEGIDRQHFESWEKAEAEGLDVVALFIDNDTSASTGEYRPGFEDMKALVAAGGVDFILSWSQDRLLRKPRQIEDFIDIATDHPIKIYQAIEEATDLTTASGRKAARDRAVQASFETERKAERQRAQSRQRARKGVTPVTECFGYDIIRDEKGQPQAVINADEAKVVREVFEWYVSGLGTHTIAQMLNERGLVNLWNNPWNPTSVRTMLRNPRYIGERWLQNYRRRTDGTKIKEVTYYAEGTWEPIFTGDDVETLFREANRQMKARRKSTGTNGTSRKWLGTGLYMCVQCGGTVSAGHRPRKNGNEVTYDCRPHTHVTRPAANVDLHVRRVVAAYVARYGVGELIADKASADQSAALKEAEAKIVRKLSRVESDYDDEILTGPEYRRKKDDLKAELETVRADIAALGHSSVLSMLNGSADPAALFLEAPLALQAAIIRDLGTVTLTKGKRGHRPANYWLRPGHKFSDTILFHWRSGREMDMTEFDIPLDE

SEQ ID NO: 9813 - protein, 546 aa, Unknown
  Description of Unknown: Integrase B9814 sequence
  cd00338,PF13408,IPR011109,IPR038109,PF07508, Coil,PS51736,G3DSA:3.40.50.1390,IPR036162,IPR006119, PTHR30461,PTHR30461:SF3,PS51737,IPR025827,PF00239, SM00857,G3DSA:1.10.10.2600,SSF53041
MQIRRAGIYARFSTDLQNDRSVDDQIALCRDFAARNGLTVVKDYFDKARSGASVFGRDGLLSLLDDARAGRFQTIIVEALDRLSRDQEDLAGIHKRLTFAGVEIIAVHDGRADAIQVGIRGLVSTLFLADLKNKIRRGQAGVIRDGRHAGGKAYGYKPTPGQPGVLRIDDEEAAVVRRIFEEIAAGKRPREVAYGLNEDGIAPPRGRAWGASAIYGSSSRGYGILRNPIYHGVLVWNRVTMVRDPETGKRVSRINPESEHKTAEAPHLAIVSRELAEKAIAIASRGPSKAADGKVQIKRPKRILSGMLRCSHCGGGMSIHDRYKNGIGIRVKCTRHIESRSCTNDKKYRLDKIEDAVISGLRQQLSNPALLVEYVKAFREEMREDAAKLERDRSKIERRVADLSGRLERLIQGMARGILPIEAIEAQYKPIEEERDRLKAKLAQQPAPAVIELHPQAVAHYRKSVQHLAQRLNDLDDRADAETVAAFRELVDRVIVHDRPGKMVEVEVVGHLSSLLGRPAEILGGRVVAGERPNDTPQVSMFMAVA

SEQ ID NO: 9814 - protein, 545 aa, Unknown
  Description of Unknown: Integrase B9815 sequence
  cd00338,PF13408,IPR011109,IPR038109,PF07508, PS51736,G3DSA:3.40.50.1390,PTHR30461,IPR006119,IPR036162, PTHR30461:SF3,PS51737,IPR025827,PF00239,SM00857, G3DSA:1.10.10.2600,SSF53041
MKRAATYSRFSTDKQTEASIEDQRRCCADYAKQNGLQVLHEFSDLAISGASFGNRPGVNALQKAAFAGELDVILIADLTRLSRNSADLPKFLERMRFRKIRVIGVLDHFDSDQRHSRMQAGLSGIMSDEYRLAIGERVHLALDTLAKSGKPTGSKAYGYTSKQVVIPEQAKIVKEIFERIAAGETMLAIASDLNGRQVRSPGASWKGRVTNRGDGRWIVPALNNMLQNETYMGRVVWNRSQWVKDPETGKRTRRERPESEWIIDERPELAIVDRKTWDTVSALMTRRKLSYGKKGGGRTKYPLSGLLVCGRCDARFIISGGGKNSRGYGSGLPRYYTCSTFHQGGPAACSNSIRVPRDLCETRLLEPALNDLLSDAAVDKAVIRIRKALKERPPEPVADVAEVDTKVAKIRALVASGALDGDMAETLFAKLEAERLAIVRQSHSAARPPLVSGPWGLEAEYREHAQKLRADLTGEDADVARAALASIYGQRIRLLPDRHGLHLIAEVHFQANAVLHAVGGSVGRISLSSGGLQSAHIPLIRKGQK

SEQ ID NO: 9815 - protein, 545 aa, Unknown
  Description of Unknown: Integrase B9816 sequence
  cd00338,Coil,PS51736,IPR036162,IPR006119, PTHR30461,G3DSA:3.40.50.1390,PF00239,SM00857,SSF53041
MVTKKTGKTAVVYCRVSGKGQKDADTIEAQRTTCKQYVEQYGVTLIPYGPKGDGWIMDDGISGSLLEGRSFKKFVEDLWARKIHVDYLIVSNMNRLSRHDKTSKDRDKVRQSARDQADIMACLNVNKVQIIDHSGINDPASVVTEIKQTLAGEEYADIRRKTMNGKARVLANGAYATGGPVPYGYKRVPINGVNNKQGTTLAIDPVNGDRFIQIMRWYVEGGLAHAARQATKAGWPGPKGGPEWFPSALQHTLNKIKVYLGEATLTVQGTPYTVQYPALLDTKLYSAIVRRQKERTLKHRTTLLSTGYVDCMCGHHVHGHRGAATDQMPMKIICGNLEGGRCGSIPDTVFSKALWELVVARLIQIKEHERIASNGKDPYGPQLTAAKARLTKVQDSLERLVSLYAEGEIDKAALTKSNEKLRNEKAAAQVEVDRLESARAQHAQRLSGERSVQSKVQETLARLREGHVPLEGKRQILSDLLQGERAVIQFHGPKGAYWVTITLPAFGSLAPVTIKSNQDICTQMHGVSRQTLEAIYSVDDEVSLG

SEQ ID NO: 9816 - protein, 545 aa, Unknown
  Description of Unknown: Integrase B9817 sequence
  cd00338,IPR011109,IPR038109,PF07508, Coil,PS51736,IPR036162,IPR006119, PTHR30461,G3DSA:3.40.50.1390,PTHR30461:SF3,PS51737, PF00239,SM00857,G3DSA:1.10.10.2600,SSF53041
MFKEYPVFYNYKTKEYGRKSRLDDPLLSDIEVLEKHSKMLEEYAIKHLGGPIPEENKYMEIGSGESLKDRPEITRLLKDIEDPEVQAILVVDVQRLSRGDLEDAGRLIRLLRYTNTHVITPMKTYDLRDEYDRDAFERELKRGNDYLEYFKKIQARGRLASVKDGNYIGSVAPFGFDRHIIEDGKKIYHTLKERKDQADVVRMVFNWYCNDDIGVTAICRRLEELNIKTKTGGKYWHPYQIFAMLENVHYIGCVRWNWRKTVKIIEDQEIRKLRPKAKIDEYLVFEGKHDGIVSEELFNKAREIKGKRHRTKRDLTLKNPFSGIMFCKCGAKIGYNTYRNKGVEFAPPKLVCNNQVHCKTGSALFDEIYEEVCDAIRECITDFEIRIKTDRDDSFKLHRDLVKRLESKLEELEKKEVEQWEAQYDPDESKRLPPHIFKVLNEKVLKEKDEVNKALSKAKDSMPQPIDYKDELLKFRDALKYLEDDELDAKTKNQYLRNIIDRIEYERGPTVRITKANAPIYNVDTSKGTQWYTPPYKIKLKLKYN

SEQ ID NO: 9817 - protein, 545 aa, Unknown
  Description of Unknown: Integrase B9818 sequence
  cd00338,IPR011109,IPR038109,PF07508,Coil, PS51736,IPR036162,IPR006119,G3DSA:3.40.50.1390,PTHR30461, PTHR30461:SF3,PS51737,PF00239,SM00857,G3DSA:1.10.10.2600, SSF53041
MLKTDYLISLGIEHIINYLRKSRADEEHERKTGEDVLKSQKELMDRVLEPLGIPYDQRPEVGSGDKISTRPVFQGVIKDLEAGKFQAIAVKEISRMGRGSYTDMGIIYDLIVERRIFIITPYRLYDPRNAADLRMIRFELFMSREEFETTRERLFGGRVTNAMAGRWVAGAAPFGFNYNPDTKMLEINEEEAAVVRQIFDFYVNGVPDKNGKLRDVSFRALATYIMRKTLLRTPRGSRNWSPVVLKRLITSERYIGTMQFRTTQRVDGKQVPRPEDEHIVVPNAIPAIVDFELFMRAQEKVASSAHKPRTKMDFSPCELAGLCICLKCGRRMVRQSSTQHYKAVGGDVRIYEKEFLWCTTPGCTFVKYRTVEENLLGLLQHFRDLDELQVEQQIAAVIEADKQERPREDMTEYIEQRTKELKNRMRFIYEKYETGRYTDDMFDERKAEVDRELKELEDMRAESAQEPAEKRDGVIDTSVVKKNLTAVLDAYNAAEDKTDRNTIMRAVFSHVHVELIERGRGRIPAKFNLYPELKKDLTRSGFLVL

SEQ ID NO: 9818 - protein, 478 aa, Unknown
  Description of Unknown: Integrase B9819 sequence
  cd00338,IPR011109,IPR038109,PF07508,Coil, PS51736,G3DSA:3.40.50.1390,IPR006119,IPR036162,PTHR30461, PS51737,PF00239,SM00857,G3DSA:1.10.10.2600,SSF53041
MNENFKHQTALIYVRLSSKKQEDGMSKEVQEEKCRAFCEKEEMSVKAVYYENKSALHGSKRPVFEEILALQKTKDRVDVIMVYTLNRLTRNHPDFYFIRELVDKYNTKIVFVKENMVIQKPFKSYEKYFFNILVANAEFEIEHMKEIRKIGLLARAKTGKRPCLAPYGYKTYKNKLVVVPNDANFVKKAYELYATGSYSINSLCEELYEQGFYYSKQPNKKIPRASLSSMLKNLFYTGYYTFPDCEGEIKGAHKPIIERELYDKVQEMLSISGYEKIKKHQFLYSQLLTLQETGKLMTGEIKKGQYIYYKAYDNEKKYHCINETHVTEAILEYFKEIRLNLIPKEIVKSVLKEELKDLKQEYSTLKRNVSRKYHRKLRLNDFIKKDKIDDTDFIFDELEDIENTYENLNERIKESEEQIRQITSKCEDIMKKRLYDIYIQLNFENQRKILELVKSKLELQDKKVKLTFKSAFRKIRQR

SEQ ID NO: 9819 - protein, 545 aa, Unknown
  Description of Unknown: Integrase B9820 sequence
  cd00338,IPR011109,IPR038109,PF07508,Coil,IPR036162,G3DSA:3.40.50 .1390,IPR006119,PTHR30461,PTHR30461:SF3,PS51737,PF00239,SM00857, G3DSA:1.10.10.2600,SSF53041
MYKEYPRFYNYEVLDYGRKSRTDDPLLSVEEVLDKHDKIIEEYAEKHLGGPIPEENKYREVGSAESLDSRPEILRLLKTIENPAIKAVAVVEVQRLSRGDLEDAGRLIRILRYTNTYVITPMKIYDLRDEYDRDAFERELKRGNEYLEYFKKIQARGKLASVKEGNYVGSVAPYGFDRIEKTDGKKSYHTLIERKDQADVVRMVFNWYCNEDIGVTAICRRLEELGVKTKTGGKYWRTYQIFSMLENVHYIGCVRWNWRKTIKIIEDQEIRKLRPKAKVDEYLVFEGKHDGIISEELFYKAREIKGKRHRTKRDLTLKNPFSGIMYCKCGAKMGYNTYRKNGIEYAPPKLVCNNQIHCKTGSVVFDEIFTDVCSAIKDCIQDFVIRIENNKDDSFKLHKDLVARLEKKLKELEEKEVLQWEAQYDPDPNMRLPQEVFKRLNEKLLLEKEEIKKSLAKAKGSMPKPIDYREEKKKFEDAITALEDPNVDAKVKNQFLKNIIDRIEYERGETIRITKANAKEYKVDTSKGMQWHTPPYKLKMKLKYK

SEQ ID NO: 9820 - protein, 545 aa, Unknown
  Description of Unknown: Integrase B9821 sequence
  cd00338,PF13408,IPR011109,IPR038109,PF07508, IPR036162,PTHR30461,IPR006119,G3DSA:3.40.50.1390,PTHR30461:SF3, IPR025827,PS51737,PF00239,SM00857,G3DSA:1.10.10.2600, SSF53041
MPTSKNTARKYAAGGSSDNSCGVEPLRAVIYARYSSSGQREESIEGQLRDCYEFAKKHGIIVIGEYIDKAMTGRVDRRPDFQRMMKDSEKGRFNCVLLWKMDRFARNRYDSAMYKYKLKKNGIRIFYAKETIPDGPEGIILESVMEGYAEYYSENLAQNVKRGNYDSALELKTLGKTCLGLKTGPDGRYMIDQAEAAIVRRIFEEYAEGERAKDIYERLNSEGYRTSRGGKFNKNSLRRILSNKKYIGVYEYEDIYVENGIPAIITDRDLFERVQKMLKINHDAPARGKAQNFLLTTKLFCGLCGSPMIGDGGTSHTGKAYAYYSCTKRKRGRSCKKESVPKDWIEDLVVGELVKIVHNDELIEQIADRVMEYQKREKDQSGLHALETRQKENEKAISNMLAAIEAGIITPSTKTRLMELEADRADIEKGIAHELLAEPEFERDQIIYFLERFRSGDINDEAYRIVLVDTFLNSVYLYDDDHLVLVMNYSGENCKVDLKLVEGAVSGDGCKGSAFAPSSALNGAKPNPVYFFKKVFAVVVNFTRK

SEQ ID NO: 9821 - protein, 545 aa, Unknown
  Description of Unknown: Integrase B9822 sequence
  cd00338,IPR011109,IPR038109,PF07508,Coil, G3DSA:3.40.50.1390,IPR036162,IPR006119,PTHR30461,PTHR30461:SF3, PS51737,PF00239,SM00857,G3DSA:1.10.10.2600,SSF53041
MYLPPKIDFAPEEVLDYLRKSQADDPDLSVEEVLARHETILDEWAEKNLGAVVPPENKFREVASGETIAGRPEMQRLLRAIESPKYKAVLTVEVQRLSRGDLEDAGKLIRILRYTDTIVITPVKIYDLRDEYDRDAFERELKRGNEFLEYQKKIMRRGRELSVSQGNYIGSRELYGYERTVVMDGKRKCPTLTEKKEEADVVRLIFDMYVNQDMGRHNICKHLDSIGIKPPRGEHWSPPSVRDLLMNVHYIGKVKWNASKTVLTIEDGEVKKTRPRAKVGEYLIYDGKHEAIVDEDLFNRAQEKIGRNARTKAKTKVRNPLAGLVQCSCGRAMSLRTYKLKDGSERCAPRLLCDGQTHCGSGSCLYSEIEDRVIKILEDQIDAFQVRIKSQAGDSVKLHEQMIKNYKVKLKALEAKELAQWEAQSSPDPEERMPAAIFKQLNAKLLQEKEEVKHALCELYDTMPNPVDYTEKMRTFQEALEALRDPAISAEVKNSLLKECIEVIDYKRERPQRVKRAPGEKRGTTLTRGGQWTDPPIELDVKLKI

SEQ ID NO: 9822 - protein, 545 aa, Unknown
  Description of Unknown: Integrase B9823 sequence
  cd00338,IPR011109,IPR038109,PF07508, Coil,IPR036162,PTHR30461,IPR006119, G3DSA:3.40.50.1390,PTHR30461:SF3,PS51737,PF00239, SM00857,G3DSA:1.10.10.2600,SSF53041
MYKEYPKFYNYETLDYGRKSRSDDPLLSIEEVLETHDKIIEEYATKHLGGPIPDKNKYREIGSGESLDSRPEMLRLLKAIESPSIKAIIVVDVQRLSRGDLEDAGRLIKILRYTNTYVITPYKIYDLRDEYDRDAFERELKRGNEYLEYFKKIQARGKLASVKAGNYVGSVAPYGFDRIAIVEDKQTRYTLIEKKNEADVVRMVFNWYCTEDIGVTAICRRLEELGIKTKSGNTNWRPFNIFSMLENVHYIGCVRWNWRKTIKIIEDQEIRVLRPKAKIDEYLIFEGKHDGIISEELFYKAAEIRGKRHRTKRNLSLKNPLSGIMYCKCGAKIGYNTYRRDGVEYAPPKLVCNNQFHCKTGSVEFHEIYNNVCNIIKECISDFELRIDKDQDDSFKLHKDLVERLEKKLKELEAKEISQWEGQYNPDPNVRLPAHVFKILNEKLLSEKEEVKKALSKAKGSMPKQIDYKEEIVKFKDALEALENPDIDAKIKNQFLKNIIDRIEYERGPTVRITKENSEKYNIDTSKGMQYYTPQYKIQVKLKYN

SEQ ID NO: 9823 - protein, 545 aa, Unknown
  Description of Unknown: Integrase B9824 sequence
  cd00338,PF13408,IPR011109,IPR038109,PF07508, Coil,G3DSA:3.40.50.1390,PTHR30461,IPR006119,IPR036162, PTHR30461:SF3,PS51737,IPR025827,PF00239,SM00857, G3DSA:1.10.10.2600,SSF53041
MYKEYPVFYNYETLEYDRKSRFDDPYLSVEEVLEKHERMIKEYAERHLSGPIPEENKYKEVGSGESIDDRPEMIRLLKAIESPKIKAIIVVDVQRLSRGDLEDAGRLIKLLRYTNTFVITPGKIYDLRDEYDRDAFERELKRGNEYLNYFKKISLRGKLDSIREGNYIGSVAPYGYRRITKQNGKKICHTLEERKDQADIVRLVFEWYCNDNIGVTAICRRLEAMKVKTPGGTNIWRTPTIFTMLENVHYIGCVRWNWRKTIKIIKDQEVKELRPKAKIGEYLVFNGKHEGIISEEMFNRAKEIRGNRHRARTDTTLKNPLSGILICKNCGSKMGYNTYRRKGVEYAKPRVMCNNQVRCKTGSAIYDEVMERVCDSLRDIIDDFEVRVENQQDDSIKLHKSLVERLEKQLEDLEIKEKMQWEAKHHPDPEERMPSHIFKSLNSKLLKEKEEINEALCKAKESIPEPIDYKELSVKFTETLNILQDPTIDASIKNIHLKDIIEKIEYDRPPNIKITNENKKELGYDELSKGKMFHSEPFEISITIR

SEQ ID NO: 9824 - protein, 545 aa, Unknown
  Description of Unknown: Integrase B9825 sequence
  IPR038109,IPR006119,PS51737,PF00239,G3DSA:3.40.50.1390, PTHR30461,IPR025827,SM00857,G3DSA:1.10.10.2600,SSF53041, IPR011109,PF07508,PS51736,cd06503,cd00338, PF13408,Coil,IPR036162,PTHR30461:SF3
MPKARAAKQDTGFTAAIYARYSSSVQNDASIEQQVAECQEYARQHGLMIVATFEDRAISGRSDNRPGFQKMLRAAERHEFQVLLAYKSNRISRNMRNALVYEERLFQAGVKVVYCKEEFGDNATGRFMLRMMMNMNQFYSENMAEDIRRGMVDSAAKGKVVGVIPYGYKKGEDGRFAIDDQTAPVVQEIFRRFLNDESYADIARELNARSILTKRKQPWGKNSFHSILVNERYTGVYIYGEVRTEGGMPQIIERSVYEMAQKKLGEHKETRARHRDNEDYLLTGKLFCGHCLAPMVGLSGRGRWGNDYFYYACQTRRIQKTCQKKNVRKDFIEEEVTRCVLESVLEDETVEWIADTIIEASKRRSAQSQLADYEKRLADTKKQIRNIVRAVEMGIISDEFKERMAELEETKKELTGLIALEKAQIKHYDREDIIVYLESIRNGNPKDKKFQRKIIHDFVRAVYLFDDHFKLVVDFTGEHTVYDRSFMTSVSEDPEGGLAENNANGVCLSTAEVYQYILIQTPNSRNRIEAVDSGFVITWYFETNP

SEQ ID NO: 9825 - protein, 545 aa, Unknown
  Description of Unknown: Integrase B9826 sequence
  cd00338,PF13408,IPR011109,IPR038109,PF07508, PS51736,IPR036162,IPR006119,G3DSA:3.40.50.1390,PTHR30461, PTHR30461:SF3,IPR025827,PS51737,PF00239,SM00857, G3DSA:1.10.10.2600,SSF53041
MKRAATYARFSTDKQTEASIDDQRRCCADYAKQNGLQVLHEFSDLAISGASFGNRPGVNALQKAAFAGELDVILIADLTRLSRNSADLPKFLERMRFRKIRVIGVLDHFDSDQRHSRMQAGLSGIMSDEYRLAIGERVHLALDTLAKSGKPTGSKAYGYTSKQVVIPEQAKIVKEIFERIAAGETMLAIASDLNGRQVRSPGASWKGRVTNRGDGRWIVPALNNMLQNETYMGRVVWNRSQWVKDPETGKRTRRERPESEWIIDERPELALVDRKTWDTVSALMTRRKLSYGKKGGGRTKYPLSGLLVCGRCDARFIISGGGKNSRGYGSGLPRYYTCSTFHQGGPAACSNSIRVPRDLCETRLLEPALNDLLSDEAVDKAVIRIRKALKERPPEPVIDLSAIDTKIHKVQALVASGALDADMAEPIYKKLEAERLAIVRQSHSAARPPLVSGPWGLEAEYREHAQKLRADLTGEDADVARAALASIYGQRIRLLPDKHGLHLVAEVHFQANAVLHAVGGSVGRISLSSGGLQSAHIPLIRKGQK

SEQ ID NO: 9826 - protein, 545 aa, Unknown
  Description of Unknown: Integrase B9827 sequence
  cd00338,IPR011109,IPR038109,PF07508,Coil, IPR036162,G3DSA:3.40.50.1390,IPR006119,PTHR30461,mobidb-lite, PTHR30461:SF3,PS51737,PF00239,SM00857,G3DSA:1.10.10.2600, SSF53041
MYRYEKIEFRPEEILDYLRKSQSDDPLLTVEEVLEKHEAILDEWDERHLDAKVPEENRFREIVSGETIKERPEINKLLRLIESPKYKAVKVVEPQRLTRGDLEDIGRIMKLFKHTNTYVITPERIYDLRDEYDWNAIESELKRGNDYLNYYKKIQNRGRLLSVSQGNYLGSVAPYGFDKTYVMDGKRKCPTLKENKEEADVVRLIFDLYVNKDMGCAKICNYLDNMGIKAPKSKHWSQAALKDKLSNIHYIGKVKWNWRKTIDVVEEGEFIKTRPRAKIGEYLIYEGRHEGIVPEDLFNAAQEKRGRNHRAKPTTKIRNPLASILWCKCGRSMSYRTFKNKDGSEKTAPRLSCEGQKYCKNGSCTYEEIINRIVEVLEQCIEDFELRIKNDEGDSIKLHASLIKNLEKKMKDLEARELAQWEAQSHPDPSQRMPVEIFRKLNENLLKEKEEIQQALCKAHASMPEPVDYEEKMKKFKDALEALKNPEADAATQNKLLKECIDRIEYQREKPERMKKEPGEPKGTRFEVGGDWTKPPIHLDIKLKV

SEQ ID NO: 9827 - protein, 545 aa, Unknown
  Description of Unknown: Integrase B9828 sequence
  cd00338,PF13408,IPR011109,IPR038109,PF07508, Coil,IPR036162,PTHR30461,G3DSA:3.40.50.1390,IPR006119, PS51737,IPR025827,PF00239,SM00857,G3DSA:1.10.10.2600, SSF53041
MTPHEDDAVIRRPRRTLRPKAKIELPDLPAHWHAYPCDCEPCVIYLRVSAAGGRDRIISPMIQFASILEECHRNNRRIVGIYFDLKTGKTLDGRKIHTVVKEITDGKYRTVAVHKWDRWGRNTLESLQMCDMVDKAGGQVVSSTEAFNTKTPAGNFIRTVLLGVAELQSKLIGENWKGTQQHRKTSGLPHSGRDRIGYAYINRRYVIDKVEAETVRQTYEQYVSGVGFKSLARQWNTADIVTTTGAKWTPQALCRTLDTGFAAGYIRERSDPGNDPANTIAAYDIWRQGDHQPIISEGLWQQYRARREAQAGLPSRLRTGTHALSGLIFCGTCGRRANTKYMGRNGAHHWVCNFSQTYHPGKANSMTNAIAEAEVRRWVEERAGAGDAEKVTKKARELADAQRQPGPVDGIMTKLGGIAGEKFRARDMYQQGDCTRQEMKQRVAKLDVEEQELRVELARAKAAEQSANGHTDFIPMFTKLAKEWENFAAEERSIILKKIIGMVQFFPQSTVGRDPSVRIRVVPVWEMSEWGDAWLSARRRWQELR

SEQ ID NO: 9828 - protein, 545 aa, Unknown
  Description of Unknown: Integrase B9829 sequence
  PS00397,IPR038109,IPR006119,PS51737,PF00239, cd03768,G3DSA:3.40.50.1390,PTHR30461,IPR025827,SM00857, G3DSA:1.10.10.2600,SSF53041,IPR011109,PF07508,PS51736, IPR006118,PF13408,Coil,IPR036162
MGKKSEVVQKIRRACGLYLRVSTEMQAIIKEGSLDTQQSTLTKYTEIKSSNGDEEWCVAEVYREEGRSGKNTDRPEYQRMLKDIKNRKIDVLLCTKIDRVHRSLVDFYKLHELLEAHEVTFVSLSENWDTSTPMGRFGLKLTLAVAELEREQTSQRTKEKMRWRAEQGLRNGGQVFGYDIDPENRGVLKVNSEEAKLIRLIFETYRELRSFRRTAQKLNEMGYRTKSYQSRRGHIHGNKKFTKCAVIHILQNPVYIGKVTHYDSLFDGKHDAIIDERLWQDVNDQMRANRVVRAKPREQKMHTFLLEGLIRCGWCGGYLTPTYSGGRNGTYFYYQCTKVHNGGDECKMKRVSAEDIEEVIARRLIEMSKDQNLLTEILDEADTASRKERKILEERRNIQKRALAPIEQEIANIVKFIAQGKGSAALSTEIERLEIQKQEIEGELERIELEARELKNRTISAEVVSEGLGFFEQAWQVATPKQRKDLMRLHVHRIIWTPEKIKMGLYARPTSEMYIKPTAVNHLGDFAVDSMNWLPKFPVLLTAVR

SEQ ID NO: 9829 - protein, 544 aa, Unknown
  Description of Unknown: Integrase B9830 sequence
  PS00397,IPR038109,IPR006119,PS51737,PF00239,G3DSA:3.40.50.1390 ,PTHR30461,IPR025827,SM00857,G3DSA:1.10.10.2600, SSF53041,IPR011109,PF07508,PS51736,IPR006118, cd00338,PF13408,Coil,IPR036162,PTHR30461:SF3
MKAALYARVSSQGQADKDLSIPAQLKALREYALKKGGSVAVEYIDEAESARSADRPKFQEMIFAAKQKVCLFDTILVWKFSRFARNREDSILYKKLLKKHGIDVISINEPIDDTPSGHLMEAMLEAVDEFYSLNLSSDTIRGMKENAARGFQNGGVAPYGYKRVKSVINGNERVKLELEPSEASVVRRMFEMAAKGLGTKEVVKTLTKEGLKTRAGFPWSKTVLHYMLTNETYTGTIVFNRFKQSEEVRKRNEPEKLIRVENAHPAIIDKETFTKVGELMKSRAPKIMHPREVSSDYLLSGMVFCGKCGAKMVGSSAKSGKFFYYACQNYLKRGKDICDCKFIPQAKLEDAVIAKIRERVITKENIGKLVRDINEELLASKGSLLDRVHEQDLKVVEANKRLQKLYNALETGQLELADLAPRIKDLRTQIDALEGVKAALNAELAKETINVSDSELKAYEDELCGFLQRSTITETKSFLAQWVKRIELDTPGGGHIIYKLPLAPGAKGAEVLSLRIGSSPDRTGNRFWDSSTCSSTCTDIADQH

SEQ ID NO: 9830 - protein, 544 aa, Unknown
  Description of Unknown: Integrase B9831 sequence
  cd00338,IPR011109,PF07508,Coil,PS51736, G3DSA:3.40.50.1390,IPR006119,IPR036162,PTHR30461,PTHR30461:SF3, PF00239,SM00857,SSF53041
MSFAYSYIRFSTKKQGKEGRDSFRRQTELRNRWLLKTGHELSNIAFHDLGKSAFHSTNLIPTSALSKFLSLVESGQIEKGSFLVIEKLDRLTRAKLSTAYNLFQRIIEKGIKIQTLEPEKTYDETSLDNVFTLMEPLMSFQLANDESQKKSDRAKSFWDNQRKTGTINARKPAWIDKNGKLNIGAKAIQFIFDESIARIGQRQILQKLVANFPPIGNSKKWNLSYINKILSEITVTGRFQPMSTQNGVRIKINKEIPNHYPRVISDKIFKEVQLLRRRTKRVRGIVNSTNIFSGLLVCANDTSPYHLQTTKTQGIRKWLVSYFHTQKQQNSCRMMVPYHYFEKQVLLFITDTVGDLNETRKTTDTTELETELHNIELRLEEIEKEMITMENPIALLAKVANKLTTRKKQIEVEIEKQTIPIDELKLSLSQLLSVLNSGDEVARFKLKGLIGEVVNSIHIMPEKHNGKIFVLFQIEYKNGEIRQCGYFRDKVLYLSMVNNKTELTIDLTDNKSITGQFFPPLIESNKLTMNLGKSIAAKLANIPA

SEQ ID NO: 9831 - protein, 544 aa, Unknown
  Description of Unknown: Integrase B9832 sequence
  cd00338,PF13408,IPR011109,IPR038109, PF07508,Coil,PS51736,G3DSA:3.40.50.1390, PTHR30461,IPR006119,IPR036162,PTHR30461:SF3, IPR025827,PS51737,PF00239,SM00857,G3DSA:1.10.10.2600,SSF53041
MAKKKEKPQPVQTAAIYARYSSNAQNDASIEQQIAECELYAKANNLTIVDRFEDRAISGRSDKRPGFQKMIRAAERREFQVLLTYKSNRMARNMYDALRYETRLEDAGVKVVYCKENFGDNAAGRMMLRMMMSINEFYSDNMAEDIRRGLMDSASQGKVVGALPYGYKKGEDGKVIIDEELGPIVQEIFSRVMNDETYADIARDLNARGYRTQHGKQFGKSSFRAILENERYTGVYLYGDIRIDGGMPKLIEKEVYDAVNHIVKHRQTLHARQRENGEYLLTGKIFCGKCLGPMVGISGKGRWGKDFFYYSCNTKRLQKKCDKKNVRRDQIEEEVTRAVLECVLDDDTVEWIANTAMEMSREMEEQSQLGYYESRLKEAKKQIANILRAVEMGIISDEFKERMTELRMEKQELEGLIATEKLGILQVDRDHVIKYLLLLRTEDYRDKKFQKRIIRDFVKAVYVYDDHFKLVVDFTGENKTYTRPLKIKLAKAEGPVNEGEGVCISSGVAHHISLIQTPDPRNCIDVSDAGFVITWYFSDNTVKQ

SEQ ID NO: 9832 - protein, 544 aa, Unknown
  Description of Unknown: Integrase B9833 sequence
  PF13408,IPR011109,PF07508,Coil,PS51736, IPR036162,IPR006119,G3DSA:3.40.50.1390,PTHR30461,PTHR30461:SF3, IPR025827,PS51737,PF00239,SM00857,cd03768, SSF53041
MPSPAASPVVAGVYARKSKYAEASESVSTQVALCRDLAQRQYPGCTFVVYDEDEGFSGKNTNRPGFLRMMEDVRSQRINVLYVYRLDRMGRSVRDICATLETLQRHAVSFVSVRENFDTSTPMGRAMLYVASVFAQLERETLAERVRDAVHAMARQGRWLGGNTPTGFVSRKDSKGWFYLKPVPDDLDKVRHLYEQFVSLGSVSALVTYCLRNGIRSRTGVEYSRTTLRSLLVNPVYCTADLDAFRFFSSHDYALAAELSEFDGFLGLQPFGRTSRNENTVILNPTSQWIIAVGNHPGAVPGAVWVRAQNILEQNKELGASFRGRRTENALLSGVIRCGSCGSAMRPKTYGTPLPDGSRRVAYICTRKVDSRGDLCTIKNAPANDVDAIVLDHLRQLSQQFDSLNQSSVSLLAASSAHAAEEGIRALQLEVQKAQQQMDNLTDTLAEGVPAAARQQIYQRMEDLSQLISEKEDAIAELTASQLDSQQQLSFAEQACALFASFGDGFSSLTHDERRRLIRSVVSSVIWDGENITINPAGVPASLG

SEQ ID NO: 9833 - protein, 544 aa, Unknown
  Description of Unknown: Integrase B9834 sequence
  cd00338,PF13408,IPR011109,IPR038109,PF07508, Coil,PS51736,IPR036162,PTHR30461,IPR006119, G3DSA:3.40.50.1390,PS51737,IPR025827,PF00239,SM00857, G3DSA:1.10.10.2600,SSF53041
MAYRKITDIKDTIGMRAVFYARVSTAEEEQLNAIELQIEENRGCIKDHGWKLVGEYIDRSKSGTMVKGRDDYQRLYEDLYEDLFDIVVIKDQERLQRNTLDWYLFINRIVQTGKLLFMYMDGKFYSPDDALITGVRAIIAEEFSRNLSKKLHNYHDHRIEKARQGQEIALQGSGNVYGWDKKDGKYYINPEQAKVRRLMCEGIMARKGSTLIAKELNEAGYRNTVGKLWKPMDIPKFVYDCKNVGTMIINKERHDFESKQTIKLPKEEWVYVENALPPIVTQEEWDLICKIHEERVIATGSDRRGKKTSGYSFSGKLVCGICGAPYWRKQRVSKDEYWVCSTKQTKGRRTRKRDSTMGKAGEINPLGCDNENISYNSLMEIMGVVSERLQANTNTIKQDMINWLTKLRKQLLEANGGHTEADLQRELSRKSKLLDAYLDGILNKQEYQKKAEELDERIIQLKTETEKNKANSGDIAEIDKVLANIDEEVARYVDGNEKLKVEYLLEHLEQVQIFPDKVIVIVPILSEGIVVEKTQYVSREKWRW

SEQ ID NO: 9834 - protein, 544 aa, Unknown
  Description of Unknown: Integrase B9835 sequence
  cd00338,PF13408,IPR011109,IPR038109,PF07508, Coil,PS51736,IPR036162,IPR006119,PTHR30461, G3DSA:3.40.50.1390,PTHR30461:SF3,IPR025827,PS51737,PF00239, SM00857,G3DSA:1.10.10.2600,SSF53041
MPVSITFSADLKKAKGEPILAAIYARYSSHSQTEQSIEGQLAAGHAYAEKHGYTVIKEYCDRAQTGRNDNRDAFQQMLSDTDKKQFDVIITWKVDRIGRNREDIAFNKHRCKKNGVRIEYVAENLPDSAESVILESVLEGMAEYYSLQLATNIRRGQLESARKLHCIGGTRPLGYSVDPETKRFVINPDTAPIVKQIFELYAEGSTETEIITWLNEQGIRTTRKQPFSKSSLARLLHNEKYIGLYIFKDLVRVEDGVPAIIDKDLFDRVQELMKVNRRAPSHTWTHQDYILTDKIFCGKCGSPMIGESGISHTGAKHSYYSCVGHRKKKICDKRPVRQDWIEKRVLEATRKLLEDDELLDWIADKTYEYYTATNGNVDQKDMLEKELATVNTSIDRLISAIEAGAFNDRIKSRLDELNAQKAQITASMAELELASGFRLTRDHIAFFLRAFRDADINDRACQKRLIQTFVNAVFVYDDHIKIVYNYTSDSNTVTLDTVENLDIEDSDGFVHSTQCSTIAIRHEPKGITIFGTVFMIIIETGQDA

SEQ ID NO: 9835 - protein, 544 aa, Unknown
  Description of Unknown: Integrase B9836 sequence
  IPR038109,IPR006119,PS51737,PF00239,G3DSA:3.40.50.1390, PTHR30461,IPR025827,SM00857,G3DSA:1.10.10.2600,SSF53041, IPR011109,PF07508,PS51736,mobidb-lite,cd00338, PF13408,Coil,IPR036162,PTHR30461:SF3
VPKKNAGQPVKPKRGQKLDAPGVIYARYSSHAQKDLSVEQQIEQCTALAKEYGIHVIEIYPDRAVSGRTDKRTNFQRMMKDAASGRFKYVIAWKSNRIGRNMLEALVNEARLQEQGVRIIYVEEDFDDTAAGRFAARSMMNVNQFYSENMAEDIKRGLYANAQKCLVTNGHLPYGYKPDETRHFAIDEPKAAVIREIFTRVATGEPFVDIFESLNARGITTSYGRPWGRTSFSNILSNERYRGIYIYGDVRIENGIPRIISDELFYKVQEVITTKRHPRGRHRINGDYLLTGKLFCGKCGSPMTGYSGTSRAGDMHYYYVCNKHRYEKNCDKKNVRRDSIELQVAQAIKDYALQDDVIEWIADQTIAYNKRKEAENHIGMLEDQLKTAKRGIKNIISAIEQGIITSSTKDRLQELEREQSKIEGQIAAARADIVTVSRDDIISGLSMFRDGDINDKKFQAQLFDTFLIAVYVYDDRLKIVFSFSGAKNTAEIPLNNPPDSSESDEPECSSKLQLDPPSWSQTNTTVIYMIGGMFVLALPLKETQ

SEQ ID NO: 9836 - protein, 543 aa, Unknown
  Description of Unknown: Integrase B9837 sequence
  IPR038109,IPR006119,PS51737,PF00239,G3DSA:3.40.50.1390, PTHR30461,IPR025827,SM00857,G3DSA:1.10.10.2600,SSF53041, IPR011109,PF07508,PS51736,mobidb-lite,cd00338, PF13408,Coil,IPR036162,PTHR30461:SF3
MAHGILPENAAVLYLRMSSAKQDKSIDAQRDELLKLALRKGYTIRREYVDPAISGDDTERRTGFLRLREDCENGPDFSIVLVWHEDRFSRNDPLEYGYWLKPIRDSGVVLETPTGRVDWESLGGRLLSLIGQEMRHDYLRQLSRNVARGQLAAAKDGRGGTGGRAPGGYKHKDGKVLVERDKAAVVLHAFQEYDKASASLRSVVDLLNREGLRTARGNKWSITTLRGTLTNRKYAGDFVRLKYRAGKYHAIKDGEIVTRRKGEGVEEVEPIVVEDHHKAIVPRRLFDRVQRKLAGQRKRTAHRTGHQYIFSGLLRCGDCGGRMGGAPAMDGSKYKKYFTYICRTYHSHGPAACHCNSMSEDKLLDVVTRKLQAEVLSETAISRLLDAYRKRLAARRRGVPADDGGRLRKQIDKLDRQIDQGLDRLVLVPEKLVGTLSAKIEKLREELDRLKDQLNAAGQPETCSVVEDDRKVEEAARVLRDMREAFADAEPAAVRDLISPLVSKIELQFDHVQEGKKRRHLCKGGTILVRPVDPALSLLFGIS

SEQ ID NO: 9837 - protein, 543 aa, Unknown
  Description of Unknown: Integrase B9838 sequence
  cd00338,IPR011109,IPR038109,PF07508,Coil, G3DSA:3.40.50.1390,IPR036162,IPR006119,PTHR30461,PTHR30461:SF3, PS51737,PF00239,SM00857,G3DSA:1.10.10.2600,SSF53041
LTPEEILDYLRKSRSDDPLLTVEEVLQKHESILDEWAVKNLGGEVPEDNKYREVVSGETIKDRPEINLLLRRIESPKIKAVAVVEPQRLTRGDLEDIGRLMKLLKHSNTWVITPQHIYDLRNEYDWDAFERELKRGNDYLEYTKKILNRGRLLSVSQGNYIGSIAPYGYTKATVNEGNKKCPTLAINEEQADVVRMIFDMYVNKDMGRTNICHKLDDMGIKPPKGKLWSPFALKDMLENVHYIGKVKWNWRKTIKIVEDSEILATRPKSKIGEYLIYDGKHEAIISEELFQRARDKQGKNHRAKPKTKIRNPLAGLLICQCGRAMSLRTYRKNGEERADARLLCDDQVHCGTGSVVYDEMIEHISGILRECIEDFEVRLENDEGNSVKLHNNLIKSLEKKKKELESKELAQWEAQASPDPAQRMPAHIFKTLNEKLLKEKEEIQQALCKAYESMPEPVDYEEKIVSFKEALDALENPNVSAIQKNTLLKKVIERIDYRRDKPERVRSTAKRVTINGKRIRPNGLKTGATWTNPPFEVDVKLKV

SEQ ID NO: 9838 - protein, 543 aa, Unknown
  Description of Unknown: Integrase B9839 sequence
  cd00338,PF13408,IPR011109,IPR038109, PF07508,Coil,PS51736,IPR036162, PTHR30461,IPR006119,G3DSA:3.40.50.1390,PTHR30461:SF3, PS51737,IPR025827,PF00239,SM00857,G3DSA:1.10.10.2600,SSF53041
LTTPKHPPKPKRGKKIEAEAIGVIYARYSSHSQRDISIEQQIAKDQELAAEYGIKIVAIYADRAVSGRTDKRKEFQKMMRELPKHKAKYVIAWKSNRMGRNMLESMVNETRLQDMGVRVLYVEEDFDDTAAGRFAARSMMNVNQFYSDAMSEDIRRGLMDNAEKCMVNGSVPFGYRRGADGYYEVDPEKAAIVREIFKRFLDSESFAEIGRDLNSRGIRTKRGNPWNKNSFHRLLSNETYIGVYKYSGIRKEGGVPAIITKEVFDAAQERLRTKPNPVGRHRMNSDYLLTGKLFCGHCGSPMVGISGTSKTGDKHYYYSCQKHRLEKTCDKKNVKRDYIEARVLEKIRECLMDDHVIQWLVDGYEEFVIKVRSESLLATYEQDLEEVKKSLKNIMRAIEQGIFTDTTKERLEELEEERRVLEGNIAAEKAMLVDTPKEQVQFWLESWRQGDVTDQKTAERMIDTFVKAVYLYDTDGGLRGKIVCNYTGKNSTLEFSLDDLEDLPEAASRSVRISSRQVHQKSQYELNTVIYVLRDVFVLVTDL

SEQ ID NO: 9839 - protein, 543 aa, Unknown
  Description of Unknown: Integrase B9840 sequence
  cd00338,PF13408,IPR011109,IPR038109,PF07508, Coil,PS51736,G3DSA:3.40.50.1390,PTHR30461,IPR006119, IPR036162,PTHR30461:SF3,IPR025827,PS51737,PF00239, SM00857,G3DSA:1.10.10.2600,SSF53041
MRVVLYMRYSSDRQTEQSIEGQNRVCTAFCEQQGYEIVDRYIDRATSAFKDTDKRTEFQRMIRDSEKQLWEGIVVYKLDRFARNRYDSATYKARLKKNGVRVISATENISDNPEGVILEAVLEGMAEFYSKELSQKITRGMFESANKCHSIGGHIPLGYKIENKKLVIDEAGAAIVREAFDLYANGATVAEICETFNTKGYRTAKNAEFNKNSFRSMFKNERYIGIYKYKDLRIEGGVPAIVDKDTFAIVQKKLSKNAEAPSRGKAKIDYLLSQKLFCGHCGSLMTGESGTGKGGTTYFYYTCGKRKREHTCDKKPLKKDFIERAVVEDALTLLTPETIDELADIAVNESIREMEENSIIPALKDQLHDTERSINNLVKMVEKGVESDTIADRLKELEKEKRAIEKRLVVAQDDYVLLEKDHIVWWLSEFCNGDIEDEEFRRHIIDLLVNSVTVWDEPDGWYKITSVYNLTSNKTKTFRCSDLSGQAPPKLEIAAVKTAVIFHLTTEIPQTGNLPHPREFLFWLSQPVPCFPELPPLRLDLRF

SEQ ID NO: 9840 - protein, 543 aa, Unknown
  Description of Unknown: Integrase B9841 sequence
  cd00338,PF13408,IPR011109,IPR038109,PF07508, Coil,PS51736,IPR036162,IPR006119,G3DSA:3.40.50.1390, PTHR30461,PTHR30461:SF3,IPR025827,PS51737,PF00239, SM00857,G3DSA:1.10.10.2600,SSF53041
MEVAKIPKKIVTVIEPKRSMTVDKEKYRQKKVAAYCRVSTDSEEQLVSYANQKKVYTEMIASRKDWCFAGLFADEGKSGTRADKRPEFNKMINDCLAGKIDYIITKSVSRFARNTVDCLDYVRMLKSKGIGAYFEEQQIDTLKTDSELYLVIYAGFAQSESESISKNITWSVRKKFEEGTPVFIYKRFLGYKKGADGEPEIVPSEAAIVERIFNLYLAGETVDNISKMMQAENYDIPGKTISFSKGMIMNMLSNERYCGDAILQKSVTVDCIEKKRKKNTGEAPMYYVQNNHPAIIDRVTFNKVQEELARRKTKTPGSAKSSITSTGKYSRYALTDVLICGNCGTRYRRVTWSRNGTKRIVWRCISRLDYGKKYCSDSPTIMEDKLQEAIVRAVNKFNKQDNATYKALMRATISEALGLNGDPEEVDMLERKIEALNNKMLALVNESVSSGDGIEAHESEFMTLSQEAELLKQRIAAIQESTAKDNGEQNRLEQIQAIIAERESKCMEYDDSIVRQMVECIKVYPGGKLEIIFGGGYLVEESV

SEQ ID NO: 9841 - protein, 513 aa, Unknown
  Description of Unknown: Integrase B9842 sequence
  cd00338,PF13408,IPR011109,IPR038109,PF07508, PS51736,G3DSA:3.40.50.1390,PTHR30461,IPR006119,IPR036162, PTHR30461:SF3,IPR025827,PS51737,PF00239,SM00857, G3DSA:1.10.10.2600,SSF53041
MPKAVLISPITKQGIQKIRVAAYCRVSSNSADQLNSYATQIRVYTKLINSKKEWTMVEIFADEGLSGMKVDSRPEFLRMIRMCELHQIDLIITKSVARFARNVKEALEYVRKLKLLGVGVQFEKEGINTLAMGDEMLLNTFTAIAQEESKAISQNQRLSIVKRMELGEYIDSNAPYGFRLENKVLVVYEPEAEIVRWIYNSYLNGWSTSEIARHMNEQGIPTKMGKDKWTSSKIKYILCNERYIGDCNYQKTYRDTTVPFKQYKNRGQEDMYYAKGTHTGLLDKDVFTKVQDLLAKRQQQFGKSEVLNTYPLTSRIRCLECGSIYRRKIRNGTVKWVCGKHQEDSTACPASYYSEERIYDSLAAMFNTLRFGEEDILGQVIAKLDSAATTYKRNNKAAGQISQSIAEINAKILMLDQLRSKGYLAPEVHQAQTIELRNQLSRLKTERNDLFETRILGMLEAVKKLKDLVEEIEEPLEVFDERLLMEAVEDITINRHDEMTVTLLGGLKFKELL

SEQ ID NO: 9842 - protein, 543 aa, Unknown
  Description of Unknown: Integrase B9843 sequence
  cd00338,PF13408,IPR011109,IPR038109,PF07508, Coil,PS51736,G3DSA:3.40.50.1390,IPR006119,PTHR30461, IPR036162,PTHR30461:SF3,PS51737,IPR025827,PF00239, SM00857,G3DSA:1.10.10.2600,SSF53041
MKKQPEILNAVIYARYSSHSQTEQSIEGQLHDGYAFAEKCGYKVVGEYIDRALTGTKDDRPEFQRMIKDAEKKQFQIVIVWKLDRFARNRYDSAIYKRTLKKFDIRVVSVMENITDSPEGIILEGLLEAMAEYYSANLAENIRRGQQESVKKGWYCGGSIPLGYRLQDHRLVEDERTAPLVRELYQRYGSGESLASIAADFNARGFRTNRGRPFKTSTFDRIIPNATYIGQYTYAGQVVPDLAAPLIDQETYDRAVQRRTANRRAPAANRTPVKFILQGKLFCGYCGTAMCGDYGTSKSGERHNYYSCSARKHRKNDCRKKSEKKDFLEWYVCEQTVKYVLDPDRMDQIAETVADLYNSEIDDSKVAALERTVQRLDDELNALVDKLILVPKESAGRIADRMKQLELQRIEAETDLSKLRIQQNIRITKKEVAAWLQTFASGDLFDPDTRIRIIDTFINSIYLWDDKIVIFYNIKEGKQTIGIDQIGDLDEKIEKAGQVDCSTLTGDGGAMPSKVEHSAHAFIFIHGMLGLVVFRQLKTTENN

SEQ ID NO: 9843 - protein, 543 aa, Unknown
  Description of Unknown: Integrase B9844 sequence
  cd00338,PF13408,Coil,G3DSA:3.40.50.1390,IPR006119, IPR036162,PTHR30461,PTHR30461:SF3,IPR025827,PF00239, SM00857,SSF53041
MPSDAPFPLNSRVVAYLRDSGGEDQDLSVAQQEAFVRGWCQQNNLVLTAIFADVATPGSSTIGRDQFRKLIDHFHNPDCPDAGVILWKFSRFSRSMDDAQFYRADLRRRGFIVHSIQDNIPDTTDGRIYEALIDWMNNKFLEDLSMDVKRGLHHLVTTYGALPGTPPRGFMREPVAIGSRRDGSPHTACRWSPDPEKWDLCLQAWTMRAQGIPVRRIHKELHLFGSINSYSTFFKNPLYLGELHYGDLVIKDYTTPMVTREIWDIVQELNQANSAGHSPLHRRTNDRHPRRENSTFVLSGLLHCPRCGSLMNGMSVRSTKSGLFEYYLCSNANSKGDCDARRVPKATIETLVIEKILEYVLDPEAVKERDKEMALAQADNPKRIKKALEGCNARLANNARRIENVTNRLAEEKKPPQSLLAKLHELELEHLTLSAEKERLKSMQNHETVFVRNPEQIQKMVDGFNYSMTHGTLEEKRDAVRSLVVRVAAERDGDFIRGIVRFFNPTDEKRGFMSMAGGTVEAPEYRHKIFTFEFCVKIKQKSQ

SEQ ID NO: 9844 - protein, 543 aa, Unknown
  Description of Unknown: Integrase B9845 sequence
  cd00338,PF13408,IPR011109,IPR038109, PF07508,Coil,PS51736,IPR036162, PTHR30461,IPR006119,G3DSA:3.40.50.1390,PTHR30461:SF3, PS51737,IPR025827,PF00239,SM00857,G3DSA:1.10.10.2600,SSF53041
MAVSITYNADLKKAKGEPILAVIYARYSSHSQTEQSIEGQLAAAHAYARGHGYTVVREYCDRAQTGRNDNRDAFQQMLSDTDKHQFDVIITWKVDRIGRNREDIAFNKHRCKKNGVRIEYVAENLPDSAESVILESVLEGMAEYYSLQLSTNIRRGQLESARKLQCVGGTRPLGYDVDKETKRYIIDEKTAPVVRQIFEKYAKGATEVEIIRWLNDQGIRTTKKKPFTKSSLATLLHNEKYIGVYTYGDLVRVEDGMPAIVDRETFDKVQELMKVNRRAPSHTWTHQEYILTDKLFCGKCGSPMVGESGFSKTGAKHCYYSCTGKRKKKTCDKRPVRQDWIEGEVLKATREMLKDEELLDWIADQTYNYYLSVNGREEEKTILQKELAGVDTSIDRLVSAIEAGAFNDRIKSRLDALNEQKAQITASIADLELASGFRLTRDHIAFFLRQFRDADLEDRACQKRLIQTFVNSVFVFDDKIEIVYNYTEGNNTVTLDILTSETDGGEFVHSTECSTIPIRYEPRGIIIFGTTFMITVQIENRGG

SEQ ID NO: 9845 - protein, 542 aa, Unknown
  Description of Unknown: Integrase B9846 sequence
  cd00338,PF13408,IPR011109,IPR038109,PF07508, Coil,PS51736,G3DSA:3.40.50.1390,PTHR30461,IPR006119, IPR036162,PS51737,IPR025827,PF00239,SM00857, G3DSA:1.10.10.2600,SSF53041
MVQEKLRAVFYARVSTEEERQLNALEKQVAECKDAVLQKGWKLVDQYVDEGKSGTQIKRRDEYRRLFEDLENDKFDIVVIKSQDRLQRNTLDWYIWIDRLTTHGKRLYMYLEDTFYSPDNALISGIKAILAEEYSRELSKKINNSYKRRIEAAKNGEKISIVNNSRSLGYDKVNGELVINEKEAEIVRMIFNMYASGEGLRAISNTLYDMGYRNRSGNEIDPSTISRMLSSEKYKGVYVINQRHYDFDTKKTVLNPKSEWVHIPGAVPAIVEPELWDRVQEIKGSKVQSIKNEKRGRNCGKSIFSGKIYCAKCGAKYWRSLENGYVKFKCSSYSKYGKIPGKGCDNKSFSENALYSILQSLSEQIVEVNTAEVRKSLLSWLESLRERLRASQGDDTIKEEIRKQTARKEKLTDAYMDGIISKEDYSKRYKELEKTLEDLKDKLLTLEVNEDLQSIEEVIQNIDKEMEEYLQTQSFNESRVDFLNQHLTKVTVNKDSFLLEFDLIGGAILTGKDFYLFVDNPRWYSIQTDKRNSVDVGIKIAA

SEQ ID NO: 9846 - protein, 542 aa, Unknown
  Description of Unknown: Integrase B9847 sequence
  cd00338,PF13408,IPR011109,Coil,G3DSA:3.40.50.1390, IPR036162,IPR006119,PTHR30461,IPR025827,PS51737, PF00239,SM00857,SSF53041
VSRPSVYSYLRFSDPRQAAGHSAERQAQYAARWAAEHDLPLDESLSMRDEGLSAYHQQHVRSGALGVFLAAIDAGRIVPGSVLIIEGLDRLSRAEPLEAQAQLTRIINAGISVVTASDGRVYTREGLRSQPMDLVYSLLVMIRAHEESDTKSRRVRAALHRLCQRWAAGSYRGPVRAGKDPAWVTWDGTRFVLDPDRSEAVRQALALFRAGHGASRIVLQLAHAGLSTTGRAMAASHLYKLLRLRALMGEKEVAVGGQTYRLAGYYPALMSADEWDALQLLADDRGRRRVKGDLPHTITGLGITRCGYCGQTMSGQNLAGKPRLPDGRIRDSYRRLLCSGRSRGGEPCPVPGSCSIAPIERALLAYCSDQIRLDALRTGADPATGPAAEAARHRTRAAELTRQIDRLAEALASDDGPAPAAIMRRVRELEQQLDTEQTALDAAERTLATLNSGRMTHDIAARWAELKAGVEAQDFDTRLRARQMIADTFEALVVYHASRQPGQCDAIDLLIRARGGAPRWLRIDRVTGALIDGLDVSAPEVM

SEQ ID NO: 9847 - protein, 542 aa, Unknown
  Description of Unknown: Integrase B9848 sequence
  cd00338,IPR011109,IPR038109,PF07508, Coil,IPR036162,IPR006119,G3DSA:3.40.50.1390, PTHR30461,PTHR30461:SF3,PS51737,PF00239, SM00857,G3DSA:1.10.10.2600,SSF53041
MKAIAYVRWSSKDQKKGDSERRQTSLAAEMCQTRGWTLVETVIEHGKSAYHGRNRSKIGELGKLEKRAANGELAGMALIVENVDRLSRQEPIEGLLLLQSLTKAGVTVAESASNSVLDVNTVKENWQSLLVPFLRWGLSYEESLKKGLRISEAYQSTLDRGFRTKDGLADLRFSPSWIGRDEAGDYQIIEDRADIVRLIYKRCVDGHGLRAICAELNKDLSKTRWQKGDWNQANIREILRNRQSLGEYELTERTEDNYTRRTGQWVKGNFPSVIDAELWHRAQSALDARRSTGGKRRGMVNLLQGFTYCGAINDGERCGSRMIITQNSKTEPRKARLRCARNHRAAGCKSRASFHYQHLVNGILDQLLEVALPVPKKESDASSSLAVAQVELEGAEKRLDNLVDAFAESGSPALKRGIARAEADIEEQRQKLEELRIALEKERCKRPAKKAIDEIQALRDQLQDDEDARRKVHSALQEMITSIFLYPDTREAHVLVAGIHALRFDGLGNLIDSQVATSAVLEGAHNDNPIGLQRYLDYTKNG

SEQ ID NO: 9848 - protein, 542 aa, Unknown
  Description of Unknown: Integrase B9849 sequence
  cd00338,PF13408,IPR011109,IPR038109,PF07508, Coil,PS51736,IPR036162,IPR006119,PTHR30461, G3DSA:3.40.50.1390,PTHR30461:SF3,IPR025827,PS51737,PF00239, SM00857,G3DSA:1.10.10.2600,SSF53041
MKITAPARSARAVSLEAFVDNLNLANVVIYARYSSAGQNDQSIDGQLAKCREYAQQRGYCVVGEYCDRALSGRYAETRPEFQRMISDSAKHAFDFVLVWKLDRFSRDRYDSAIYKKKLRANGVRVLSVTEGVGDSSESVLLEAILEAMAEEYSRQLAQNVRRGMRQNAEKGLSLGGLAPLGYRVVNKQYEINEDEARIVRFIHEQYADGAGQKQIVADCARLGYRNQRGNPLTLAAVKRILANERYIGRYDYLGEIVIEDAFPAIVSKDLKKRVRDRLNANAKAPGHAKAKVEYLLHGKLFCGECGAPMIGECGRGRHGATYYYYTCAARKKQHTCKKRNERKDELEASVVDYIGSCVLTDSWIDGAAERVVAEYQKSYDASGIKPLEKQIRDADKEIDQLVDALISATAEAARRRINERIETAEARKQALEADLASLRIASRVQIKKEDIVVWLNQFRTGDRSDLEYRKKVIDLFVNSIYLYDDTFKLFLNVTDSTQITYSDSLALAPPSVSDFGASGVPDMHLSEHIIFVNGVIGMIVQR

SEQ ID NO: 9849 - protein, 485 aa, Unknown
  Description of Unknown: Integrase B9850 sequence
  cd00338,IPR011109,IPR038109,PF07508,Coil, PS51736,IPR036162,IPR006119,PTHR30461,G3DSA:3.40.50.1390, PS51737,PF00239,SM00857,G3DSA:1.10.10.2600,SSF53041
MSKVILLSRVSTAHQDLTQQTEKVLDEIKKDGYKPANIITIEDKESAVLLSEEERNGLNKLKHYIETEKIDAVYTYEVSRISRQPSILYSIRDYLIRHKVQLVILNPYMKMLKDDGTLSETANIFFGIFSSMAENEGFIRKARMRRGVEKKRAAGLHWGGSIAVGYSTDKQDRYIIDPHGAEYVRRIFNEYVSGKSVRQIARDLQNEGWRTNTAYLTVVQSVLNILHREYYTGNDGIHPAIISQELYDQAQTKCEKARVYAVPKDEVMLLKGLIYDRKSGFLLSGNKANGVYYSKRVKGPTVSWLVIDPIIWIFVEREHRYRFVYERESWLKDVDKEIKRNNKIIDTMTQKGADEMEIIERIEERYIEGKITKQKANELEEKHHRLIFEYTQIMKKAEEDIKRLESDRTSSSDKLDYDKMSIAERIQLVRNCIDKIIIERQTRFIVSLEIHMKWYDVWDFEINTREKIVLKESKRPRMTLHGPIN

SEQ ID NO: 9850 - protein, 542 aa, Unknown
  Description of Unknown: Integrase B9851 sequence
  cd00338,PF13408,IPR011109,IPR038109, PF07508,Coil,IPR036162,PTHR30461, G3DSA:3.40.50.1390,IPR006119,IPR025827,PS51737, PF00239,SM00857,G3DSA:1.10.10.2600,SSF53041
MAYRKITDIRDTIGMRAVFYARVSTAEEEQLNAIELQIEENRGCIKDHGWKLVGEYIDRSKSGTMVKGRDDYQRLYEDLYEDLFDIVVIKDQERLQRNTLDWYLFINRVVQTGKLLFMYMDGKFYSPDDALITGVRAIIAEEFSRNLSKKLHNYHDHRIEKARQGQEIALQGSGNVYGWDKKDGKYYINPEQAKVRRLMCEGIMARKGSTLIAKELNDAGYRNTVGKPWKPMDIPKFVYDCKNVGTMIINKERHDFESKQTIKLPKEEWVYVENALPPIVTQEEWDLICKIHEERVIATGSDRRGKKTSGYSFSGKLVCGICGAPYWRKQRVSKDEYWVCSTKQTKGRRTRKRDSTMGKAGEINPLGCDNENISYNSLMEIMGVVSERLQANTDTIKQDMINWLTKLRKQLIEANGGHTEADLQRELSRKSKLLDAYLDGILNKQEYQTKAEELDERIIQLKAETEKNKANSGDIAEIDKVLANIDEEVSRYVDGNEKLKVEYLLEHLEQVQIFPDKVIVIVPILSEGIVVEKTQYVSREKR

SEQ ID NO: 9851 - protein, 542 aa, Unknown
  Description of Unknown: Integrase B9852 sequence
  cd00338,PF13408,IPR011109,IPR038109,PF07508, Coil,PS51736,G3DSA:3.40.50.1390,IPR036162,IPR006119, PTHR30461,PTHR30461:SF3,IPR025827,PS51737,PF00239, SM00857,G3DSA:1.10.10.2600,SSF53041
MPYCIYLRKSRADLEAESHGEGETLARHERTLLELARKQKLNVTEIYREIVSGDTIAARPVMQRLLSEVEQGIWTGVIVMEVERLARGDTIDQGIIAQTFKFTNTLIVTPLKTYDPRNEFDEEYFEFGLFMSRREYKTINRRLQRGRIAAVKEGKFAASVPPYGYERVKLRSEPGYTLSPVPDQADVVRLIFDLYVNGEKQPDGSTLRLGVSLIARKLNALGIPSATGGKWSPVSIRDMINNPAYVGRIRWNWRRTKKKMVDGEVVFSKPRNPRQECLEVKGLHPALVDEDTWDKAQIIMAEVPPAPVGAKSSVKNPLSGLVVCAKCKHKMVRRPYSGKHASQPPSLICSVSYCDNVSAPLHLVEEAVLDGLAAWAADFVIQWPNDEDDRSEVSGVKSRERMLSKQRSELSSLQKQLDAAHDYLEQGVYTVDTYLERSRTLSLRIAECRNSVSALEEEVEKLRANVGTCERLVPKINSLLEVYHSIDDPAARNKLLKEVLYKVEYLKTVNGRWHNDPADFTIVLYPRIPGAEGFVRGVNEPE

SEQ ID NO: 9852 - protein, 542 aa, Unknown
  Description of Unknown: Integrase B9853 sequence
  cd00338,PF13408,IPR011109,IPR038109,PF07508, Coil,PS51736,G3DSA:3.40.50.1390,IPR036162,PTHR30461, IPR006119,PTHR30461:SF3,PS51737,IPR025827,PF00239, SM00857,G3DSA:1.10.10.2600,SSF53041
VKKKKEVAAGSVPAVIYARYSSSGQREESIEGQLRDCREYAKKNGLLVVGEYIDKALTGRTDKRPDFQRMLRDSERGAFKVVICWKMDRFARNRYDSAMYKYKLKKSGVRLVYAMESIPEGPEGIILESVMEGYAEYYSENLSQNVKRGYYDSALELKTLGQTVLGYRKGADGRFEIDPATAPVVRRIFEEYAAGERAKDIYERLNEEGYRTTRGGKFNKNSIRRILQNEKYVGVYEFKDIRVENGIPAIVSRELFEECGKMVEKHHRAPAAKRDESFLLTAKIFCGECGEPMTGDAGTSKSGAVHYYYICNGRRRHTCKKERVRKNEIEEAVVSELVQLIHSDDFIEKVADLAMEYQEREKDTSALKALEARQKDIEKKIENVLRAIEDGIVTASTKTRLMELEAERADIEKGIAKELIATPELDRDQIVFFLERFRDGDAKDERYREFLVDTFLQAVFVYDDRLVITLNYSGQNNKVTKSLADKAASGEGSGCSCLAPSGALNGADLNTAPIRIFWIQKVIGVVAPYDRKIQEQKKRARV

SEQ ID NO: 9853 - protein, 542 aa, Unknown
  Description of Unknown: Integrase B9854 sequence
  cd00338,PF13408,IPR011109,IPR038109,PF07508, Coil,PS51736,IPR036162,PTHR30461,G3DSA:3.40.50.1390, IPR006119,PTHR30461:SF3,PS51737,IPR025827,PF00239, SM00857,G3DSA:1.10.10.2600,SSF53041
MKITAPARSARAVSLEAFVDNLNLANVVIYARYSSAGQNDQSIDGQLAKCREYAQQRGYRVVGEYCDRALSGRYAETRPEFQRLIADSAKRAFDFVLVWKLDRFSRDRYDSAIYKKKLRTNGVRVLSVTEGVGDSSESVLLEAILEAMAEEYSRQLAQNVRRGMRQNAEKGLSLGGLAPLGYRVVNKQYEINEDEARIVRFIHEQYADGAGQKQIVADCARLGYRNQRGNPLTLASVKRILANERYVGRYDYLGEIVIEDAFPAIVSKDLKKRVRDRLKANAKAPGHAKAKVEYLLHGKLFCGECGAPMIGECGRGRHGATYYYYTCAARKKQHTCKKRNERKDELEASIVDYIGSCVLTDSWIDGAAERVVAEYQKSYDASGIKPLEKQIRDADKEIDQLVDALISATAEAARRRINERIETAEARKQALEADLASLRIASRVQIKKEDIVVWLNQFRTGDRSDLEYHKKVIDLFVNAIYLYDDSFKLFLNVADSAQVTYADALALAPPSVSDFGASGVPDMHLSEHIIFINGVIGMIVQR

SEQ ID NO: 9854 - protein, 542 aa, Unknown
  Description of Unknown: Integrase B9855 sequence
  cd00338,PF13408,IPR011109,IPR038109,PF07508, Coil,PS51736,IPR036162,IPR006119,G3DSA:3.40.50.1390, PTHR30461,PTHR30461:SF3,PS51737,IPR025827,PF00239, SM00857,G3DSA:1.10.10.2600,SSF53041
VKKKKETAAGSVPAVIYARYSSSGQREESIEGQLRDCREYAKKNGLLVVGEYIDKALTGRTDKRPDFQRMLRDSDRGAFKVVICWKMDRFARNRYDSAMYKYKLKKSGVRLVYAMESIPEGPEGIILESVMEGYAEYYSENLSQNVKRGYYDSALELKTLGQTVLGYRKGADGRFEIDPATAPVVRRIFEEYAAGERAKDIYERLNEEGYRTTRGGKFNKNSIRRILQNEKYVGVYEFKDIRVENGIPAIVSRELFEECGKMVEKHHRAPAAKRDESFLLTTKIFCGECGEPMTGDAGTSKSGAVHYYYICNGRRRHTCKKERVRKNEIEEAVVSELVQLIHSDDFIEKVADLAMEYQEREKDTSALKALEARQKDIEKKIENVLRAIEDGIVTASTKTRLMELEAERADIEKGIAKELIATPELDRDQIVFFLERFRDGDAKDEQYREFLVDTFLQAVFVYDDRLVITLNYSGQNNKVTKSLADKAASGEGSGCSCLAPSGALNGADLNTAPIRIFWIQKVIGVVAPYDRKIQEQKKRARV

SEQ ID NO: 9855 - protein, 542 aa, Unknown
  Description of Unknown: Integrase B9856 sequence
  cd00338,PF13408,IPR011109,IPR038109,PF07508, Coil,PS51736,G3DSA:3.40.50.1390,PTHR30461,IPR006119, IPR036162,PTHR30461:SF3,PS51737,IPR025827,PF00239, SM00857,G3DSA:1.10.10.2600,SSF53041
MKITAPARSARAVSLEAFVDNLNLANVVIYARYSSAGQNDQSIDGQLAKCREYAQQRGYRVVGEYCDRALSGRYAETRPEFQRMISDSAKHAFDFVLVWKLDRFSRDRYDSAIYKKKLRANGVRVLSVTEGVGDSSESVLLEAILEAMAEEYSRQLAQNVRRGMRQNAEKGLSLGGLAPLGYRVVDKQYEINEDEARIVRFIHEQYADGAGQKQIVADCARLGYRNQRGNPLTLASVKRILANERYVGRYDYLGEIVIEDAFPAIVSKELKKRVRDRLNANAKAPGHAKAKVEYLLHGKLFCGECGAPMIGECGRGRHGATYYYYACAARKKQHTCKKRNERKDELEASIVDYIGSCVLTDSWIDGAAERVVAEYQKSYDASGIKPLEKQIRDADKEIDQLVDALISATAEAARRRINERIETAEARKRALEADLASLRIASRVQIRKEDIVVWLSQFRTGDRSDLEYRKKVIDLFVNAIYLYDDSFKLFLNVADSAQVTYADALSLAPPSVSDFGASGVPDMHLSEHIIFVNGVIGMIVQR

SEQ ID NO: 9856 - protein, 542 aa, Unknown
  Description of Unknown: Integrase B9857 sequence
  cd00338,PF13408,IPR011109,IPR038109,PF07508, Coil,PS51736,G3DSA:3.40.50.1390,IPR036162,IPR006119, PTHR30461,PTHR30461:SF3,PS51737,IPR025827,PF00239, SM00857,G3DSA:1.10.10.2600,SSF53041
VKKKKEVAAGSVPAVIYARYSSSGQREESIEGQLRDCREYAKKNGLLVVGEYIDKALTGRTDKRPDFQRMLRDSERGAFKVVICWKMDRFARNRYDSAMYKYKLKKSGVRLVYAMESIPEGPEGIILESVMEGYAEYYSENLSQNVKRGYYDSALELKTLGQTVLGYRKGTDGRFEIDPATAPVVRRIFEEYAAGERAKDIYERLNEEGYRTTRGGKFNKNSIRRILQNEKYVGVYEFKDIRVENGIPAIVSRELFEECGKMVEKHHRAPAAKRDEPFLLTTKIFCGECGEPMTGDAGTSKSGAVHYYYICNGRRRHTCKKERVRKNEIEEAVVSELVQLIHSGDFIEKVADLAMEYQEREKDTSALKALEARQKDIEKKIENVLRAIEDGIVTASTKTRLMELEAERADIEKGIAKELIATPELDRDQIVFFLERFRDGDAKDERYREFLVDTFLQAVFVYDDRLVITLNYSGQNNKVTKSLADKAASGEGSGCSCLAPSGALNGADLNTSPIRIFWIQKVIGVVAPYDRKIQEQKKKARV

SEQ ID NO: 9857 - protein, 542 aa, Unknown
  Description of Unknown: Integrase B9858 sequence
  PF13408,IPR011109,IPR038109,PF07508,Coil, PS51736,IPR036162,IPR006119,PTHR30461,G3DSA:3.40.50.1390, PTHR30461:SF3,IPR025827,PS51737,PF00239,SM00857, cd03768,G3DSA:1.10.10.2600,SSF53041
MPPVPRVALSGVALYCRVSGDEQRERQTIKTQVEFGQRMADLQGVSLVDVFADDGVRGVVPFGERPEGARLLREARAGRVTQVWLYKLDRLGRAIRVILAAVDQLEEAGCTVRSLTEPFDTSTPAGRFQLTMMAGAAELERDNIADRTREGIERAARNGVWLSSERLYGYQIAGKGRHATLVVDEVEAEVVRLIFRLYVEQDLSCESVADYLNAAGIPTMYAAGSRIERTSGRPTSGRWSEGRIHNMLKTRAYCGTHEWGKESKAPGREIIRRPVPALVDVEIWERAQEVMDKRRTYALRSSRHSYLLRGLVWCGCCGRPYYGSTLGGYRYYRCQAKQPGRCTEPTTLCPSKSLPGSVEEEIWSDIEGFLRNPAPVVEELRGILAAQGETQFDRTKELQQIETAVAANAGERARVLTIYRKGWINDDDLESQLAAIEKEENALAVQREHTRRQVEAVTEARERLLQAGGLLQTLGTRLGEEISFEEKRHLVERLVERIDVETHGTGRAAKALVRVRYCFQAAPETGASCFSDNSLVARSGSP

SEQ ID NO: 9858 - protein, 541 aa, Unknown
  Description of Unknown: Integrase B9859 sequence
  cd00338,PF13408,IPR011109,IPR038109,PF07508, Coil,G3DSA:3.40.50.1390,IPR036162,PTHR30461,IPR006119, PS51737,IPR025827,PF00239,SM00857,G3DSA:1.10.10.2600, SSF53041
MAYRKITDIKDTIGMRAVFYARVSTAEEEQLNAIELQIEENRGCIKDHGWKLVGEYIDRSKSGTMVKGRDDYQRLYEDLYEDLFDIVVIKDQERLQRNTLDWYLFINRVVQTGKLLFMYMDGKFYSPDDALITGVRAIIAEEFSRNLSKKLHNYHDHRIEKARQGQEIALQGSGNVYGWDKKDGKYYINPEQAKVRRLMCEGIMARKGSTLIAKELNDAGYRNTVGKPWKPMDIPKFVYDCKNVGTMIINKERHDFESKQTIKLPKEEWVYVENALPPIVTQEEWDLICKIHEERVIATGSDRRGKKTSGYSFSGKLVCGICGAPYWRKQRVSKDEYWVCSTKQTKGRRTRKRDSTMGKAGEINPLGCDNENISYNSLMEIMGVVSERLQANTDTIKHDMINWLTKLRKQLLEANGGHTEADLQRELSRKSKLLDAYLDGILNKQEYQKKAEELDERIIQLKAETEKNKANSGDIAEIDRVLANIDEEVARYVDGNEKLKVEYLLEHLEQVQIFPDKVIVIVPILSEGIVVEKTQYVSREK

SEQ ID NO: 9859 - protein, 541 aa, Unknown
  Description of Unknown: Integrase B9860 sequence
  cd00338,IPR011109,IPR038109,PF07508,Coil, G3DSA:3.40.50.1390,IPR036162,IPR006119,PTHR30461,mobidb-lite, PTHR30461:SF3,PS51737,PF00239,SM00857,G3DSA:1.10.10.2600, SSF53041
MYNSKIELLTIDGIYIYLRKSRSDDPSLTVEEVLEKHEMRLQEWAMQNFDAKIPEENILREVVSGETIDDRPEMLRLLSIIESPKAQAILIVEPQRLSRGDLEDAGRIIKMFRYSNTLICTPPKTYDLRDEYDRDNFERELKRGNEFLEYQKKIMNRGREQSVKQGNFIGSIAPFGYKKIVVMEGKKKCHTLEIVEEQAEVVRMIFDMYVNQDMGRVNIAKHLNDLNIKSAKGGLWKQDAIKDLLENEHYIGKVRWNWRKTVKVVEDGEIREKRPKTEIGEYLVYDGKHESIISEELFYAARDKQGRNHRAKPKTRVRNPLAGLVYCQCGRAMSLRTYKNKGVERCAPRLLCDNQAYCGTSSCLYDEILQRVCDVLEQCIEDFEIRIKNNDDDSIKHHATLVKRLKAKLDELHKKELSQWEKYTEEGMPKHVFDALNEKVLKEKEEVQEALCKAAASIPERIDYEEKILRFKDALEALQDPVVPAATKNKFLKACIERIDYKREKAQRLKRAPGQKKGTAFESSGGRWTNPPIELDIKLRL

SEQ ID NO: 9860 - protein, 541 aa, Unknown
  Description of Unknown: Integrase B9861 sequence
  PF13408,IPR011109,IPR038109,PF07508,Coil, PS51736,IPR036162,IPR006119,G3DSA:3.40.50.1390,PTHR30461, PTHR30461:SF3,IPR025827,PS51737,PF00239,SM00857, cd03768,G3DSA:1.10.10.2600,SSF53041
MRIAIYSRKSKFTGKGESIGNQVEMCRDYIATNYNGEEHSIQVFEDEGFSGKNLDRPQFKKMIEIENVIPFDLIVVYRLDRISRNVGDFASLIEKLNKKNTSFVCVKEHFDTGNSMGRAMMNIAAVFAQLERETIAERIKDNMYLLAKEGHWLGGTTPLGYKSIEGTNGKRTHFELIIDESQIDLVNIIFSKYKQLGSINGVETYLFVNGYKTQKNNYWHKSNVKRILTNPIYCIADIDSLNYFTELGCNVCFTLDDCNGKKGIYPYNRFSGQKREMQSYDRWIITISEHQGILAGKEWVAIQQQLKANSKDGFGGKANERRSTNNTSLLSGVLFCSCGAYMRPKKYPSGNTFYICENKMDKKITECNNSNINADELDKIVLNELFSFDIKDGVVDSQIQNLKEQIANVDSDLQKQIGRLKKQIETNKNTVNKFMNIVALSIENDTPEQVVEVYNQKINELLNQNKITQKRIDELQDTNIVQTKMTNRLNSLTDAIVYLKENFDKLTIVEKRGFVKEIVDRIVWDGKNINIFIKGISELSE

SEQ ID NO: 9861 - protein, 541 aa, Unknown
  Description of Unknown: Integrase B9862 sequence
  cd00338,Coil,PS51736,IPR036162,PTHR30461, IPR006119,G3DSA:3.40.50.1390,PTHR30461:SF3,PF00239,SM00857, cd03768,SSF53041
VSTREQAENGVSIETQVAKCAYYARAHSLMLSDKSNCGTPGVFVDAGESAWKKSSLAERPGGMALLENLQRGDHLIVTTPHRLFRNLTEMLIQIKVWEEAGIVFHFVDLNMRLDQPSGRLMFHMLGAIAEFKSALRSARLKESYLWRKSKGKRALEKIVIETPRGSGSPLELNGRRIAGVSHRETLPSPFADTADHGVAMIAADLIQKRICPESREVTGVIRAYIRVSTNDQTAASQRLLINRYIQNTPELAKLKIEWYDDTGFSAYRTNFDKRPSGGQVMRVLKPGDVLLTVRIDRVCRSISNLSYLVDSVEAKGATLAIIDNGIRTDTPMGRMMVKLLSFAAELESYELDISSNAAVRQNIMKTGKVCGKIIPGCLLYQNKYDLSRTSFAMTEDQWWEFWMGWYRGHKKMMHKATEGQLVRFAVEWNQEFAKKMGWPVPKPKWRRTFVDFGKVTDAIEEAERMQEEHHTIEREQFITAMRRRRQGACWAGVFCAKHASRAFRRISKWVAYFTPDAAIASHPMGTEILSASERLQALAAG

SEQ ID NO: 9862 - protein, 541 aa, Unknown
  Description of Unknown: Integrase B9863 sequence
  cd00338,PF13408,IPR011109,IPR038109, PF07508,Coil,PS51736,IPR036162, IPR006119,G3DSA:3.40.50.1390,PTHR30461,IPR025827, PS51737,PF00239,SM00857,G3DSA:1.10.10.2600,SSF53041
MKKQQQRTQEPPQDVAVIYARYSSSRQRDVSIDQQVSACRAYADQQGWKVLRVYADHAITGTTDQRPSFQQMIRDASALAWSKVIVYAFDRFARDRYDSAVYKHALKECGVRVLSVTEQVTDDPAGVLMESIFEGFAEYYSRELQRKIRRGLRYNAENCIASGSHTIPLGYDRGPDGRYRINPAEAALVQEAFRRYGAGETMAAIARDFNARGITTKRGKPWSRSSFHALLKNERYTGVFIWKDVRVEGGVPVIIDREDFDRVQRRIAAEAENRLDRRDRGHGLYVLTGRAVCGLCGCGLTGVSGTGRHGDRHAYYYCSGRRKGTGCELKPVPRDQLEGLVARAVLELVLTDDTIEWMAEYAAAHQRQEDTDAEISRTQDALKANKKAAGNILTAIEKGIYTDTTADRLRELEAEAHLLEARLCELQSTIADTFTAAEIKAALQLLREGELSDPDYQQALIDAIVRAVSYDGRTLLITLTYGKPGAAQLQLPVKLEDLEASTEDKIRVCLEGREWGCLPPNQTPVLYAVPGGFVLALRLAA

SEQ ID NO: 9863 - protein, 541 aa, Unknown
  Description of Unknown: Integrase B9864 sequence
  PF13408,IPR011109,IPR038109,PF07508,Coil, PS51736,IPR036162,PTHR30461,IPR006119,G3DSA:3.40.50.1390, PTHR30461:SF3,PS51737,IPR025827,PF00239,SM00857, cd03768,G3DSA:1.10.10.2600,SSF53041
MRIAIYSRKSKFTGKGESIGNQVEMCRDYIATNYNGEEHSIQVFEDEGFSGKNLDRPQFKKMIEIENVIPFDLIVVYRLDRISRNVGDFASLIEKLNKKNTSFVCVKEHFDTGNSMGRAMMNIAAVFAQLERETIAERIKDNMYLLAKEGHWLGGTTPLGYKSIEVTNGKRTHFELIIDESQIDLVNIIFSKYKQLGSINGVETYLFVNGYKTQKNNYWHKSNVKRILTNPIYCIADIDSLNYFTELGCNVCFTLDDCNGKKGIYPYNRFSGQKRETQSYDRWIITISEHQGILAGKEWVAIQQQLKANSKDGFGGKANERRSTSNTSLLSGVLFCSCGAYMRPKKYPSGNTFYICENKMDKKITECNNSNINADELDKIILNELFSFDIKDGVVDSQIQNLKEQVANIDNDLQKQIGRLKKQIETNKNTVNKFMNIVALSIENDTPKQVVEVYNQKINELLNQNKITQKRIDELQDTNIVQAKMNDRLNSLTDAMTYLKENFDKLTIVEKRGFVKEIVDRIVWDGKNINIFIKGISELSE

SEQ ID NO: 9864 - protein, 486 aa, Unknown
  Description of Unknown: Integrase B9865 sequence
  cd00338,PF13408,IPR011109,IPR038109,PF07508, Coil,PS51736,G3DSA:3.40.50.1390,IPR006119,IPR036162, PTHR30461,PS51737,IPR025827,PF00239,SM00857, G3DSA:1.10.10.2600,SSF53041
MKKRAVAYIRVSTASSAQLHSYEFQEQYWQDRFEGDPNIELTGIYADRGISGSSIHKRPQFLVMMEDARQHKFDVIYVKSVSRFARNTVQLLEAVRELRDIGIEVIFENENISTFQPTSEIFLTIAATVAENDLQVDSDRMRWSIRHRYENGWISIGSKIYGYRMTKDNTLEIVPEEAAVIRRIYEMYVGGAGCCAIADTLNDEGYRASGGNIWQHQVILAILTNEKYMGDAMMGKSVYHLGIKHNNMDGTYGKRYYMEDTHEGIVSKELWYKAQEVRVQRTNKKTVGVPRPIYALTSLIECGQCGTHFQHKVNNSGKKWASDIWVCGAKLRYGVKRCDCTSIKDSVLKEKFVEAYNEFVTKRPQGESAIILQRAIERLKREERELSELRMQRLIPESAFREEQKRIKAQIAGLNARYAEQRTKVVRESDFTLITEYSDEKVEKFITRIKIHKGVITFTFYNGVEISRKYSNGQPGNKVGWNKKEA

SEQ ID NO: 9865 - protein, 541 aa, Unknown
  Description of Unknown: Integrase B9866 sequence
  cd00338,IPR011109,IPR038109,PF07508,Coil, PS51736,G3DSA:3.40.50.1390,IPR006119,IPR036162,PTHR30461, PTHR30461:SF3,PS51737,PF00239,SM00857,G3DSA:1.10.10.2600, SSF53041
MEKAIIWVRVSTNQQDIEDQRRECYQMAYADGWTDDNIIELGAKGASARMHGKAMSAEYINQLNKLLNYIKNDPDVKALYIWELSRLARVYMYLINVVEYCKINGVQFVCKNPNIRLLDINGNVDNNADITITVVGKLAAQEMDIKIARMKRGKNANTEKGLATGNKRMYGYDIVNKQYVINEAEADIIRTVYRTYLESKGGYNDTVNELNRIGINLNRNQIVYILQKEAYTGSMKMKSGLTKPYPQIITKELFEKVRQKREGRDIIKDKSRKYYLCTFMLKCPHCGAMLKTMNGKSYQCCRCKKLYAPMYAADTILWDVATKTRANILAGDAKKIKADIEATNEELAMEIKGLELSKEKTNRKLKARQRLFLDGEITETEYDEGKLKIEAERATINTQIEAINDRIKANNKRMATITENDADTLKLYERLHISEEMDLTTTNWREMYNIIRTYIKVGNCSYVRLKKLNSDWLMVEGENERYRALRIDVETINDRKCTYYYLSPKGNQKDLRKPKYLYLSDDGLVKPMHFYIEIPKRMPIT

SEQ ID NO: 9866 - protein, 541 aa, Unknown
  Description of Unknown: Integrase B9867 sequence
  IPR038109,PS00397,IPR006119,PS51737,PF00239,G3DSA:3.40.50.1390 ,PTHR30461,IPR025827,SM00857,G3DSA:1.10.10.2600, SSF53041,IPR011109,PF07508,PS51736,IPR006118, cd00338,PF13408,Coil,IPR036162,PTHR30461:SF3
MTDKTAIIYARVSSAKQAEEELPISSQIEQCRKKAESLGANIIKVYSDEGISGSSDKRPAFQDAMLFCEIEPPTYLITWSSSRFARNKVDAGFYKKRLATANVKIMYVSMEVDTDTTGGWLLDGVMEIFDELYSRQVSADTRRSLIKNAKDGYWNGGRVPYGFIAANDVENPKRKRLAHNPDEVDVVRKIFDLKMNENMGGKSICIWLSENGYKYRGSTWKVSTVQSLLRNKLVIGKTTFGKRDSNRKIRPKEEWIIVDSHKPIIDSVTWDTVQKIMDSQTDPESNGSPKSLHTFTGLLTCGQCGSSMHTESAKGKLKRFYYYNCSAAAKYKKHKPRRINSDAMDKWLLQVICETIFSEENLTEIINSLFDIAGTWLYEKNKRLSSAESRLLSLKQKQNNLYDLLELHGLDAPNLGDLSERLKNNNEKAKIIEQEIAIIDAETPPVIEKASKSTIREVSKFLTELIITMENPKKVRALLGTFIESIVLKDTYITVNYNPNSLIDRTSAGVLSDVVWLPEQGLLGTLSVKFRLPSTFHKKAA

SEQ ID NO: 9867 - protein, 541 aa, Unknown
  Description of Unknown: Integrase B9868 sequence
  cd00338,PF13408,Coil,G3DSA:3.40.50.1390,PTHR30461, IPR006119,IPR036162,IPR025827,PF00239,SM00857, SSF53041
MSTSVGIVYSYLRFSDPRQAAGHSADRQAQYAKSWAAERGLALDESLSLRDEGLSAFHQKHVKQGALGVFLRAVDDGLIPVGSVLIVEGLDRLSRAEPIQAQAQLAQIINAGITVVTASDGREYNREKLKSQPMDLVYSLLVMIRAHEESDTKSKRVKASIKRQCEDWINGTYRGLIRNGADPHWVRLVEGKWELIADRAEVVQFAIDKYLAGYGADRTHSLLQANGYDTSLVGASPQQIYRLIKLVSLKGAKQISIDGEEFLLKDYYPRLIDEQQFDELQLLRGNRSRRRGKGAIPGVVTGIGITYCGYCGTSMTAQNLMHKLRDDGTLSDGRRRIMCTSYMSRGGCNVGGSCSVAPVERAVMSFCADQLNLSRLQEPAGPRGDLHVSLTESRKKVADLERQLSRITEALALGESDGVLPMTFLRKARDLEAMLDAARTDERRIEREIAGVAARQKPGDAKLWSDLASGVEAQQVEPRDKMRQLMLDTFERIVIYMRGVVPEGRGAKYIDVLLISKAGQRRWLRVEKKTGSWAAAIDRPL

SEQ ID NO: 9868 - protein, 541 aa, Unknown; identical to SEQ ID NO: 9706
  Description of Unknown: Integrase B9869 sequence
  cd00338,PF13408,IPR011109,IPR038109, Coil,IPR036162,PTHR30461,IPR006119, G3DSA:3.40.50.1390,PTHR30461:SF3,IPR025827,PS51737, PF00239,SM00857,G3DSA:1.10.10.2600,SSF53041

SEQ ID NO: 9869 - protein, 541 aa, Unknown
  Description of Unknown: Integrase B9870 sequence
  PF13408,IPR011109,IPR038109,PF07508,Coil, PS51736,IPR036162,IPR006119,G3DSA:3.40.50.1390,PTHR30461, PTHR30461:SF3,PS51737,IPR025827,PF00239,SM00857, cd03768,G3DSA:1.10.10.2600,SSF53041
LKIDAFYGRNSTDEQAEKGTIEAQVDYANKYFDLNETTGFEMYLDEGTSGTIALEKRENASRMLNDVKIGKIGAVYVYRLDRLARSVKHVLDTYEFLEAYNVRLISMTEAFDTGTPTGKFFMTLLASIAALERDTILERTQMGKDRNAKAGKWVSGAPPFGYRIGDDGKLVIYEPEAETVKLVFKLYSEEMTMFELAKYLNAKGVETPATSKGTKNASTGKWHAGHISIILKTEAYTGVYNYLQRSKRNRETIEVDVPALVDIQTFNAIQKKILANADNARGKRGRLYLLRGVIFCGHCGRSMIGNSGGTNRAYYRCTGTTDQGQGKRCTAKQIKATLIEDAVWSDILEIVKKPEQIKKYVDRSVAKGKESVAPVVNELSEVEEALIKKQKAKEKILSLINRGIISDEDAEKELKSISIEIRSLNSRKEQLFEQQEKSKSVEAEVINSQVLFDFILKQSEILDKKVKARVIRGLVKKVEVLTIEQENGKRGNRAVISYRLGRSLELGISGDAISQTTLYYIESTWEFQAFSRGDGLRVKWH

SEQ ID NO: 9870 - protein, 540 aa, Unknown
  Description of Unknown: Integrase B9871 sequence
  PF13408,IPR011109,IPR038109,PF07508,Coil, PS51736,G3DSA:3.40.50.1390,IPR006119,IPR036162,PTHR30461, PTHR30461:SF3,PS51737,IPR025827,PF00239,SM00857, cd03768,G3DSA:1.10.10.2600,SSF53041
MQRKDLIAYSELILGIPDYEIFEDAGYSGKNTDRPAFQDMMARVRQGEFSHVLVWKIDRISRNLLDFSQMYRELQSLRVTFVSKNEQFDTSTAMGEAMLKIILVFAELERNMTSERVTATMISRASQGQWNGGRVPFGYDYDPETSTFSIREDEAAVCRILKDDYLKYRSLVHTSRLLNERGFVTRAGAEWSPTAVWIIAQSPFYAGVYRYNKHKGTERRVLNPEDEWVLVYDHHPAIFTLEEHTRMNEIRDTNARSFNAVGKAKSTNMVYVFGGICYCGKCGSRMSAAPGKLHADGYRSANYLCPKRRKTSECDNATVSDIVVGEFVVNYILNIINAKRSFSGVGSPEELEHRLLRGSTFAEVERIEQDGLNELYNLLSRYGSDGSFSFATKKPKNRAAVSPEVEALRREKEKQERALKRLQELYLYSDRAMSEKDFIIRKKEITARIDEVGNRLGLISRSETGTLSDEDFIRQASHLLIVSKLKDKEYVYYRGLASNTSPEVLKEFIQSIVDSIYLSDGRVSRLVFKNGLTHSFLWRA

SEQ ID NO: 9871 - protein, 540 aa, Unknown
  Description of Unknown: Integrase B9872 sequence
  PF13408,IPR011109,IPR038109,PF07508,Coil, PS51736,IPR036162,IPR006119,PTHR30461,G3DSA:3.40.50.1390, PTHR30461:SF3,PS51737,IPR025827,PF00239,SM00857, cd03768,G3DSA:1.10.10.2600,SSF53041
MKEATAKRVALYVRVSGTEQAERGTVETQLEFLKNYARLHSWEIIETYRDEPVSGSSVVADRPDGGRLLRDAQRGRFEAVLVYKLDRLARSVYQLHEALQVLDAAGVAFLSATESFDTATPYGRVILNLMAAFAEWERDLISERSHEGRKRNAREGRWPGGPPPLGYRVEAGVLVVDQEPIAGQAYSEAALIERIFTDVAAGTLSVRKLAVQLNTERVPTGQACNYPRHKTGKHLPAGWLDTSLRRILRNPVYRGEMVYGKGKSGAIAAAAPAIVTPSLWYAAQAQLANNAKFSARNSKRVYLLRGLIHCEECGRVMSGFTPSRDAEQRRYYACRGRYDPLARAAHGQPCRTPYLAAEALEEQIWADIVCYAENPQKALAELARDLEARRGQQETLQAEVDHLTSLLKAVDDHRRRALSLFIRGQVDEREKDLLLAEIEAEATALEERATVKRALLSACGEQAAQFTMAEQLLARFKAIVHRPGLTPTERQQIVRGAVLSIEARTNGDAAVRYVFDRIEHTACSNRVSNWAGFEVIYQRK

SEQ ID NO: 9872 - protein, 540 aa, Unknown
  Description of Unknown: Integrase B9873 sequence
  cd00338,IPR011109,IPR038109,PF07508,PS51736, G3DSA:3.40.50.1390,IPR006119,IPR036162,PTHR30461,PTHR30461:SF3, PS51737,PF00239,SM00857,G3DSA:1.10.10.2600,SSF53041
MYNNKIEFEYSEIIIYLRKSRSDDPNLSVEEVLARHEAKLQEWAMQQFGKEIPEENILREIVSGETIDDRPEMKRLLAMIESPKIKAILIIEPQRLSRGDLEDAGRIIKLFRYSNTLICTPPKNYDLRDEYDRDNFERELKRGNEFLEYQKKIMRRGREQSVKEGNFIGSIPPYGYNKTTIMEGKKKCYTLEIREDEAEIVRMIFDMYVVQDMGRVSIARYLNDLGIKAKKGGLWAQDAIKDMLENEHYIGKVRWNWRKTVNIVEDGEVRKVRPKTEIGEYLVYDGKHEAIISEELFYAAREKQGRNHRAKPTTKIRNPLAGLLFCRCGRAMSLRTYKKEGVERSAPRLLCDNQAYCKTSSCLYDEIIDRVCIALEQCIEDFEIRIQNNNEDSTKHHATLIKRLKMKQEELNKKEIAQWEKYTEENMPKHIFDTLNEKVLSEKEEAQQALCKAYESMPDPVDYEEKMYKFKDALEALKDPEVDAAKKNKFLKACIERIDYSREKAERLKRPEGVKKGQHFESTGGRWSAPNIELNISLRL

SEQ ID NO: 9873 - protein, 494 aa, Unknown
  Description of Unknown: Integrase B9874 sequence
  cd00338,PF13408,IPR011109,IPR038109, PF07508,PS51736,G3DSA:3.40.50.1390,IPR006119, IPR036162,PTHR30461,PS51737,IPR025827, PF00239,SM00857,G3DSA:1.10.10.2600,SSF53041
MGKPKKRVVTYVRVSSSSKAQLHSYEFQEEYWRGRFEDDPEMELISIYADRGISGSSVYKRPQFLTMMQDARDGKFDVVYTKSVSRFARNTVQLLEAVRELRDLGIEVVFEKEQISTFQPTSELFLTIAATVAENDLQVDSERQKWSVRHRFENGWICIGCGMYGYTMTEDNNLVIVEDEAKVIRRIFDMYLKGVGLSTIAKTLNEKGIRNFVGHAWRPTSVSLILDNEKYMGDSMMGKSTTIDGIRYDNMDGKYGKRYYMEDTHEGIVSKEVFNQVQQMRLARRNYKLYRQKRPEYPFTGVVECGECGKHYQHKVNNSGKKWRTDVWVCATQLKTSVADCGCNRLKDTVLREKFMEAYNEFVINRPQGADVDMLQQVISTLWQEERELAGLYVQRLIPESAFRTEQRRIKMQIAENTAKIEELRGKTVRESDFGIIAEFDPDKVEKFITKVIVRKGTVTFVFYNGVEITKPFTNGPAGNQKGWMQKKEAAACQ

SEQ ID NO: 9874 - protein, 540 aa, Unknown
  Description of Unknown: Integrase B9875 sequence
  cd00338,PF13408,IPR011109,IPR038109,PF07508, PS51736,IPR036162,PTHR30461,IPR006119,G3DSA:3.40.50.1390, PTHR30461:SF3,IPR025827,PS51737,PF00239,SM00857, G3DSA:1.10.10.2600,SSF53041
MSSISRTIERSRTRKTAVAYARYSSNNQREESIDAQLRAIREYCEKENIELIEEFVDEALTGKNDDREDFQNMITKLLKGHIQADYVLVHKFNRFARNKFDSTLHKKKLRDIGVKVISVTQKIDDTPEGELLEGFLETIDQYYSANLATEVRKGLRENALKGKHAGGQVLFGYSLDDDGYYIPNENAKIVKRIFEEFALGIPKTEICERLNAEGYRNQRGKKFNTRTLYDLLRNEKYIGNYVYTIDKKETIRLDGIIKGHPINKELWNTVQRLCDESSETHGRQRSQKRYYYLTGKTFCSCCGEHICGNGSKRSGGKNGKLNYYYKCVGKTNHKNGCKNPSLNKDWFEPKVLKAVLDTVTNKEQVKEIAQMAYKEILEMRDEPVVSTAQLKKELAQIFKKQERLTDLYMDGDMSKEMLDNKNGELTRRRFQIEEELEKRKNILDADDIQVEDIENYIIQFIEDVKEDCESIDDEFMRIMLNVFVKRVDVSIEEVVVHIHTPFGRMDRGDSVCFGGVIQRLTPINLVQIFPRKTNVHGKNI

SEQ ID NO: 9875 - protein, 540 aa, Unknown
  Description of Unknown: Integrase B9876 sequence
  cd00338,PF13408,IPR011109,IPR038109,PF07508, Coil,PS51736,IPR036162,IPR006119,G3DSA:3.40.50.1390, PTHR30461,PTHR30461:SF3,IPR025827,PS51737,PF00239, SM00857,G3DSA:1.10.10.2600,SSF53041
MATKKKKIESGVGAIYARYSSHAQREESIEQQVEACMEKAKELGIEIIKTYSDKAISGKTDNRPQFQRMLRDAEKGKFQYLIAWKSNRLGRNMLNAMVNEERLNDSGVRCLYVEEDFDDTAAGRFALRSMMNVNQFYIENMAEDIQRGLRDSAKECKVISSIPFGYKKGEDKKFAINENEAPIVKEIFQRVANGEMFITIADDLNRRAIPTRRGGPWGKNSFQNMLHNEKYTGLYKYQDIEIPGGMPRIVSDTLFRTVQEVCTTKKNPSNNARRRTNNGMYLLTGKLFCGKCGAPMTGLSGTARNGALKFYYVCQNKRRKHTCDKDNVRRDVVEKAVAQAVREFILKDENLDWIADLAVEYSKTTVENSDLGLLYQELSSVEVSINNIMKAIEAGIFSETTASRLKELEAEQKKIKGKIVDAKETAIELSKDDILAGLMLFRDGDYEDQRFLMHLFDTFIKAVYVYDDNLKIVFSFTGDNTIVIPLDVENTKEDTTEEAQGVVRLSSLLVHSNRLKRTAKLLFYKGDFMLIVPFDEKVLD

SEQ ID NO: 9876 - protein, 540 aa, Unknown
  Description of Unknown: Integrase B9877 sequence
  cd00338,PF13408,IPR011109,IPR038109,PF07508, Coil,PS51736,G3DSA:3.40.50.1390,PTHR30461,IPR036162, IPR006119,PTHR30461:SF3,PS51737,IPR025827,PF00239, SM00857,G3DSA:1.10.10.2600,SSF53041
MSKNNAVIYARYSSSGQREESITGQLRECNAYAKRNGYTVINEYTDSALTGTSDKRPAFQRMIADAKTGNFSAVIVWKLDRFARNRYDAAMYRNELKKAGVRIVSAMENISESPEGIILEGLMESLAEYYSANLSENIKRGLYDSALERKMTFRTFGYRRGPDGRYEIDPVSGPIVRRCFEEYAAGKPMPAIIEDLNADGVRTAKGREFKRNSLRAMLRNEKYIGVYRYRDVYDEHGIPPIVTPELFEKVQKELAIRSKSYTKRKTKTGATYLLTGKLFCGHCLAPMAGDSARSRHGTVYHWYSCPNNRYKPKTCEKRRVPKDWIEAEVLRILNTEILTDEFIERAADAAVEYEKHFDNNSELESLRLELKQTEAKIKNVSAAIATGVITKTLPEMLADFERQREQIETAIAKKSAGVHEFSRDAVVAYLHELKALAHTDAGSQRQLLNACIKSIYVFDTDSPDELKLVINMNYFDNDAEISHSEIVRIVSAPLHLNVTTRTLVHGRRLLLIRTIKKPPAECTGGSSYPGGGLVPGFGKL

SEQ ID NO: 9877 - protein, 540 aa, Unknown
  Description of Unknown: Integrase B9878 sequence
  PS00397,IPR038109,IPR006119,PS51737,PF00239,G3DSA:3.40.50.1390 ,PTHR30461,IPR025827,SM00857,G3DSA:1.10.10.2600, SSF53041,IPR011109,PF07508,PS51736,IPR006118, cd00338,PF13408,Coil,IPR036162,PTHR30461:SF3
MKRAVIYARVSTERQADEGLSVESQIEACRRKAAELGAVVAHVYRDDGISGRTDARPGFRAAIHHCTAAGGIAYLVCWSSSRFARNQLDALTYKRELASAGVRLVYASNAIDLETTEGWLADSFSQIIDEAYSRQVATDTRRSMISAASEGYFMGGRVPFGYQAVPVEGTKRRRLQPHPDEAPVIREIFDHAARGIGAVAVAVMLNEQGRTLRGRPWGKSTVLHILKSEVYMGEVIYDRFDRKGKRQRPEAEWVRVKAHEPLVSAERWHEVQDGLAGREPKGGHVPGNNQHVFAGLLRCGLCGGGLKLTNGTGRNGTRYSYYACNSKVQGKGCQLRRLPADRFDSWALGELLDRVLTEENVQGVVDGLDKAAAAWVKDRAARRRALVAELRDAEGRRAKLYQVLEVEGPGAPGIHEIGPRLRELNEQIKRIDLALQALEDEQEPVVPQLATSPAEAAAVLRDLVLRCEDAKTLREFVASIVERVEVLEAEVRVDYHPECLIRSGGAVVHSTLNWLPVVGTLRTTCTLAIALPLEMLKRAA

SEQ ID NO: 9878 - protein, 540 aa, Unknown
  Description of Unknown: Integrase B9879 sequence
  cd00338,PF13408,IPR011109,IPR038109,PF07508, G3DSA:3.40.50.1390,IPR036162,PTHR30461,IPR006119,PTHR30461:SF3, IPR025827,PS51737,PF00239,SM00857,G3DSA:1.10.10.2600, SSF53041
MSEKTAVIYARVSDKKQVENDISIPGQIERGHEKALSLKSSVLQVFTDEGISGRSDNRPSFEAAIDFCEIYKVDYFICWSSSRFARNRFNAAIYKRRLDNCGTKLEYLTFSVDRDTDSGRLLDGFLEIMDEHKSVQTSKDTIRSLIRNAQLGYWNGGRPAFGFKVVPAEDNPKKKRLAVNNEESYVVKKIFELRCEGYGIRTIAQWLNENNHFNRSNTWKKNTIANLLNNMAVLGKTAFGKTSKTTGKKQPRENWIIADSHEAIITQELWDKAHSEMDNDNLNTRTSSSKSMYKFTGLLKCGECGAAMHTESAKGRTRRYWYYNCSASKLKKSHPPRRLPAVEIDDFLVECIVTNIFTRETLTGILTDLYDVSNRWLHDHSERRLSVLNSIKGIQKKLDNLYSTLELFGKDAPNLGDLTKRLRQHNTQIKVFEGKLNIIDKEEPPKVDVTDEDVTQLLEFLIKTIRESDDPKKVRMFFKTFIQNVVVESKSLKITYDPQRLVNRPEWTVPSTRIWLPERDLLGTKVIKLDLPEKLQKKAA

SEQ ID NO: 9879 - protein, 540 aa, Unknown
  Description of Unknown: Integrase B9880 sequence
  cd00338,PF13408,IPR011109,IPR038109,PF07508, Coil,PS51736,G3DSA:3.40.50.1390,IPR006119,IPR036162, PTHR30461,PTHR30461:SF3,IPR025827,PS51737,PF00239, SM00857,G3DSA:1.10.10.2600,SSF53041
LRAASYARYSTDKQRETSVEDQHRLNRQYAAREGWQLVAEYSDREIKGSTPVALRAGGKMLLADVLAGRIDVLLIECLDRLSRDSVEQEQVVRRCERRGLRIIGIADHYDSTAAGRKMTRKFRGIINEIYLDDLRAKVHRGLSGQIERGFYAGGLAYGYRSMPVDVDAQGNARGHRLEIVESEAAIVREIFARFASGESCQRIAAALNARGASGPRGGTWSVSAIYGTPRKGTGILNNELYTGRYVWNRSQWVTDPDTGRRQRLERPRAEWMIDERAELAIVEPALWERAKAAQVARSVPEGKRSKGRAPSTLLGGLMRCGLCGGALIAVNARAYGCGARKDRGPHVCAGLLVRRDLLEDRVIEAVTGLLLEPRWLAELQAMIAEELAESKREAKIGEGDRRRRRGEIEQEIANLVDALAKVGYSEAVHQRLVTLEAELERLQRAGSGKARIVVTDLAARYKREIDALAVLLRSDVQNARPALQEVLGEARLTPATPDKGFWAEIALRADRLLIAAAGDAYLGGGSGGPLSTPAIRVRII

SEQ ID NO: 9880 - protein, 540 aa, Unknown
  Description of Unknown: Integrase B9881 sequence
  cd00338,PF13408,IPR011109,IPR038109,PF07508, Coil,PS51736,IPR036162,IPR006119,PTHR30461, G3DSA:3.40.50.1390,PTHR30461:SF3,PS51737,IPR025827,PF00239, SM00857,G3DSA:1.10.10.2600,SSF53041
MAVSISYNADLKKAKGEPILAVIYARYSSHSQTEQSIEGQLAAAHAYARGHGYTVVREYCDRAQTGRNDNRDAFQRMLSDTDRHQFDVIITWKVDRIGRNREDIAFNKHRCKKNGVRIEYVAENLPDSAESVILESVLEGMAEYYSLQLSTNIRRGQLESAKKLQCVGGTRPLGYDVDRETKRYIKDEKTAPIVKQIFDRYAEGQTEKEIIDWLNEQGIRTTKKKPFSKSSLATLLHNEKYIGVYIYGDIRIEDGMPALVDRDTFDRVQELMKINRRAPSHTWTHAEYILTDKLFCGKCGSPMVGESGFSHTGAKHSYYSCVGKRKKKTCDKKPVRQDWIEGEVLKATREVLADEELLDWITDRTYAYYLATNGKEEERTILQKELAGVDTSIDRLVNAIEAGAFNDRIKSRLDDLNAQKAQITASIAEMELASGFRLTRDHIAFFLRQFRDADMEDRACQKRLIQTFVNAVFVFDDKIKIVYNYTEGNNTVTLDILPSELDGEGFVHSTECSTIPIRYEPGGIVIFGSTFMIIIENRAG

SEQ ID NO: 9881 - protein, 540 aa, Unknown
  Description of Unknown: Integrase B9882 sequence
  PF13408,IPR011109,IPR038109,PF07508,Coil, PS51736,IPR036162,PTHR30461,IPR006119,G3DSA:3.40.50.1390, PTHR30461:SF3,PS51737,IPR025827,PF00239,SM00857, cd03768,G3DSA:1.10.10.2600,SSF53041
MKAAIYTRVSTTHQIDKDSLRVQQRELLQYAELLLGTKECVVFEDAGFSAKNTDRPKFQEMMSRIRAGEFTHLLVWKIDRVSRNLLDFTNMYAELKALGVTFISKNEQFDTSSAIGEAMLKIILVFAELERNMTSERVTAVMQSRAKSGAWNGGRVPYGYSYDKETKEFSLNRQESLVVKKLFRTYEATKSIIATTRNLNEAGIRTRAGASWSTIGVHKILRNPFYIGTYRYNVHSPDGKHPEEEWTLIENHHVPLIEAAQFDRVQEILSRNQKLNPDDVNYFSPHIYIFHGLCFCGHCGSKMTPNSCKPTKYGHASATYGCAKRRSKASYCSNRYLNEEILADFVFTVIHNLLSVSAEPPSEGSLFALQSLLLKGVKEPKGIEERSLRAVYEATGGNSAPIEFSPRFDAYDREESEMLSTELKRTESTLKRTKRLYVNGGIDDEEYAALTEALDSQIDNLKRRQSEAAVEADEFREKASYYLLADMLTTEPFNPKKFNSVVSKKAREQFVQQVIKRLIISDGHVTVMEFRSGLTIEFKY

SEQ ID NO: 9882 - protein, 540 aa, Unknown
  Description of Unknown: Integrase B9883 sequence
  cd00338,IPR011109,IPR038109,PF07508,Coil, PS51736,G3DSA:3.40.50.1390,PTHR30461,IPR006119,IPR036162, PTHR30461:SF3,PS51737,PF00239,SM00857,G3DSA:1.10.10.2600, SSF53041
MTKSLPPLLRAASYSRYSSDNQRDTSIDDQERLTGARGTVEGWPIVARFSDCEISASTPMAVRDGGKAMLSAAARGEFEVLLIEGLDRCWRDIVDQEQTIRRLEHQGVRILGVSDGYDTRHEDRELSRGVRGLLNQQYLRDLAKKTHRGLTGQVFRGGHAGGLSYGYRSIDAGAVHRLEIDRDQAAWVRWIFEHYAAGWSCQKIAAELNNLGVKTGRGGTWAVSALYGCPNKGSGVLNNELYVGRYVWNRSQWKKDPDTGKRVRLIRPSEEWVIEDRQELRILDPELWQAVRDRMNGTRLANGGKGKGARPKTLLGGLMTCSKCGGAIIAVSGRDYGCAAHKDRGPAVCTGTRVRRKATDLRLLAVVREDLLSQSAVLELRDQVEALLDAHRQAAAGAAGSAKAALGEVTREIDRLVDAIGAMGHSDALAARLKDAEARLAKLASEAVRKPAAPIKIDDVMARYRRQLLALETALKAEPERARAALHEYFGDIVVEETGAQAWATFTADPGRLLLQAAGDSGYGCGGRISHPEPRRIRIR

SEQ ID NO: 9883 - protein, 539 aa, Unknown
  Description of Unknown: Integrase B9884 sequence
  cd00338,PF13408,IPR011109,IPR038109,PF07508, Coil,PS51736,IPR036162,IPR006119,G3DSA:3.40.50.1390, PTHR30461,PTHR30461:SF3,PS51737,IPR025827,PF00239, SM00857,G3DSA:1.10.10.2600,SSF53041
MPKRERQQPALTAAIYARYSSTAQNDASIEQQIAECLQYATEHKMAVVAQYEDRAISGRSDKRPGFQRLLRAADRHEFQIVITYKSNRISRNMQSALNYEKRLNDAGVRVVYCKESFSDDATGRFMLRMMMNMNQFYSENMSEDIRRGMMDSATKGKVVGSVPYGYKKGEDGLYAIDEPAAAVVREIFARYLKDESFADIRRDFNDRGLLTKQAKPWTKNSFHNILVNEKYAGVYTFGETRLEDGIPAIISKEVFHMAQKKVNSEKLVRKRHRGNEDYILTGKLFCGYCLAPMVGMSGRSHVGREHFYYACQTRRTKHTCDKQNVRKDDIEQKVVEIVQGTILDDKTVVWMADAIMDASRRFKEQTRLSEYESHLREVKKQIANVIHAIEMGVAGDEVKERMDELQEEKRKYEGLIAIEKVAVKDYDRVTVIGYIESIRHGDATDKEFQRMVIRDFIKAVYVYDDHLRIVVDFTGDENAIDVPFKGSDSPTESADGFAQGLMRCTISAIGEPLTGQNSVEFTGHWFVITWYFGDNSVKR

SEQ ID NO: 9884 - protein, 539 aa, Unknown
  Description of Unknown: Integrase B9885 sequence
  cd00338,PF13408,IPR011109,IPR038109,PF07508, Coil,PS51736,IPR036162,IPR006119,PTHR30461, G3DSA:3.40.50.1390,PTHR30461:SF3,IPR025827,PS51737,PF00239, SM00857,G3DSA:1.10.10.2600,SSF53041
MRKTKQEKKQSYIRAVIYIRYSSHRQDGSFTVEAQHDECMRYLERKGYKFIKQYIDTAKSGKKVAGRDAFDEMINDAHKGNFDRIVVFTFSRAFRNTRDALNYNAELKEKCGVVIESVVEPVDMDSPHGKFSATNLFAMHELQSDIIAGHVKAGMYYAAQEGYYLGGTLNYGYKLYGTGEYSRGKERKKYEIDENEAVNVREMFRLYADGFSIDYIQNEMKQRGVLGRRSGAAISVQTLARMLKAEFYIGTRIFDVDGYPPIHMKNAVPAIIDEETWLKVQARHAENKPDPRESKRTKRLYPLTGKIFCAKCGAHMHGQTKGMSKGYPYSYYSCANKKGNKTCDARNIRKDELEAYCVQEIKKHILNEEAMQQIAEHIVGIVSAAPDDVANEIKKLHRRRKELAEAVKKLAKKNALDLMPDDVFRELTADFNTEIADIDLQLVQLEAVERNAITVPIVINYLQEIFNDIDNTDPHIIKSIFDKLIDKIVVSDTHVELFLRVTPYAVIRDRGSQGQPQYKLSLKAHRDKISPAISGRGGN

SEQ ID NO: 9885 - protein, 539 aa, Unknown
  Description of Unknown: Integrase B9886 sequence
  cd00338,PF13408,IPR011109,IPR038109,PF07508, Coil,PS51736,G3DSA:3.40.50.1390,PTHR30461,IPR036162, IPR006119,PTHR30461:SF3,PS51737,IPR025827,PF00239, SM00857,G3DSA:1.10.10.2600,SSF53041
MVKIKYNGTAWQQSYGPGELAVVYARFSSHKQGEQSIEGQLAAAHAYAAARGYQIIHEYIDRAMTGRNDNRDEFQQMLSDCTKKQFSVIIVWKVDRFGRNREEITFNKYHCKKHGVRVEYVAENMGEGPESVILESVLEGMAEYYSLQLSQNIRRGNRENAKKCRFTGGRVPLGYKLDKDHQFVIDPDTAPLVRRIYAMYAEGQTITEIIDQLNAEGLRTGQGNRYTKNSLRTILKNEKYIGIYDFKNGEIRIEDGVPAIVDKEIFYKVQKLLAINQRAPAAKWNRADYLLTNKLFCGSCGAQMVGESGTSKTGAKYNYYLCINHKRGNTCARKAIRQDWLEPFVLTKTQELIMDDEVIQYITNNVWEYYLRQDQQRDKVTSLKAQIAEVEKAINNLMRAIEAGMPLTEMTKNRLTELDGQQQALNAAIAQTQLDGGFRLQKDHIQFFLEQFREMDFTDRKCQQRLIDVFVNSIFITDDELTINFNFGGDKSVIKFTDFKALSGENEFGCRALVSTIKRAYELVFYANVFALIVKMPER

SEQ ID NO: 9886 - protein, 539 aa, Unknown
  Description of Unknown: Integrase B9887 sequence
  cd00338,PF13408,IPR011109,IPR038109,PF07508, Coil,PS51736,G3DSA:3.40.50.1390,PTHR30461,IPR036162, IPR006119,PTHR30461:SF3,PS51737,IPR025827,PF00239, SM00857,G3DSA:1.10.10.2600,SSF53041
MKKQSSARNASQPLNAVIYARYSSHSQTEQSIEGQLHDGYAYAERCGYRVIGEYIDRALTGTKDDRPDFQRMIADAEKHQFQIVIVWKLDRFARNRYDSAIYKRQLKKHGVRVVSVMENINDSPEGIILEGLLEAMAEYYSANLAENIKRGQAESVKKGWYVGGPVPLGYQVIDHRLVRDDRTAPLVVELYQRYAAGESLADVAASFNARGYRTSRGRLFTCNSFHSMIPNSTYIGDYTFSGQIIPGVSDPLIDPDLYDRAVRRRDRMRRAPASGRGPVSFLLQGKLFCGLCGAPMFGDCGTARSGERKYYYSCSAKRHKRTGCRKKAEKQDFLEWYVCEQTVKYILDPARLDQIASTVTDLYNSEIDDDREKDLLRAIQRLKDEMNTLIDKLIIVPKEAAGPIGERMKQVELQRLDLEADLTKLRLQQKVKIEKSQVSAWLRTFSHGDLFDAAFRASLIDTFINSIYLWNEKIVIFYNISGAQETIGLDEISALDEMKEAGQDGSSLTGNGGAFPTKVEPNHAFVFLRGQLGLVIFRE

SEQ ID NO: 9887 - protein, 539 aa, Unknown
  Description of Unknown: Integrase B9888 sequence
  cd00338,PF13408,IPR011109,IPR038109,PF07508, Coil,PS51736,IPR036162,IPR006119,PTHR30461, G3DSA:3.40.50.1390,PTHR30461:SF3,IPR025827,PS51737,PF00239, SM00857,G3DSA:1.10.10.2600,SSF53041
VRTVIYARFSSQLQNSRSIDDQVAVCRERAEREGWSIVEIFTDYAISGAAGIGEMQRPGLHAMMARVERGGVDQVLAESTDRIARHQGDSFAIRDRLSFAGTRLFTLSDGEVTEIAGTFKGLMDAQFRKELGAKIKRGQRGTIASGRSPAGLAFGYRTANRIDAAGRPVRGLREVDADQSDIVRRIFEEFAAGRSARTIAAALNAEGIAGPRGSHWRASTINGDATRGNGILRNELYVGRLVHNRTSKVVEPVTRNVRIRPNPPSEWQTEEVPHLRIVPQALWDEVQGRREVFEGLKPVRCVRPRRMLSGLATCGVCGQGWIVIGTDRWGCTKHKADGSCTNNRQIITATFEDRVLSGLRERMLDPELVAMFVREYHSEHARRSIDARRSSAKLDRKVAEANAKIERLVAAISGGGAEFAEVKDALAQARADRDRAAAELLEIEALPVVALHPAIAADYRRQVEHLDQALVDPLARDAAIPALRELIDHIIITPHPTKRGVEIEVQGRLASMLALAGAMPAPERMTACGAFPSPAPRFR

SEQ ID NO: 9888 - protein, 539 aa, Unknown
  Description of Unknown: Integrase B9889 sequence
  cd00338,IPR011109,IPR038109,PF07508,Coil, PS51736,IPR036162,G3DSA:3.40.50.1390,IPR006119,PTHR30461, PS51737,PF00239,SM00857,G3DSA:1.10.10.2600,SSF53041
MRIEDLEGLPGILYLRKSRKDLEAEREAAQTGRPYDTLQKHREELFKMVRNYKLNVIDVLSELVSGEFIAEREEMQKVLDYLSEGTIRWVGVMDEDRLGRGDKIDQGRIERAFKESGAFIITPGKIVDLQDEADELYMDYKGMGARYEYKQTKKRLHGGRRRSAGRGNFVGGKPPYGYLKGIDLKTEYPHLIKEYVQKAAEMENLKLYPHPEESEVVKQIFEWMTSGAGIRTIAKRLTGAHLTPTGLINWNRTTITKILKNPVYTGIIRYGNKKWIKRENGTYMIKPVAEREKEIAKDAHHPLVSEEDFDKVQNILKANDTTPLNHNKVLTNIFAGLLKCGFCNLSMSFQPRYNVTRSPRFTCMNPHCKMNKSIILELFESRVLDRIEQYYQMLKSKPDMTKKNSDVSVLSTLEKRKSLLRNQLTELKGQINNIHDLLEKGVYTVEIFLERQKTLVDRQDATSREISEIDREIQREKEHIHNKEMVKPRFENVLNTYHMLETVEDKNKLLKSVIISMHYSKPKYLKSQDDFDLGIEWKT

SEQ ID NO: 9889 - protein, 539 aa, Unknown
  Description of Unknown: Integrase B9890 sequence
  IPR038109,IPR006119,PS51737,PF00239, G3DSA:3.40.50.1390,PTHR30461,IPR025827,SM00857, G3DSA:1.10.10.2600,SSF53041,IPR011109,PF07508, PS51736,mobidb-lite,cd00338,PF13408,Coil,IPR036162,PTHR30461:SF3
MNAVIYARYSSHNQNEQSIEGQLADCYEWAKKNDVTVIGEYIDRALSGTVDRRPDFQRMIADAAKRQFEIVLVWKLDRFSRNRYDSAIYKTRLKKYGVRVISVMEKITDSPEGIILEGLLESMAEYYSANLAENIRRGQRESVKNGTFLGGNIPYGYRSVNKKLVIDDRTAPVVRHIFAEYSKGVGKRELMDDLSARGFRNARGKPFSNSSVTRILSNTVYVGRYVYNGEVVEGLAERLIDDDTFEKVQSRLAVNKRMSGAATAKVDYLLSGKCFCGLCGASMVGDSGTSRRGEMYYYYTCGAKKKKSSACSKQREKKGFLEWYIVEQTVEYVLDPSRAEFIADAVVKEYEKEFSDDGIAVIEKALKRLDSELDKLIDVLVDTPKQARGRIAARMEQIEAEKTSYEGELAKLRIASHNKITKKEVLAWLSTFRNGDPLDADFCRRVIDTFVNSVQLYDDRIVVFYNIRGGREVLGIELIDALDLPPDDPAPLSSLIASSDTKKAEPSGSTFNPNGGPIGSKLEPRYIFIGGMFGCIFSR

SEQ ID NO: 9890 - protein, 539 aa, Unknown
  Description of Unknown: Integrase B9891 sequence
  cd00338,IPR011109,IPR038109,PF07508,Coil, G3DSA:3.40.50.1390,IPR036162,PTHR30461,IPR006119,PS51737, PF00239,SM00857,G3DSA:1.10.10.2600,SSF53041
MDKKRVWTLYRVSTKAQVNKDEDIPMQKNSCHRFVNNMPNWEITNELYERGVSGWKKTVSQRDELQLIKEGAINKEFDILLVYYSDRLGRNKDEIPVIISFLSKNGVSVYSAEEGELRSVEHVDSLLNYIRFWQSEGESIKTSLRVKEQIKQMNEAGSFTGGNIALGYDLVETELKHPKKDKYLNKLVINESQANIVRIIFDLSANKGYGRHKITAYLNERGYVNHFGNKFNDKFIHRLLNNPIYIGLKRYNTKGIDSLNIEYKTQPYDDSLRIIDDETFYKAQELMRKRKLYLQEENKHLHDSIPYSSKVLLSGLIRCTYCGQFMKTDYSYKDYKRKDGTINRMICYRYRCVNGLNKTVYHPKNQVGAKNIDIQLKDMVISAIRKIDLSGIEENVNKSKNVKLSKKNNELNNLQKELQKKQKNLFVLNNEIPKSLIGESAFSPEVLNKSIKQVETEINNILENIKLINEDIINISKNINEIEHHKNILYNWEDKFNNADIDAKKIYLSDVIDYVEWSKDNIHIEWKEFIKFLISNKNK

SEQ ID NO: 9891 - protein, 539 aa, Unknown
  Description of Unknown: Integrase B9892 sequence
  cd00338,PF13408,IPR011109,IPR038109, PF07508,Coil,PS51736,IPR036162, IPR006119,G3DSA:3.40.50.1390,PTHR30461,PTHR30461:SF3, IPR025827,PS51737,PF00239,SM00857,G3DSA:1.10.10.2600,SSF53041
MKNVNQSLIPAVIYARYSSSGQREESIEGQIRDCREYAEKNGLLVVGEYIDKALTGRTDKRPDFQRMIKDSEKGAFKVVICWKMDRFARDRYDSATYKYRLKKNGVRLVYAKEVIPEGPEGIILESVMEGYAEYYSKNLSQNIKRGNYDSALELKTLGQKLLGYKKGADGRFEIDPSTAPLVRRIFEEYASGERAKDIVDRLNQEGHRTAYGGMFNKNSIRRIIQNEKYTGVYTFKDIRVEGGIPPIISKKQFEDANKLQEVHHRAPAAKRDVSFLLTTKIFCGECGEPMTGDAGTSKSGVVHYYYICNGRRRHRCKKERVRKEHIEKAIVDELVDLIHSDEFIEAVADLVIEYQSREKDDSLLKSLDVRLKDIEKRIDNLVSAMEQGIVTATTKTRLMELESEKVDIEKGIAKELLKEPELERDQIVYFLQRFREGDIEDDEYKGYLIDTFLQSVYVYDDKLVLTLNYSGKNNKVTKSLIDKALDGEGSECSCLAPSGARNGANLNTAPIRVFLIRKVIGVVAPYEKKIQRQRKRAKT

SEQ ID NO: 9892 - protein, 539 aa, Unknown
  Description of Unknown: Integrase B9893 sequence
  cd00338,PF13408,IPR011109,IPR038109,PF07508, Coil,PS51736,IPR036162,PTHR30461,IPR006119, G3DSA:3.40.50.1390,IPR025827,PS51737,PF00239,SM00857, G3DSA:1.10.10.2600,SSF53041
MDKKRVWTLYRVSTKEQVNHDNDIPMQKTACYRFANNMPNWEITNELYERGVSGWKKSVSQRDELQQIKEGAINKEFDILLVYHSDRLGRNKDEIPVIISFLSKNKVIVYSTEEGELRSIEHVDSLLNYIRFWQSEGESLKISMRVKEQIKQMNEVGSFTGGNIALGYDLIETELKHPKKDKYLNKLVINESQANIVRIIFDLSANKGYGRHKIVAYLNERGYVNHLGNKFNDKLIHRLLNNPIYIGLKRYNTKGIDSLNIEYKTQPYDDNLRIIDDETFYKAQELMRKRKLYLQEENKHLHDSIPHSSKVLLSGLLRCSYCGQVMKTDYSYKDYKRKDGSINRMICYRYRCVNGLNKTVHHPKNQVGAKNIDAQLKDMVIDAIREIDLSNVENNVNKSKNIKLSTKNNELNNLQKELQKKQKSLFVLNNEIPKSLIGESAFSPEILNKSIKQIENEIDNILENIKLINENIISIGKNINEAEHHKNILYNWEDKFNNADIDGKKVYLSEIINYIEWSKEKLHIKWKVFIELLISNKNK

SEQ ID NO: 9893 - protein, 539 aa, Unknown
  Description of Unknown: Integrase B9894 sequence
  cd00338,PF13408,IPR011109,IPR038109,PF07508, Coil,PS51736,IPR036162,PTHR30461,G3DSA:3.40.50.1390, IPR006119,PTHR30461:SF3,PS51737,IPR025827,PF00239, SM00857,G3DSA:1.10.10.2600,SSF53041
VTGVMSVDIKWNVPQKGKEGDLAAVYARYSSHSQGEQSIEGQLAEAQKYAAAHGYTIVHEYVDRAKSGRTDNREEFQRMLKDTAKKQFNVIILWKVDRFGRNREEIAINKMKCRKNGVRVEYVAETIPNTPEGVILESVLEGFAEYYSLQLSQNIRRGIAESAEKCQVTGGNRPLGYKTGPDKKFEIDEDTAPTVRLIFKMYADGATVTEIVAELNELGLRTLRGGKFTHNSLHTILKNEKYIGIYNNHGKHIEGGVPRLIDDELFYKVQEMLKVNKRAPAKTWARADYLLADKAFCGKCGAPMFGESGTSKTGARHNYYICSHKKRFKTCDKKAVRQADVEDLVIKATCDLLADTELLDFIIENTWQYYLAQDNSQEELRNLTRQLEQTDLAIKNLIRAIEAGILTEETKSRMDELTTQKAELKASIADRELARGFHLRREHIAFYLYDLRNADHSDREVQKRLIQTFVNSVFVFDDCVKLTFNFSGNKSVVTLKMLQAAEAGEVFGRYASCSTITHRYELFWFQNVFCLTIEIPWKR

SEQ ID NO: 9894 - protein, 538 aa, Unknown
  Description of Unknown: Integrase B9895 sequence
  cd00338,PF13408,Coil,IPR036162,PTHR30461, IPR006119,G3DSA:3.40.50.1390,IPR025827,PF00239,SM00857, SSF53041
MDNPKVYSYLRFSDPKQAASSSADRQTAYAQRWAADRGMVLDEALSLRDEGLSAYHQRHITQGALGAFLRAVDAKLIAPGSVLVVEGLDRLSRAEPVLAQAQLAQVINAGITVVTASDGREYNRASLKAQPMDLVYSLLVMIRAHEESDTKSKRVRAAIRRQCLAWQAGTFRGVIRNGKDPKWVRWTGTGFELIPERAEPMRAAIALFLAGHGGYRVMRALREQGYQADQVPTTSGTLYKALKRPDLIGTKTLSIDGEEWALDGYYPALLSPAEYQQLQAANLGRVKRKGKGEYPGLITGLGLLHCGYCGAAVVGQTLLGRNRKADGTPQDGHRRLLCSGTRTRIGCEVGGSVSVAPIERALLAFCSDQLNLSSLQGSGDHLAAGRAAIAAARQRGSDLGDQLERVTAALIAGDGGATPISFVRAARDLEAQIVATQKEESLAEADLARRSRRDLPAIAEQWRHLVTGAMALDYDARMQIRDLVAETFSRIVIYHYGITIEAGSRHIDLVLMAKGGTPRMLRIDRKTGAWMAQEYGAG

SEQ ID NO: 9895 - protein, 538 aa, Unknown
  Description of Unknown: Integrase B9896 sequence
  cd00338,PF13408,IPR011109,IPR038109, PF07508,Coil,PS51736,G3DSA:3.40.50.1390, IPR006119,IPR036162,PTHR30461,IPR025827, PS51737,PF00239,SM00857,G3DSA:1.10.10.2600,SSF53041
MAAKKAPAGGEAMRAYIYGRYSSHSQKDTSIEQQFAEIRDFCDRSGIRIVGEYADRHLTGTNDRRPEFQKLMKDAAKGHVQLVVCWKVDRFARNRYDSAMYKARLKKYGVRVIYAKESIPEGPEGILLESVLEGSAEYYSANLAQNIKRGMHANALECKVNNGRLPLGLCKGPDGRYAIEPAGAALVREIFAMYIDGMSPTEICADLNSRGFRTSRGAAYNKNSLRTILRNERYVGVYKYADVRIEGGIPAIITRETFDMAQEIIAKNARTPAASWSHVDYLLTGRLFCGRCGSAMVGESGTSKTGAKYNYYTCVGRKRRRDCEKKPVKKDVIEELVVRETVQRVLVDSVIERIADAVVDLQRAEAEAGEGPILKKQLGEVERSIRNVMTAIEAGIITETTKARLEELEEQRRQLQDQIERIRFETPQLSREQVIYWLEKFRGGDVTDPAFQWKVIENFVNAVYLYDDRIRIVYNYTKQGAETVDLAFMDGLPDPSGDVFDVGASCSTIMHLSELGDEATIIVTPAVFVLTVPLPACV

SEQ ID NO: 9896 - protein, 538 aa, Unknown
  Description of Unknown: Integrase B9897 sequence
  IPR038109,IPR006119,PS51737,PF00239,G3DSA:3.40.50.1390, PTHR30461,IPR025827,SM00857,G3DSA:1.10.10.2600,SSF53041, IPR011109,PF07508,PS51736,mobidb-lite,cd00338, PF13408,Coil,IPR036162,PTHR30461:SF3
MKTVKTQSGATKAVIYARYSSHGQTEQSIEGQLHDNYAWAKQQGITVIGEYIDRALTGTKDARPDFQRMIEDAAKRQFEMVIVWKLDRFARNRYDSAIYKARLKKYGVKVVSVKENITDSPEGIILEGLLESMAEYYSANLSQNVKRGLRESVEKGYYCGGSIPYGYKAENHRLVPDEKTAPIIRYVFEEYAKGTSKKEIIDELNRRGVRNGKGNPLTYTSFQHALRMTTYIGEYVYQGKVVPCADPLVTREVFDKVQARLDRRAHAPAAAKARVPYLLQGKAWCGLCGAPMFGESGTSHTGALHTYYCCYNRKRKKGCKKKTERRDKLETFIVARTMDYILTPSRMNRIAKAVVQEYNKEFSGSRVEDMEKAIAQIDREMDKLVDALIDAPKAAHKKIYARMETLEAQKAEFETDAAKLRVAMGLRLTEKEVVSWLKTFRDGDPDDPDFRRRLVDIFINAVYVYDDRIIVFYNIRGGKQVSSKDLYEALESPKDKENSKPETGSDLESSGGAGNSKSEPEFVFVHGVFGCIFPWGEG

SEQ ID NO: 9897 - protein, 538 aa, Unknown
  Description of Unknown: Integrase B9898 sequence
  cd00338,PF13408,IPR011109,IPR038109,PF07508, Coil,PS51736,G3DSA:3.40.50.1390,IPR036162,IPR006119, PTHR30461,PTHR30461:SF3,PS51737,IPR025827,PF00239, SM00857,G3DSA:1.10.10.2600,SSF53041
MEVLNVAAYVRYSSENQRQESIDAQLRAIKDYCDKNSYNIVRIYQDEALSATTDQRDQFLQLIDDSKLGTFKYIVVHKLDRFARNRYDSAFYKRELRMNDVSLLSVMEQLDDSPESVILESVLEGMAEYFSKNLSREVKKGLNENALQARHNGGRPPLGYDVNKDLSYKINDTEAESVRIIFEMYANDYGYGMICDHLNLKGYKTKIGKTFGKNSIYEILRNEKYIGRYTYNKRQSKKNGNHKFKSDDQITRIDDAMPRIISDELWNNVQFKLNSNIKPRMNAQRVYLLTGKLECGKCGCAYVGSSYFRSRQGKKYYNYQCVSKSMHSGCDNKPLRADYIEQYVMDRIQDNILSDSAIDRLSRMIYDMIMEATSINRDLVNDLKRKRDGLKIQVDKLFDLYLEGMIDKSMIGEKTNRIKAEIESYEKRISELGDTSGDVIELEKIKLYMYDLRTKLDEADDNVKKAMIDVLVDRIIINADDIEVIFKVDPFNHSKSKSAASVKSEATQDKVGGDKAYLTIPFVFSRLDMYDYFKMYQA

SEQ ID NO: 9898 - protein, 538 aa, Unknown
  Description of Unknown: Integrase B9899 sequence
  IPR038109,IPR006119,PS51737,PF00239,G3DSA:3.40.50.1390, PTHR30461,IPR025827,SM00857,G3DSA:1.10.10.2600,SSF53041, IPR011109,PF07508,PS51736,mobidb-lite,cd00338, PF13408,Coil,IPR036162,PTHR30461:SF3
MKTVKTQSGATKAVIYARYSSHGQTEQSIEGQLHDNYAWAKQQGITVIGEYIDRALTGTKDARPDFQRMIEDAAKRQFEMVIVWKLDRFARNRYDSAIYKARLKKYGVKVVSVKENITDSPEGIILEGLLESMAEYYSANLSQNVKRGLRESVEKGYYCGGSIPYGYKAENHRLVPDEKTAPIIRYVFEEYAKGTSKKEIIDELNRRGARNGKGNPLTYTSFQHALRMTTYIGEYVYQGKVVPCADPLVTREVFDKVQARLDRRAHAPAAAKARVPYLLQGKAWCGLCGAPMFGESGTSHTGALHTYYCCYNRKRKKGCKKKTERRDKLETFIVARTMDYILTPSRMNRIAKAVVQEYNKEFSGSRVEDMEKAIAQIDREMDKLVDALIDAPKAAHKKIYARMETLEAQKAEFETDAAKLRVAMGLRLTEKEVVSWLKTFRDGDPDDPDFRRRLVDIFINAVYVYDDRIIVFYNIRGGKQVSSKDLYEALESPKDKENSKPETGSDLESSGGAGNSKSEPEFVFVHGVFGCIFPWGEG

SEQ ID NO: 9899 - protein, 538 aa, Unknown
  Description of Unknown: Integrase B9900 sequence
  cd00338,PF13408,IPR011109,IPR038109,PF07508, Coil,PS51736,G3DSA:3.40.50.1390,PTHR30461,IPR036162, IPR006119,PTHR30461:SF3,IPR025827,PS51737,PF00239, SM00857,G3DSA:1.10.10.2600,SSF53041
MAKRKKEVQQPAQIAAIYARYSSNAQNDASIEQQVAECTLYAQQNGLKVVATFEDRAISGRSDKRPGFQKMIRAAERREFQVLLTYKSNRIARNMYDALRYETRLEDAGVKVVYCKENFGDNAAGRMMLRMMMSINEFYSDNMAEDIRRGLMDSASQGKVVGALPYGYKKGEDGKVAIDEELGPIVQEIFSRVLNDESYAEIARDLNARGYRTQHGKQFGKSSFRAILENERYTGVYIYGDIRIEGGMPKLVEKEVYDAVNHIVKHRQTLHARQRENGEYLLTGKIFCGKCLGPMVGISGKGRWGKDFFYYTCNTKRLQKKCDKKNVRRDQIEEEVTRAVLECALDDDAVEWIADTAMQMSKEMEEQSQLGYYESRLKETKKQIANILRAVEMGIISDEFKERMTELRMEKQELDGLIATEKMGILTVGRDDVIKYLLMLRTEDYRDKKFQKRIIRDFVKAVYVYDDHFKLVVDFTGENKTYTRPLKIKLAKANGTMDCSGVCIRSDEGHHISLIQTPDPRNCIDVSDAGFVITWYFH

SEQ ID NO: 9900 - protein, 538 aa, Unknown
  Description of Unknown: Integrase B9901 sequence
  cd00338,PF13408,IPR011109,IPR038109,PF07508, Coil,PS51736,IPR036162,IPR006119,PTHR30461, G3DSA:3.40.50.1390,PTHR30461:SF3,IPR025827,PS51737,PF00239, SM00857,G3DSA:1.10.10.2600,SSF53041
MSQNAIIYARFSTAEQSKGYSLERQQRHGLEYATSRGWIVEKTITDEGRSAFHGANRLEGSALHEFELEARNGLHRGKALLVENVDRLSRQGAKAAAQLVWALNEQGVDVATWQDGYVYQAGNNGDLMELFSVIIKAQMAFEESDKKSKRTAATARRRDQRIEAGEVDVPIANMPNWIKVVDGTKVLDENRTAVLNLIYDLYIDGVGIHRIVTVLHERGVPSWTPKEQRRGNNGWFYSHIYRLLTRRAVLGEYVNGEGRTLNPGFFPQAITAEKWNRAQAALSMRKGNQTNVKVFGNRNLLSQMVVCEKCGGGAHFGHTTDTVQKYTKVSGEVVNYRRKTYRKLRCDRARRNHTCDNGTTLNYDVVEATILQEMLPQLARKPDANAEARKLREQIADLARLQNAEQVKLNHLIDALADGGSKAIVQRVAALEVELERLSVDIASAQKSLAIETAKPAGDNDVKLVESLRTELTSENDEVRIYARGRVNMSLRRLIKRIVITETGLFRVEPDDHSWWLFSEDGTMLQGAYTLGPTAEAS

SEQ ID NO: 9901 - protein, 538 aa, Unknown
  Description of Unknown: Integrase B9902 sequence
  PS00397,IPR038109,IPR006119,PS51737,PF00239,G3DSA:3.40.50.1390 ,PTHR30461,SM00857,G3DSA:1.10.10.2600,SSF53041, IPR011109,PF07508,PS51736,mobidb-lite,IPR006118, cd00338,Coil,IPR036162,PTHR30461:SF3
MPADRPTPTPPNNEVNPSLPGAPLRYACYARVSTDDQADRNLSIPAQLRECRAFVQKEGGLWTAEFSDPGFSGTTMDRPGLQEMLTAARQSAFDVLVIQKSDRLSREDLAPLLIKAELAKHGIRIRSVSEPFYGGAEPLDEMMETIARGFNKLYISNLKKEIKKGQAQMAVEGRQSGHAPFGYRFVNKDVPGSGWSVDEEAAVWVRRVFARVLEGATFAEICREMNAAGVTTPSLRHARHVKAYGFWTGNTLRNILKNRVYLGEIRAGGQWQPGSHPPVVDKETWARVEAVLSRRSRGRAENTRGLFTGQLLRCPRCGALLTLISYKDRAFTGERGGRLYRHRYACTAGRHREQKAGYGIPQDALDGLCTGYSIGEKRLIRLLQAYLIRMAGPEERGRKKPILPLPPVLSLPVPQGPARDIAAERLVLEKEIAGLPGLRAAYQAQQAAGYMTMEELGQALATLSARREALEAALAQLSRSVPPAPITLAPTEARSLLLLLDDPAATPRQTRDALKFAFSHFVPWPDKSGLDVYPALTV

SEQ ID NO: 9902 - protein, 538 aa, Unknown
  Description of Unknown: Integrase B9903 sequence
  IPR038109,IPR006119,PS51737,PF00239,G3DSA:3.40.50.1390, PTHR30461,IPR025827,SM00857,G3DSA:1.10.10.2600,SSF53041, IPR011109,PF07508,PS51736,mobidb-lite,cd00338, PF13408,Coil,IPR036162,PTHR30461:SF3
MKTVKTQSGATKAVIYARYSSHGQTEQSIEGQLHDNYAWAKQQGITVIGEYIDRALTGTKDARPDFQRMIEDAAKRQFEMVIVWKLDRFARNRYDSAIYKARLKKYGVKVVSVKENITDSPEGIILEGLLESMAEYYSANLSQNVKRGLRESVEKGYYCGGSIPYGYKAENHRLVPDEKTAPIIRYVFEEYAKGTSKKEIIDELNRRGVRNGKGNPLTYTSFQHALRMTTYIGEYVYQGKVVPCADPLVTREVFDKVQARLDRRAHAPAAAKARVPYLLQGKAWCGLCGAPMFGESGTSHTGALHTYYCCYNRKRKKGCKKKTERRDKLETFIVARTMDYILTPSRMNRIAKAVVQEYNKEFSGSRVEDMEKAIAQIDREMDKLVDALIDAPKAAHKKIYARMETLEVQKAEFETDAAKLRVAMGLRLTEKEVVSWLKTFRDGDPDDPDFRRRLVDIFINAVYVYDDRIIVFYNIRGGKQVSSKDLYEALESPKDKENSKPETGSDLESSGGAGNSKSEPEFVFVHGVFGCIFPWGEG

SEQ ID NO: 9903 - protein, 538 aa, Unknown
  Description of Unknown: Integrase B9904 sequence
  cd00338,PF13408,IPR011109,IPR038109,Coil, IPR036162,IPR006119,G3DSA:3.40.50.1390,PTHR30461,PTHR30461:SF3, IPR025827,PS51737,PF00239,SM00857,G3DSA:1.10.10.2600, SSF53041
MPNSPFPPGAHVAAYLRDSGHEDQELSTSHQEANLRAFCTQNGLILAEIYRDEARPGSTTVGREAFHRMIHDFRTGAHLAGLIVWKFARFARNIDDAQFYKADLRRRGFRIYSLNDTIPDGPEGRFFETAIDWMNERYLEDLSIDIKDGLKYNFTHYGAVPGTPPAGFRRGPEIVIGHHRDGRPRTIHRWEPDPLTAPLARRAWEMRAAGASLKQIADATGLFKSLNGWTTFFANRLYLGIMVYAGETAPNYCDPIIDQATWDTVQSIIQANAANQNLRTNNHPRRNSETSPWLLSGLAVCAVCGSPLNGGGHKQINGKIVTSYECSRKRRRRDCASKAIPKDLLETGVLQDIRNYILTPGVLASCQAVIAAENQTQAQNIQQEKKRIKAKLTGVRKRLDNITEALSMRPKSRSLLKKHDTLEAEEAKLLASLSETEKASTPITLTPDEIDNIAPILQAQLSGTPQEVKQFLRGWIKNIIVERDGRNVLGLINYYLPPTDLTPPSTPTDDNNVSMPRTPPGALYHRHIFTHPFRYTLK

SEQ ID NO: 9904 - protein, 537 aa, Unknown
  Description of Unknown: Integrase B9905 sequence
  cd00338,PF13408,IPR011109,IPR038109,PF07508, Coil,PS51736,IPR036162,IPR006119,PTHR30461, G3DSA:3.40.50.1390,IPR025827,PS51737,PF00239,SM00857, G3DSA:1.10.10.2600,SSF53041
MKAAEPLRTAVIYARYSSAQQRDASIEQQVKVCQKYAADNGLTVLRVYDDHAMTGTNDNRPMFQQMIRDSASGAFSFVIVYSLDRFSRDRYDSAIHKHTLKERGVKVLSAVENIQDNPTGVLMESILEGFAEYYSKELAQKVRRGIRSNAEKAMVVAQLPLGYRRGADGKFEIVPEEAEVVREIFRRVADGDQLSEIYTDLNARGIRTKKGHAFGKNSFQGLLHNEKYIGIFRYDDIVLTDAVPPIVDEATFRRVQERYSGASHQYNPQKRVNQNGSYLLTGKLFCGHCKGPMVGTSGTGKHGELHYYYTCRTRQKTKTCKKKPVRRDEIERLIAQRLHQMIFAEDVVDRIADELIAYLKANEMTDEVRNLTAQIQALEREEANTLKAIRMGVVAAPVQKMLEQIETDLDALRARLLLAKERARSDITKDEVLTLFEMFREGDIGSKEYQEKLIDAFLIRAYVYDDRVKIIFNYSAAGSNEIEIPFDIDSVEKPVKGSDKAPEGVLFLPYTNPDDLFFVKGFFVLITDFAGTLQKEV

SEQ ID NO: 9905 - protein, 537 aa, Unknown
  Description of Unknown: Integrase B9906 sequence
  cd00338,PF13408,IPR011109,IPR038109,PF07508, Coil,G3DSA:3.40.50.1390,IPR006119,IPR036162,PTHR30461, PTHR30461:SF3,PS51737,IPR025827,PF00239,SM00857, G3DSA:1.10.10.2600,SSF53041
MNNAVTYNRFSPGPNQREESITGQLRENHRMAEQKGLTVIHDYIDRSLTGRSDDRPEFQKMLKDAESGLFQYVICYQTGRFARDRFDAIIYKRKLKKLGVKVIYSKMNIPDGPEGIILESVLEGLDEYYSEELRQKVIRGQYDNALQGKASGGPVPYGYKLSDDKFYMIDEDRSIIVREIYNRYAAGESIVAITEDLNRRGLKTAKGENFNKNSLHRMLKNPKYYGLLIFKSKDESYDEVRKEDAIPAIITKDLYMKVQERINQNKHKTAKTLAKTLPVTFLLSGKVFDGTCGGSMVGDSGTSKTGQTYYYYTCNNKKSKKGCKTKSIKKDFLEDLVINTTKESILVPDVMNFISDSISQLQDENYDESMLNSMTSELKQVKANIKNLMAAIERGIITNTTKERLLELERRQDVLEAQIQIERKRIEAPKTVTDKVLFYLEKFKDGDANDDMYRKTLVDMFVEGIVVNPEYITIAYKYNGDNDIIDVPFNLKDSSDNSVRMSLINWSLRYNIRTLKRPQIAFDIKNGWILYTFKRAA

SEQ ID NO: 9906 - protein, 537 aa, Unknown
  Description of Unknown: Integrase B9907 sequence
  cd00338,PF13408,IPR011109,IPR038109,PF07508, Coil,PS51736,G3DSA:3.40.50.1390,IPR036162,IPR006119, PTHR30461,PTHR30461:SF3,PS51737,IPR025827,PF00239, SM00857,G3DSA:1.10.10.2600,SSF53041
MAKRKFNKGGEVRLVAYYRYSGGSGQTEQSIEGQRRDCETYARLHNMTIQKEYVDRHISGKTDDRAAFQQMITDSDKGAFDMVICWKTDRFARNRYDSAVYKKRLRDNGVEIVYAAESNIAGAEGIIIEGVMEALAEYYSAELAEKMRRGMRESALKGQAISRCRALGLKTDEHKRFVIDEKTAPTVRFIFEHYAAGESATSIVDKLNAKGLRTSQGNPFNKSSIPRIIQNEAYRGVYVSKSYDVRIEGAIPAIIDDELWERAQTMLKLNRQLKAKNEPKADYILSGKLYCSCGSLMRGMSGHSATGEVYRYYTCPNKNCHLRNIPKDDLEGKVMQSIVDHLLQPESMEALAEAMVEVQKADVEKPNAERVAIEQSLSDVRRRSKNILDAIENGTANAQLCARLDDLTEQEQTLSFQLSSLEKEKPVVFTKEQYLFLLEQFLMEPSERTPEYGRRLVNTFVTSMVVSGRELVINFNVSDETVNKNKKTSQTNLQKESSSGMRLVHLAHQQANYSLYAASGYFSLVEHQFSARLWRTA

SEQ ID NO: 9907 - protein, 537 aa, Unknown
  Description of Unknown: Integrase B9908 sequence
  IPR038109,IPR006119,PS51737,PF00239,G3DSA:3.40.50.1390, PTHR30461,cd04300,IPR025827,SM00857,G3DSA:1.10.10.2600, SSF53041,IPR011109,PF07508,PS51736,cd00338, PF13408,Coil,IPR036162,PTHR30461:SF3
MLAPNVRVIQPTKIIDDTSMDILKQELPKRVCAYCRVSTDSEEQKTSYNSQKTYYTDKIKNHPGWIFAGIYADEGITGTSMKKRDEFNKMIKDALDGKIDIILCKSIPRFARNVVDILNIIEQLTSKRIPVIFETENLNSLDNSQGTRIQIMMLAANAEDYSISLSESVKWGRIRQIEQGNYPFTECFGYKVEIKKVGNKVVEKKIRIDENEADVVRLIYTTYLNGYSYRQIAAMLEEREIPSPKGKPNWKSSTVQGILQNEKYKGDLHLQKQTTTDVKFRKRVANTTGKQYYIEDHHKAIISKSEWNRVAKEIEHRNSQRGFGETGRSVYTSKYPFSNKIYCLQCGSKFRRYGYDTKDGKVATWVCINHKIKNSTCTQLQVIEKNVENAFIEALNELITDKHQVIETVINNIEEVIKNRKDEITPEEIDNKIALKHRDLMALIQTIGTMDNYNESQKIMNEIENLKAQKEDAIRMDKQRKRDLYRTEDLRKLLDKSQVFDTFQPQIFKQLVDKILIDGNKATFVFTNLVKITKIVK

SEQ ID NO: 9908 - protein, 537 aa, Unknown
  Description of Unknown: Integrase B9909 sequence
  cd00338,PF13408,IPR011109,IPR038109,PF07508, Coil,PS51736,IPR036162,IPR006119,PTHR30461, G3DSA:3.40.50.1390,PTHR30461:SF3,PS51737,IPR025827,PF00239, SM00857,G3DSA:1.10.10.2600,SSF53041
MERAVFYARVSTEEEKQLNALSKQVEECRDCIRAQGWALVGEYVDEGKSGTKVRGRDEYRRLFEDLEEDKFDIIVIKSQDRLMRNVKDWYLFLDRMLTHGKKLFIYIDNQFYTSDNALITGIKAILAEEYSRELSKKLNNAHRRRVEKAKAGEDISAVGSPSTYGYDISDGKWVIDEKEAEVVRLIYSRYLIDLSAKKVMEYLNSHGYKNREGRAFNYDTILRILKNEKNKGTLVINRYHRDFDLKRIVTKPEDEWVIVDDAIPALVDKESWEKVNEIIRSRVRAHDGRGKKVGCEKLSGKLYCASCGRVMWGHRGKYKDKTYLYWKCSGQLSKGDALCSDYVRIPENKVREIIKGIVCDLQPRREVVKATMIKWLEDLKESLSGANTSSQRVSGELSKLRQKKERLTDAYLDGIIDKPDYRGRLSEIEAQIKELERSVTPVEENEDIRDIEAVIANIDQELDMWISSEDFIENKIDFLIEHSQKITVSKNNLLIIELDLIGGVIIAGEGIFAVCQETKILSRTKVKNYEVELRLAA

SEQ ID NO: 9909 - protein, 537 aa, Unknown
  Description of Unknown: Integrase B9910 sequence
  IPR011109,IPR038109,PF07508,Coil,PS51736, IPR036162,IPR006119,G3DSA:3.40.50.1390,PTHR30461,PS51737, PF00239,SM00857,cd03768,G3DSA:1.10.10.2600,SSF53041
MKKCIIYSRVSSDHQDYSSQVTELKTYAKLLSLEVDRVFSEKVSGYDPKAERVQFELMKAYLKETDIKIVLMWELSRIARTTLKSLQEIKTFTEQGIDIYFKKEGINTLSDNPSTKLLLSVMSTMAEVERDNIVSRVKRGLEASAKKGKITGYQTLPYGYKSDDGFLAVDEEEAKIIQLIFSKAKEGLGMRGIASLLNSTGVQSRWKKLGRVSKNRMGKTTEILWKPNSIGLILRNETYIGIRKYRKETIVAPSIIDKDLFDEVQKLLDTKPGLRKGRTKHTYLIRGKLFCAHCGRAFGAITEARYNAPSFYFCNGAKDIEIRCKVGQYKSSFMDKVIYDALFLHRDMYSTLANAKKAETDPAEKEQRIEFYKEEIKKGNDRLTRVLELFKGGMIDKKELTKDRDAILRNRAEYEGNIEVLQGDLDTYKNTVIKVEEIYNTYAPEQSVAKRQSFIDKYLDKVTLKKIENPGVDFEKLATKDVKDLKSWEIIVKGEPTKKSHSRFAYIEIYAFGSKIPLKGVIQTSSGILHLSQNYSF

SEQ ID NO: 9910 - protein, 537 aa, Unknown
  Description of Unknown: Integrase B9911 sequence
  cd00338,PF13408,IPR011109,IPR038109, PF07508,Coil,PS51736,IPR036162, IPR006119,G3DSA:3.40.50.1390,PTHR30461,PTHR30461:SF3, PS51737,IPR025827,PF00239,SM00857,G3DSA:1.10.10.2600,SSF53041
MNNNAAVIYARYSSHRQDEQSIEGQLHVCHEYAKRNGYTIVGEYIDRAISGRSDDRPQFQQMIEDAKKKAWKYVIVYKLDRFARNRYDSAIYKHKLKQCGVKLLSAMEQIGDNPESIILEAVLEASAEYYSLELAQKVRRGRIESAGKGKFVGGGVPLGYRSEGGYLVLDEQRAPYVRQIFEQYADGISKREIIDDLNRRGFRNRQGKPLDHNAIHRVLRSEKYVGVLEQSGVRVDGGCPAIVDRATWDRVQARLDLMRRSGAKSPAGSEVEYLLTGKAFCGHCGMSMHGVSGTGKTGNTWYYYQCTGRRKKRNGCKKKHEKKDFLEWYVVEQTVDYILAPERVRKIAAAVVAEYEREFGADQLRQLEDRIAALGREIEKYIDAVVDLPKSARSSLFDKIQRLTDEKEALEVDLAKLRVANRIQLTEDEIVAWLRSFCKGDLFDMDFRRRIIDVLVNSVFVFDDKIIIYYNVRGGKQVSYVEMLESYGEEGCPGPDDDLPEGSTSAAFGPPSETIVEPAIIFAGGLIGLVLPRPVDS

SEQ ID NO: 9911 - protein, 537 aa, Unknown
  Description of Unknown: Integrase B9912 sequence
  cd00338,PF13408,IPR011109,IPR038109,PF07508, Coil,PS51736,G3DSA:3.40.50.1390,IPR036162,IPR006119, PTHR30461,PTHR30461:SF3,PS51737,IPR025827,PF00239, SM00857,G3DSA:1.10.10.2600,SSF53041
MNNTTAAIYARFSSNNQREESLDAQIRAAKEFAKDNDLKITKIYTDKAQSATTSDRPGFLEMIKDSQDDLFDKVIVHKLDRFARNRYDSAVFKRKLRENEVELISVLENFDDSPESIILESVLEGMNEYYSANLAREVSKGMKENAMQCKHNGGLAPLGFDVADDKTYKINEEDAAKVRLIFRMYAAGNGYGPILKKLKEKNYKTQTGRNFSKPSLHDILRNEKYRGVYVFNRSASKKAGKRNHHKSKPEEEIIRIEGGMPRIVSDKTWRRVQRRMDENKKGPGAHSAKEIYLLSGLIECGKCGGSMVGNRRIAGRDRTVYMSYECSTRKRTKECDMKSITKEHVEEIVLDDMVEAMFSAAKIDQLAKDVYNFAKQENEEINADIKRFEKQLKNINSKIDNLTEAVAAGLFQPSMKEKLNKLESEKSDLGLMLNEAKLQAEKNLPTKSEIKAELKGYRNIKNESLKAQRKAIKTFVKSVIIYENNIKVNYIVDLTGGGGGSRTHVLNGSPSSFYECSSAFGLTVSTPLNWITYCQPV

SEQ ID NO: 9912 - protein, 537 aa, Unknown
  Description of Unknown: Integrase B9913 sequence
  cd00338,IPR011109,PF07508,Coil,IPR036162, IPR006119,PTHR30461,G3DSA:3.40.50.1390,PF00239,SM00857, SSF53041
MRARVYSYLRFSDAKQATGASSDRQRAYAQEWAKQNGLTLDESLSMRDEGLSAYHQKHVKRGALGAFLKAVEDEKVPIGSVLVVEGLDRLSRAEPMVAQGQLAQIITAGITVVTAGDNKQYSRESLKANPMDLVYSLLVMIRAHEESATKSKRVRDAIRRMCRGWAEGTYRGLIRYGQTPGWLRVQDGKWELIPERAEAYRYAIERFRSGVGLGPIIQELQVRGLELGTSEARSGQMSRLLSHPALKGEKHLDLDGETFVLEGYYPAVVPKSEWDELQVLVGQRSRKRIRRSIPAILTGAGVTICGYCGASKKTQTMTARMKADGSVPDGNRRLQCCSDNGAIKCPVRSSCSAAPIERALMNFCSDMLNLQSLYSGDATAAPRAAVIAAREKLKKIDSQLDRLTQAMLDDEGSAPAVFVRRAKEMEEQRGHLEHELQTAERALADAARVDITGSEDRWRELAAGVETLDTESRLRARQLIADTFDQIVVYRIGIDPQTTPAGTMDVLLRAKGGKARLLRIDKKGGWVAGAEFAALPA

SEQ ID NO: 9913 - protein, 536 aa, Unknown
  Description of Unknown: Integrase B9914 sequence
  cd00338,PF13408,IPR011109,IPR038109, PF07508,Coil,IPR036162,PTHR30461, IPR006119,G3DSA:3.40.50.1390,PTHR30461:SF3,IPR025827, PS51737,PF00239,SM00857,G3DSA:1.10.10.2600,SSF53041
MYKVYEPLSAEECLEYLRKSRSDDPSLTVEEVLANHELELNEYAEKYLGGRVPENQTYREVASSETIDDRPEMVRLLKAIESPKIKAVLVREPQRLSRGDLEDAGRIIKIFRYTNTLVVTPQRTYDLRDDMDRDYFERELKRGNEYLEYAKKIMSNGKETAVKKGNFIATFPPYGYRKIHYKVDKEKCSTLEIIESQADVVKMIFDLYVYQDMGFELIANRLNELGFKSQKGDLWKKASIQDIISNEAYIGKVRWKYRKTVKTIENQQVKKSNPRNKVSDYLLFDGLHPAIISQELFDLAQAKRGKNIPIRKNLSINNPFAGIFFCAKCGRAMKLRPQNGKNKPRLECSQMKHCQNGSAVFDEILERVCEALEGCISDFEVKLDNNNVDEKERHKQLISSLEKRLKELKEKEIRQWEKYTDEGMPKEIFDMLNDKVLKEKEETKNALCSAYDSMPEPVDYEEKIVTFANAIEALKSDDVSPELKNKYLREIIEKMTYERPKPIILTKELAEQMGVPYPHKLCYHHYPFTLDITLRG

SEQ ID NO: 9914 - protein, 536 aa, Unknown
  Description of Unknown: Integrase B9915 sequence
  cd00338,PF13408,IPR011109,IPR038109,PF07508, Coil,PS51736,G3DSA:3.40.50.1390,IPR036162,IPR006119, PTHR30461,PTHR30461:SF3,PS51737,IPR025827,PF00239, SM00857,G3DSA:1.10.10.2600,SSF53041
MRPAAYCRFSSDAQREASIRDQLRNIEAYCTRSGWPAPALYQDQAISGSRNDRPGYRALLDAAEFGAFDVLLVDDLSRLSRDHIETAQTIRRLKFAGIRVIGVSDGTDTARDGYKLETGLRGLMSEFYLDDLAKKTFRGLMGQALEGYSAGGLPYGYASHAEEGGTRRQINPEQAAIVRRIFERYAAGVSPRAIADELNRDRIPSPRQSTWVHTALYPDAKGVGMLGNPIYNGRPVWNRTAWVKDPVTGRRKRTQRPRSEWVIIDAPELKIIDDDLWAACEARAKAQKRDTASKENAGRGTGGRGPKYLLSGLLRCGCCGAPFIIVDRTHYACSSRKNRGTSTCANAYKVKRATVERELLAGVRDQLLSEESFKEFEAEARAALKAIRPDPQAAKKRISEANREVDNIMTAIKAGIITPTTKAALQDAEDNLAEARETLKAIERFEPTQMLPRAREIYRDLVARLDAIEDISAAREALRALIGEVKLLPENGKLTAEIQNAGLAGVCEITVVAGAGFGRYLTSTEGRRTVRICGLD

SEQ ID NO: 9915 - protein, 536 aa, Unknown
  Description of Unknown: Integrase B9916 sequence
  cd00338,IPR011109,cd16858,PF07508,PS51736, G3DSA:3.40.50.1390,IPR036162,IPR006119,PTHR30461,PF00239, SM00857,SSF53041
VSVIDLHTRQPVDERPGVVLLRNSTPGQKDNARSVKAEEVARALLMSLGITVGAVLDEQGTSGKDLTRRPVARQLVDELQAGKWAALAVIEVSRTSRDPDGVDQRIFKRACRRGRALLVTPTKCYDFRNDSDDLQYEMESVLSAREWRVLRKRTWEGNVERARLLPVFYGFAPFGYRKVAATYTIRGTTRNALVLEKDTEQAGLMEAIGAAMDVEDGLNAVAWRLNTQGWRQPNGSLWYFSQIQQVIKRSYYRGLWTQGEYREANDLYEMEGVERITHERPELAWYTEERVAKWQRKFTSKGPIRVRPQGHDHPALGVLVCSLCRGLMNGQGERGYCCSNRREGRCKGQNLSDLQANGAIRRLLADVLPGLADLTREVRDALTSDARPDDAAELRELDRQIEARFEVATEAKANGVQPPSGFYAKTHDLQERRARLAERMADVDRIESERRRHMARLAEFSDPEQALQLYDEVMTTGERQQFLGYLFKWIVIATNGGRGNRARAWVSDYEATFPSDFKSVSGLGPWTLWLSRFDVA

SEQ ID NO: 9916 - protein, 536 aa, Unknown
  Description of Unknown: Integrase B9917 sequence
  cd00338,PF13408,IPR011109,IPR038109, PF07508,Coil,PS51736,G3DSA:3.40.50.1390, IPR036162,IPR006119,PTHR30461,PTHR30461:SF3, PS51737,IPR025827,PF00239,SM00857,G3DSA:1.10.10.2600,SSF53041
MRTAAYCRFSSDAQREASIRDQLRNVESYCARAGWPTPALYQDQAISGSRNDRPGYQALLAAAEVGAFDVLLVDDLSRLSRDHIETAQTIRRLKFAGIRVVGVSDGTDTARDGYKLEAGIRGIMSEMYLDDLAKRTHRGLMGQALEGFSAGGLPYGYASVAVDGGFRREIKPDEARWVRYVFERYAAGASTRAIANDLNAMKIPSPRGGTWAHSAMYPDSKGVGMLGNAIYNGRQIWNKTAWVKDPISGRRRRTMRPHSEWVIIESPELKIIDDDLWRACEARAKVVKRDTAGRREAGKNSGGRSAKYLFSGLLKCGVCGAPFTIRGSRYYGRSNYQNRGASVCGNSVSVKKATIERVLLATVKESLLVEDAFKAFEAEARALLKEARPDPGLARRKLAAANKELDNLMSAIKAGIITPTTKAALQEAEGQVASAAEELKAIERFEPTQMLPRAREIYRNMVAQLEEIDDVSAAREALRGLIGDVRLIPENGKLTAEIQSAGLAGALYETVVAGAGFGRYLPSTEGRRTVRICGLD

SEQ ID NO: 9917 - protein, 536 aa, Unknown
  Description of Unknown: Integrase B9918 sequence
  cd00338,IPR011109,PF07508,PS51736,IPR036162, IPR006119,PTHR30461,G3DSA:3.40.50.1390,PTHR30461:SF3,PF00239, SM00857,SSF53041
MPFLGGFAVHFGIYGRKSYFKDTSDSTQMQFSEGDKYIAEHFFPDEIESVTYYEDDGWIRSDMDRPDLNRLKDDILAGLINVVVIYKIDRLCCDMADFVPFYAFLKDHGVKFITIKDGIDTTTPIGEAMMYLAVIFSGLEVQTDSLRITDNMNHLAAEGFWCGGKPPIGYNIQEISLGAKSHKTLVFNEDEIRYKNTLIDIFLENHFSLQSMETYCKNHGITSLKGSFLSTTQLYSMFGSPMCVANTPAMYDYFADKGCQMSEGSPRDAWDGKHGIIVYGRTMEKKVSGKKKHIQAPPENWRVSIGYHEPYMTDERFFAIQAQFGHNVFSKQSKYDLPLLKGSLRCKCGRLMSMSRKKKADGSISTWYYCPRRMRNGVDACDMIQTKADLLDNRVISIFQEIEHDPAALKKYLKEEKRQPQDNAAALRAAMEKCQAKIGKLTATLSLNSESAAAKYIVNEIEKLDIEYNSLRKRMLSANAVDRKNALNMKNAMEKREEIIRLLNDFDNFTPNERNEIAKDVLKECVWDGDTLFLTL

SEQ ID NO: 9918 - protein, 536 aa, Unknown
  Description of Unknown: Integrase B9919 sequence
  cd00338,PF13408,IPR011109,IPR038109, PF07508,Coil,PS51736,G3DSA:3.40.50.1390, PTHR30461,IPR006119,IPR036162,PTHR30461:SF3, IPR025827,PS51737,PF00239,SM00857,G3DSA:1.10.10.2600,SSF53041
MYEDIKTACLYVRFSSHNQTEQSIEGQTRVCRDFCKRHNIRIVEIYADRATSASKDIEKRVQFLKMIKDSERGLFDAVIVYKLDRFARSRYDSATYKYRLKRNGVQLISATENISNDPEGIILESVLEGMAEFYSAELSQKINRGMRESAYKHNSIGGAVPLGYKIEDKKLVIDPKTAPIVKEAFEKYADGETVAEICRQFNARGYKTSKGTTFGKSSFTKIFRNERYIGVYSFHDYRAEDAIPAIIDKDLWDRVQLRVGKIKNAPARNKAKVVYLLSGKIFCGHCGSKMNGNCNAGNYYYYQCYGKKNGNVDCKKKNIRKEFIERLVAQDALSLLTDEYIEQIATIACEKNQHEIELDSALPTIRDRIHQVDLSLNHLLKAIESGSAPDMLVKRMGELEKEKKDLQAQAKKESEDIVELDKAQVIYWLEQFRGGSIEDQEFCRMLIDLFVNSVTVWDEDDNTYKVTVAYNLTSLPTKTYRLNKGGTLSDFASNAPVPHSRTLRQRLRRRRLWSALMCLTLTAIWTGTGSLPASTW

SEQ ID NO: 9919 - protein, 536 aa, Unknown
  Description of Unknown: Integrase B9920 sequence
  cd00338,PF13408,IPR011109,IPR038109,PF07508, PS51736,G3DSA:3.40.50.1390,IPR036162,IPR006119,PTHR30461, PS51737,IPR025827,PF00239,SM00857,G3DSA:1.10.10.2600, SSF53041
MKLTHGAYILARFSTDRQEADSIEVQVSKCREWCERQRLPVLDVFADEAVSGMKETRPQFDRMMRLLSEGGADTVVIYDQSRMFRKMTAWFTLRERLERLGVRVVSVTQPMIGGDLRDPATFMSEGGMALMNQMWVLQTRQKVCEKMRWMAEQGKYTGGVPPLGYVVIDGRIEVCEPEAETVRIIFGDYAAGRSYREIIQRLNAEGRRTKSGGTFGSNSLHDLLKNEKYIGVLTYGRTQKRPDGSRNSHAVASTVMRMEGMIPAIVDRETWDIVQEKLMANKRKQAGRPVRVREYPLKGKVFCGECKASMSVTCSQGGYYYYACSEKKRKKTCDNMPIKVDDLERMIAEAIKNLLGNPENVDGLICILREERGKIQEQTAMRMKALFDRQAEIKKQLDAAMSAVLAGMHSQSLIDTVHALEAEQAQNDREMTTLHNQAQGTTIPEDRLRELLKVAANDIPALLSVVVRVEVGKDRIRVWTLLDAKPDGTFDFNADWDDPEIGLIIIPGVAPPVPRIIINGGLLCFSLPRQKKNRAE

SEQ ID NO: 9920 - protein, 536 aa, Unknown
  Description of Unknown: Integrase B9921 sequence
  cd00338,PF13408,IPR011109,IPR038109,PF07508, Coil,PS51736,IPR036162,IPR006119,G3DSA:3.40.50.1390, PTHR30461,PTHR30461:SF3,IPR025827,PS51737,PF00239, SM00857,G3DSA:1.10.10.2600,SSF53041
MEELTQEPCFVYARYSSHAQRDVSIEEQLADIEVYCRQNNLRIVEVYADRALSGTTDKRPRFQQMMKDAAHGKVRYVVVWKTDRFARNRYDSATYKYRLKRYGVRVLSAKEAIPDGPEGILLESVLEGSAEYYSANLSQNIKRGMRYNATLCKVNNGSMPYGYCKGEDGRFAIVESEAEVVREIFRKVAEGVPFVEISNDLNGRGIRTKTGGLWGRNSYHGMLKNEIYVGVYRYSDVRVEGGAPAIVDKARFLEVQQRLATKKNPQGRHRENGEYMLTGKLFCGLCGSPMVGVAGTGKHGELHHYYVCQKRRREKSCSKENVNRDWLERFVVQSTLDYVLQPEVIEWIADAAMEYQEREGNSAVLLGLRDELDANAKATANVMKAIEAGIITVTTKARLTELEAEAARLRDAITVEEAALTHIERDYLIYWIKRFCGGPIEDAAFRRKVIDTFVNSVYLWDDRIRIAFNYHGKGSTVDAELVTNAEGAAGAVDGVAVEGSYKLSGAPPMGSQTNPAATIFFVGPVFVLAMPLPEKR

SEQ ID NO: 9921 - protein, 536 aa, Unknown
  Description of Unknown: Integrase B9922 sequence
  cd00338,PF13408,IPR011109,IPR038109,PF07508, Coil,PS51736,IPR036162,IPR006119,PTHR30461, G3DSA:3.40.50.1390,PTHR30461:SF3,PS51737,IPR025827,PF00239, SM00857,G3DSA:1.10.10.2600,SSF53041
MPEALNAVIYARYSSDRQTEQSIEGQLRECYAFAKANDIAVIDTYIDRAISGKTDNRPAFQKMIEDSAKRQFQAVIVYRLDRFTRNRYDSAIYKARLKKNGVKVLSAMENLNGSPESIIMESLLEGMAEYYSVELSQKITRGMRENALKGKALGGQRVLGYKVNSDCYFEIDETTAPVVVDIFKLYSSGKTVKEICDILNARGVKTARGGAFNKNSLHTILTNKKYIGIYKTKYGEIVGGIPAIIDKELFEMVALRMEQNKKAPARAKAEINYLLSTKLFCGKCRSAMVGESGTSKTGKKYYYYACVKKKREKACDKSNVKKDWIEDLVIQRTVTDILKDDVIEKIADRLVELQKAEAAQSGTMLYLENSLAEIQVSIKNIMTAIEKGIITESTKTRLTELEDEKRNVEIEIAKESIARRIISREQIIYWISSFKDGDITSEKYRQQLIDTFVHAVFVYDDKIVITYNYSGENNTATISDLDLSSPPNQKSEPLSEGTEVRIFLVCSWYCRGMNSKRRMHDPWSIICSCVAQRSTT

SEQ ID NO: 9922 - protein, 536 aa, Unknown
  Description of Unknown: Integrase B9923 sequence
  IPR038109,IPR006119,PS51737,PF00239,G3DSA:3.40.50.1390, PTHR30461,IPR025827,SM00857,G3DSA:1.10.10.2600,SSF53041, IPR011109,PF07508,PS51736,mobidb-lite,cd00338, PF13408,Coil,IPR036162,PTHR30461:SF3
MPRKKKLQEVGGLRLVAYYRYSNGGQQTEQSIEGQRRDCEAYAKAHGYKIVHEYIDRHISGKSDSRPAFQQMISDSDSHLFDAVICWKTDRLARSRYDSIIYKTRLRRNGVKILYAAETVVDGPEGIIIEGLMESLAEYYSAELAQKLRRGQRESALKCIALGGNRSFGYDIGPDKHYCINEKQAPAVRYIFEQYAAGATAADIVRELTARGYRTSRGNPFNKNSICRIITNEMYLGVYKYADIRIEGGVPAMIDRELFNRCQTQLAFNRAHGGGKGAPRADYVLVGKLDCGLCGHAMKGASATGHTGSKHYYYTCTQHVEKKCPKTSIEKNYLEQIIVDGVAKYVLTPEKISQIVDCMMELQAKEQEPKGNPEKDALEAELAECRRKQNNILEAIEEGGSARLAARLRALEEQEAQLTFALSEINNAPTPPQFSREALTFMFEQFRREEDEVDEEYRRRILDTFVSSILLYEDRAEVKFNITDQETGDFERVILPISANKKPPEDDDTTSNSEGSTALRLVEAMGVEPMSEKSSA

SEQ ID NO: 9923 - protein, 536 aa, Unknown
  Description of Unknown: Integrase B9924 sequence
  cd00338,PF13408,IPR038109,Coil,G3DSA:3.40.50.1390, PTHR30461,IPR006119,IPR036162,PTHR30461:SF3,IPR025827, PF00239,SM00857,G3DSA:1.10.10.2600,SSF53041
MNVEHQFSPRVFVAAHLRDSGGEDQDLSIEQQEKEIRAWCIQKGYILTLVFKDEARPGSSTVAREAFQDMMRHFRSSDCQEQGVIIWKFSRFARDIDDAQFYKADLRRRGYQILSMKDQVPDGLDGRFFEAAIDWMNARFLDDLSTDVKRGLRHLVSEYGGVPGTPPRGFKREIVNIGTHRNGKPHTISRWVPDPETWERAKLAWKMREQGASYNDIRAATGNLYTTNSGIQHFFENRLYRGELHYGDQIIKDYCKPMITEETFQTVQRLNQARSTKAGIQRGENHPRRLKSDYILSGLVRCAQCGALMNGDTITSRKKNITNHYYACTDMKLKRGCSARRIPRDTIETAVLDELIGYLSDPDNIQQLQMEYAKRKSTENADLEAEKRRVTVELGTVKGGITRIVEAITAHGHNQTMLDKLTSLEKRKTELQTQLEHLNRITFSTPSDELPHVAASITKALRAADRNTKRTVLRGLVDRITAERIDKSVQGIIHFYLPQFMPMQQSHRRDSYYNLITIPFISSHSTGSHAPHPAQP

SEQ ID NO: 9924 - protein, 536 aa, Unknown
  Description of Unknown: Integrase B9925 sequence
  cd00338,PF13408,IPR011109,IPR038109, PF07508,Coil,PS51736,G3DSA:3.40.50.1390, PTHR30461,IPR036162,IPR006119,PTHR30461:SF3, IPR025827,PS51737,PF00239,SM00857,G3DSA:1.10.10.2600,SSF53041
MNKTAAIYARFSSNNQREESLDAQIRAAKEFAKNNDMKITKIYTDKAQSATTSDRPGFLEMIKDSQTELFDKVIVHKLDRFARNRYDSAVFKRKLRENEVELISVLENFDDSPESIILESVLEGMNEYYSANLAREVSKGMKENAMQCKHNGGKPPLGFDVAEDKTYKINEEDAPKIRLIFKMYAAGNGYGPILKKLKAKGYKTQTGRNFSKPSLHDILRNEKYRGVYIFNRSASKKVGKRNHHKSKPEEEIIRIEGGMPRIVSDKTWRRVQRRMDENKKGPGAHSAKEIYLLSGLIECGKCGGSMVGNRRIAGRNRTVYMSYECSTRKRTKECDMKSINKEHVEEVVLDDMVEAMFSAANIDELAEDVYNFAKQENKEINADIKRFEKQLKNINSKIDNLTEAVAAGLFQPSMKDKLNKLEDEKADLELMLNEAKLQAEKNLPSKSKIKAELKSYRNVKNESLETQRKAVKTFVKSVIIYENNIKVNYIVDLTGGGGGSRTHVLNGSPSSFYECSSAFGLTVSTPLNWITYCQPI

SEQ ID NO: 9925 - protein, 536 aa, Unknown
  Description of Unknown: Integrase B9926 sequence
  cd00338,PF13408,IPR011109,IPR038109,PF07508, Coil,PS51736,G3DSA:3.40.50.1390,PTHR30461,IPR006119, IPR036162,PTHR30461:SF3,PS51737,IPR025827,PF00239, SM00857,G3DSA:1.10.10.2600,SSF53041
MARKKSQEKAAATAAIYARYSSTAQNDASIEQQIAECEQYAQANNLTIVARFEDRAISGRSDKRPGFQKCLRAADRGEFQVLLAYKSNRISRNMQSALNYEQRLANAGVRVVYCKESFSDDATGRFMLRMMMNMNQFYSENMSEDIRRGMVDSVSKGKVVGSVPYGYRKGADGKYEIDEPAAAVVHEIFARYLKGETIADIRRDFNERGLLTRQKRPWAKNSFHAILVNEKYTGSYTFGEVRIEDAIPPIIDKGVFAMVQKKLDWEKVARKRHRGNVDYMLTGKLYCGYCFAPMVGMSGRSHVGREHFYYACQTRRTKRTCDKENVRKDDIEQKVVEIVQNCILDDETVMWMADALIEASKRFKEQSNLTQLESHLRDIKKQIGNIVRAIEMGVAGDEVKERMDELQEEKRNYEGLIAIEKLAVKDYDKGTVLGYFESIKRGDPTDKDFQKMVIRDFIKAVYVYDDHLRIVVDFTGENNSIDVPFGGTSAGESSADGVRLMTDKVYHISHRRTLEQRNSIEFTAQGFVIIWYFSEK

SEQ ID NO: 9926 - protein, 536 aa, Unknown
  Description of Unknown: Integrase B9927 sequence
  cd00338,IPR011109,IPR038109,PF07508,Coil, G3DSA:3.40.50.1390,PTHR30461,IPR006119,IPR036162,PTHR30461:SF3, PS51737,PF00239,SM00857,G3DSA:1.10.10.2600,SSF53041
MKTAVVYARVSEARNSEDGLPLESQVEQCLKKAESLEASVINTYVDNGISGTTDARPAFKEAFLFCELKRPDYFITWSPERFARNKMHAALYKEKLCEFGVKLVYVAMDIDTGTLGGWFLDGILDVVNQYQALKVSVDVRRSMMKVARDGFWTGGRPPFGYRVVPAGNGTSRKKMVPDEAEADVVREIFRLKTSDHLGCRSIATMLNEKGLLNRGRPWCKSTISYILNHRAMIGEVAYGKRETTTGKRKPLDECIIIKSHEPIISQELWHQAHAALQVDRANTDTSRATSRFLFTGLMMCSCGSSMQTESASGRNRRYWYYNCRAAAERKLHAPRRIAAKDFDHWLLNSICDQLITERTLDGFIQEVEEAAAAWVSDNTRRRNIVLRQISAIEHKINNLYAILEETGAGTPNILDLTPRLRSHRHALGALEDQLKRIDAELPPAIDVQKLNPDALRKMVMKEFASSSVRKIRAFLKTFISGVTVLDDEVRIQYNAAALLGGGGGSPDVQHGPPDTLSKNRLKCLILQLPDWARKAA

SEQ ID NO: 9927 - protein, 535 aa, Unknown
  Description of Unknown: Integrase B9928 sequence
  IPR038109,PS00397,IPR006119,PS51737,PF00239,G3DSA:3.40.50.1390, PTHR30461,IPR025827,SM00857,G3DSA:1.10.10.2600,SSF53041 ,IPR011109,PF07508,PS51736,mobidb-lite,IPR006118 ,cd00338,PF13408,Coil,IPR036162,PTHR30461:SF3
MGSVIVLLVMIYLRVSTRDQERKGYSLPEQSEACRMKAREIASETEKATGKQVDLQIVEFTDTFGGDVAERPVLEEVRDFVRARRPAWFVCMDPDRFSRELTLQLVVTEEIEKAGTRLAFVLHNYEKTAEGKLFYQMRGAISEFEKAKILERTSRGKRGKVKAGRRPNGAEPYGYRHNKETDQLELYEPEAQWVRQIFAWIAEENITSYEVALRLNSLGVRTKRNRRWRGSTVRDIIRNTSYIGQMRCNRWDLRGLSSVRRLPKGKRPNLTAKFRPPSDWKTVPVPALVDPDLFALVGSRIRESTKKGGRRHAGLLSMLVRCGVCGGHMAYSRNNQTGRYYIKCNRRYADLLNYIDRTRCPNRHHHAAVIEAEVWQQIAKWLTDPRLLEVYLQELHSGPDLEGQVGALTKERNLVAGELADRRREQATVISQLSKGNIRESEADALLAGLRPQVDYLEQRLATLDQQVRSLQESIGQAASAAARARELSEAIAAEQADVHRLLESMDQQRRRELVLQIVREVIIKGDGTWTILPV

SEQ ID NO: 9928 - protein, 535 aa, Unknown
  Description of Unknown: Integrase B9929 sequence
  cd00338,PF13408,IPR011109,IPR038109,PF07508, Coil,PS51736,IPR036162,PTHR30461,IPR006119, G3DSA:3.40.50.1390,PTHR30461:SF3,PS51737,IPR025827,PF00239, SM00857,G3DSA:1.10.10.2600,SSF53041
MNAVIYARYSSHGQTEQSIEGQLHDNYAWAEQQGITVIGEYIDRALTGTKDQRPDFQRMIADAAKRQFELVIVWKLDRFARNRYDSAIYKARLKKYGVKVLSVKENITDSPEGIILEGLLESMAEYYSANLAQNVLRGKRETSAKGNWNGGRVPLGYKAVDGKLVADDKTAPFVQYLFHRYAEGASKADVIRELNEKGLRNRNGKPITYSSIRTVISNTLYIGQAMYDGEVVEGLAERLIDDDLYYKVQAQIQANARAPGTYKARVDYLLRGKAFCGHCGFPMVGQPGQSQNGVQFYYYACSGRKRKKTVCKKKYENKDFIEKYVVEQTVQYVLTPERIGFISKAVVEEYRKEFSKSQVSDYQKSLDQISGELERLVDALIDSPKPARASIYARMESLEAQKADIETCLARLKVASEIQLTESEVSSWMKQFCSGDPSNEDFRRRIIDVFINSIYLYDNRIVIFYNIRGGKQVSYMDLVNSSELPADNECSDLVRFAPAKSNKSEPYFVFVNGVIGCVFIRKKDELPKSKRKPLC

SEQ ID NO: 9929 - protein, 535 aa, Unknown
  Description of Unknown: Integrase B9930 sequence
  cd00338,PF13408,IPR011109,IPR038109,PF07508, Coil,PS51736,IPR036162,IPR006119,G3DSA:3.40.50.1390, PTHR30461,PTHR30461:SF3,IPR025827,PS51737,PF00239, SM00857,G3DSA:1.10.10.2600,SSF53041
MNDDKLTTGYIYARYSPGPQQTEASIEGQVRECKEYADRNGIRIINVYSDSKQTGRNDNRAGFQRMLRDCKRGGVSVILVWKIDRFGRNRAEIAQNRALLKLSGVKVISAMEHIPETPEGIILESVLEGMAEYYSANLAENVRRGLKENALQCKSNGAGQSIGYIVGDDRHYAIEPNEAAIVKRIFTEYDEGAKIADIWRGLMADNVKTKRGKDFTQYGIARVLSNRAYIGEYRYADIVTPGGMPRIIDDDLFNRVQERRKAGGRAPRRRGISSVVDFMLTGKCFCGCCKGTMRGTSGTSKSGRKKYYYTCHNKAYKHTGCTKQNVCKEWLEREVTRITAEYILTDSVIDMIADNVVKVQAAELADKTMLHYYQAQLKETQAALNNLLKAIEAGLVTSTTKARLFELEERKAALEIDIEKEKIQHPPLDKRQVMFFLQRFKGGDVDDQTYQQQIIDLFVNKVILYDDKLIITYNVSGSNNEVSAEIVENAAFSAEGDVFDLMHVKSTICRKVEHPTIILFFVGGLFGLSVKTREA

SEQ ID NO: 9930 - protein, 535 aa, Unknown
  Description of Unknown: Integrase B9931 sequence
  cd00338,PF13408,IPR011109,IPR038109,PF07508, Coil,PS51736,G3DSA:3.40.50.1390,IPR006119,PTHR30461, IPR036162,PTHR30461:SF3,IPR025827,PS51737,PF00239, SM00857,G3DSA:1.10.10.2600,SSF53041
MKQSTQPTTNAVIYARYSSHSQTEQSIDGQLHDAYEFAQREGYTIVGEYIDRAQSGTKDNRHDFQRMIADAPKKQFQAVIVWKLDRFARNRYDSAIYKAKLKKFGIRVVSVMERIQDNPEGIILEGMLESMAEYYSANLAVNIRRGQRESIAKGRFCGGAVPYGYKNADGHLIADDKTAPIIREVFSRYAAGDSMKDIIDDLKKRGVKSSSGGELTYTTFSRALLNRAYIGEYAYNGEVVQGCADALIDADTFGKVQEKVAARRRAPAAGKAKVEYLLQGKCFCGHCGGHMIGESGRGRHGATYNYYSCRNRKKNHNCDKKNEKKDFVEWYVVEQTLEYILTPDRMDKVAAAVVAEYNKEFGDGPIKEKERQIKKIGKELDNLVDSLSEAPKAARPRIYARMEELETQKADIEVDVAKLKIAQGIRFTEAEVKAWLKQFCKGDLLDEEFRRRIIDVFINSVYLYDRRVIIFYNIKGGKQVSYIDVAEADIEGSGGEGVSDLIANAPPNASISEPRFIFVNGVFGIVLERQEEQGE

SEQ ID NO: 9931 - protein, 535 aa, Unknown
  Description of Unknown: Integrase B9932 sequence
  cd00338,IPR011109,PF07508,Coil,IPR036162, IPR006119,G3DSA:3.40.50.1390,PTHR30461,PS51737,PF00239, SM00857,SSF53041
MPLAPEYLHLVFPDQVFNALLYGRNSRDPKKKGRSVEDQLADGRALCDRFGWPVLEEFKDTGISASRHGRKTRDDFEALLDTIETGVARIVVAFEASRYYRDLGAYVELRNACHEANVLLCYNGTVYDLSKRDDRRATALDAVNAEDEAEGTRDRIIRTARRTAEAGGAWGHLVFGYRRKYDENTGELIGQFEDEIQGPIVVEQLKRVDGGGSLHSVIKSLKNNPDAKRADGSEWTDNNVKYMLLNRVYLGERLHHGKAVKAKWKPLKGLETPEGRALFRRVTQILTDPARGGQFDSRAKHLLTGIPLCGSCGDDTPLKSNQRGAAAKKLNIYTCSEKRDVSVSERMLDAYVEEALLSWLRNKDQARAALLPDEAQVADDVRRAQSLLETYRDEMEEARRLNRTRNEQGRPLLSLASLSQKELELLPQIEELEGRLQKATGVPLLIQQLLTAPDPEEVWNGGGGAPGLSLEQKREAIRQIVTVRVYKATTFGRKFNPERVKLSFVGADGFRVSRTRARGTARGRAGARAAARGTE

SEQ ID NO: 9932 - protein, 535 aa, Unknown
  Description of Unknown: Integrase B9933 sequence
  cd00338,PF13408,IPR011109,IPR038109, PF07508,Coil,PS51736,G3DSA:3.40.50.1390, PTHR30461,IPR006119,IPR036162,PTHR30461:SF3, PS51737,IPR025827,PF00239,SM00857,G3DSA:1.10.10.2600,SSF53041
MQKNNKSIGNRCVIYARYSCSNQTEQSIEGQMHDCEQFAARNNLQIVNSYIDRATTATTDKRPQFLKMIADSKQCVFDVVLVWKLDRFSRNRYDSAMYKKKLKDNGVRVMSAMENITDSPEGVLMESVLEGFAEYFSKDLSQKVKRGMRETAAKHKITNRIPFGYCKSEEDTYIPDPHTANAVRKVFDMYITGFRKSDIADWLNSNGYKTSYGNQFTLTAITPLIKNTRYIGKYYYADNEYTDETQRIVTDDIFYKAQQKAIANQHGGSCKAIERYLLSNKLYCGYCHNKMIGECGKNQNGLAYHYYTCVGRKRKHICNRKNIKKKDIEQYVINAISCLLNDEYAINKIIETAINYQQNDVEHINEIKDIESTIKEIERKISNILSAIEAGIFTDSTKNRLQELENQKTRLTQELNYKNQSSTKIPRTTLKQILKNLDLSKDATNPEKQNIIDLLIHRIYLWQDKILIVFNQSNLCDNEISVDDTDVNTIIKTLSEPNASSSDSVEYGTPYLLISEFLQLYMYKNIAYQIFTIQQ

SEQ ID NO: 9933 - protein, 535 aa, Unknown
  Description of Unknown: Integrase B9934 sequence
  cd00338,PF13408,IPR011109,IPR038109,PF07508, Coil,PS51736,G3DSA:3.40.50.1390,IPR006119,IPR036162, PTHR30461,PTHR30461:SF3,PS51737,IPR025827,PF00239, SM00857,G3DSA:1.10.10.2600,SSF53041
MMDADMQNCVIYARYSSHAQKDTSIEDQVRDIEVYCKLNNLNIVKVYADRHLTGTSDKRPQFQQMMQDAARGRWQYVVVWKTDRFARNRYDSATYKYRLKRHGVRVLSAKESIPDGPEGILLEAVLEGSAEYYSANLAQNIKRGMRANALQCKVNNGSLPYGYCKGPDGRYAIVPAEAEIVKEIYRKAAGGALFVDICRDLNARRILTKRGTPWRKSSFEKILKNEIYRGVYHYADIRIEGGVPRIIDDALFAEVARKMKSKANAHRRRRKDSEYMLTGKLFCGECGSTMIGVSGTSRNGDTHYYYSCSKRRTEHSCNKRSVAREQIEQLVVNAALDAVLQDDVIAWIADQVMRYQDREGKSAQLEALREELKAKEKAISNMLDAIEAGIITASTKQRLHDLEEQRRQLKSDLAVEEAATTHIERDFIVYWLERFRDGDRNDKDFRRKVIDTFVSAVYLYDDHVRIAFNYTSTQNIVEKEIIDKKFVDGAEDAAGANGSYKLAYAPPNATHTNHPTVIFFLGSVFVLSMSIPTEF

SEQ ID NO: 9934 - protein, 535 aa, Unknown
  Description of Unknown: Integrase B9935 sequence
  cd00338,PF13408,IPR011109,IPR038109,PF07508, Coil,PS51736,IPR036162,IPR006119,PTHR30461, G3DSA:3.40.50.1390,PTHR30461:SF3,PS51737,IPR025827,PF00239, SM00857,G3DSA:1.10.10.2600,SSF53041
MEVLKHPNYPWAAEKINAVIYARYSSHSQGEQSIEGQLEKAYAYAAAKGYRVVHEYVDRAQSGRTDKRDEFQQMLKDTAKKQFQVIILWKVDRFGRNREEIALNKIRCKKNGVRVEYVAENIPDSPEGVILESVLEGIAEYYSLQLSQNVRRGQAISVQKCQSVGGVRPLGYLTDKDKKYIIDPKNAPTVKLIFSMYAEGSTVTEIINHLNSQGLTTVKGKPFSKNSLYSILNNEKYTGVYIHNGTRTEGGMPQIIEPELFHKVQELMKINKRAPSHKWSHADYILTDKLFCGKCGTAMVGECGTSKSGTTYNYYICSKRKRFKACDKKAVRQDWIEGIVLREIKKILANDKLLEFIADNTYQYYMKQNAAEEELRIIRDKLKDVELGIGNIVKAIEAGMFNPALSKRMNELEEQREALLQATAEIEITQVFKLTKEHILFFLHEFKKYDFENVECQKRLVATFVNAIYLYDDKIILTFNYSGDSRTVTLAEIDAVTEGEVFGCCAPWSAMTNTYEHPIVWFSHVFAITVKIPQE

SEQ ID NO: 9935 - protein, 535 aa, Unknown
  Description of Unknown: Integrase B9936 sequence
  cd00338,PF13408,IPR011109,IPR038109,PF07508, Coil,PS51736,IPR036162,IPR006119,PTHR30461, G3DSA:3.40.50.1390,IPR025827,PS51737,PF00239,SM00857, G3DSA:1.10.10.2600,SSF53041
MNRNRTNLNPNGLYYAYLRKSRADRDAEARGEGETLARHQKLLTDLAASLGVTISRFYKEIVSGENIKDRPVVQELLRDISTGICDGVFVVEVERLARGDTSDQGTIANYFKLSDTLIITPLKIYDPNDEYDEEYFEFGLFMSRREYKTINRRIQRGRRASVEEGKWIASTAPYGYERVRIPNDKGYTLKIVPEEAEVVRLIFDLYTTGEQQPDGSYQRLGHYRISKKLDSMGVKPRNSARWSPSSIKDMLRNPTYIGKVTFGKEQDKKIIENGVPKTVRVKNADYTLYNGLHPAIISEEQFYLVQQYVDSRPIFPVVSNKELKNPLSGLIRCTQCGSLLTRAASNTKTNYPVLKCSNRDCSTVSAPLYLIEEKVISSIAEWFEEYKLSWTDDQIISNQIQVTENALASYQAELATLNEQKNKAYDFLEQGIYTPEVFSSRISLLDEKMSDVKLEISRLEFSLKLDRKKEYETNTFLPRVEKLLNSYWDTEDSMVRNHLLQDVVLKIDYTKNEANKKFQRDNANFKLKIYPKLPV

SEQ ID NO: 9936 - protein, 535 aa, Unknown
  Description of Unknown: Integrase B9937 sequence
  cd00338,PF13408,IPR011109,IPR038109,PF07508, Coil,PS51736,IPR036162,G3DSA:3.40.50.1390,IPR006119, PTHR30461,PTHR30461:SF3,PS51737,IPR025827,PF00239, SM00857,G3DSA:1.10.10.2600,SSF53041
MARKKAEKTDGNICVVYARYSSHAQNDASIEQQVAECREYAAAHDLKISDIYADRAISGRSDRRPEFQKMIRHAEAGRFQVVLTYKSNRIARNMLDALRYEERLEKAGVKVVYCKENFGDNAAGRLALRMMMSLNEFYSENMAEDIRRGLIDGAKQGKVMGCIPLGYKKGEDGCFAIDEPKAEIVREIFRRVSENETLASIADDLNARGIQTAYKKPWGKNSFSTLLSNERYIGVYIFAEVRIEGGMPAIIDRALFEDVQEKVRRRKEVAGRRRDYAEYLLTGKAFCAKCGAPMVGISGTSRNGTPHYYYVCKTRREEHTCKKLNVRKEAAEREIAFRLKNTILQPNVVEWMIDNVMRFQEEARKQSDLASYQNRLVEVKRSLDNLVKAVEAGVFSQSTKARLDELEAEQRELQGMIAVEQAKIKTVTRDQIEYYIDSFRDGDVDDPAYQKRLFKAFLVKVFLDDDKFRIVYNYADGLDAMEFPLTLEEIESAYVTAECSYKPCSGPPQPAETNTTWSISMIKGVFVLTVYCSIR

SEQ ID NO: 9937 - protein, 535 aa, Unknown
  Description of Unknown: Integrase B9938 sequence
  cd00338,PF13408,IPR011109,IPR038109,PF07508, Coil,PS51736,IPR036162,IPR006119,G3DSA:3.40.50.1390, PTHR30461,PTHR30461:SF3,PS51737,IPR025827,PF00239, SM00857,G3DSA:1.10.10.2600,SSF53041
MIEKVKSPIKYFLYARKSSESEDKQVASVPAQIKELKDLAKQRNLNVLDVLTEEKSAKAPGRPVFNQMMEDIHQGKAQGIICWKLDRLARNPVDGGQIGWLLQQSIIKHIHTYQREYFPTDNVLMMNLEFGMANQFILDLSVNTKRGLRNKAEEGWLPNKPPLGYLNNKYNLPELPPIYNDPERFSLMKQLWDILLKRQCSINTLYQKAIEIGLVTDKGKPIARSKFYLLFKNPFYYGCFYWKDRLYSGKHNPMINKAEYDLAQVIISGNKPSFYHNHVFAFTGMIKCGECGAGITAENKTKHQKNGNVHHYIYYHCTKKINPNCSQKTIRDTELERQIIDILDKIEIPSMFHQWAIKYLKEEQSKETVDREEILCSQQKRLDVCKRKLNSLFEMRINDEMDASEYMQRKEKLAEEKQRFEQLIADNNHRFDTWLDNAEKLFSFAETAKKRFESGNLVVKREILACLGSNLILLDRKLSIQLQEPLSIFTKYSPELKVLHNRLEPLQDKSEQEVMEVISTGNEIWGGGLWSLRRI

SEQ ID NO: 9938 - protein, 535 aa, Unknown
  Description of Unknown: Integrase B9939 sequence
  cd00338,PF13408,IPR011109,IPR038109,PF07508, Coil,PS51736,IPR036162,PTHR30461,IPR006119, G3DSA:3.40.50.1390,IPR025827,PS51737,PF00239,SM00857, G3DSA:1.10.10.2600,SSF53041
VVRGVIYARYSSDNQREESIDAQVYEIKEYARANNIYIVKIYTDEARSATTDNRPGFLKMIDDANKGIFEVILIHKLDRFARNRYDSAFYKRELKTAGVKLISITEKLDDSPESIILESLLEGMAEYYSKNLAREAMKGLKENARSCKHNGGRPPLGLDVEPTTKQYIISTNTKEVESVKLIFDLYDQGLGYGTLIKELHLKGYTTKLGGKFSKNSLYELLRNEKYIGTYLYNRSASKSDGKRNNHKSKSEEEIIKVENAFPAIIDKDLFERVQEKMDTRKHAKARNKAKVNYLLQGLVYCNECEAAMVGNSGSYKTKTETVRYSYYECNKRNRQKNCNNPRIRKEILESIVLDKLYQEIFAPERVSVLVQKINEYNQKTATERNAELELLETELKETKKQIDNLVMAVANGAPFASFSDKLNELENKKAMLETRLEESRALALRSLITEDMIINYLNQHLQAVEDKDIDACKKFIGNYVEKVVVSLDFIDIHFYLKFLDIDGGGGAYRSISKIHKRDINVKPVGATPTGLLFLQ

SEQ ID NO: 9939 - protein, 535 aa, Unknown
  Description of Unknown: Integrase B9940 sequence
  cd00338,PF13408,IPR011109,IPR038109,PF07508, Coil,PS51736,G3DSA:3.40.50.1390,PTHR30461,IPR006119, IPR036162,IPR025827,PS51737,PF00239,SM00857, G3DSA:1.10.10.2600,SSF53041
VLRGVIYARYSSDNQREESIDAQVYEIKEYARANNISIVKIYTDEARSATTDNRPGFLKMIDDANKGIFEVILIHKLDRFARNRYDSAFYKRELKTAGVKLISITEKLDDSPESVILESLLEGMAEYYSKNLAREAMKGLKENARSCKHNGGRPPLGLDVDPATKQYIISANTKEVEAVKLIFELYDQGLGYGTLIKELHLRGYTTKLGGKFAKNSLYELLRNEKYIGTYLYNRSASKSDGKRNNHKSKSEEEIIKVENAFPAIIDKDLFERVQEKMDTRKHAKARNKAKVNYLLQGLVYCNECEAAMVGNSGSYKTKTETVRYSYYECNKRNRQKDCSNPRIRKEILENIVLDKLYQEIFVPERVSILVQKINEYNQKTTTERNAELELLETELKETKKQIDNLVMAVANGAPFASFSDKLNELENKKAMLETRLEESRTLALRSLITEDMIINYLNQHRQAVEDKDIDACKKFIGNYVEKVVVSTDFIDIHFYLKFLDIDGGGGAYRSISKINKKDINAKPVGAIPTGLLFLQ

SEQ ID NO: 9940 - protein, 534 aa, Unknown
  Description of Unknown: Integrase B9941 sequence
  cd00338,IPR011109,IPR038109,PF07508,Coil, PS51736,G3DSA:3.40.50.1390,IPR036162,IPR006119,PTHR30461, PS51737,PF00239,SM00857,G3DSA:1.10.10.2600,SSF53041
MYTNKIEGLSVDGIIIYLRKSRSDDPMLSVEEVLERHETRLQEWAENNFGEKIPEENILREVVSGETINDRPEMLRLLSMIESPKIKAILIIEPQRLSRGDLEDAGRIIKLFRYTNTLICTPPKNYDLRDEYDRDFFERELKRGNEFLEYQKRIMNNGRLLSVSQGNYLGSIPPYGFDKITIKEGKQTCYTLTENASEADAVRLMFDLYVNQNFGYSKIAARLDELNFKPRNSDLWSPPAIKEMLSNVHYIGKVKWNWRKTQKIVEDGEVIATRPKNKISEYLIYEGKHEGLIPTELFEAAQAKMGRNIPVKNKAKVRNPLSGLVYCHCGRAMSFRTYKNKGVERSAPRLLCDNQAHCKTGSCRFEDLLDRVILALKESIADFEIRLNNDDGDSLKLHLKMVANLEKKLDELNKLEISQWEKYSLESMPKHVFDALNEKVLKEKTEVQEALCKAKDSIPDPVDYEEKRKRFSDALEALQDPEIPARTKNKLLKACIDKIIYKREKPQRVKGKGVKTNGTLWNEPEIELDIYLKV

SEQ ID NO: 9941 - protein, 534 aa, Unknown
  Description of Unknown: Integrase B9942 sequence
  cd00338,PF13408,IPR011109,IPR038109, PF07508,Coil,PS51736,IPR036162, IPR006119,PTHR30461,G3DSA:3.40.50.1390,PTHR30461:SF3, IPR025827,PS51737,PF00239,SM00857,G3DSA:1.10.10.2600,SSF53041
MKKIKNQVQRAVIYARYSCSNQTEQSIEGQLADCEKFAEKYNYYIVDTYIDRAMSATTDRRPQFQQMIADSATGGFDVIIVWKLDRFTRNRYDSAVNKQKLNSNGVKVVSVMEHIEDTPEGALMESVLEGFAEYFSKDLSQKVSRGMRETALKFKATGLIPYGYKKTSDNICVPDEHTAPVVKKIFEMYADGVINKDICDWLNSHGYRTSNGNLFRNQYLRKILNRRRYTGSYTYGDLELHDENQRIISDELFDRVQIQLQAKRRTGRIAREQYILVGKLFCGYCRNPIRGESGRNHQNRIYTYYKCSVNKTGGKCPKTTVHRDIIENNTIKFILNNFLNDEIINSVVDTIQASETAESNSAELITLRTQIEDTDRKINNLLTAIENGVFTPSTKQRLNDLENVKEKLKYELIVKQSEKNNFNATAFKRFLKNIDVDDFKTTEQRQKLINLVLYREYLWNDKVLYIFNLTPSKPNDSVDVDSYVDAVLAGSTSPTDGVPQVAISELLFGYFFVMGFFPFHKHFALSFFALYIYR

SEQ ID NO: 9942 - protein, 534 aa, Unknown
  Description of Unknown: Integrase B9943 sequence
  cd00338,PF13408,IPR011109,PF07508,Coil, PS51736,IPR036162,IPR006119,PTHR30461,G3DSA:3.40.50.1390, PTHR30461:SF3,IPR025827,PS51737,PF00239,SM00857, SSF53041
VVRLSRTDAASTSIERQREEIERWAAIARHDIVAWAQDEDVSGDVAPWRRPGLGQYLPDSLGHRDASASDVARSTASSRAGEWDALVVWKLDRLSRRAADMLAVIDWCRANGRQVWETSGTEYTGPAGTLIVSVLGGLAQGERERMVERARSSFVKLSKSGRWRGGQVPWGYRVETDSAGHPRLGVDEEQAVVIRSVVARVLAGESINSIAADLNRRGVPTVSGRGEWRMGNLQRAVKSERLLGYMVREDKRAGEGRREYVVRGDDGMPVQRAEPILTRAELSAVRAKLADSRKGAGNTAGARPDRAMLLRVLWCWECQNEHEIDEPMYLSMGRSRRYYRCGSRSRTGAAQCSNGSIPAEAVEERVSALVLGMWGDAPVTERVWEAGTDATERIAELTEALRNLRDDRAAGLYSSASAVDEYRATYGALEAQRTHLEALPQVPSGWRAVDTGRTLADRWQECATDAERNALLRSMGVRFYVDRGTGLPGQDAGARLRIGVPLVEDGWADGEARPVADLVLQGAGEIGRRAGEPR

SEQ ID NO: 9943 - protein, 534 aa, Unknown
  Description of Unknown: Integrase B9944 sequence
  IPR038109,IPR006119,PS51737,PF00239,cd03768,G3DSA:3.40.50.1390 ,PTHR30461,IPR025827,SM00857,G3DSA:1.10.10.2600, SSF53041,IPR011109,PF07508,PS51736,mobidb-lite, PF13408,Coil,IPR036162,PTHR30461:SF3
MRRRKPAPVAAAHLEAKRCAIYTRKSTTAGLDQAFTSLDAQRESGISYIQRQPGWTVLEERYDDGGFTGANIDRPAFQRLLHDVEARKIDCVVVYKVDRLSRSLMDFAAVMARFNTANVAFVSVTQNFSTADSMGRLTLNMLMSFAQFEREMISERTRDKVAASRRKGKWTGGTVPLGYNVETGRLVVNELEAVVVQEIFALYLERRSTLEVARILNSSDRRTKRHRSIHGNPREPHDWTTNDVARVLKHPIYAGYMSSGGTLFEGEHSAIVERVVFARVQAALREGTPNRSVGVRNPAYLLRGVLRCAGCGAAFTTASTISHGVTYRYYRCGTRDKQGAQACGSQPLPAEAIEQLVIQRVRAATADGTLAGDVAASVRRRIQARREACQIEREHLPARIASLSQEIRRLVDVLATVEGGARQQVQSRLQELEDQSAHSEADLVASTRQLAELDAVEVDVTWVAQSLADFDRVWDRLTVENRGRLVRAVIHRVEVDEPGNTVRVVLADLGANLADPSTPTPPERVPLAPQSPSA

SEQ ID NO: 9944 - protein, 534 aa, Unknown
  Description of Unknown: Integrase B9945 sequence
  cd00338,PF13408,IPR011109,Coil,PS51736, IPR036162,PTHR30461,IPR006119,G3DSA:3.40.50.1390,PTHR30461:SF3, IPR025827,PS51737,PF00239,SM00857,SSF53041
MNRAAFAIHHNKIKTAPAPTETVYISEDMRLKSTNIVSSSGQSHKRNICFALAVIFVPILNIFYKRRVMQMPEKILRCAIYIRVSTFEQSVHGKSLQAQKECLEQYATDNNMSIVGVYADEGKTARKELKKRKAIHALVEDVKRDKIDVIIFWRLDRWFRNLSDFYKVQDVLDEHGVRWISVSEPGINMETRDGRLQLNVVLSIGQNEVDTTSERIKFVNEASIRQRKLIFGDANMPFGYKTGVVDGKKCMVKDPETEHMVEDFFNYFRIHNSKKGAVRYMQEVYGIDFSYGMLRTMLSSEFYKGTYRGYPYCPAYLSEKEWNEMQTISKRNIKSTPSGRVYLFTGLMRCPVCGQKLVGTGCSSIINRKTGEKRTYCYYRCNRALKDHICTYRHRVSQNLIEKYLLENLEREYEKYKVRSNKVSEELKKEKKAKDPEKLRKEMERLNLLFQKGRISFDYYDKEYQRLEREYSASAAFCEEEETRNLHYVEELLKTDFRQMYDSLSPENKRSFWRSTIQEIYLNDDNTIKAVDFL

SEQ ID NO: 9945 - protein, 534 aa, Unknown
  Description of Unknown: Integrase B9946 sequence
  cd00338,PF13408,IPR011109,IPR038109, PF07508,Coil,PS51736,IPR036162, IPR006119,PTHR30461,G3DSA:3.40.50.1390,PTHR30461:SF3, IPR025827,PS51737,PF00239,SM00857,G3DSA:1.10.10.2600,SSF53041
MKTAVIYARYSSDKQTEQSIEGQLYDCYNYAKQHGITVVREYIDRAMTGKNDDRPAFQQMLHESAMHKWDSVIVWKLDRFARNTIDSAVNRQILAKNGVKLLSVMESFGDDASGQMMTHIIEAINEYYSADLREKTIRGMRQSAMKAQTTGHIPLGYKVVDKKLVIDDETRIIPETVFRMYAEGERLTDIADHLNAQGYRNRRGRPFTTNSFYNMLANEKYIGIYKYDDIVIEGGIPQMIPNEVFEAVREKLITNRKRAAKNTAKADYYLSGKLYCGHCGEPMSGLSGTGRNGVKHYYYRCNGVQKKSGCHKKLENKYLIEDEVCRAARSAFEQMDKAETAETIYQMYLQTVRNEYAPAELEKELTECTKQAENVVNAIAQTGGNQLLFDKVRELEERKEQLGSALRLSQAMTDNVPSVEQITVFIDDILATDINTTEGKKAIADIMISKVYVYDDKLTAIFKDKDGKSVDIPLSDVSDSSSADCAPSALGSQSSFNLNLLKGKESNVCTYLLLLNRSSFFIDLLRINNFLCEK

SEQ ID NO: 9946 - protein, 534 aa, Unknown
  Description of Unknown: Integrase B9947 sequence
  cd00338,PF13408,IPR038109,G3DSA:3.40.50.1390,IPR006119, IPR036162,PTHR30461,mobidb-lite,PTHR30461:SF3,IPR025827, PF00239,SM00857,G3DSA:1.10.10.2600,SSF53041
MNLLPPPSTLPPGSTVWAYLRDSGGESQDRSIGRQLEAIQAYCKGNQLQLVHIFKDIAKSGTTTAGRDDFQRMIKLSNQGENLPQGLLLWNYARFARDLDDSTYYKSLLRRNGLIIHSLTDPIPEGTYARFVETLIDISNEERSRQTGIDAKDGLRSIVSQGAVPGTPPRGFKRSPVKTINTRTGEERTNHKWVPEKKLVPKVRKAFKMRATGSTLFEIHKTTRLYSSLNSYRTFFTNKIYIGILEFGDLVVERYCDPLVDMDTWNAVQKRVEEHSQKRFGDQHPRRVNSIYLLSGIIKCARCGSPMNGNTVTRPALGGKDEAYRCSRAKRRRDCDAGRISKRKLEDLVLATLSGFILIPENLSAVQEIALHSQSKGESERAEKKSTLGGERTELSRQIANITRAIADTGHSPALLDALKAKEGLRAQVKAELDELDIPIQPVPNLSQPQIETVSKILLEHLNNSPIETRRQILRSIVHSVVAERDGKIIRGMITYYYPPPFDLAPVGALPMESTPVGASLYRQTFSYPLSSKI

SEQ ID NO: 9947 - protein, 534 aa, Unknown
  Description of Unknown: Integrase B9948 sequence
  cd00338,PF13408,IPR011109,IPR038109, PF07508,Coil,PS51736,IPR036162, IPR006119,PTHR30461,G3DSA:3.40.50.1390,IPR025827, PS51737,PF00239,SM00857,G3DSA:1.10.10.2600,SSF53041
MKSILICRTSTSRQEIDNQIKEIKEFAIADGNKEEDLILLAKHGASAIKIDAAYQENMERVYREIEAGGIECVYAWALDRIGRNEVVMMQFKEFLIKHRVQLKIKNPALVLLNDDGTVNSGMEIAFTLYITLAKQEMEQKKARFERTRKAKLEKQQHTGGRVLFGYTVDDNDYMMPDPEKAPLVQDAFAKYATGDYSIESLTEKMKYCGWPDCNAENLFRILTNRAYIGEHKVFKCPAIIDNDTWDKCRQVAEKKTTRIGNTKQYWLGAKIITCPECGHHYVVWKTSDKTATYRCVTHGKNKGCSNDVTINAKNLDALLYEVALPLEMERQKEQLNVNKEVLFAELNDLHNEIDNRQSEYDKRVKKAVDRINDMYEVGAIDKDEWKERRAKAVAKADDLKEKIAKLRIEADRKQRQIDSTSVGGRSEAIFGYNFAMSAEEVSQMVHRNIIDVVLKRIGERETLVTLQTTAGEQKFIYTSKTRSNNWQEWHGNGKHLPFVVAKMEKSGEYITFSTAASKHTLTLSDKDIAAFVTK

SEQ ID NO: 9948 - protein, 534 aa, Unknown
  Description of Unknown: Integrase B9949 sequence
  cd00338,IPR011109,IPR038109,PF07508,Coil, PS51736,G3DSA:3.40.50.1390,IPR036162,IPR006119,PTHR30461, PS51737,PF00239,SM00857,G3DSA:1.10.10.2600,SSF53041
MTTTKKKQGAIYGRKSRENEATLESQINACIQWAEENDIEVEIFAEEGTQSSEDWNRPKLQEMLKKVENLEFNYVIVSESSRISRTEDFSIFKKLMKETGTILLEADTRQSTNFLDRNDAVKSGIQQVFNEYELDLAKTRLKRGTVQSAKKGNYQGKKPPIGYSYDHETKRLKKNSDAPIIREMFEMYMAGMSTVEIEHEFTTKNVLAYQKIKGELVPITWGKSTIARSLKNILYVGHTVFGKTKVQRIKGKRVQVDVPEEEQILIENTHEGIITQEEWDKVQQIMNKKRTIPPALKHSKHTFSGLVRCAKCGAVHTFEKATSITGKFRISSCKTRVYDEDFIQYKMCGNSGGELESLEVLFYASLKETKAQIENYIDLIKNIQNSEAKAGKSLETQKGIKFQQIQQMAKKRKKIQAFLEEDFYEGEEEIEKIREVKELANRIKALKDEMEQLEEKKGESELEHVERVLNNINKFFEGTKNSASGKVLNEILNEFVSKILYRRNGRGAQIEVEVYLKEEIQEIINHKEDLTKIA

SEQ ID NO: 9949 - protein, 534 aa, Unknown
  Description of Unknown: Integrase B9950 sequence
  cd00338,IPR011109,IPR038109,PF07508,Coil,G3DSA:3.40.50.1390, IPR006119,IPR036162,PTHR30461,PTHR30461:SF3,PS51737,PF00239 ,SM00857,G3DSA:1.10.10.2600,SSF53041
MQSSLEIQIAEKIETARNHKTKNLAFAYARISSKKQEDGNSKAAQIKGINTYAQRNNLYIIHLFATTESAWSPGRIDFNLMIRLAKKHNIKHLIFKNHDRISRNDEDWLTVDKMIKQEVQFHLYEFNKILDSTRSAEEKFGDKVTSGLNEYWSDKISQGVRRGYNEKAFDRRVAHKAPLGYEWEASLKNWIIDPEKMAVVKYMFELYDSSGNTLQEIADLLNAHGYTTVRDAEFTKSRVHQILHNRFYTGWFQYKNEWIKGTHEPVISDDLFQERISRMDDRYNGNRKSETTYNLSKYVRCSHCGMMYTGYKVIKSDVYYNHHCEALNGKYRIVKESEIVTALDDYIETIVYSDQYSMWLKKTFSEIMNDKSSVTERERAESNKKIRELQSSKSKLLDMYLSDEFTKEEIDKKAHEINTQITVLEDRLVILNKDLSNHFNKVLDIVDYLKNFTKTFLLDSIDGKMEFLRAMSYVMIYDDDNKKVAEIQWKKAFAYLLARDFTTQIPPTSLDLVSPFTYAWRDDFRTNLERWMCA

SEQ ID NO: 9950 - protein, 534 aa, Unknown
  Description of Unknown: Integrase B9951 sequence
  PF13408,IPR011109,IPR038109,PF07508,Coil, PS51736,IPR036162,G3DSA:3.40.50.1390,PTHR30461,IPR006119, PTHR30461:SF3,IPR025827,PS51737,PF00239,SM00857, cd03768,G3DSA:1.10.10.2600,SSF53041
LSNLRRKAKSIQIDPNKVAIYVRWSTDEQAEGTTLTIQLERSKQFILSQGWIINEDLIFIDEGFSGGTLERPEIKKLRKNVNDGLIDCVVIFKLDRLSRNIVDTVNLVLDEWDEICYIKSVTEPFDTTQQIGRQILTMLAGFAEWERYNIKLRTFEGKIETVEKGFSAGFKPPYGYIVGEKTGTFELVKQEAEIVKRIFREYKNGKGTNAICTELNSEGVIFRNSKRWNTNTIAYMLCNPLYIGRLIYGKLQNNPKRSKKEGEPLRSRRAEEDIMVKELTSDVITPIITEDEFNSVQKIRQSRNVFIDHKTSGRIFTSPHLFSGLLKCKCGYGLTARSKQTTDNHAYYMCRGNKMKGSGFCDAGYIRQDTLDNLISQDFINNCLSQDNSIVNVISEQNEVRLAELNNSLNGIVDSLKRLEHEFETIKMKLRKDNLDVSTFNMIKSDIDKESAELKDKQQFLIDELNTLNSNRIDKKEIEELYKLLNTWEFLSIEEQKQILFKWIDHIEVHKTKGKETPDSKISIHIHYKTKFKI

SEQ ID NO: 9951 - protein, 533 aa, Unknown
  Description of Unknown: Integrase B9952 sequence
  cd00338,PF13408,IPR011109,PF07508,Coil, PS51736,IPR036162,IPR006119,PTHR30461,G3DSA:3.40.50.1390, IPR025827,PS51737,PF00239,SM00857,SSF53041
VKKVIELIRVSTSEQAAEDRASIPAQRAVNRKTAAAYGLTISKSIEMSDVSGTAVLRTPEMQELLRLIEAPDIKGVVVREFSRVMRPDNFGDYVLFQVFQDTGTLLYLPDGPLDFNSKTGKLVAGLRAIISGNELSEIRERVWTAKEEMRRDGKHVQGGVALPFGVGYSKEQGFFFKPESEMVRDAFRRLLSGETSYTQLAKPLGFTPQGMRTLFTNPIYMGWRVYDKKRNMAPSAKRYSAGGRQGDRPKILRDPDEVIRVKVIDTPLVTEAEFRRVQEIVMLKDSHHWRHRSGVKHNFTYNGFLLCSECGSTLYGKNASGGSGKRRRIATAFYYGCRRRFWHKEGQCLTPYMQRDRLEEKLDGIFTERLTNQEFLTGLLRDLDAKSETDTSRTRIARLQAELTNLRAKRSRVLDAFFEAVLTKAERDLRLAEIDVRLKSTEELLLREAPVQKVSLRSLMTALAPLFEWRFMNRESKRRILAVTVPEIRVSNYQVQGVAVTSPNLCGYVESRSLAGFDLTTGSPARLWLPLNL

SEQ ID NO: 9952 - protein, 433 aa, Unknown
  Description of Unknown: Integrase B9953 sequence
  cd00338,PF13408,IPR011109,IPR038109, PF07508,PS51736,G3DSA:3.40.50.1390,PTHR30461, IPR036162,IPR006119,PTHR30461:SF3,PS51737, IPR025827,PF00239,SM00857,G3DSA:1.10.10.2600,SSF53041
MEEKSIEKRLGMPSLVHKKKVAAYCRVSVEKDAMLHSLSNQVSYYQDYIAKNDEWIYVGTYADEGISGTKVNRPEFNRLIEDCKAHKIDMIITKSISRFARNTTLLLQTTRLLKKLNIDVYFEEQKIHSLSNDGELMLSLLAGFAEEEAKSMSNNVRWKVNKFFEDGKIWGLHKIYGYDVIDGKLVVNQKEAEVIRLIYHLYLDEGLGTHQIVNRLDELNIPAPKANGWIRYSVRNILRSIIYTGELMLGKYSQEMNPISHHKENDGRYPLYYVEESHEPIISKELYERAQATFKQRNEKYIPTKENNYSPFAGLIKCASCGKNYLRKKNKYRIYWICGQFVVGKGKKCNQALSLREDTLYELTKLALDIDEVTEKSLEPLEQIMVHDSKDLDFIFKNGEKKTYHFEFKSRKESWTEEMKEEARRRGLLNYYA

SEQ ID NO: 9953 - protein, 533 aa, Unknown
  Description of Unknown: Integrase B9954 sequence
  cd00338,PF13408,IPR011109,IPR038109,PF07508, Coil,PS51736,G3DSA:3.40.50.1390,PTHR30461,IPR006119, IPR036162,PTHR30461:SF3,PS51737,IPR025827,PF00239, SM00857,G3DSA:1.10.10.2600,SSF53041
MYEDIKTACLYVRFSSHNQTEQSIEGQTRVCRDFCKRHNIRIVEIYADRATSASKDIEKRVQFLKMIKDSERGLFDAVIVYKLDRFARSRYDSATYKYRLKRNGVQLISATENISNDPEGIILESVLEGMAEFYSAELSQKINRGMRESAYKHNSIGGAVPLGYKIEDKKLVIDPKTAPIVKEAFEKYADGETVAEICRQFNARGYKTSKGTTFGKSSFTKIFRNERYIGVYSFHDYRAEDAIPAIIDKDLWDRVQLRVGKIKNAPARNKAKVVYLLSGKIFCGHCGSKMNGNCNAGNYYYYQCYGKKNGNVDCKKKNIRKEFIERLVAQDALSLLTDEYIEQIATIACEKNQHEIELDSALPTIRDRIHQVDLSLNHLLKAIESGSAPDMLVKRMGELEKEKKDLQAQAKKESEDIVELDKAQVIYWLEQFRGGSIEDQEFCRMLIDLFVNSVTVWDEDDNTYKVTVAYNLTSLPTKTYRLNKGGTLSDFASNAPGMSANPTITGNLLIHTFHCRLKSHSQKRFWDYDTFVV

SEQ ID NO: 9954 - protein, 533 aa, Unknown
  Description of Unknown: Integrase B9955 sequence
  cd00338,PF13408,IPR011109,IPR038109,PF07508, Coil,PS51736,IPR036162,IPR006119,PTHR30461, G3DSA:3.40.50.1390,PTHR30461:SF3,PS51737,IPR025827,PF00239, SM00857,G3DSA:1.10.10.2600,SSF53041
MIAETLNAVIYARYSSHSQTEQSIEGQLHDSYAYAEKCGYRVIGEYIDRALTGKSDDRPDFQRMIRDAEKHQFQVVIVWKLDRFARNRYDSAMYKRILKKHGIRVVSVMENITDTPEGIILEGMLEALAEYYSANLSENIRRGQQESIKKGWFPGGAPPMGYKVVDHKLVPDERWAPVLLEVYTRYASGQGLAMIAEDLNARGYRTRQGHEFRPATFDRVIPNPAYIGQYSYGGVTVPDLCPPIVPEDIYQKALARRERNRRAPAAGRSPVEYLLSGKMFCGLCGAPMVGDCGTSMTGERHIYYSCAAHKRKAANCRKKSEKKDFIEWYICEQTVEYILRPDRLPLIARQVVECYNADIDNSRIRDMERTIRRLKDESSALLEKLTFAPKNIALRIMEKMELLDAQRVDAETDLSKLRMQQKIPLTEKEVTAWLSTFSRGDLMDLAFRCQIIDTFINSVFLFDRKVVILYNIKDGRQTCVIDPIDALDELKEAGQSSTLTGDGGALPSKLEPERPYYIFLRGMLGLVLVRSID

SEQ ID NO: 9955 - protein, 533 aa, Unknown
  Description of Unknown: Integrase B9956 sequence
  cd00338,PF13408,IPR011109,IPR038109,PF07508, Coil,PS51736,IPR036162,PTHR30461,IPR006119, G3DSA:3.40.50.1390,IPR025827,PS51737,PF00239,SM00857, G3DSA:1.10.10.2600,SSF53041
MKYFIYCRKSTEDAESQSLSLPAQLRVLTQLAGDRKLSILDTIEESKSAKTPNNRPLFRKMLNRMYANHAQGLVVWHVNRLARNPMEAGELQQMLVDGKIKEIITPDETITKDNANDIILGVKFGEASQYSKDLSKNVKRGLKEKMIRGQYPNRAPSFYVNVGKSAANKNITPDPRYADIFKKWIKWFKDTCPTLTESANWLNNKGALTCKNKSFNKARISDILNNPVYAGYMQISGEPMIKGTWEPLISLEDHKIIKSIVSSRHVVMKQRHEKGYKQLIVCGHCGCAITCSHKVKNGLDYIYYHCTRRRGKCDQIALTEKNLEDQILKQIVKIRINPIKYNLMIEMTKSMTEFKRKASSRVGHNTLESIDTIKEQKEMILDLFLTKAIDREIYNNKILELDNKIMESKKKYASTEFDYDQWFSFVQGFYTKCRDMQSLYIDGDIDERTTLVRSLGWNLKMMHGNLSWNFEKPWDAMLDIDLVDDRTVLWAVAFTVGTFFRNSANTLLSSISPSSNLLYSQSINNILTINQNG

SEQ ID NO: 9956 - protein, 533 aa, Unknown
  Description of Unknown: Integrase B9957 sequence
  cd00338,PF13408,IPR011109,IPR038109,PF07508, Coil,PS51736,G3DSA:3.40.50.1390,PTHR30461,IPR006119, IPR036162,PTHR30461:SF3,PS51737,IPR025827,PF00239, SM00857,G3DSA:1.10.10.2600,SSF53041
MKQQSTVNAVIYARYSSHSQTEQSIEGQLHDAYEFAQREGYLIVGEYIDRAQSGTKDNRRDFQRMIADAAKKQFQAVIVWKLDRFARNRYDSAIYKAKLKKYGIRVVSVMERIQDNPEGIILEGMLESMAEYYSANLSVNIQRGQRESIAKGRYCGGPIPYGYKHVDGKLIADERTAPIIQEVFSRYAAGESMKAIIDNLTERGVKSSSGAALTYNTFSRALLNRCYIGEYTYKGEVIPGLAAPLIDGHTFDAVQEKVSSRKRAPAAGKAKVEYLLQGKCFCGHCGANMVGESGRGRQGETYYYYSCSNRKKKHTCNKLNEKKDFIEWYVVEQTLEYVLSAERMELIAARVVAEYEKEFGSGPIKEKERAIRKIEKELNNLVDTLAEAPKVARQRIYDRIEELEASKADIEIDVAKLKIAQNIRFTEAEVKAWLKQFCKGNALDIEFRRRIIDVFINSVYLFDKRIIIFYNIKGGKQVSYIDVAEVSNEAGNGETVSDFIANAPPYASKSEPRYIFVNGVFGIVLERTEEQGE

SEQ ID NO: 9957 - protein, 533 aa, Unknown
  Description of Unknown: Integrase B9958 sequence
  cd00338,PF13408,IPR011109,IPR038109,PF07508, Coil,PS51736,IPR036162,IPR006119,PTHR30461, G3DSA:3.40.50.1390,PTHR30461:SF3,PS51737,IPR025827,PF00239, SM00857,G3DSA:1.10.10.2600,SSF53041
MPTAYTYARFSSDRQHESSIEAQQDATRKWAEARGVTIIREFADRGISGTTDERPAFQEMISACRSQRVDFVLVHKHDRFARNRYDAAIYGRIIEKSGARLVAVAQDFGESPEALILEGMMQAWAEYYSRNLSTEVRKGLRIRAERGAHAGGCTPFGYRWQDGEKLVIDEEEAAWVRRWYEGYISGRQCTEMASEANAAGVRGRYGRQVRAGTISRIVRNPVYAGVYIATIGSETYRHDDHHEPIVPLDLWKEANKKVDERAVSRRAPGERTYLLTGIAYCGICGKRIAGHTQLQKGREYASYFCRGPHEGESLRSIRAEVLDENVRQYIRGLLTPEARAMAAHALEQYMAERKKHLGKRGPNVKKRIGELEQKISALVENMSAGVLPPAALKRMGDQIAAMESEIETLKEIGEEPPEPDPVSIDEFFAQGAAIDENTPIEEAQSIVRRFIKRITITNDEIQIESSFADWLREKCGGKKLYQSTENPTLCAFDITLQRIGRHSTVVCKSAQSSIKNTKKAHFPELFARLSPSG

SEQ ID NO: 9958 - protein, 533 aa, Unknown
  Description of Unknown: Integrase B9959 sequence
  cd00338,IPR011109,IPR038109,PF07508,PS51736, G3DSA:3.40.50.1390,IPR006119,IPR036162,PTHR30461,PTHR30461:SF3, PS51737,PF00239,SM00857,G3DSA:1.10.10.2600,SSF53041
MKAVGYLRYSSDSQSEGYSIEAQKNAIDTFALREGYEIEKYYIDEARSGTNDNRESFLNMIEDAEKKLFQYVLVHKLDRFSRSRKDSIIYRAKLNETGVKIVSVLEKIDENVPEDVILLSMLEAMAEYYSKNLGREVKKGMTVAASRGQFVGGRVPFGYYSNRVTKKLHIKDDEAIIVKDIFNKFISYGSIDQLAQYCKDSNYFTREGGQLRSKQLHSMLTNKVYIGSAVYRIFKKESISYKGMKNRPEPIVVESAYESIINKDDFNLVQSILNEAKRGPYQRRSKKTGNTYLLTGKLSCVNGSQMTGRSMHVVKKYKNETEGHFQYFTYHCSCGQKHTVKKDDIENFIHASIQRDIFNEDNILNLAQKLKYVYDKNEKAAHVDLQLAREKLDVVVTNQEKLLDLYLDGKLSKDRFNKKNLDLEQSRLKYLSILQKSSQKHREINIEQFKLAIRMLPEMYGIEEHEKQRNMLINTFIEKITYSDKDINIVYKISLNEVLFKKQNGGGKVFLNITYTTNHRDINHFSLQRGLSS

SEQ ID NO: 9959 - protein, 533 aa, Unknown
  Description of Unknown: Integrase B9960 sequence
  cd00338,IPR011109,IPR038109,PF07508, Coil,PS51736,G3DSA:3.40.50.1390,PTHR30461, IPR036162,IPR006119,PTHR30461:SF3,PS51737, PF00239,SM00857,G3DSA:1.10.10.2600,SSF53041
VYKLPDGEYCAYLRKSRADLEAESRGEGDTYARHIKILLELARRHNITLTKIYQEKPATSGERISERPEMIRLLEDIEDGLWTGVLVVEVERLARGDTLDQGIVAQTFKYSNTLIITPMRVYDPSRPEDEEYFEFGLFMSRREFKTINRRLQTGRITSVKEGKYVGNKPPYGYIRVKLDNGKGYTLEPHPEQAPVVKMIFSLYTDPDPNRRMGTALIARYLNEKKIPTQRNKQWTVATVNGILRNPVYIGYVRWGSRPVAKKKNTKSRPRKPIEEWTLAKGLHEPIIDEVTFRRAQQIMQQNSHPPVDPKKISNPFAGLVKCAFCGSAMILRPYNDKRPPGIICSRQGCKNVSSMFHIFEERVLEALKDWLEEYKSQWLQIRPEEKKHDRLEVLRNVLRAHEKSLKELEVQKDSLHDLVERKVYTIEDFIERSQKLAKRFEEVNEAIRQVKEEIENEVQFRASQDEFIPQVEHVLDIYHKTEDPALKNELLKSVIEQIVYRKDKRGHWKTGGMDNFEISLFPRVPKQINISTS

SEQ ID NO: 9960 - protein, 533 aa, Unknown
  Description of Unknown: Integrase B9961 sequence
  cd00338,IPR011109,IPR038109,PF07508,Coil, PS51736,G3DSA:3.40.50.1390,IPR036162,IPR006119,PTHR30461, PTHR30461:SF3,PS51737,PF00239,SM00857,G3DSA:1.10.10.2600, SSF53041
MYQLPARVKRIILYVRKSRQEELEEQNKDGSDMLERQLEMMKKVLLKFEVPFDWVKEVRSGDSIESRPKFQQVLKDLKAGKYQAIAVRDLSRLGRGSYSDMGVIFDTIHDNRILIIDGTGKVYDTRNQSDERYIRWNMFMAREEYKNIVERLINARYFRASAEGKFMNSKPPYGYMRDKKTKKLVPNPDEAPYVKKIFEWYLEGIGYQGIASRLNKMGVPTRGRKTKTKNNKWVPMVVRGILTNPVHMGDIYFRITERIGNKQVLRPEEEHFIYENAHEPIVSREVWHEVQRKMKDKRKLPLNNDYSPCELASLVVCANCGKKLVRQSSVARYKKSDGTISKYYKEYLYCRGGCGITFKYRDVEEQILNTLSLFKELDTKDIRNYLKAFIESEKEQTRLTNDDKIKTLKRKKESLLARREFIFESFERGDYSSDEFRERRDKIDQEIEFIEKEIELEEQTKNQMVPTSIKPKEFKNRIETVLDTYKILDDKSLKNELLLSVFDHIEITRITKGKGHQSSIFKLKPYFNFNFIA

SEQ ID NO: 9961 - protein, 533 aa, Unknown
  Description of Unknown: Integrase B9962 sequence
  cd00338,IPR011109,IPR038109,PF07508,Coil, G3DSA:3.40.50.1390,IPR006119,IPR036162,PTHR30461,mobidb-lite, PS51737,PF00239,SM00857,G3DSA:1.10.10.2600,SSF53041
MAVLTTAEAVMDEAVTRAAREYLRVSKGNGRTARSIRDQHRDNLATEADHGPWTWGEPYKDTGSASKFARKIRDDFERMLADLRSGQFGGPGDVLVLWEISRLARETGRGVELVDACEKGRYLIHVTSHERTYNPANYQDRHSLIGGINDAEKEARLLSVRTLRGLNSAAREGRPQGQVPFGYRRDYEVVDGRPRPVAQYPDPETAPLVKELYERVVGVNGKLPEPMYAIAKDWEERGVVGKNGKTFTPQNLRSMLLRPSNAGLRKHNGVLVPEQWDGWTPVISRDLFDRVQVILSDPSRRKYTGEHIRHVLSMTLKCGVCGRGMVVQTRRKPGAKDAVGYQCGPRGHVWVPKAQTDRILIGDLDPVDPDTGELLPPKLGTILEYLTAPDRYAGLRHRPDTSAEETTLRAELARLHGELKELEEAPQPKTARARIRRTSDIEELETDVAVLEAKLGTLTTPAPLAELLPDEPITDVVRWWRRAGVEKQRAIAALLLTPSMLGEVRIMPSPVPRGHAPVAERMAVYRETLPAAE

SEQ ID NO: 9962 - protein, 533 aa, Unknown
  Description of Unknown: Integrase B9963 sequence
  PS00397,IPR038109,IPR006119,PS51737,PF00239 ,G3DSA:3.40.50.1390,PTHR30461,IPR025827,SM00857 ,G3DSA:1.10.10.2600,SSF53041,IPR011109,PF07508,PS51736 ,IPR006118,cd00338,PF13408,Coil,IPR036162,PTHR30461:SF3
MTTAAVYCRVSTEDQEREGSSLSSQNSYCLRKAAELGYDVPADCIFTEVFSGADTDRPRLNEMRRLIRSHSVDAVICYSTDRLARNPIHIAIIAEECEKRGIELVFVSEPLDSTPEGALVRYIKGYAAQVEREKIRERSLRGKREKAMQGKLSTGGRRLFGYDVVEGRRVINDTEAEVIRRIFNWFAECRYTLYKAVRDLNSERIPGPAGGKWKEVTIYRLLNHPAYYGVTYAFRYKCVEPKRSKFPKGTKSARILRDKSEWIEVPGATPPIISKNIFEAAQEQLVINRHKSPFTLRQKYLFSGGRLRCGTCGRSMTGGTNKKAGKVYHFYRCICNVKPNYYGKCSQPSISASKVEPLVWGEILNILDNPDMLIENIKSRRSQSPTSIEAEEFLLNNNIKKAREEETRYIELYGKGRISEVSFEKLIEKIRGAIQVQEKKLRALRGKRQSFEQAEAHIEDLVKTSAIFSKVLKNADFELKAKAMEALDIQVTYLPDKTVLITGILPMGATNFHMPRHTQSRNTPRFEISAIVK

SEQ ID NO: 9963 - protein, 533 aa, Unknown
  Description of Unknown: Integrase B9964 sequence
  cd00338,PF13408,IPR011109,IPR038109,PF07508, Coil,PS51736,IPR036162,IPR006119,G3DSA:3.40.50.1390, PTHR30461,PTHR30461:SF3,PS51737,IPR025827,PF00239, SM00857,G3DSA:1.10.10.2600,SSF53041
MPAKSAVQPSTVNAVIYARYSSHNQTEQSIEGQLHDCHAYAERMGYTILHEYIDRALTGTKDTRPDFQRMIRDAEKRQFQLVIVWKLDRFARNRYDSAIYKAKLKKYGVRVVSVMENINDGPEGIILEGILESMAEYYSANLAENVRRGLRESVNKGQFAGGPVPLGYRVDGHRLAADERTAPLAQEIFRRYADGESPSAIAADLNARGYKTRLGRPFRVSSFDTMLSCRTYIGEYTYSGQVIEGVADAIIDKETFDRAAARRAKNRHAPAAKKAREPYQLQGKIFCGHCGSPMIGESGRSRNGEIHQYYTCAKRKKEHSCRKKNEKKGFIEWYVCEQTVAYVLDPERIGLIAERVVAEYDKEFGGDQVRELERRIHRLDNDLEALVDSLLTLPASARARIGERMERLEAEKADAEIDLAKLKLASGIRLTVDQVKAWLRSYTRGDLLDPAFRQRIIDVFVNSVYLYDDKVVIFYNLRGGQETSAIGDISELDEMIDDDGGGSDLSGVTPPLPVKPEPRYIFVRGMIGIVITR

SEQ ID NO: 9964 - protein, 533 aa, Unknown
  Description of Unknown: Integrase B9965 sequence
  cd00338,PF13408,IPR011109,IPR038109,PF07508, Coil,PS51736,G3DSA:3.40.50.1390,IPR006119,IPR036162, PTHR30461,PTHR30461:SF3,IPR025827,PS51737,PF00239, SM00857,G3DSA:1.10.10.2600,SSF53041
MDNAVIYARFSSSKQQEQSIDGQLRYCHEYASRYGYKVVGEYCDRAITGSTDQRPQFQKMIEDSAKKKFKYVLVWKLDRFSRDRYASALYKYKLKNNGVKVLSVTESIGDGNESIILEAVLEAMAEIYVKQLAQNTKRGMKESILHGRNAGGTIPFGYDSIDKRLVVNEKEADIVRRAFTMYADGAQIRDICDEFRRRGYRTRTGGEFNRNSFHRMFQNTKYVGTVTYSDIVIENNCPAIIKKDVFEKCRARLLSNKHSGKPTKTKVEYLLKGKAFCGHCGASMVGDSATSKTGARHEYYSCSAKKKFKNCDKAREKKTYIEWYVTEQTLKYVLQPDRLDFIARNVVRMYEESCDTSELDSLRQKKAKYEKEYDQITDSLIHAATQRLIDKINRRAEELDVLLNDLDAEIAELEAATDAPLTVDDVKMWMTVFCNGDAMDVSFQRKIIDVLVNSVFIYDDKIVIYFNVRDGKQVSYTQMIDETSDIFDDLNCSDIPKGSDIVTDGSPFKAISELYCYIFVDGRVGIVVKRPEV

SEQ ID NO: 9965 - protein, 532 aa, Unknown
  Description of Unknown: Integrase B9966 sequence
  cd00338,PF13408,IPR011109,IPR038109,PF07508, Coil,PS51736,G3DSA:3.40.50.1390,IPR006119,PTHR30461, IPR036162,PS51737,IPR025827,PF00239,SM00857, G3DSA:1.10.10.2600,SSF53041
MKAVIYARYSSHAQREESIEGQLRVCYDYAAREGLVVVDEYIDRAISGTTDERPAFQRMIADSSSGSFDVVLVYAVDRFARDRYAAATYRHELKRHGIKILSATQPLDDSPESILLEAMLEGLAEYYSANLARGVKRGMRENALKCLSVGGPKILGYTTDPDTKKYIIDPVGANTVRDIFEKYDSGMTLAAVVEHCNDQGYLTRNGKPFSRTSLTTILRNRRYIGYYIYDDIEIEGGMPVIIEREQFESVQRRLAMNHRSKSRGKSLVDFMLTGKLFCGHCGRPMAGTSGRSANGEKHYYYSCRIHGEKCVKHNERKEVLEEAIFSYISSSFLTDENIEMLAESVAEEAQGDETAMLIEGLKAEKDDIRRKKKNVLNMIAEGGRDPDLLEMVEDFRNQEDRIDSQLAKAELERNVLTKDMLIFYLEQFRSGHEDTIAARPDIINALVSSIYIYDIEKNQNSCESSDRGSNGLGRRLVISFNVDETVENPMTFECSDLAGMVDCTSPYPNISGRRGRFYILQRGRIIVAVVDI

SEQ ID NO: 9966 - protein, 532 aa, Unknown
  Description of Unknown: Integrase B9967 sequence
  cd00338,IPR011109,G3DSA:3.40.50.1390,PTHR30461,IPR006119, IPR036162,mobidb-lite,PS51737,PF00239,SM00857, SSF53041
MGTTTAVRAVIYLRLSDLRLIEPGPDGIEKAFCAREKDLRELAKRVGATVVKVIRENDLRSRGKGRQQGVSAFKRKKITLPDGRETWRVIRKGFDEILRDLWVGTVTLLLTEDLDRMVRDPRDLEDLIEVAERRGISARSLSGSLTLTNGGTDSEITMARIMVTMANKSSRDTARRVSEARRRAAENNQPTGGGRKFGFEIDGMTPIPAEAAVVLDCSTRVLQIDAKAKEKNPNTTKLTSLRSLALELRAGDVPTVTGAQWSAETLRDILLRPRNAGITVHLGEELGRFTSDPIVPEDIYRAVVALLTDPSRTTGSGPAAKWQGSGVYLCGRCDDGETYMEATGGGTACVPYYRCEGHNHVRRTSSYVDEMVSAAVVARLSRADAVDLIPTVDVPDVDVPGLQAESARIRASLKSLGGMLVRGLIDEDQLLDATQVGRKRLAEIKDLLDVTIVESPLAPLIGVDDVAAEWAKQPVHIRREIISTLFVVKILPTVKGAKFVPGTRFSRSSVVIEPKPAPVCVTAPVETLPAAA

SEQ ID NO: 9967 - protein, 532 aa, Unknown
  Description of Unknown: Integrase B9968 sequence
  cd00338,IPR036162,PTHR30461,G3DSA:3.40.50.1390,IPR006119, PTHR30461:SF3,PF00239,SM00857,SSF53041
MANNTKNNEILKNDNAQQMQYNPYGYMMQPQMMPMQMNHQMIPMQMNPQMNPYMMPMQMNPYMMPMQMNPYMMPMQMQQPMQQLIQPMQQPMQQPMQQPIQQPMQQPMQQQLIQPIKNNGINNGINNGINNMDEIINNIDVDVDVDVELPINNIINEDKNGISGISKTNKKRKIIPKEDLGIENLFDNVLDNYKFNKKQKKDSAFISDKDFKNVIKSIKPHNLNEAHFNNETHPNEIYNVTLLDGNTHNISAKDISNDALKTQKLNYEHNIKLANAYPNMPPNATNTVIYTRRSIKDKEHIDNSIKTQTEACYKYAFANNMKMASFGYLEDNGVSGRNGKNLISGEIAFWMSHIPNHSNIIVYSPDRWCRNTLKGLEVLDSLSKRDITVHFISNNIDYNKDITSANRAMIQTELMTAEKQSNDTSEKIKGTLTRLKAEGHVIGRAPYGFNNIIINGIRKRTINESEKNMINVIKNKYNDIIENYVNYRDKEYLRSSESSIIKFIMRWASREGMKNRNNVAFTISQIKTIINI

SEQ ID NO: 9968 - protein, 532 aa, Unknown
  Description of Unknown: Integrase B9969 sequence
  cd00338,PF13408,IPR011109,IPR038109,PF07508, Coil,PS51736,G3DSA:3.40.50.1390,IPR036162,IPR006119, PTHR30461,PTHR30461:SF3,PS51737,IPR025827,PF00239, SM00857,G3DSA:1.10.10.2600,SSF53041
MSQVNKVRVIPAAPKHNTYEALFERKKRVCAYARVSTNKEEQVTSFESQKRYYTNYIQENPEWEFAGIYADEGISGRSMKKRGEFRRMVQDALDGKIDMIMVKSVSRFARCVVDVLTIVDELRQKGVPVIFEKEHLNSIEDDKRTNFMITLYASIAQEESDSLSDSVNWGIQRRNEQGIVRGVRIYGYDMTEDKKYIVNPEQAEVVRLIFSLYLSGLSSKGVANELKKRGIKTYKGFDNWDESTILYMLKNEKYLGNALLQKTILEPWRAKRRTAYADKQMYLVEDNHEAIIDKDTYNRVQRELEFRKTIRSYTKTGRGGYSSLYPFSCKVFCYQCGSVFRRHNYHSAGKTIPTWVCVNHENNGNAVCSQKPIREDELKQAFMRVVNALVADKKAMLRKIQESIEETVGKGDLSGRIEELDKQIQEKQRELVTMMNRARNANEIIMNEGAQNAIMAEIEKLTEQKRHYENTTVENERNSGRVETLIDLAERKVQMTEFNDTLCRALLEKAVVDGKEVTFMLGGGLEIAETLN

SEQ ID NO: 9969 - protein, 532 aa, Unknown
  Description of Unknown: Integrase B9970 sequence
  cd00338,PF13408,IPR011109,IPR038109,PF07508, PS51736,IPR036162,IPR006119,G3DSA:3.40.50.1390,PTHR30461, PTHR30461:SF3,IPR025827,PS51737,PF00239,SM00857, G3DSA:1.10.10.2600,SSF53041
MRAVAYCRFSSDMQRDGFSIEAQRSAIQAYCKQEGIELVGEYVDEARSGTNAERENFQRMISDSKLHAFDLVVVHKLDRFSRDRYDFAVYRKLLKGNGVSIRSVVERLDDSPESIILEGMLESMAEYYSKNLARETMKGLRARARKGLCCANRPLGYDIAEGRFVINQLEAIVVREIFSRVGSGESLASISRDLASRSIRGSRGAPLQYVSLSKIVKNTIYYGSYTFAGELACANCAEPIVDFELWTAANARLQGHRNPSIRRHRVEDYLLTGLLYCGLCGGHFSGHCSHGRNGKIYRRYRCTNSTQGKCDASVVDKEAIESFVLSALEHDLVKGSIVPHVIDSLNARLKERAKSSDAGKLKKELASLEMKKTRLLDVYLDSKIEKDVFVVRSSELDTKISEMKDLLAQCELPSILLVENTVRKSAESYCLSIKQKSGKDLSRLIGALIERVILYPDRIVIVYKIKNSTGDPIESVVPREPVAPAESAIPSGALNANYGGAFVCLSATYGVASYRRESLLFQPDAVVYYTLL

SEQ ID NO: 9970 - protein, 532 aa, Unknown
  Description of Unknown: Integrase B9971 sequence
  cd00338,PF13408,IPR011109,IPR038109,PF07508, Coil,PS51736,IPR036162,IPR006119,PTHR30461, G3DSA:3.40.50.1390,PTHR30461:SF3,PS51737,IPR025827,PF00239, SM00857,G3DSA:1.10.10.2600,SSF53041
MPNTAVIYARYSSAQQRDVSIEQQVKACQKYAADNGLTVLRVYDDHAMTGTNDNRPAFQQMISDSASGAFSFVIVYSLDRFSRDRYDSAIHKHTLRERGVRVLSAMEQIQDNPTGVLMESILEGFAEYYSKELAQKVKRGIHSNAERAMVVARPAYGYRRGEDGRYEIIPEEAEIVREIYRRIADGEQYTSIYADLNARGVPTKKGGKWGKNSFQAILRNEKYTGVYRYEDVLIPDGIPQIIEPELWQRVRDRSAAHTLSVTPKKRPNENGAYLLTGKLYCGHCKGAMVGTSGTGKHGELHYYYTCRTRQKNKTCKKKPVRREFIERLIAQRLQQMIFAEDVVDRIADELIAYLKANETTDEMRNLSAQIEALEREEANTLKAIRMGVVAAPVQKMLEQIESDLDSLRARLLLAKERARSDITKDEVLTLFELFREGDIGSKEYQQKLIDAFLIRAYVYDDRVKIVFNYSAAGSNEVEIPFDIDTVDKTPPGSDKSPEGVLILPHTNPDSLYFVKGFFVLITDFSGKMQKET

SEQ ID NO: 9971 - protein, 532 aa, Unknown
  Description of Unknown: Integrase B9972 sequence
  cd00338,IPR011109,IPR038109,PF07508,Coil, PS51736,G3DSA:3.40.50.1390,PTHR30461,IPR006119,IPR036162, PTHR30461:SF3,PS51737,PF00239,SM00857,G3DSA:1.10.10.2600, SSF53041
MSKINSYSSPQQNIYKIICYIRRSRQDIERENRTGEDTLATQKRIMIKVLDDLSIPYDQVLEIGSGDKIETRPVFQQVLEDLKIGTYNAISVKEIARLGRGSYSDMGVIYDLFFGKNIYIITPYKIYDPSNPSDARQIRFELFISREEFLMIKERLLSAKCSLAHTGCWMAGNLPYAYKLNSQTSKLEPIEEFADIVRLIFILYVNGIDGQEVSFRAIATYLTRIGIHTPKNGITWEPSTVKRILSNPVYNGTVMYYRRKRVMKDNKSIVIDRPKEDHIIVEHAHESIIDEETWELAQKKFNSRGTAPHNKLDFSPCELAGLVLCSKCHKTMIKQTTRTHYDRKDGTRKTYFQEVLWCTKPGCSYAMYRRIEENILLFLDRLKDMGIEEAKKLLEDDFNKFVNNKKENSVDINDVMSKKELELKRKLKFAYEKWEDGLIDDNMYKERTNELNNELNKLKLLISNENVNNNNFEQKFFEWQDKVKTVLEAYKICDDKTEKNGLLKSVIIKIEFERINKKDFKIRITPSFYSHE

SEQ ID NO: 9972 - protein, 531 aa, Unknown
  Description of Unknown: Integrase B9973 sequence
  cd00338,PF13408,IPR011109,IPR038109,PF07508, PS51736,G3DSA:3.40.50.1390,IPR006119,IPR036162,PTHR30461, PTHR30461:SF3,PS51737,IPR025827,PF00239,SM00857, G3DSA:1.10.10.2600,SSF53041
MRAIIYARYSTEHQTESTILDQLRRCRDYAKNHGLKIAAEYTDEGISGAAIGNRPGVQRALAELERGDVLLVVDTTRLSRSQDLAPLLTRLRHRGIRVVGVLDGFDSDSRTARMQAGLSGIMSEEFRAQIASRTHSALDMRARQGKATGGKCYGYSKAGEIIEAEAAIVREVFERAARGEAMKAIASDLNRRGVPSPGSTWERKARRSDGMWLVSGIHSMLGNDRYIGRVVWNRSVWKRDPDTGKRQRVERPQSEWVVSEGPAIIELEAWDKVRALAKPRQFHGGTKGRGPKYILSGILVCGECGGKLVATGANGSWYYCGTRHQGGDSACSMAIGARRDVAEEKLLEPISSQLLSNEAVELAVQMIRQWRRDERTESTRPAELEELDHRIARLEAQVSQGILDREDIAPSVAALLERRQALLSKSWRKANSRSNVDQAVAEEAYRQAVANMREALQGPAARARAAVHELLGDVVCRPEDGALVAVVRVKTAPLLRAAGVSQNGSGGSLPYYEMVPLVRDGPPLFSKLLAA

SEQ ID NO: 9973 - protein, 531 aa, Unknown
  Description of Unknown: Integrase B9974 sequence
  cd00338,PF13408,IPR011109,IPR038109,PF07508, Coil,PS51736,G3DSA:3.40.50.1390,IPR006119,IPR036162, PTHR30461,PTHR30461:SF3,IPR025827,PS51737,PF00239, SM00857,G3DSA:1.10.10.2600,SSF53041
MRAIIYARYSTEHQTESTILDQLRRCRDYAKNHGLKIAAEYTDEGISGAALGNRPGVQKALAELERGDVLLVVDTTRLSRSQDLAPLLTRLRHRGIRVVGVLDGFDSDSRTARMQAGLSGIMSEEFRAQIASRTHSALDMRARQGKATGGKCYGYSKAGEIIEAEAAIVREVFERAARGEAMKAIVCDLNRRGVPSPGSSWERKARRSDGMWLVSAIHSMLGNDRYIGRVVWNRSIWKRDPDTGKRQRVERPESEWIVTEGPAIVQLETWEKVRALATPRKFHNGTKGRGPKYILSGILVCGECGGKLVATGANGAWYYCGTRHQGGDSACSMAIGARRDVAEEKLLEPITKQLLSSDAVELAVAMIRQWRRDERTESTRPAELEELDRRIAKLEAQVSQGILDREDIAPSVAALLERRRALLAKSWRKANSRSNVDQAVAEEAYRQTVANMREALQGPAARARAAVHELLGDVVCRPEAGVLVAAVAVNTAPLMRAAGVSQNGSGGSLPYYEMVPLVRGGPPLFSKLLAA

SEQ ID NO: 9974 - protein, 531 aa, Unknown
  Description of Unknown: Integrase B9975 sequence
  cd00338,IPR011109,PF07508,G3DSA:3.40.50.1390,IPR006119, IPR036162,PTHR30461,PTHR30461:SF3,PF00239,SM00857, SSF53041
VPPQLTADPIPTIGYIRVSMAREEMISPAIQRSAIEEWARRTGRQIVLWIEDLDLSGRNFRRKVMGGIERLEAGEAREIACYRYDRWGRNAFESLANIARVEQAGGHVQSATEPMDAETAIGKYNRLNALGLAEMQSDIISDNWKAALANRIGRQIHPSGAAQFGYLRLGRVRSEDDPTRFRRDRDDAAGERYEADYAGGAADVLIGMYDRYITEQKGFRKIAVWLNARGILNTRGAPWSDVTVRNVLDSGFGAGYLRIHDKDCKCGKPSSCRKREYVPGAHEPILDEPTWQAYLALRARRRNLPPRSRYAAYPLTSLILCGHCCSGMSAQNASYVPGHTYRCTRWKQYGGDTPGGCRGVFPQRLRVEAAVRARLAEWADEIDGRTAVREAKAAVRVPAAIDRDRIARALVATDAALTRLAVTNAVDPMPEGVYKAARAELLAKRTQAEAELEAAPAEDAPAVDYLPIVRSILEGWDLWPAGQVRDMLAKVIRHVKVSRQPGVPTKSRHPPLVDVTPVWEPCDCVACERVR

SEQ ID NO: 9975 - protein, 531 aa, Unknown
  Description of Unknown: Integrase B9976 sequence
  cd00338,PF13408,IPR011109,IPR038109, PF07508,Coil,PS51736,G3DSA:3.40.50.1390, IPR006119,IPR036162,PTHR30461,PTHR30461:SF3, IPR025827,PS51737,PF00239,SM00857,G3DSA:1.10.10.2600,SSF53041
MKAIVYARYSTEHQTESTILDQLRRCRDYAKNHGLKIAAEYTDEGISGAAIGNRPGVQKALAELERGDVLLVVDTTRLSRSQDLAPLLTRLRHRGIRVVGVLDGFDSDSRTARMQAGLSGIMSEEFRAQIASRTHSALDMRARQGRATGGKCYGYSKAGEIIEAEAAIVREVFERAARGEAMKAIVCDLNRRGVPSPGSTWERKARRSDGMWLVSGLHGMLGNDRYIGRVVWNRSIWKRDPDTGKRQRVERPESEWIVSEGPAIVELETWEKVRALATPRKFHNGTKGRGPKYILSGILVCGECGGKLVATGANGSWYYCGTRHQGGDSACSMAIGARRDVAEEKLLEPITKQLLSSDAVELAVAMIRQWRRDERTESTRPAELEELDRRIAKLEAQVSQGILDREDIAPSVAALLERRRALLAKSWRKANSRSNVDQAVAEEAYRQAVANMREALQGPAARARAAVHELLGDVVCRPEAGVLVAAVAVNTAPLMRAAGVSQNGSGGSLPYYEMVPLVRGGPPLFSKLLAA

SEQ ID NO: 9976 - protein, 531 aa, Unknown
  Description of Unknown: Integrase B9977 sequence
  PS00397,IPR038109,IPR006119,PS51737,PF00239, cd03768,G3DSA:3.40.50.1390,PTHR30461,IPR025827,SM00857, G3DSA:1.10.10.2600,SSF53041,IPR011109,PF07508,PS51736, IPR006118,PF13408,Coil,IPR036162,PTHR30461:SF3
MIIYNKQKSPTLSNFGESEREASGKKQSIKKLFFLYPFYHFLGNFERGTTMITTNKVAIYVRVSTTSQVEEGYSIEEQIDKLESYCKIKDWTVYKVYTDGGFSGSNTERPALEKLIKDADKKKFDTVLVYKLDRLSRSQKDTLFLIEDVFIKNGIEFLSLQENFDTSTPFGKAMIGLLSVFAQLEREQIKERMQLGKLGRAKAGKSMMWAKTSYGYDYHKETGTMTINPVQSLVIKFIFESYLSGRSITKLRDDLNEKYPKEKPWHYRAVRVILDNPVYCGYNQFMGEIYKGNHEPIISKETYDKTQEELKIRQRTALENLNPRPFQAKYMLSGIAQCGYCLAPLKIIMGVKRKDGSRFKKYECHQRHPRKLRGVTTYNDNKKCDSGFYYKDDLEAYVLQEVNKLQHDSEYLETIFSDNRKESIDRESYQKQIRELSKKLSRLNDLYIDDRITLEELQSKSREFLSMRALLEKELEDDPSLKQEETKNTIKQELSKGDIYKMDYESQKTIVRALIRKVQVTADSIVIKWRI

SEQ ID NO: 9977 - protein, 439 aa, Unknown
  Description of Unknown: Integrase B9978 sequence
  cd00338,PF13408,IPR011109,IPR038109,PF07508, PS51736,G3DSA:3.40.50.1390,IPR006119,PTHR30461,IPR036162, mobidb-lite,PTHR30461:SF3,IPR025827,PS51737,PF00239, SM00857,G3DSA:1.10.10.2600,SSF53041
MDRIVQRVKFEAPKQERLLRVAAYSRVSNGKDTMLHSLSAQVSYYSNLIQNHEGWIYCGVYSDEALTGTKESREDFQRLIADCRAGKIDLVITKSISRFARNTVTLLNTVRELKLLGIGVFFEEQNINTLSAEGELMLTILASYAQEESLSASENVKWRIQNDFKQGKLPMSVWNIYGYKRTPDGGLEIIPEEAEIVEQIYKLYLDGLGVLKIAQILNEMGIESNTRDTWSAKKVRYILSNEKYIGDLLLQKSFRLDHLTKKTVRNRGEKTQYYVEDNHEPIIPREVFEAVQLELEKRREKHCKEVVPQKYAFTGKILCENCGKNFRRKVTATRVVWICSTFDRLGKKVCASKQIPDETLCAVSAEMLGIADFDADLFEEKIIKITVPEANHLIYHFKDGHTVETTWKDRSRSESWTPEMREQVRQNNLKRRNQEWQKQ

SEQ ID NO: 9978 - protein, 531 aa, Unknown
  Description of Unknown: Integrase B9979 sequence
  cd00338,PF13408,IPR011109,IPR038109,PF07508, Coil,PS51736,IPR036162,IPR006119,PTHR30461, G3DSA:3.40.50.1390,PTHR30461:SF3,IPR025827,PS51737,PF00239, SM00857,G3DSA:1.10.10.2600,SSF53041
MTIYDAVIYTRVSSDEQRRSGFSLDYQEKQGREYAQKNNLKVVKVYTESYTAKRPGRPLFNEMMMFVRKNKVRHLIFLKSDRASRNGVDSAALVYMAERDIFNIHLIQDGLCLNKNSRPTDFLIFEINNTFANFYPRNLSVEVTTKLIEKAEQGFYPVTAPVGYENKRIKHRSYIQINPDKAPFIKRIFELYSTGEYSYKTLATKMREEGFMISPAVKCGKSNIEDILNNPIYMGDFVYKGKRYYNGKHEPIISRELYSICQEIIKSRTSGRISKHDFVFSNLIKCSKCGCFMVGEIKKGRYIYYHCTGNRGGNCKSKSYIREEKIEKAILDTLATIRLSDDVLELAKRSFKYELENQNIYNEERIKSLDEEIKKMKERSDKLFNLVLDGKVNETIFEKKSAEIESTLDDLILSRSAYTKTGFELLKYSENLFELFKMSSGLYSRLDNAKKRELLKLLCSNFSYDGENIRITIKKAFQPIVEIAKLEKLGLKRQSSNFLKCIQTLVNTMQTPENILMLEKFSTLKKDFLVA

SEQ ID NO: 9979 - protein, 531 aa, Unknown
  Description of Unknown: Integrase B9980 sequence
  cd00338,IPR011109,IPR038109,PF07508,Coil, PS51736,IPR036162,G3DSA:3.40.50.1390,IPR006119,PTHR30461, PTHR30461:SF3,PS51737,PF00239,SM00857,G3DSA:1.10.10.2600, SSF53041
MLVAVYCRYSSDRQRETSIADQLRVCQTFADQRGWSLVAMHSDEEVSGSTPVRARRGGAALLADAMADRFGALVLEGLDRLSRDLVEQETIVRRLEHRGIRIIGVCDGYDSEATGKKLHRGMRGLINEVYLDDLRAKTHRGQAGQVSRGYSAGGGGYGYRSTHDGTGYRIEIDEDQARWVRWIFEHFAEGWSSKRIVAELNRLRVPSPRGGTWAVSAVYGSAAKGCGILHNELYVGRYIWNRSQWVKDPDTGKRQRFERPRSEWLIEERSALRIIDQAIWDATRARFSTSYKEGGTKGKGRAPRSLLGGLMKCGYCGGAVVAINGKLYGCATKHDRGAVVCRGVFAPRQETETRILAGVREELLRPSAIAEMQQMVTEMLRAELAVGESEAKAARGRVVELEREIDRLVEAIASVGISDALTQRLRNAEAELASVRRTAATSSGKKVEIPNLKSIYREQVMNLQEALRSDIQQARNALREMIGPITVVERNDEVWAQIDTGPEAMLKASGLYIGLVAGACFGSNIREIRIS

SEQ ID NO: 9980 - protein, 531 aa, Unknown
  Description of Unknown: Integrase B9981 sequence
  cd00338,PTHR30461:SF21,IPR011109,PF07508,Coil, PS51736,IPR036162,IPR006119,PTHR30461,G3DSA:3.40.50.1390, PS51737,PF00239,SM00857,SSF53041
MAIDAPGIPTRAIIYCRISRDREGAGLGVERQREDCEALAKQLGVEVVAVYTDNDLSAYSGKPRPGYQQLLNDLRDGQADTVLAWHTDRLHRSPAELEEYIDVCEPRRVETRTVKAGHLDLTTATGRMIARQLGVQARYEVERMVERQRRTRDQMAEQGKNFGGRRPFGYEGDRITPRALWCPSCGVEEGFSVVQRCSSCSHAGQFVPGRVCGSCGAREGVAVVALCGCGADAEVVEGSEAWHVRWAADAILAGASLQSIAAAWNEKKVATSTGGEWAGPEVRSMMVRPRNAGIIRHRGQEAGPARWPALLEEPLWRSVVAVLSDPSRRTSPGNERKYLGTGLYECGLCPSPNSVRTVTSNRKGGRHELAYGCRISKHVVRKAEPVDAYVQTVVLDRLSRDDAAELLAEREDPVDVRGAQRDMREARETLDALAEQLGAGEMDVQEWRVARKSARERLENAERVLARAVDVNPVAGLIGADDVDAEWERLDLSRKRAVVSYLMSVKLLPARRGRIPGGGYFDSDSVEITWK

SEQ ID NO: 9981 - protein, 400 aa, Unknown
  Description of Unknown: Integrase B9982 sequence
  cd00338,PF13408,IPR011109,IPR038109, PF07508,PS51736,IPR036162,IPR006119, G3DSA:3.40.50.1390,PTHR30461,IPR025827,PS51737, PF00239,SM00857,G3DSA:1.10.10.2600,SSF53041
MRNITEVTRQPKSLFLTDRLKVCAYVRVSTDHREQLNSLENQTQYYERLISSNPDYEYCGIFSDAGISGAKENRPGFLAMLEKARIGEIDLIITKSISRFARNTLMLLKYVRELRDMGVGIIFEEEMVNTLKSEGELLLTVLAAIAEEERKSVRSNVQWAMQNKCKRGEVMVDTNRLLGYDKDSKGNLIINQEQAKIVRQIYKLYLNGISGYKIAQMLNDQSIPTYNKKPWSSHRIIRIISNEKYAGDCLMQKSFVADNGRQIINRGQKDKYYIEDNHPAIITRLDWEAAQIIREKRRKKIYPFSSMLRCPFCGASLTRVVHEGQWVSWICATYLHKGKAMCQGMRITDGILQELVKDIHIIEPMVVEGVIYGKGRKKRTKEDFRLVPAAQYRGYKSNRE

SEQ ID NO: 9982 - protein, 525 aa, Unknown
  Description of Unknown: Integrase B9983 sequence
  cd00338,PF13408,IPR011109,IPR038109,PF07508, Coil,PS51736,IPR036162,PTHR30461,IPR006119, G3DSA:3.40.50.1390,PTHR30461:SF3,PS51737,IPR025827,PF00239, SM00857,G3DSA:1.10.10.2600,SSF53041
MSANVIIIPPRKIAGNTVDKHEDKPKLRVVAYCRVSTDSEEQATSYDTQVQHYTDYISRNPLWEFAGIYADDGISGTSTKKRVGFNDMIHDCMSGKVDMVITKSISRFARNTIDCLKFVRQLKDKNIPIIFEKENINTMEASGELLLTIMASLAQQESASLSQNVKLGLKFRYQEGKVQINHNWFLGYTKDDEGNLVILEQEAKVVRRIYREYLEGASLRDIAEGLEKDGIKNGAGHLKWNLSNIKGILQNEKYIGDALLQKTITTDFINHVRIKNDGTEPQYYVKDSHTPIIPRDIFFKVQEEMLRRANMFSGEENKKRRVYSSKYALSSLCVCAKCGDVYRRIAWNNRGVRSVVWRCCTRVENGPSACDAPTVQENELQSAIVKAINKVFSISDEVLDTLKNNIREIIAGNNLSEIETVDKKIADKQAILLTLLKAKKDYTKIADEIDELKGKKQQLLIEKAGQEDAKRRIREMEDFLKNERHDISEYDEKLVRKYIKKIKVYEDRFSVTFKSEISVDIERAS

SEQ ID NO: 9983 - protein, 531 aa, Unknown
  Description of Unknown: Integrase B9984 sequence
  cd00338,PF13408,IPR011109,IPR038109,PF07508, Coil,PS51736,G3DSA:3.40.50.1390,IPR006119,PTHR30461, IPR036162,PTHR30461:SF3,IPR025827,PS51737,PF00239, SM00857,G3DSA:1.10.10.2600,SSF53041
VAKRKRDPNAPKLGVIYARYSSANQREESIEQQVAECRIFAEAQGITILDVYADAAQTGRNDKRQSYQKLLADARHGGFSYIIAYKSSRISRNMVDALVFEAEMLRNGIKTLYAKEEFGNNAAGRFALRTMMNVNQFYSENMGEDIKRAKDDNARQCKANGIIPYGYKKGPDGKLVIDENTAPIVQEIFRRVRSGENYIDIANDLNARGLKTRQGNPWNKGSFHIMLKSERYLGVYIYKDIRIEGGNPAIIDLETFLEVQKIVSDKAKIRGRHRSDEDYLLTGKLFCGKCKAHMNGMSGKGKGGDIYRYYSCSTRRLTGECDKEHVQKDYIEREVAKAVRDYVLRDDVIEWMIRTVMEFQDRMDITAEINQLEQQIADNENATANLMKAIEQGIITQTTKDRMFALEEEKSELRKQLAEAKARDISVSPQEIRTYLNSFRRGDVSDPSYQARLFDAFLTAVYVYDDKLKIVFDMYDGTGKTVDVELLDVPAEEAEFSLKLPYAPAYGNEANTTITMISGVFVLTVAFISRN

SEQ ID NO: 9984 - protein, 530 aa, Unknown
  Description of Unknown: Integrase B9985 sequence
  cd00338,IPR011109,IPR038109,PF07508,Coil, PS51736,IPR036162,G3DSA:3.40.50.1390,PTHR30461,IPR006119, PS51737,PF00239,SM00857,G3DSA:1.10.10.2600,SSF53041
MNPADIQRKINSASVPAFAYDRVSTSSQAEEGISLAYQETQAEQYAQRAGIEIVHFFTVAESARSSERRKMFREMIEAARNFGVRHLIFKNVDRMSRNYADLVLIEQLIDEEGFHVHFYQNNKMLNADSNHNDRFILGIEIAVAKQLSDKLSHDMREVHRHKVRHGIMPGRSLGYTYDRDTKRHMIDPETEEMLRYLFDTFDNEKISVAEMTDRMNQRGYCTSTGRPWHKSITHRLLSSPVYCGMFEYRGEIFEGVHQAFYPAERYYSRRCRLDMKYTGTRKRNYEFLLAGLLQCQGKTLTGEVKKNKYIYYTNRFNGASFRQEDIFRWIDADIESIQFSPNFAEYIKELFRESVQEQEQGNRHVIGAVNRQISKIRVRIDRLLDLYVDGDVDRESLTRKVDLYRREISRLQENRKRAELDKAKFILKSADIVDQIQKFPALWQNSTPEEKAELLPIMATHVTIENERASVAWRKPFSIILIPELIDHAQKVRKFHNNLHEWDDFRTLIPECEDLVFSRISPELQFFVAA

SEQ ID NO: 9985 - protein, 530 aa, Unknown
  Description of Unknown: Integrase B9986 sequence
  IPR038109,PS00397,IPR006119,PS51737, PF00239,G3DSA:3.40.50.1390,PTHR30461,IPR025827, SM00857,G3DSA:1.10.10.2600,SSF53041,IPR011109, PF07508,PS51736,IPR006118,cd00338,PF13408,IPR036162,PTHR30461:SF3
MNEKVAIYIRVSTKYQIDKDSLQVQRRELIAYSELILNIRDYVVFEDPGFSAKNTDRPEFQAMMARIRAGEFSHILVWKIDRFSRNLLDFAEIYKELKKSGVAFISKNEQFDTSTPVGEAMLKIILVFAELERNMTADRVTSVMLSRANNGQWNGGRVPLGYSWDSESKTFSIIRQQAELVQLIFDTYEEQRSLIKTASVINSLGFTSKNGKTWKAETIHSILTNIFYTGAYRYNVHGYGQGYTLKNDSEWITIEDHHPTIIRKIQFNRVQHMLSSNNKTSTRQFRYNKNIHIFAGLLTCGQCGTNMSATPGKRRIDGWLPSVYGCRGRRNKTCPQKYVYDLTVAPFIFNTIQTILTNREESPAYIESKLKEVLGVNSVKGLDDLLSNQSDTLFSTPTSVSISEHEKLLTSKNRIENALTRLKNLYLFSTDSIPEKDYIIEHTELTAELEKINKSLASIPDDSEDNIRRASYYLMADQLSKGTFDFMTHAKNMDRSVLRTFILATVKEAVVLDDTICQITFQNNKTIFFQ

SEQ ID NO: 9986 - protein, 530 aa, Unknown
  Description of Unknown: Integrase B9987 sequence
  cd00338,IPR011109,IPR038109,PF07508,Coil, PS51736,IPR036162,IPR006119,G3DSA:3.40.50.1390,PTHR30461, PS51737,PF00239,SM00857,G3DSA:1.10.10.2600,SSF53041
MGRIKENGLYCAYLRKSRRDMELEALGQGETLARHEKQLADLAARLGIRIARTYREIVSGDTIAERPQVQQLLRDVNAGLWDGVLAVDVDRFGRGDSIDQGVIMQSFMYAGVLIITPDKIYDPSDDSDAEFFEIKLFFSRREYNMIKKRMQRGRLASALDGCYMGSRPVYGYERVKLQGRKGWSLKVVPEKAAIVRSVFDWYAHGMDGRDVGAAVIADRLNQMGLRTDMGNAFEASYIRHMLQNPVYIGKVQWNQRTTQYAIRDGRRVHSRPKNDDPVLVDGHHQAIIDPALFERVQQMFAAHEKRPRNKMADVANPLAGLVVCSQCGRHLQLKGDRHRRAGFLGCVTQRCPTCATSIDVVEGVVLDALRGWISAYEARADAPAPEPSADVRASDAARAQLTDQLAALNEQRKKNFDLLELGVYDVPTFRERRADLAARIAEIHAALAALDAPPKPDPVVTILPQVRTVLGSYDLAATPAEKNTLLRSVIDHIAYTKTQRCYRNSAPTDHLSLVLFPRVPSAGDGDGSGF

SEQ ID NO: 9987 - protein, 530 aa, Unknown
  Description of Unknown: Integrase B9988 sequence
  cd00338,PF13408,IPR011109,IPR038109, PF07508,Coil,PS51736,IPR036162, IPR006119,PTHR30461,G3DSA:3.40.50.1390,PTHR30461:SF3, PS51737,IPR025827,PF00239,SM00857,G3DSA:1.10.10.2600,SSF53041
MLYDIKQIKIEDLIIYLRKSRSDDPSMTVEDVLAKHEEDLQEYCEREFGQKMPESQIFREVVSGETIDDRPVMTSIMKMLETGKIAGVLVKEPSRLSRGDLQDCGRIINTFRYTNTLVITPDTTFNLTNERDRKFLEMQLTKGNDYLEYNKQILNSGRIRSVKRGNFIGSVAPYGYKKVKIGSGKDSCYTLEIIPEEADNLRLMYHLFINEGYGFMRIAKHLDNIGVKPRKSETWSPAAIKDMLENPVYIGKIRWNWRKTEKTIVDGKIVKVRPKTKDETQWIFVDGKHDPIIDDATFQAALDKRGKNVRVTKGKELKNPFAGLLFCGTCGSAMSYKKFKQYRGNYENNCENMLCNRQSWCKTKSVKYDAFLDRVIATLERTIADFEMKLQNDDGDAAELHKNIIKNLEMDLKKLKDKDIRQKDAYEDGIYTKEEYASRNAKLQEQISETMEALCQAKDSVPPSIDYTEKIVRFTDCLTALKDPEVPAIEKNMLLKACIEKIVYHNKMESKPGIGRYVENVFNLDIFLRL

SEQ ID NO: 9988 - protein, 438 aa, Unknown
  Description of Unknown: Integrase B9989 sequence
  cd00338,PF13408,IPR011109,IPR038109,PF07508, PS51736,IPR036162,IPR006119,PTHR30461,G3DSA:3.40.50.1390, IPR025827,PS51737,PF00239,SM00857,G3DSA:1.10.10.2600, SSF53041
VRTITRIEPKTFIIPTKLRVAAYCRVSLEKESMLHSLSAQVSYYSEFIQNHRGWQYVGVYADEAISGTSNIRPEFNRLLVDCREGKIDMIITKSISRFARNTLTMLEVVRELKSINVDVFFEKENIHSISGDGELMLTILSSFAQEESLSVSENCKWRIRNQFKTGVPYHFSIIGYELKNNKLEIVPREAEVIRMIFNDFLSGMGKIAIIKKLNAKGLMTRNNKLWQEKAVDRILRNEKYAGDLLLQKFYSSNHLEKQKRVNVGQLPSYYITDSHEPIIDRDTFERVQLELEKRARIYNAGAVTGMPHSFAGKIVCGECGDNYRRRITHAGEKYEKAVWICTTKNRLGKEACGSKQIPEDIISKTTAEVLGIKDFDEDLFSQNIKMIKVTDTNHLVFVFLNGLECIKLWQNNSCRNSWSEEKRQKQREMITCRLQEQK

SEQ ID NO: 9989 - protein, 530 aa, Unknown
  Description of Unknown: Integrase B9990 sequence
  cd00338,IPR011109,IPR038109,PF07508,Coil, PS51736,IPR036162,PTHR30461,IPR006119,G3DSA:3.40.50.1390, PTHR30461:SF3,PS51737,PF00239,SM00857,G3DSA:1.10.10.2600, SSF53041
MYYNELRHYLPEEILVYLRKSRSDDPMLSVEEVLQRHQQILEEWIERNLDGPIPEENYFREVVSGEQLETRPEMMKLLKLIESPKIKAVLVVEPQRLSRGDLEDCGKLIKLLRYTDTHVITPMKIYDITNEYDRDGFERELKRGNEYLEYTKKILKRGKVQSCKDGNFIGSVPPYGYNKTIVYDGRKKCPTLTINEQEAEVVRMIFDMYGNRDLGRATIAAELNRMGIKPRSNELWSRTSILSMLRNEVYLGKVKYGYNKTIHVVEDFTVRQTRKITGDYVLADGKHEPLISEELFNRCQKNNGKQAKVKSNKILSNPLASLIFCEECGYALTYRTYNDGITQARYQCRRKEVHRAGSIIASRVWSAVADTLEAQIPNFEVELRENTGEDKKRKEQAIALLQNRLADIERKEISLWEKYTEEAMPRDIFDKLKDKITREKEEVTLSLQNEKQIDSRGIDYKEKIVSFHQAVDALRDSEVSAAEKNKLLKKCVKRITFKIPHSERVSMQVEGANSRGWTQPTPEINIELKF

SEQ ID NO: 9990 - protein, 530 aa, Unknown
  Description of Unknown: Integrase B9991 sequence
  PF13408,PS00397,PS51736,IPR036162,IPR006119,G3DSA:3.40.50.1390 ,PTHR30461,mobidb-lite,PTHR30461:SF3,IPR025827, PF00239,SM00857,cd03768,IPR006118,SSF53041
VSPSPSPALRWISYCRVSTDEQASEGVSLDAQAAACRAYAQAKGWLLAEEIQDAGASAATMKRAGMQRVLAELQAGAGVVVYRLDRLTRSLRDLLDLVALAGDRGGLVSVSESLDTTNPMGRFTIHLLGALAQWERETISHRVKGAMQHARGEGFYVGGGVPAGLGLVSEGARKRLVRGKYADAVAPIWGMVLRGASLSDVGATLRAAGVPGQWTKNRVRGLLLATYCTGLLVDKGTQEAVRSTLAKRPGLPGRPPAGEARALPASPVAGIARCPACGATLIQVSARGRGGRYRYLRCVGRAKGVCTAKDRRAEPVEAGIAVAVSHALRGGDYTRAWVSTLRGETQRAEGLAAERGRLTVERDQTRARAEELSLSGPRPSDPAFWVAMRPLTDRLTVIESRLAEIEGKLAASEGQGLSAEEILSRLELAGAGLAEAAPERQRLVYDGVLAAATVHEDRVELRLFPPDETSTPPERGGGSFQSRLWLGSRPIPTNRSRIKGRLCRMIRLDVPRRSGSLARCAVPAREGSKA

SEQ ID NO: 9991 - protein, 530 aa, Unknown
  Description of Unknown: Integrase B9992 sequence
  cd00338,IPR011109,IPR038109,PF07508, Coil,PS51736,IPR036162,PTHR30461, IPR006119,G3DSA:3.40.50.1390,PS51737,PF00239, SM00857,G3DSA:1.10.10.2600,SSF53041
MEQYLIYLRKSRSDLEAEAHGEGETLSRHEHTLLELAKRQHLNVTDIYREVVSGDTIAARPMMQRVLSEVEQGVWSGVLVMEVERLARGDTIDQGIIAQTFKFSGTKIITPIKTYDPDNEFDEEYFEFGLFMSRREYKIINRRLQRGRLASAKEGKWPSGLAPFGYRRVKLKNEKGCSLEPIEEQAAIVRMIFDLYTVGLQDEDGSARPLSLGSIATRLNDMHIPSPSGSQWARITIRGIIKNPTYIGMVRWGSRETKKKVVDGKVVSVRGPADPEKECIFKGIHPPLIPKETFELANDKLTRSENTSTHKEKVVRNPLAGLLVCSECGRQMMRMINPVHPDMPVVRCPRRGCPNCSSYLPIVEGRVIQGLSEWMKGYELEWSSAAASSSVSSVGVREKALASAEAELRKLQQQLERTHDFLEQGIYDTDTFLSRSRMLSDKIAAAKDSVARCSRELTEEKLRETSRRDIIPKVKNLLDVYPLLETAEEKNALLKEVLEKVVYQKLNEKRKKSPDGFTIEIYPRIPKSEK

SEQ ID NO: 9992 - protein, 530 aa, Unknown
  Description of Unknown: Integrase B9993 sequence
  cd00338,PF13408,IPR011109,IPR038109,PF07508, Coil,PS51736,IPR036162,IPR006119,G3DSA:3.40.50.1390, PTHR30461,PTHR30461:SF3,PS51737,IPR025827,PF00239, SM00857,G3DSA:1.10.10.2600,SSF53041
MANLRAKTKIINIDPNKVAIYVRWSTDEQAEGTTLTIQLERSKQFILSQGWTISEDLIYIDEGYSGGTLDRPAIKKLRKDVDNGLIDCVVIFKLDRLSRNIVDTVNLVLEEWDDTAYIKSVTEPFDTSQQIGRQILTMLAGFAEWERYNIKLRTFEGKIETVEKGFSPGIKPPFGFRIGEKTGTFEIVEQEANIVKRIFREYRNGKGTSLICTELNNEGIQFGVGKKWNSNTIAYMLSNQLYIGRLIYGKLQNNPKRLKKDGEPYRKRRDVEDIMVKDLTEEVITPIITVEEFNLIQKIRKSRNVFMEHKTSGRIFTSPHLLSGLLRCKQCNYGLIARGKQKGDNHSYYVCRGNKQKGTGFCNAGYIRQDKLDKLVSKRCADRYLSEEMSLIDDFLEQNKIRLSELNTSLIEVDTSLKRLEKEFENIKLKLRKDNLDVNTFNMIKNDIDKEEKGLKEKKEVMIEEINKINASKQDDKEIKELCLQFSNWELIPLEIKKQILRKCIDYVLVYKSKGKETEKTVFDYHIEWK

SEQ ID NO: 9993 - protein, 530 aa, Unknown
  Description of Unknown: Integrase B9994 sequence
  cd00338,IPR011109,IPR038109,PF07508,Coil, PS51736,IPR036162,PTHR30461,IPR006119,G3DSA:3.40.50.1390, PS51737,PF00239,SM00857,G3DSA:1.10.10.2600,SSF53041
MEQYLIYLRKSRSDLEAEAHGEGETLSRHEHTLLELAKRQHLNVTDIYREVVSGDTIAARPMMQRVLSEVEQGVWSGVLVMEVERLARGDTIDQGIIAQTFKFSGTKIITPIKTYDPENEFDEEYFEFGLFMSRREYKIINRRLQRGRLASAKEGKWPSGLAPFGYRRVKLKNEKGCSLEPIEEQAAIVRMIFDLYTVGLQDEDGSARPLSLGSIATRLNDMHIPSPSGSQWARITIRGIIKNPTYIGMVRWGSRETKKKVVDGKVVSVRGSADPEKECVFKGIHPPLVPKKTFELANDKLARSENTSTHKEKVVRNPLAGLLVCSECGRQMMRMINPVHPDMPVVRCPRRGCPNCSSYLPIVEERVIQGLSEWMKGYELEWSSAAASSSVSSVGVREKALASAEAELRKLQQQLERTHDFLEQGIYDTDTFLSRSRMLSDKIAAAKDSVTRCSRELTEEKLRETSRRDIIPKVKNLLDVYPLLETAEEKNALLKEVLEKVVYQKLNEKRKKSPDGFTIEIYPRIPKSEK

SEQ ID NO: 9994 - protein, 530 aa, Unknown
  Description of Unknown: Integrase B9995 sequence
  cd00338,IPR011109,IPR038109,PF07508, Coil,PS51736,IPR036162,IPR006119, PTHR30461,G3DSA:3.40.50.1390,PS51737,PF00239, SM00857,G3DSA:1.10.10.2600,SSF53041
MEQYLIYLRKSRSDLEAEAHGEGETLSRHEHTLLELAKRQHLNVTDIYREVVSGDTIAARPMMQRVLSEVEQGVWSGVLVMEVERLARGDTIDQGIIAQTFKFSGTKIITPIKTYDPDNEFDEEYFEFGLFMSRREYKIINRRLQRGRLASAKEGKWPSGLAPFGYRRVKLKNEKGCSLEPIEEQAAIVRMIFDLYTVGLQDEDGSARPLSLGSIATRLNDMHIPSPSGSQWARITIRGIIKNPTYIGMVRWGSRETKKKVVDGKVVSVRGPADPEKECVFKGIHPPLIPKETFELANDKLTRSENTSTHKEKAVRNPLAGLLVCSECGRKMMRMINPVHPDMPVVRCPRRGCPNCSSYLPIVEERVIQGLSEWMKGYELEWSSAAASSSVSSVGVREKALASAEAELRKLQQQLERTHDFLEQGIYDTDTFLSRSRMLSDKIAAAKDSVARCSRELTEEKLRETSRRDIIPKVKNLLDVYPLLETAEEKNALLKEVLEKVVYQKLNEKRKKSPDGFTIEIYPRIPKSEK

SEQ ID NO: 9995 - protein, 530 aa, Unknown
  Description of Unknown: Integrase B9996 sequence
  cd00338,PF13408,IPR036162,G3DSA:3.40.50.1390,IPR006119, PTHR30461,IPR025827,PF00239,SM00857,SSF53041
MNLSPFSRGDKVVAYCRYSGGEEQGHKDTSTDEQEAAIRRFCDETGLSLIKVYADPFVSGRSTKGRDHYLEMMSDLLHKKIKGIAGIIAWDFERLHRNVDQATMDAARLRMVGYKIFSLQQPVVDSGPFARVMEAMYMASAQNQSDMISADVRRALQSNFTRFRVIPRTNIPDGWIAVPVDMGTYSDGKPRVGYRAEPDPDLADRIRAGILKRMEGATMDEVKAEIGGIFATKPRETIRHLMMKTLLFGQLTYGGTTMDDYCTPIIDKETFDRLQIYNEQAPREHHKPLGHFSPNRPLLSGLLYCGECGKKAFLDRRKAKGHVYETYYCNDYHVGFRRELLDDLVITKAIELLSDAQFSKDVAALIAQAGNLEALPDPKETAAELARIDRKIARLTEAIEDSDEPPASLVKRLSELEHQRAELTASVPADTDGSRDRILAEADRLRRTILDVLTNKKSTTDSLRDALSLFVQSVTIYHDNRVRITYTLPGLAKLQVTPEEKSKRPWSAFAVTCNFEIWVTVDRRGGQPSL

SEQ ID NO: 9996 - protein, 530 aa, Unknown
  Description of Unknown: Integrase B9997 sequence
  cd00338,IPR011109,IPR038109,PF07508, Coil,PS51736,IPR036162,IPR006119, PTHR30461,G3DSA:3.40.50.1390,PTHR30461:SF3,PS51737, PF00239,SM00857,G3DSA:1.10.10.2600,SSF53041
MYYNELRHYLPEEILVYLRKSRSDDPMLSVEEVLQRHQQILEEWIERNLDGPIPEENYFREVVSGEQLETRPEMMKLLKLIESPKIKAVLVVEPQRLSRGDLEDCGKLIKLLRYTDTHVITPMKIYDITNEYDRDGFERELKRGNEYLEYTKKILKRGKVQSCKDGNFIGSVPPYGYNKTIVYDGRKKCPTLTINEQEAEVVRMIFDMYGNQDLGRATIAAELNRMGIKPRSNELWSRTSILSMLRNEVYLGKVKYGYNKTIHVVEDFTVRQTRKITGDYVLADGKHEPLISEELFNRCQKNNGKQAKVKSNKILSNPLASLIFCEECGYALTYRTYNDGITQARYQCRRKEVHRAGSIIASRVWSAVADTLEAQIPNFEVELRENTGEDKKRKEQAIALLQNRLADIERKEISLWEKYTEEAMPRDIFDKLKDKITREKEEVTLSLQNEKQIDSRGIDYKEKIVSFHQAVDALRDSEVSAAEKNKLLKKCVKRITFKIPHSERVSMQVEGANSRGWTQPTPEINIELKF

SEQ ID NO: 9997 - protein, 530 aa, Unknown
  Description of Unknown: Integrase B9998 sequence
  cd00338,PF13408,IPR011109,IPR038109,PF07508, Coil,PS51736,G3DSA:3.40.50.1390,PTHR30461,IPR006119, IPR036162,PTHR30461:SF3,IPR025827,PS51737,PF00239, SM00857,G3DSA:1.10.10.2600,SSF53041
MYEDIKKVCLYARFSSHNQTEQSVEGQVRVCTEFCQKHGFHIVETYVDRATSAAHDIEKRTSFLKMISDSAKDKFQAVVVYKLDRFARSRYDAATYKYRLKKNGVVLISATENITNTPEGIILESVLEGMAEFYSAELSQKITRGLRESALKQNSAGGQIPLGFKVENKKYVIDEETAPIVREAFQRYADGEAVADICRDFNLRGYKSSKGAEFGKCSFTRMFKNEKYIGTYVYGKYKFENAIPAIIDMKTWRIVQARMNKQKKTHSRGKQKYRYLLTGKLFCGHCGYQMTGNSSASLDYGYYQCYGKSSYKSNCSKRNIKKNIIEEIVVKDALSLLTDERIKEIAKVACNTNKAYIQEETNIYVIKEKLREVEISLSNITKAIESGEAPVTLVKRMNELEAEKRTLLKEQKKESADVVQLDEEQVIYWLSQFKGGDIKDEEFCRNIIDLFVNSVTVWDEPDGTQKVVIAYNLQSENKKTYRLNSDGKSATDMNGNTSPCATGEYASITIPLSWQYLIRSSGVLEMWQST

SEQ ID NO: 9998 - protein, 530 aa, Unknown
  Description of Unknown: Integrase B9999 sequence
  cd00338,IPR011109,IPR038109,PF07508,Coil, PS51736,IPR036162,PTHR30461,IPR006119,G3DSA:3.40.50.1390, PTHR30461:SF3,PS51737,cd06455,PF00239,SM00857, G3DSA:1.10.10.2600,SSF53041
MKLRCYVRISTEGQQDNYSIPQQRADAEAFAKQQHCTDFLIYEDVRSGADITRIGWNKLLADIENGECDCVWVGRPDRFSRNTQDGLMAIDVLRKHNVRYFIGGIEYDIFNEYTKLLITMQFAFSELERNLIKQRTMMGKIRAANSGNRINNNTLGYENVGKKSVKIIDDEAEMVRKIFTWYAVDNLSYKQIAYRLNTEGYKCKKYGQTFHYKDGSEKKVGLTWTDARMPDIIKRPEYVGLTWNWNKTELIKSNIYPPIIDKELWDKANNKFKQRTKETTYKGYRITYHTVSGLVRCKKCGAGYFFRDGKYQYYVHKVSSQKNTDCTQLPTCLTASTLEDAFAVLFINTFTNTDELKKLYDLSSKAIEKDRQELEAIEKRIGERIDDINTKLKRFTVAIESGMDIDDIKQRYNELKDERSELEKNLDKAKKEYQLKTTQYDEIARQFTVDSLGEFIQSDGKNRRLIYFKTIRSAEIDDKVLTIEFITGRIIKLDVTSYPAWLMAQIKNYQAGLYSVEWINEKRLALSLHT

SEQ ID NO: 9999 - protein, 530 aa, Unknown
  Description of Unknown: Integrase B10000 sequence
  cd00338,PF13408,IPR011109,IPR038109,PF07508, Coil,PS51736,G3DSA:3.40.50.1390,IPR006119,PTHR30461, IPR036162,PTHR30461:SF3,IPR025827,PS51737,PF00239, SM00857,G3DSA:1.10.10.2600,SSF53041
MKKTTSPRGTVAVIYARYSSHQQRDVSIEQQVSACRQYAQQHGYTVLRVYDDHAMTGTNDNRPAFQQMIRDSASHAFDYVIVYTLDRFSRDRYDSAVHKHTLKENGVRVLSAMEHITDDPTGALMESVLEGFAEYYSKELAQKVRRGLNDNARRGILNVAPGFGYRRGADGKYEIIPAEADVVREVFSRVANGEQYASISRDLNQRGIRTKNGGEWGRSSYTYILQNENYIGVYNYADIRVEGAIPPIVDRETFDRVQEMRRIAKHGPQKRRRENGTYLLTGKLYCGECGAPMVGISGTSKTGDLHFYYVCKCKREEKRCHKRNVRRDDAEELVAQSLARMISDPQVVNWIADSVIKYQAERNVNPEVPILTERFADVQRKKQNVMNAILAGVLTPTVKDTLQQLEAEEADVAKKLDAARRSTELTFTREDVIAFLQLTADGDIRDKAYQERLIDTLLVRAYMYDDRLKLVCNFTDMPAYEVPINIEDDEGDEGEEVRIDSCSVHLCHIIRTIQIRMIAGFFVAVARLAE

SEQ ID NO: 10000 - protein, 485 aa, Unknown
  Description of Unknown: Integrase B10001 sequence
  cd00338,PF13408,IPR011109,IPR038109,PF07508, Coil,PS51736,G3DSA:3.40.50.1390,PTHR30461,IPR006119, IPR036162,PS51737,IPR025827,PF00239,SM00857, G3DSA:1.10.10.2600,SSF53041
MRKRAVAYARVSSNSASQEHSFEFQKEYWDRKLSNDPNYEYVGLYADRGISGKFANRRPQFQLMLSAIKSGNVDIVFTKSVQRFARNTEELLTIVRELRELGVGVFFEKENINTLTNDNDLFLTIAVAVAEDDLSRYSQNVVWSIQDKFKKGHPVVNGRIYGYSMGKGKGDSFRIIESEALIVNRIFELYLYGNSVTTISDILNQEKIPSPLGKTWHQSCIDRILRNEKYVGDCLLQKYYREKWNSKVTNKGVRDKYLVENHHEPIVSRELFDKVQEMIKQRSNHKLIGRIIKPFPFTGLIICGDCGKHYRHKVSKSFYSKDFDVWMCNSKKDVCHSVRVKDDELKQRFVEAYNEFILMKYQGNEEKLIQDEIDALISQKNELDRLKSNGWISLTQYQSEIDKIIKPLSIKKGELSALKLRKLSEKDFRVIESFDESKVEKFLSKIVISGININFHFYNGVVVTRTIQNTRIYDKDKKLLGIKEE

SEQ ID NO: 10001 - protein, 530 aa, Unknown
  Description of Unknown: Integrase B10002 sequence
  cd00338,PF13408,IPR011109,IPR038109,PF07508, Coil,PS51736,G3DSA:3.40.50.1390,IPR006119,IPR036162, PTHR30461,PTHR30461:SF3,IPR025827,PS51737,PF00239, SM00857,G3DSA:1.10.10.2600,SSF53041
MKKKIDDCSGKNAVIYARYSSHAQRDVSIEQQVQKCQEYAQRQGLTVVETYSDAAVSGKTDNRPAFQRMMKDSKKHRWQYVIAWKSNRMGRNMMEAMINNAELMKEGISCLYVEEDFDDTAAGRFALRNMMNVNQFYSENMAEDIRRGLMDNAEKALVNTRPPFGYAVGPDRRYVIREDQAEIVREIFNRILEGWSFISIANDLNQRGIKTALGREWNKSSFHAMIKNEMYLGVYKYSSVRIEGGVPAIIDRGTFEEVQRKVQTKRNAPGQPRNSTGDYMLTGKLFCGHCREPMVGVSGTGKHGELHYYYACQGRRRKKNGCEKKNVVRDKIEQQVINAIRDYVLNDDVIDSIAEAYGRFYESARKDSVLQAMRERLKENQKATANLMKAIEMGIITETTKARLLELEAEKKDLESSINSQEKVLLRLTPDHVRFFLERYKTMDFEDREVQRQLIRTFVQEIYLYDDHMKILFNFDSSGEHRIDFDEIECENSSPASGSYSDASRPLYIVYTNPAIVSIFAHGFVLTVPV

SEQ ID NO: 10002 - protein, 498 aa, Unknown
  Description of Unknown: Integrase B10003 sequence
  cd00338,PF13408,IPR011109,IPR038109,PF07508, PS51736,IPR036162,IPR006119,PTHR30461,G3DSA:3.40.50.1390, mobidb-lite,PTHR30461:SF3,IPR025827,PS51737,PF00239, SM00857,G3DSA:1.10.10.2600,SSF53041
MAKQRAVAYIRVSTKSDAQSHSFEYQLEYWRNTITQNTECEYMGVYADKGISGRALAKRPQLLKLLTDARQHKFDVVYTKSVSRFGRNTEELLETVRELRELGVKVVFEKEQIDSFNPAAETYLTIAASIAENDLQIYSDNMRWSIRNRFKNGWFSVGHGIFGYRTNKDTDELEIEPSEAETVRRMFDLYLEGYGTIAIGLILEKENRPNSFGKVKWNRGAILYMLTNEKYKGCALSQKYVQSQGVCRLNKNEAPKYYIENTHPPIISPEQFDKVQAELEKRGKSHKGKGKPIYAFTTKIVCGQCGHGYVHKINSSGKPWANPIWICSHQNFFGTKNCNNRRIKDSVLKEKFVECFNEFIANKTESDEAIELRQRLASLIESENELNLLRINRMIDGAAFAVESASLRKEITAVTMQIAAKEMRGIDKADFTQITEYDDDKVEKFVERVTINNNVVTFTFINGAEISREYTNGPSGNQKGWRDKQRERLEKENKTEVQ

SEQ ID NO: 10003 - protein, 530 aa, Unknown
  Description of Unknown: Integrase B10004 sequence
  cd00338,IPR011109,IPR038109,PF07508,Coil, G3DSA:3.40.50.1390,PTHR30461,IPR006119,IPR036162,mobidb-lite, PTHR30461:SF3,PS51737,PF00239,SM00857,G3DSA:1.10.10.2600, SSF53041
LYYQPKIDFKPEEVIDYLRKSRSDDPLLTVEEVLSKHEAMLDEWAEKNLGGVVPEENKYREVVSGETIAERPEINRVLRLIESPRYKAVAVVEPQRLTRGDLEDIGRLMKLLKHTNTLVATPQRIYDLRDEYDWDAFERELKRGNDYLEYTKKILSRGRLLSVSQGNYVGNTPPYGYDKTFVTEGKRKCPILVPNEAEADVVRMMFDLYVNKDMGCWNICKKFDEMGIKPPKGDHWSANAMTKMLQNIHYIGKVKWNHRKTLTVVEEGEFKKTRPVAKVGEYMIYDGKHEAIIDEALFNAAQAKKGRNTRQKPTTKIRNPLAGLLYCKCGRAMSLRTYKAHNTEPRLLCDGQIYCKTGSCTYAEMEERVISILTDCIKDFEIRLKNDKGDSAKLHARLIKNLEAKQKELDEKELAQWEAQADPDPAKRMPPHIFQQLNEKLLKEKEEVRQALCKAYESMPEPVDYEEKIEQFATALNALKDPKIDAATKNRLLKDCFERIEYHRDAPQRIKSQQVRYYDKEQKEPAISHR

SEQ ID NO: 10004 - protein, 530 aa, Unknown
  Description of Unknown: Integrase B10005 sequence
  cd00338,PF13408,IPR011109,PF07508,Coil, PS51736,IPR036162,IPR006119,G3DSA:3.40.50.1390,PTHR30461, PS51737,IPR025827,PF00239,SM00857,SSF53041
LKTCIYARKSTHKLGQKETIENQIKICRSKGKELGLEIVDIKQDVGTGRDDLNRPEIKELISDALEGKYQCVIMKGISRLFRDTEKGLGLIKLLDRNNIRVITVEEMFDSGNPESRTGTGKLDLSKITMYLMFSEMESKKLGDRVKYTQIEKAKNGEWNQPNNTPFGYSYNPETKKLIVNPEEAKIVKLIFDLYRNGLGIRSIMNYLNGENQEKIKYPTPNKGKLWNQYTINFILKNEAYTGDVIYNKRTKKERTYKNPELYGKDKSDIWIGADYNPEEEWIIARNAHEPIISRDMFADVQRIMNNKATRKGIRSNVGLLAGIAKCGLCGASMTFKRGNRDKNGRIKTRNNYYCMNYIKYGNKVCTSHHVKAEDLENTIIDEIEALAKDEKMLNDLIIEICQIRKNDKEIQRLKNEQNYYENEIEKTLNKMNKLLERNIEGIISDVQFKEMNKRFSEELQKYQEQLLEIKEKIPKLKEEEFRIDEFKKLISRCINLKEKTKEEIRHLLLGLINKVIINEKGEIEKLTYKF

SEQ ID NO: 10005 - protein, 529 aa, Unknown
  Description of Unknown: Integrase B10006 sequence
  cd00338,PF13408,IPR011109,IPR038109, PF07508,Coil,PS51736,IPR036162, IPR006119,G3DSA:3.40.50.1390,PTHR30461,PTHR30461:SF3, IPR025827,PS51737,PF00239,SM00857,G3DSA:1.10.10.2600,SSF53041
MIKAVIYARYSSHNQREESIEGQIRECQEFAARNGFIIIGEYIDRAISGKTDNREDFQRMIRDSEKGHFQAVLMYTLDRFARNRYDSAMYKSKLKKNGVKIYYAKQSIPDTPEGIILESVLEGYAEYYSENLSRNIKRGMMENALQCKSNGSGLALGYNVGADQRYEIDPVGAKIVQEIYQLYADGKSATQIIEYCNERGYRTRRGQPFNKNSLRTLLHNEKYIGIYRFGDVVVEGGIPAIIDKALYDKVQSMLHHNRSARAKKKAKEDYLLSTKAFCGHCGSLMVGESGTSRHGTLYHYYKCANRKRGHSCTKKTEKKDWLERVVVQHTVEKVLTTENIEKIATKAMELIEKETADNRLVLAYESELKEVKKRLANILDLMEQGIATDSTKERLLELESRKKELLALISREKAKKPILTKERIIYWLSSFKNGDIDDVDYQRRVIDTLLNSVYIYDTNGGKGREIVFTFNLSGQNTSRLTVSDIACSAPPIETATHRVAVSIGGSRWNRKGGTSAHTGAKTCWGEHVF

SEQ ID NO: 10006 - protein, 529 aa, Unknown
  Description of Unknown: Integrase B10007 sequence
  cd00338,PF13408,IPR011109,IPR038109,PF07508, Coil,PS51736,IPR036162,IPR006119,G3DSA:3.40.50.1390, PTHR30461,PTHR30461:SF3,PS51737,IPR025827,PF00239, SM00857,G3DSA:1.10.10.2600,SSF53041
MPESLNAVIYARYSSHSQTEQSIEGQLHDCYAYADRCGYRVVGEYIDRALTGKNDDRPDFQRMIKDAEKRQFQLILVWKLDRFTRNRYDSAIYKQRLKKFGVRVVSCMEAITDSPEGIILEGLLESMAEYYSANLSENIRRGQQASIAKGWFCGGPVPYGYIVHDHKLVPDERTAPVVREIYQRYADGEGLSVIAEDLNARGIYSKKGSPFSVNSFSALVPNPVYIGEYTYGGHVVPGCATPILDPSVYARAVARRERNKRAPASARSVTYILQGKAFCGLCGMPLCGDFGTGKNGDRYHYYVCSGRKRRLSKCPKHPEKQDYLEWYVCEQTQQYILASDRLPAISSAVADLYNSEIDDSRLHELERKIRSLESEMNLLVGRLGTVADKFVSRITDRMEQLDADLKETETELSKLRIQQKIRITEKEVAAWLRTFSRGDLFDNDFRLKLIDTFINSVYLWDEKIVIFYNVSGGKQTSVIDPLPLDEIKKDGLPVSDLPVHGGALHDNSEHHPPYFVLVRGMIGLVIFRK

SEQ ID NO: 10007 - protein, 527 aa, Unknown
  Description of Unknown: Integrase B10008 sequence
  cd00338,PF13408,IPR011109,IPR038109,PF07508, Coil,PS51736,IPR036162,IPR006119,PTHR30461, G3DSA:3.40.50.1390,PTHR30461:SF3,IPR025827,PS51737,PF00239, SM00857,G3DSA:1.10.10.2600,SSF53041
MTKAVAYARYSSDNQTDNSIAAQLRAIRDYAAKNGIFITREYIDEAKSATTDDRPDFLQMFTDIAKGLETDYLLIHKLDRFARNRYDSAMYRRKLTQNGIKLIAVDQPLGDSPEDKLLEGLLESMNEFYSLNLAREVMKGMKENALAGKHTGGKPPLGYDVDPSTKKLVINEHESKAVKMIFEMYIAGKTYSAIINRINSLFYKTKENRPFSNTSLHSILTNEKYTGTYIFNRSAPAINGKRNNHSSKSDDLIIRIPDSLPVIITKEDFAMVKKIMERRKKQTGANQAKETYLLTGLIKCGKCGAPMIGNRKSAGRNKTIYHSYDCNNRKRFKTCDAKSVNKEYVEKMVIDNLMSKVFSDRGIVTLTNQLNKIREEKFKQQADEFNTLKKELEEIENQIKNAVKAIMAGLDLVALRDELSEAEKKKVILTQTLKSIVKSELAPITKDFVKSKVSKDKKTISEGTLEEIKNVVQSYVTEVLVNPDNIDTTLVCDFDGGGGAHTFKSKLDYRILRNQSRPSEYKKTLVI

SEQ ID NO: 10008 - protein, 529 aa, Unknown
  Description of Unknown: Integrase B10009 sequence
  cd00338,IPR011109,IPR038109,PF07508,Coil, PS51736,G3DSA:3.40.50.1390,IPR006119,IPR036162,PTHR30461, PS51737,PF00239,SM00857,G3DSA:1.10.10.2600,SSF53041
MKRAIGYARISDEDQSTWSLPGQLELITEYCSQNNIELVATFTDDGESAKNFDRADWKRLEEFVKKNHGQVDQLLVMAWTRFSRNTKEALTMIEQLENRYHIRVVSIREPLHMHPQSPFFHHIRTQMIQYGELELNFIKDRTKFGIHQAQKSGRYLNRAPRGYLNARNEKDEPIIIIDQTRAPLIRHIYDRFLIGDTIDSIRKQVKERGMNVKGNSMVQNILRNPVYMGCIKQIAYYDAPEAIVKGIHEPIIDENTWWKVQALFENKKSIHRSILNEDFPLRGVLKCFCNRNVTAAFSKGRNNLVGYYKCNSHTAINLNAKKLHLQFDEILKEISLPAFHIDYLQKKILENLTAKLRNREKEMQEKQQQLSALQKKIDSMEEKYILGDLDKEAYMKWKGRYHSETSLLQASLADLRRPVDQIWRNYKSSTSDLANLQFIYNKGSVQHKQSFVRMVFNNQLYYQEGVYRTPWIMPVFASKSAFLAEQRLLVIEQPPAETTNLAICAPSGSIIEPLFQLLNLFSEIKSKTA

SEQ ID NO: 10009 - protein, 529 aa, Unknown
  Description of Unknown: Integrase B10010 sequence
  cd00338,PF13408,IPR011109,IPR038109, PF07508,Coil,PS51736,G3DSA:3.40.50.1390, IPR006119,IPR036162,PTHR30461,PTHR30461:SF3, IPR025827,PS51737,PF00239,SM00857,G3DSA:1.10.10.2600,SSF53041
MRERIPGAMINARYSTDNQNPDSIEVQVTKCKEWCHQNGVPILGIFADEATSGMKDSRPQYENMMMQLRQGIGDTVVIYDQSRMFRKMTAWFTFRDEMTSMGVKVISVTQPMIGKDLRDPTNFLTEGSMALFNQIWALQSRQKTLEKMRHMARNGQHTGGKPALGYHVKDGRLVICEEEAKIVRRIFEEYASGKSYREIIAGLNRDGIKTKRGNAFGNNSLHDLMRNEKYIGVLLYGKAPYREDGTRDTHSRDDPYVICVEDAIPPIVSKELFEKVQKQMAQNKRQQGGRPPVKREYPLKGKVFCGDCKSAMTITTSQQKYNYYRCTAKKRLHTCEAAPISAEYLENRVADALRMVLGKPEETNGLIQILRDQAEQLQAGAVNSLQDLIQQEKDVTTKLNNAVEAVLNGLYSETVKSRIAALEQQKATIAKEMRTLKAAVDASAIPERKLRDILDLIISSTDSDANILLSIVYRVEVGKDTITIWTILDSDPTGIIDDTSGGVTITLGVPSGVPRVFVTDRYIRITVAR

SEQ ID NO: 10010 - protein, 529 aa, Unknown
  Description of Unknown: Integrase B10011 sequence
  cd00338,PF13408,IPR011109,IPR038109,PF07508, Coil,PS51736,IPR036162,IPR006119,G3DSA:3.40.50.1390, PTHR30461,PTHR30461:SF3,PS51737,IPR025827,PF00239, SM00857,G3DSA:1.10.10.2600,SSF53041
MKKKIVTPCLPKIAVIYARYSSHNQTEQSIEGQLHDAYAFAEKNGYTVIKEYIDRALSGTSDSRPAFQQMIKESASRQFQVVIVWKQDRFARNRYDSAVYKRILSKNNVRVVSVMENITDSPEGVILEGLLEAMAEYYSANLSENIRRGKAETVRKGLFPGGSAPYGYMRQDRRIVPDPRTAPIVQEIFRRYADGDRPKDIIADLNDRGIRTFSGKVFQHGTIRSILENRIYIGEFYFNNQLVSDTMPAIVDPAVFDRVASRRAFNRKNPAAFRGDSVPSLLLGKVFCGDCGSKVFGGRFTGRSSTYHYYLCTGKNNHLTDCKAKCIKKDDLHYAVCKVVSDFILNKKRRTLESLAESIMEIYRSDIDTSELKALEKQSAKLENDLNKLVESLIEMPESARPRIARKMEDLELQLNELKPRIARKKAETSLCFSKDDFVKFLQITFDDLRNIETQKFIIDKFINSVYVYQDGRIVVYLNHITGLPFGPDDSKPGKDDWKSGRSLPLPPECSPSGFSAGAFLVNFTQNYR

SEQ ID NO: 10011 - protein, 529 aa, Unknown
  Description of Unknown: Integrase B10012 sequence
  cd00338,PF13408,IPR011109,IPR038109,PF07508, Coil,PS51736,IPR036162,IPR006119,PTHR30461, G3DSA:3.40.50.1390,PS51737,IPR025827,PF00239,SM00857, G3DSA:1.10.10.2600,SSF53041
MKFTSTWKISDPLAQYIIYLRKSRKDMEAEALGQTDTLKRHRAALLSLSESRELNVVEICEEVVTGDSIAVRPEVQKVLQLVETGNYAGVIVMEVERLARGDTIDQGIIAQTFKYSDTRIITPNKTYDPNNEMDEEYFEFGLFMSRREYNTIKRRLSRGKEASLREGKWISGKTPFGWLREKLPNDKGYKLVPHPEQAPVLQQIYNWYTGDGCARIGAKAISTRLNSLGVPTNSGSLWRADSVLDILRNPANAGWIKSGGRPETKRIVDGSVVVSRPRTRQEDLKLYKGLHNGLISQEQYDKAVALSYSSASPRGKGAWGTVTSLAGLVRCDQCGRVMVRRPSSGNRRDTLLCPSYGCTTVSAWYDDVEDAVLDALRGWLRELELGEAAAPDDTPMRTALESSISADRKQLAKLEAQEARAYELVETGVYTPEIFLQRSQALSADKQVIVDRIEASQTTITELARAKQARARLAPAVRRVLETYPLAASPQEKNALLKTVLQKVLYHKQTKSYTKSGSDMHVTLYPLAD

SEQ ID NO: 10012 - protein, 529 aa, Unknown
  Description of Unknown: Integrase B10013 sequence
  cd00338,PF13408,IPR011109,IPR038109,PF07508, Coil,PS51736,IPR036162,IPR006119,G3DSA:3.40.50.1390, PTHR30461,PTHR30461:SF3,PS51737,IPR025827,PF00239, SM00857,G3DSA:1.10.10.2600,SSF53041
MDRAVIYARYSSDNQRDASIDQQVKACEQYAREQRMEVIRIYADRALTGKTDKRPDFLRMIRDSARQDFQFVIVYSLDRFSRNKYDSAIYKQKLKENGVRVLSAMEHITDDPTGILMESILEGFAQYYSDELSQKIHRGLKDNAEKAIVNGSVPLGYRRGADGHAEIVPEEAETVREIFRRVSEGEMLIRIIEDLNRRGITTKRGGLWNKSSFNKLLANERYIGVYTYKETRIEGGFPSIVDKELFDSVQAHVQAKPNARGGTKRRKCKADTYLLTGKLYCGECDSPMSGISGKSQADEPYHYYICTKKRYEKACHKHNVRRDEIERQITQEMRNLLDDDELLEWMADQAMAHLESERDTAELEDVRAKLKEATRKRDKLLDALEDEDMVSLIKDRLKARQEEVKDLERRLRILEADNEITISRDMILSYLEMLRDGDVEDRAYQEMLIDTFLIRAYVFDDGRLKLIFNYQKEHREVTIALEDFSRKEGAEDCGEVRLSSSYLHQSGRRRTVAVYMVKGYFVCDISFAG

SEQ ID NO: 10013 - protein, 529 aa, Unknown
  Description of Unknown: Integrase B10014 sequence
  cd00338,PF13408,IPR011109,IPR038109,PF07508, Coil,PS51736,G3DSA:3.40.50.1390,IPR036162,IPR006119, PTHR30461,IPR025827,PS51737,PF00239,SM00857, G3DSA:1.10.10.2600,SSF53041
MKFTSTWKISDPLAQYIIYLRKSRKDMEAEALGQTDTLKRHRAALLSLSESRGLNVVEICEEVVTGDSIAVRPEVQKVLQLVETGSYAGVLVMEVERLARGDTIDQGIIAQTFKYSNTKIVTPNKVYDPNNEMDEEYFEFGLFMSRREYNTIKRRLSRGKEASLREGKWISGKTPFGWSREKLPNDKGYKLVPHPEQAPILQQIYSWYTGDGCARIGSSAIATRLNNLGVKTNSGNAWTASAVLDTLRNPANAGWIKSGGRPETKRIVDGSVVVSRPRTRQEDLNLYKGLHDGLISQEQYDKAVALSYSSGSPRGKGAWQTMTSLAGLVRCDQCGRVMVRRPSSGGRRDAFMCPSPDCPTVSAWYEDVEDAVLDALRGWLHELEVGEAERSDEHSLLDALAASISADQKQLAKLEVQEARAYEFVETGVYTPEIFLQRSQALAADKQVIISRIEENQRAQDEITRAKQARARLAPAVRHVLETYPLAATPQDKNDLLKTVLQKVLYHKQSKSYSKAGSDMRVTLYPLTD

SEQ ID NO: 10014 - protein, 529 aa, Unknown
  Description of Unknown: Integrase B10015 sequence
  cd00338,PF13408,IPR011109,IPR038109,PF07508, Coil,PS51736,G3DSA:3.40.50.1390,IPR006119,IPR036162, PTHR30461,PTHR30461:SF3,PS51737,IPR025827,PF00239, SM00857,G3DSA:1.10.10.2600,SSF53041
MEERVRTVTVMPATLRANLSEMIQKENVTYYARVSTDMNEQEESYEKQREYFENYIKLRPEWNYVEGYADQGISGTKAQQRPEFMRMIEDCRKGKINRILVKSISRFARNTVDTLHYIQELKELGVSVWFETQGIDTMTPNGEVLITILAALAEQESRTISTNVKWGYQKRFKDGKVTLNYKTFIGYDKVGKEYVVVEDEAKIVRKVFLDYLSGKTIRQIADELNKQEIKPRRGQKWNPSTILGMLANEKYTGNAILGKTYKLDVLSKTRVKNVGQGTQYHVQNSHPGIISQELFDMVQVEKERRTKLRSSVNTGKGKYSSKYPLSGLLVCGDCGSKFRRYGRSVASGEFVPTWVCIQHQKDISKCKMLPLKEVDILEAYKRVVTRFSGDLSDVLETVRESINEELKAENIADLTPVKERLTETRKQILELFKDKKCGAISAEEYNQKYDELSKMVRQLEEEEKNLEDSNTTDYMRKEQLKEINDILSDESVDLLDSQIMRTLLNCIKVIDKHTVEFQFNCNLNIIEKL

SEQ ID NO: 10015 - protein, 529 aa, Unknown
  Description of Unknown: Integrase B10016 sequence
  cd00338,PF13408,IPR011109,IPR038109,PF07508, Coil,PS51736,G3DSA:3.40.50.1390,IPR036162,IPR006119, PTHR30461,IPR025827,PS51737,PF00239,SM00857, G3DSA:1.10.10.2600,SSF53041
MKFTSTWKIADPLAQYIIYLRKSRKDMEAEALGQTDTLKRHRAALLSLSESRGLNVVEICEEVVTGDSIAVRPEVQKVLQLVETGNYAGVIVMEVERLARGDTIDQGIIAQTFKYSNTKIITPNKIYDPNNEMDEEYFEFGLFMSRREYNTIKRRLSRGKEASLREGKWISGKTPFGWLREKLPNDKGYKLVPHPEQAPVLQQIYNWYTGEGCARIGAKAISTRLNSLGVPTNSGSLWRADSVLDILRNPANAGWIKSGGRPETKRIVDGSVVVSRPRTRQEDLKLYKGLHDGLISQEQYDKAVALSYSSASPRGKGAWGTVTSLAGLVRCDQCGRVMVRRPSSGNRRDTLLCPSYGCTTVSAWYDDVEDAVLDALRGWLRELELGEAAAPDDTPMRTALESSIAADRKQLAKLEAQEARAYELVETGVYTPEVFLQRSQALAADKQVIVDRIEASQTTIHELARARQARARLAPAVRRVLETYPLAASPQEKNALLKTVLQKVLYHKQTKSYTKSGSDMHVTLYPLAD

SEQ ID NO: 10016 - protein, 529 aa, Unknown
  Description of Unknown: Integrase B10017 sequence
  cd00338,PF13408,IPR011109,IPR038109,PF07508, Coil,PS51736,G3DSA:3.40.50.1390,IPR036162,IPR006119, PTHR30461,IPR025827,PS51737,PF00239,SM00857, G3DSA:1.10.10.2600,SSF53041
MNFTSTWKIADPLAQYIIYLRKSRKDMEAEALGQTDTLKRHRAALLSLSESRALNVVEICEEVVTGDSIAVRPEVQKVLQLVETGNYAGVIVMEVERLARGDTIDQGIIAQTFKYSDTRIITPNKTYDPNNEMDEEYFEFGLFMSRREYNTIKRRLSRGKEASLREGKWISGKTPFGWSREKLPNDKGYKLVPHPEQAPILQQIYNWYTGEGCARIGAKAISTRLNSLGVPTNSGSLWRADSVLDILRNPANAGWIKSGGRPETKRIVDGAVVVSRPRTRQENLKLYKGLHDGLISQEQYDKAVALSYSSASPRGKGAWGTVTSLAGLVRCDQCGRVMVRRPSSGNRRDTLLCPSYGCTTVSAWYDDVEDAVLDALRGWLRELELGEAAAPDDTPMRTALESSIAADRKQLAKLEAQEARAYELVETGVYTPEIFLQRSQALAADKQVIVDRIEASQTTIAELARAKQARARLAPAVRRVLETYPLAASPQEKNALLKTVLQKVLYHKQTKSYTKSGSDMHVTLYPLAD

SEQ ID NO: 10017 - protein, 529 aa, Unknown
  Description of Unknown: Integrase B10018 sequence
  cd00338,PF13408,IPR011109,IPR038109,PF07508, Coil,PS51736,G3DSA:3.40.50.1390,IPR036162,PTHR30461, IPR006119,PTHR30461:SF3,PS51737,IPR025827,PF00239, SM00857,G3DSA:1.10.10.2600,SSF53041
MGKSNAVIYARYSSSGQREESIAGQLRECRAYADRSGLRVVGEYTDSALTGTTDKRPGFQRMIKDAEAGGFSVVIVWKLDRFARNRYDSAMYRHKLKKHGVRLVSAMENISDSPEGIILEGLMESLAEYYSANLSQNIRRGLYDSALERKKTARVFGYRRGPDGRYEIDPVYGPIVRRCFEEYAAGKSMPEIINGLNADGIRTEKGTKFKRNSLRAMLRNERYKGVYRYRDIVDPAGIPPIVPADLWEQVQKEIGKRAHNHTKGTTKTGVTYLLTGKLFCGHCLAPMAGDSGRSSTGTVYHWYSCPNNRYKPHTCDKKRIPKDWIESEVLRILNNEILTDDFIERAADAAVEYEKHYDNTSEIEGLRADLKRTEKKISNVADAIATGITTKTLPAMLADLERMREQLEDAIAEKTVGVKEFSREAVVAYLHELKALSLTESGSQRQLIQACIKSIYVFDTDKKDELRLVVNMNYFDDDAEINHSEIVRITSAPLHLNGTTRTFVHGHSLLLVRNIKKPGGLHTVRRMKK

SEQ ID NO: 10018 - protein, 529 aa, Unknown
  Description of Unknown: Integrase B10019 sequence
  cd00338,PF13408,IPR011109,IPR038109,PF07508, Coil,PS51736,IPR036162,IPR006119,PTHR30461, G3DSA:3.40.50.1390,PTHR30461:SF3,IPR025827,PS51737,PF00239, SM00857,G3DSA:1.10.10.2600,SSF53041
VNAVIYARYSAGPGQNEQSIEGQLRDCRDYAKKNDITIIDTYIDRHISGTDFENRTEFNRLIKDCERHQFSAVIVWKVDRFGRNREEIAMNKVKMKKHGVKLLYAKEHIPNGPEGIILESLLEGMAEYYSAELSQKVRRGLRESMLKGHALGGNLMLGYKIINKKYVVDPVTSPIVVEIFERYAAGETAKAIATDLNTRGVVNAKGDPFKNNTIYFILRNEKYIGIYRYGDIVVNDVIHPIINMELWGKVQMILEMNSRNRSRSRCTAPEEFLLTGKIFCEYCKRPIIGESGTSRNGASHYYYKCSSRKNKGVKCEKSTVRKTDLENFIISQTIDNVLQPDTIDYLAKKVVEIQNSDAQELQMQSLRKQLSDVQKGLNNLVNAVEMGIITETTKERMMALEERKEELKICIAKAEIKRPKLTEEMVEYWLNKFRDQDVDSTEFKIRLINTFVNSIYLHNDYAIIVYNFCDDESGHRAEIRAQLDDALRAKKEDQTCSSDPTQVPATVLQTNILLITLTIFAIKFRIPRK

SEQ ID NO: 10019 - protein, 529 aa, Unknown
  Description of Unknown: Integrase B10020 sequence
  PF13408,IPR011109,IPR038109,PF07508,Coil, PS51736,G3DSA:3.40.50.1390,PTHR30461,IPR006119,IPR036162, PTHR30461:SF3,PS51737,IPR025827,PF00239,SM00857, cd03768,G3DSA:1.10.10.2600,SSF53041
MKPIVIYSRVSTTNQNFESQIEDLKRWCKGNDFIVKMSFGEKVSGFNPDVERIEYDKMKDFVLSNNIKNIVIWEISRLSRSIDRTLTEVKFFTSKGVNIHFKKEGFNTISDNATDKILLALLSSMADFERDTIIGRLGRGRLSAILKGKMMHSVPPYGYIKDEQGMWSINKVEAKVIMTMFEMAAKGDTLYKICQHLNSLNIPTRQTIQGKKSTLYDGTEVEGKWNPTTIRRDLMKTIYKGIKTFQEHTISIPIIISPDLWDKVQKRFTDNIGHINKNKHPYLFKGMIRCGRCNRVLSTQTRVNDIGYYLCSKINDVTHKCENQGYINTHMIDDNLYSNLFNHQYIKEILSRDSLDALSLKEKSGQIEYFNSEINSLEGTTNRYKNLYATGYLVFEEMVKEVGKVTNQITDYKNRIEILNNDIQVISKTDIDDIILTYKNATDYNVKREFLTKYINNITLWNVDLANVNWRVPLQKNEKMIYIEMKAFNYNIPIKILLTPYSKNVIVTKTLEFLKDYNMVVDTSKKLSV

SEQ ID NO: 10020 - protein, 434 aa, Unknown
  Description of Unknown: Integrase B10021 sequence
  cd00338,PF13408,IPR011109,IPR038109,PF07508, PS51736,G3DSA:3.40.50.1390,PTHR30461,IPR036162,IPR006119, PTHR30461:SF3,IPR025827,PS51737,PF00239,SM00857, G3DSA:1.10.10.2600,SSF53041
MAKIRVITKQLGLQKLVNVAAYTRVSSDKDAMLHSLSNQVSYFSSYIQSNKNWIYCGVYSDEAQTGTKSKRSAFQRMIQDAKDGKIDIIITKSISRFARNTETLLKTIRELKEINVDVYFQEQNIHTLSNDGELLMSILASYAQEESRVSSENSLWRVKKNFNEGKIYGGKNCLGYKIVDGQFEVVPDEAELVKHIFNLCEQGYGDDKIAKTLNDMGVKSYFGNLWYRSSVRGVLTNYNYTGDLILQKTYRENHLTKTTKINYGEMDMFHVANNHEPIISKEQFQNVKRIRAERLPRNHRVAFTLHSFTGFLKCGVCGRSYKHKKNKYLEYWVCSTYEQLGKSYCDSKQIRDDVLKKATCQVLNLEEFDTQKLDQFIAQIEILNGNKLIFNMHNGEKREVNWDVPKRSDSWTDEMKEKARLDALKRKTVAGGSE

SEQ ID NO: 10021 - protein, 529 aa, Unknown
  Description of Unknown: Integrase B10022 sequence
  cd00338,IPR011109,IPR038109,PF07508,PS51736, IPR036162,IPR006119,PTHR30461,G3DSA:3.40.50.1390,PTHR30461:SF3, PS51737,PF00239,SM00857,G3DSA:1.10.10.2600,SSF53041
MPTVKPDGLYCAYLRKSRRDVELESLGQGETLARHEKQLAALADRLGIAISHTYREIVSGDTISERPQIQRLLSDVGAGRWDGVLVMDVDRLGRGDSIDQGIIMQSLMYAGVLVITPDKIYDPTSDADAEFFEIKLFFSRREYNMIKKRMQRGRLASAMDGCYMGSRPVYGYERVKLAGRKGWTLQVVPEKAEIVRAVFAWYADGIDGREAGAAVIADRLNGMGLRTDLGNRFEPSYIRHMLQNPAYIGKTRWNQRVTQYRIENGRRVSARPKNADALLVDGLHEGIVDPALFERVQRMFAAHEKRPKNKQLQDANPLAGLVVCSACGRHMQRKPSPNRAGDFLRCPTQRCPTCATYIPVLEDAILSELERWTLEFDSPADPPQISGADRAAMDAARAQLAEQRATLQGQLSRLYDLLEQGLYSPDLFRERQADLGERLAAVDADLAALDAAPRPDPRRLLLPQIKKVTSAYRAAATPGEKNALLRTVIDHVTYEKTQRCYRNESPAAHLTLHIFPRLPDETPENDDFV

SEQ ID NO: 10022 - protein, 529 aa, Unknown
  Description of Unknown: Integrase B10023 sequence
  cd00338,PF13408,IPR011109,IPR038109, PF07508,Coil,PS51736,IPR036162, IPR006119,G3DSA:3.40.50.1390,PTHR30461,PTHR30461:SF3, IPR025827,PS51737,PF00239,SM00857,G3DSA:1.10.10.2600,SSF53041
MTGKNEMAVVYARYSSTSQQEQSIEGQLAAARQYAESKGYTIIREYCDRAKTGTNDNREAFQRMLSDCAKKQFSVIIVWKVDRFGRNREEITFNKHRAKKNGVRVEYVAESLGDGPESIILESVLEGMAEYYSLQLSQNVKRGQLEGAKKHHAIGAHPPFGYRTAPDKTYEIDPKTAPIARMIFEKYAEGSTEADISRWLNDKGYRTVRGNMYSRTSLTKMLKNERYIGTYIYKDIIREENAIPAIIDRDLFERVQGMLDKNRRMPSNRWSYSDYILTDNLYCGNCGSPMAGVSGTSKSKKKHCYYACMNKFKHKGCSKKSIRQDLIEPLVLDQINLLLHDQELFDFIVSKTWEYYQRQDQTQAEIHSLETQLADVEKGLSNLVRTIEAGIFNDIVQNRMAELEAQRSAIKKSIAEIRISEGIKLTEDRIRFFLQRFRDADTTDRKCQRRLIETFVNSIHLYDDKMTIAFNFSGQNNTVTVEDIKKATASEVFERDCQSVRKRSAYEHLTIRWIPECCAFAIDFSLRVS

SEQ ID NO: 10023 - protein, 529 aa, Unknown
  Description of Unknown: Integrase B10024 sequence
  cd00338,IPR011109,IPR038109,PF07508,Coil, PS51736,G3DSA:3.40.50.1390,IPR006119,IPR036162,PTHR30461, PS51737,PF00239,SM00857,G3DSA:1.10.10.2600,SSF53041
MNLEVFEQFAKKEKGRIIGKSDTAVIYTRVSSKEQFDNNASLTTQLKYCQEYAIRKKLEVIEYFGGTYESAKSDERKEFQKMLSYVKRRKNIGYIIVYSYDRFSRTGANGAYISGQLKKQGVAVMSATQEIDVTTSAGTFQENLFHMFSHFDNQIRRDKSITGMQEKLRRGYWTGAYPFGYTNANPGKGKVPNFVITKEGRLLKQAFLWKANANMSHVEIAKRLEEKGLNINAKRLTDLFRNPFYCGLMVNSLIPGEVIQGKHEALISKEIFLRIHNLLHAGDPPKKYSFDDENLPLKQFIKSSICGTPYTGYIVKKKGLYYYKNRRKGSKENRSAKKLHEEFLNVLGRFTIADKKYIEPLTDIIHDTLIAKNQEALEDQRRLAKELGQLEERINTLERRFVVLNEITKSQYDLFMPELKAKQRELEVKMENGGINSSNLKKAVKLALNFACNLPTLWKLGDLETKKSVQYMVFPDGIEYDFKKKLVRTFRVNEIFGAISSLSGNCKEIEKGTFHQICGKSPLVTAKES

SEQ ID NO: 10024 - protein, 529 aa, Unknown
  Description of Unknown: Integrase B10025 sequence
  cd00338,IPR011109,IPR038109,PF07508, Coil,PS51736,IPR036162,IPR006119, G3DSA:3.40.50.1390,PTHR30461,PS51737,PF00239, SM00857,G3DSA:1.10.10.2600,SSF53041
MNELARDIALSRDKGLVPAFSYERVSTDEQAEHGMSLDNQVQYARQYAEKNNLQIIKFFTVAESAYKEGRQRFNEMIASALEYGISDIIFKNSDRLGRNDIDWPRLKKLAKEKKIKLHFYEFSIVFDHGATAESEMFLDQASALARYWSNKISYSVRKSYDFKISQGIAPQACRTIGYIYDRANKRFLIDEKTKGIVEYIFNEWDSGTHSLRDFCVMLNARGYRTLRGSHWKKSSIHRMLTNPFYAGKFIYHGQIYDGIHESYISWEKFQIRLQKLGVKNVSKKGRPFLFKGLLKLSGSGRVLSGAYKQGAHNSGEYIYYTSYEPYFSIREDQVFEMLDQAIKEISFNDNFEQNLIDLFTERAKNKSDKRDGEIKFIRRRIGKLESENKRLLELAIAGIDPKTIQDKMQENRGMINVLEKQTHGINMDWHNFSMDIASKIESCREFPEIYLQVDREDKADLIKTIASKLIVHQDKIEIVFLKPFEFIFNPEILKHKSGFQNRHVMGPQRDNLRTAVDHQIERWVQWLAA

SEQ ID NO: 10025 - protein, 529 aa, Unknown
  Description of Unknown: Integrase B10026 sequence
  cd00338,PF13408,IPR011109,IPR038109,PF07508, Coil,PS51736,G3DSA:3.40.50.1390,IPR036162,IPR006119, PTHR30461,PTHR30461:SF3,PS51737,IPR025827,PF00239, SM00857,G3DSA:1.10.10.2600,SSF53041
MTQAAIIYARFSTSEQSKGHSLERQAQYGLEYAQQQGWAVEATIKDEGKSAFKGGNRAEGSALATFETEASQGVHHGKVLIVENIDRLSRQGAKTTAQLIWALNKAGVDVATWQDNQIYRADGNGDMLELFSIIIKAQLAYDESKKKSDRTAANWKKRHEMIASGDYSLAKSRPPLWLNVVDNEFEVIPDKAALINRMFDMFIDGFGYQRIAKQFNDEGIEAFKTTKSNTNGWYGLTIDRFLRNRAVIGEYVTSEGETLATDFYPLIVPVDKFNRAQAIMSSRVRRSTGGSLETRSRNLFGGIATCHKCNGHMGYEGKYSEKKHRRKDGGISIYKQQPQQYLRCDNARRKHLCDNTFSYRYGEMEKTILDHILHFTLDDDEQPNEHLNKIKEAHAELGRQIAVDEQKRDNLLDAISNGGGAAFITKVNELEEGIKAAQERLGQLKQDIAQEEAKPRKTDDQEALRLMIGKLNSEDMDERIYARTKTNTLLRQIVDGLILMENGEFALWIDSEVTYHWDKDGNMLSGQML

SEQ ID NO: 10026 - protein, 529 aa, Unknown
  Description of Unknown: Integrase B10027 sequence
  PS00397,IPR038109,IPR006119,PS51737,PF00239,G3DSA:3.40.50.1390 ,PTHR30461,IPR025827,SM00857,G3DSA:1.10.10.2600, SSF53041,IPR011109,PF07508,PS51736,IPR006118, cd00338,PF13408,Coil,IPR036162,PTHR30461:SF3
MNKKVKAGIYIRVSTEEQKQGHSLEAQESMLKEFADRKGYEIYDVYNDGGYSGKNFNRPEIQRLLRDLKDDKIDVILVWKVDRLSRNNTDVMSLIDTELTPRKKNLIITSIDMDSSSPTGHMFISLLSTFARYERATIIDRVKAGMQKRAEKGYWNGGLILGYDSVDKKLIINENESEIVREIFQLRAEGKGYKFIVNILNDKGIKTKTGKNFSIPAIKVIVNNYIYNGKMVWKKHQDWNTRRRTGKSEPIIVEGIHDAIIDEGLWTRVQKVNELQKNSFSSNRNFNGNFLLTGILKCPKCGAGTVMSKTKKRNSDDYHLYYMCQAYHNKGSSVCSANLIRKDQVEQQVLNIISLLVNENDIINALIDELNSDNNKTNESHIAHIKMLKKQLGKAYDKRKKLDNDYFEGNIEGSTYNRLMNELQLDINKLKRNVRESESEIIKNDSTINKEEVIYALGNFNKLFKIVNDEEKKLLIRSLIREVQMEANRKDVKEITFWFLPSSVLPSNKVRRTVSQVIVKRKWEIEICY

SEQ ID NO: 10027 - protein, 528 aa, Unknown; identical to SEQ ID NO: 9559
  Description of Unknown: Integrase B10028 sequence
  cd00338,PF13408,IPR011109,IPR038109,PF07508, Coil,PS51736,G3DSA:3.40.50.1390,IPR006119,PTHR30461, IPR036162,PTHR30461:SF3,PS51737,IPR025827,PF00239, SM00857,G3DSA:1.10.10.2600,SSF53041

SEQ ID NO: 10028 - protein, 528 aa, Unknown
  Description of Unknown: Integrase B10029 sequence
  cd00338,Coil,G3DSA:3.40.50.1390,PTHR30461,IPR036162, IPR006119,PF00239,SM00857,SSF53041
MIPNICPFNKGDKVVGYARYSGGDEQGLKNTSTDEQDAAIRRFCEQNDLVLVKVYSDPFVSGRSTKGREHYLEMMSDLLHGKKKRTDIAGLIAWDFERLHRNMNQAQLDAARLRMAGYKIYSLQQPVMDNGPFARVMEAMYFASAQNQSDMISADVRRALQNNFQKYKVIPRSNIPDGWIAVPVDMGFYSNGKKRTGYKAEPDPNLAPKIREAIDQRLHGATLDEMRIIIGGPFANKQRVYIQRLMHKPLLYGQLTYGETTMTDYCEPIIDKETFDNLQIYNKYAPKEHEKPLGHFSKNRPLLSNLLYCGVCGKKAFLDRRTAKGRLYETYYCNDKHVGFRKEILDKLVIEKGIELLSDAQYQKDILSIVDALKSPFPDEVNKYKVEEEIAKIDRKIARISSAIEDSDETPVTLVKRLSELEKQRAEFAQSLQIVDDSESHGKIIEECDRIRTSILQVLENEKSSTDELRNALSLFVHSVVIYPEAKVLIRHTLPGFATVASTTSGEVTAPPREVFRYSQLFESWCTA

SEQ ID NO: 10029 - protein, 428 aa, Unknown; identical to SEQ ID NO: 9583
  Description of Unknown: Integrase B10030 sequence
  cd00338,PF13408,IPR011109,IPR038109,PF07508,PS51736,G3DSA: 3.40.50.1390,IPR006119,PTHR30461,IPR036162,PTHR30461:SF3, IPR025827,PS51737,PF00239,SM00857,G3DSA:1.10.10.2600,SSF53041

SEQ ID NO: 10030 - protein, 528 aa, Unknown
  Description of Unknown: Integrase B10031 sequence
  cd00338,IPR011109,IPR038109,PF07508,PS51736, G3DSA:3.40.50.1390,PTHR30461,IPR006119,IPR036162,PS51737, PF00239,SM00857,G3DSA:1.10.10.2600,SSF53041
GTSLNKRDQFNAMIADAKHGKIDMIITKSVSRFARNVVDFIGIVRDLAEKTPPVGVFFESEAIFSLNDDSQLALSFQATMAEEESHTRSRSMESSLRMRLDNGIPLTPKLLGYMHDADGALIPNPTEAPTVKLAFFMYLYGYSTKQIADAFNALGRKSYLGNINWTSTGIVQILRNERHCGDVLTRKTFTPNYRTHKSKKNKGQRPQSRYRNHHEGIVSRDDFIAVQRLLDNAKYGNKNILPEIRVVKEGVLKGFVVINPRWSGFKENEYYQASKSVYLTPDEEPQLNKEIEFEVAAGDFDLTGFEIARGEFFDNPRSPHVFVFHRNIKFSTACARKFGMNNYIELLIHPISRKIAIRPTTKDNRNAIIFSKVKEGIIYPKVIHSTAFSETMFNLLGWNIDYKYRILGSLYEQDGEIAYIFDTTDSEAYFKKNTLSQDVDEGYQPLLPSGKRVRAIPESWIGSFGKQFYAHEKSVEELERQSEADWMLRIEGQLYETGNKLNVTSFDELKKYITKELEDIEQWEVTND

SEQ ID NO: 10031 - protein, 528 aa, Unknown; identical to SEQ ID NO: 9667
  Description of Unknown: Integrase B10032 sequence
  cd00338,PF13408,IPR011109,IPR038109, PF07508,Coil,PS51736,IPR036162, IPR006119,G3DSA:3.40.50.1390,PTHR30461,PTHR30461:SF3, IPR025827,PS51737,PF00239,SM00857,G3DSA:1.10.10.2600,SSF53041

SEQ ID NO: 10032 - protein, 528 aa, Unknown; identical to SEQ ID NO: 9665
  Description of Unknown: Integrase B10033 sequence
  cd00338,PF13408,IPR011109,IPR038109,PF07508, Coil,PS51736,IPR036162,IPR006119,PTHR30461, G3DSA:3.40.50.1390,PTHR30461:SF3,PS51737,IPR025827,PF00239, SM00857,G3DSA:1.10.10.2600,SSF53041

SEQ ID NO: 10033 - protein, 528 aa, Unknown
  Description of Unknown: Integrase B10034 sequence
  cd00338,IPR011109,IPR038109,PF07508,Coil, PS51736,IPR036162,IPR006119,PTHR30461,G3DSA:3.40.50.1390, PTHR30461:SF3,PS51737,PF00239,SM00857,G3DSA:1.10.10.2600, SSF53041
VTVFEAQNAIKRAKIIDSKMYAMYLRKSRVDLELEAISKEETLAAHKKLLFALAERNGILPSQIVIYHEMVSGDSIDERPEMLRLLEDVYKGTYAGVLVTEIERLARGNTKDQGEVADAFTFSDTKILTPQRIYDPNDEFDQEYFEFGLFMSRREYKTIRRRLTTGKELAAQDGNFLLPEAPYGFDIVKENRKNRYLVEKPEESKYVKMIFNWYTEDRKPTSWIAKQLTLMGVPTRKKGKDWSRTTIKDILFNEHYIGLIPWGKQITVKEKDPTTGKVVKKRKQNPNPKFYNGKHDGFIAEEQFWKVREIYGSQAPVKVKNELVNPLAGLLVCSRCGKAIIQQPYPDGRKTRYQHPKGVYACKMKSILVDDVNEAIANALRDRMEDFKFKLKTGNTNEEAERQLQAIADMEKELAKQERMKKRLFESWEADDGTYTREEFIERKGMYNSTIENLKNEIEIMKQATPAPVNYEEIISTLHTAIDYINDPDVDPKEKNIFLKSFIDKIEIYTVDLGRGKGSDPLLDIHLL

SEQ ID NO: 10034 - protein, 528 aa, Unknown
  Description of Unknown: Integrase B10035 sequence
  PS00397,IPR038109,IPR006119,PS51737,PF00239,G3DSA:3.40.50.1390 ,PTHR30461,IPR025827,SM00857,G3DSA:1.10.10.2600, SSF53041,IPR011109,PF07508,PS51736,IPR006118, cd00338,PF13408,Coil,IPR036162,PTHR30461:SF3
MEQCVLYARVSSKEQEREGFSIPAQIELLERYAYKNNYKIVEKFIDVETAKQSGRTNFEKMLAFLKKNKTVRDVLVEKTDRLYRNLPDYVTVDGLNLNLHFVKEGVIINNESHSSEKFMHLIKVGMAKQYIDNLSEEVRKGISQKCNEGYYPSKAPIGYLNVTSPTKKKIIVPDINTSHYIKKCFERYASGLYSYKSLAKKMTDDGMRINGNPVRKHNIENILENPIYYGDFIFKGKQYNGKHEPIISRELFVICQQRKRLQSSPKIKTHEFPYSNMIKCSECGCYLVGEIKKKKYIYYHCTGNKGGTCKKHYIRQEVIEKAIAEVLKLIEVTSEEIIEIKDTVKELLKMKEDYEEDKAQSIMQKISKTKTRLNKLYTDKIDGLIDEDFYFEMRNKYQSELDELHIVFNAMTTTSKYFIEDITRMLELCKNAHSLYLSETDEEKRKLVNLLCSNLSFDGSNIRVELKSVFNIFIENASRRLNLGQDVEVRTFNRAIKIAEALSNCYFMQDYRDFFDCVRIYEDEKLRA

SEQ ID NO: 10035 - protein, 493 aa, Unknown
  Description of Unknown: Integrase B10036 sequence
  cd00338,PF13408,IPR011109,IPR038109,PF07508, Coil,PS51736,IPR036162,G3DSA:3.40.50.1390,IPR006119, PTHR30461,PS51737,IPR025827,PF00239,SM00857, G3DSA:1.10.10.2600,SSF53041
LAKVKRIDNANIEIPCCAYARVSTMKEEQESSLLMQESYWTEKLQSLPNRKFCGVFADQGISGSRIIQRKEYCKMIDLAMAGFIKEIYTKSIYRFGRNSKETMEVIQKLREKGVAIIFDEENINTLKCPQDLLLKIKAILGEQELKTMSMNVQFTTRNKFKQGIVPKTLTFGYDHDENQHMIINEAEAKIVRFIFSMYLKGYGTNSIANQLTKLKIATCCGHEVWHPCAIKGMLTNEKYVGDALLQKETYTNGIRKKNTGELEQYYVTNDHDAIIDRDTFNRVQELMQKKFEYSKQVRPNMAKTTYALSGKIQCGLCGKNFRHRINKKIINFDNRLWMCLTKERRGKAICPAIEIPEPLLNEIILDAYNDYIDTPYELPCDTELKNKIREQQELQERLKRLYLDKLITYAQYKKEIESIQEKLSDMLDKMRNYKILSIYKKPKTKAREYSDEIVNKHIEKVIITGYKVQIVFKNLQSITKEYIYEHRKYRKNY

SEQ ID NO: 10036 - protein, 528 aa, Unknown
  Description of Unknown: Integrase B10037 sequence
  cd00338,IPR011109,IPR038109,PF07508,Coil, PS51736,IPR036162,PTHR30461,IPR006119,G3DSA:3.40.50.1390, PS51737,PF00239,SM00857,G3DSA:1.10.10.2600,SSF53041
MAKITVIPQTRNTLTRIPISEFSKRRVAGYARVSTDLEEQVTSYEAQVDYYTKYIKANPNWEFVEVYTDEGISATSTKNRHGFNRMINDALAGKIDLIVTKSVSRFARNTVDTLDTIRKLKASGVECYFEKENIYTFDGKGELILTIMSSLAQEESRSISENVTWGKRKAFSDGKVGLPYKAFLGYKKGEDGSLEIVEEEAVIVRLIYSLYLEGLSISTICDRLSELGYKPKLEKSKGWHVSTINSILHNEKYKGDALLQKHYTVDFLTKTRKVNNGEVQQYYVENHHPAIISKEEWDDVRAEELRRKAHRRAYSGKGIFGCRVICEECGSAFGIKVWHSNDEYKRQILQCNDKYKVKGSYCTNTHIGVEEFQEMFFKAYNLYMNGVEQVIEDIEFLISNLTNFTDLDLEITKTNDEIEIIRNMVEKLVRENSSTAMSQDDYQKRYNSLYDKYEVLEAKYNELTDKKSKALARNSSLKRYIKILKKNPTNLVEWDSAIWALVIDRAIVHKDKSVTFRFICGKEIKIEY

SEQ ID NO: 10037 - protein, 424 aa, Unknown
  Description of Unknown: Integrase B10038 sequence
  cd00338,IPR011109,IPR038109,PF07508, PS51736,G3DSA:3.40.50.1390,IPR006119,IPR036162, PTHR30461,mobidb-lite,PTHR30461:SF3,PS51737, PF00239,SM00857,G3DSA:1.10.10.2600,SSF53041
MKKIERIKPSIPKIKRKKRVAAYARVSAESDRLTHSLSAQISYYSTLIQKNLEWEYAGVYADSFISGTSIDKRTEFQRLIDDCEAGKINIILTKSISRFARNTVDLLSTVRQLKTIGVEVRFEKENISSISSSGEIMLSILASFAQEESVNNSENVKWAKRKRFEQGIPHAKFSLYGYTWDGDHMVIVPSEARVVEHIYKDYMAGMTELAIARELSERGISTRRGGRWSNTSIKGILKNAHYTGNLLLQKYYVESPLTHRVRRNEGELTRYWVENTHEAIIDKETFDAVQDEMARRKALRSTHTSCFSRKIKCPFCGHSYIYYTDKNLSHDYWVHHRRKRDCPMSWGITQEKLKSVCAEVLNTEQFDEEAFREQVDFINVPQRENLEFHLRDGRIITKISRNQRRRKTGGGSDGKKGHDYSSND

SEQ ID NO: 10038 - protein, 528 aa, Unknown
  Description of Unknown: Integrase B10039 sequence
  cd00338,IPR011109,IPR038109,PF07508,Coil, PS51736,G3DSA:3.40.50.1390,IPR006119,IPR036162,PTHR30461, PS51737,PF00239,SM00857,G3DSA:1.10.10.2600,SSF53041
MRKIIVENLIEAKNQTKPTAFAFGRISSANQEDGMSLSYQDEKGINYATRKELYLVYSFSVTETGYKHNERQVFNEMLDLAEEFNVKHLIFKNTDRLSRNLHDLLKIEDLYENHGVTLHFYDQGKVISAGSTYDDKWVIKLLILLAEKYSGDISEKVRAAHRCKAERGIPVFRPPIGYRLTPEKNYIFDEHEEQVRWFFDTFDSGNYSLSEMVRLATEHGFRTRNGNVWHKGTLHHMLTSPIYAGFFVYGGNEYNGSYTPYVTRERFEARLKRMSSNFIGWSDTIRSYAFSRFVYCDHCGCVYIPELKKGKVLYGHCCKKQNNKRSYYNETALLKIIDQEMEKHVLSEDFAEEIKKMFTRTVTVKTQEVDQNKIHDEIRLLKIKQQRLYRLYAEEDTALDSLRAVISGYQEKIDQLERTLKKVNVNAQDVIIKVAELIDGIRQLPKAYKIATPEQKGRLLRSMASGLILSPEGAEIKWLPPYDIILSPLKENATQHTPSSVRHRPKIRGVRNETRILCENLYKWAIVA

SEQ ID NO: 10039 - protein, 528 aa, Unknown; identical to SEQ ID NO: 9670
  Description of Unknown: Integrase B10040 sequence
  cd00338,PF13408,IPR011109,IPR038109, PF07508,Coil,PS51736,IPR036162, PTHR30461,IPR006119,G3DSA:3.40.50.1390,PTHR30461:SF3, PS51737,IPR025827,PF00239,SM00857,G3DSA:1.10.10.2600,SSF53041

SEQ ID NO: 10040 - protein, 528 aa, Unknown
  Description of Unknown: Integrase B10041 sequence
  cd00338,PF13408,IPR011109,IPR038109,PF07508, Coil,PS51736,G3DSA:3.40.50.1390,IPR006119,IPR036162, PTHR30461,PTHR30461:SF3,PS51737,IPR025827,PF00239, SM00857,G3DSA:1.10.10.2600,SSF53041
VRTLLYARYSSQLQNARSIEDQISLLRARADREGWPIVDVFTDYAISGAAGVGAEQRPGLHAMLARAEAGGIDQIFTESTDRIARHQGDAFGVRERLRFVGCRLFTLLDGEVDELTGTIKSLMDSRMREDLAARVRRGHRGVATSGRSPSSVAFGYQRTPKLDDRGELVRGLREIDADEAAIVRRIFEEFAAGRSAMAISQGLNIDGVLPPRRGFWRAGTLLGNAALGTGILRNRLYVGELVYGRTTGVQSPTTRKQIIRPAADPVSIGAVPALRIIDDALWSAVQLRLEQNTGDRPEKHRRPKHVLSGLGFCGVCGGNWIITGNNGKAGARRWGCARAHEKACTNTRLILGHVYEARVLADLKGQMLAPDVVAAFVREYHLEHARESKKLGRDRDRAERQLAEAGRKLDRLVAALSDGGSSFPQIRAAMTAARDDHDRIKRALASMDALPVLTLHPGLADSYRREMDDLERLLMEPDAHLEAIPQIRSMIDRIELLPKADKLRGVDLTVHRRIDKVLAIATRRHALP

SEQ ID NO: 10041 - protein, 528 aa, Unknown
  Description of Unknown: Integrase B10042 sequence
  cd00338,PF13408,IPR036162,PTHR30461,IPR006119, G3DSA:3.40.50.1390,IPR025827,PF00239,SM00857,SSF53041
MTVSTSPFKIGDKVVAYCRYSEGDEQGLKNQSTEEQAEAIRRFCESSGLQLVRVFADPFASGRSVAKRDHYLEMLSFLLHKKKPDVQGVVLWDYERYGRNYDQAQLDAARLRMAGYKIYSLQQPIVDNGPFSHVLEAMYFASAQNQSDMISADVKRALQNNFIKYKVIPRSNIPDGWAAVPVRMGFMTDGSERVGYRMEPDPEYLHKFRVAINARLNGSSVGEMMQIIGGKYGTKYSKVCDLMRKPLLYGSFSYGGTVIEDYCTPVITRKEWEKLQEYNDGLKTKVRKRAPGSGAYSLNRTLLSGMLYCGVCGKRMYNDKRTAKGHVYETYRCNLKHAGIRREFLESMVLSAAEDLLTGETWKNDSERLIASFSEPLDAGVDKFAIRREIAQIERKLGRLSDAVADGGGSRSILSKITELETKREALSAQLEAGSGADLEKIRNVTERLRVRILDTLNDDSASVDDKRDALALFIPRITIYNGCDLLVEHGLPGYSGVAGESAISDERPQRDGDYTRNHMLRMVIHLS

SEQ ID NO: 10042 - protein, 441 aa, Unknown
  Description of Unknown: Integrase B10043 sequence
  cd00338,PF13408,IPR011109,IPR038109, PF07508,PS51736,IPR036162,IPR006119, G3DSA:3.40.50.1390,PTHR30461,PTHR30461:SF3,IPR025827, PS51737,PF00239,SM00857,G3DSA:1.10.10.2600,SSF53041
MAEIKIIPKEKEMPKLKKVAAYARVSIDTDQMLHSLSSQVSYFSEFIQSHPDWQYVGVYYDRGETGTKASRGDFQRLLGDAKKGLIDIIITKSLSRFARNTVDCLKSIRELKAIGVDIYFQEQNIHTLSANGEFLITLLAGYAQEESRQCSENVLWRVKKNFNEGRLASKYDCLGYKVENKEFTIIEEEAKTVRKIYDLYLKGYGYYKIAKILNEEGLRGKQGGLWSQSSINQILDNEVYTGTLVLQKTYSENHLTKRRMVNKGEKQKYVVDENHEPIISIEDFNKVQELRALKRKDPSSYVPKGPRRDFIFTGLIKCGICGSTYRHKQGAHKIFWKCNTFLDKGKDYCASTSLRDDCLRKACAKALDITVFDESKFKQNIDFIETYPGNKLVFHFTDGNAKEVEYEPPKKRCEWSIEAINKARERSKLQYAKRKNNTEQN

SEQ ID NO: 10043 - protein, 528 aa, Unknown
  Description of Unknown: Integrase B10044 sequence
  cd00338,PF13408,IPR011109,IPR038109,PF07508, Coil,PS51736,IPR036162,IPR006119,G3DSA:3.40.50.1390, PTHR30461,PTHR30461:SF3,PS51737,IPR025827,PF00239, SM00857,G3DSA:1.10.10.2600,SSF53041
MAIDDAILYTRVSSDEQKKSGFSLDYQRKMGEEYAKMNKLNIIKVYAESYTAKKPGRPQFNEMVDYCKKHKVKNLIFLKSDRASRNGVDSALLVYMAEHLDYNIHLIQDRLILNSSARATDFLVFEINNCISNFYPRNLSVDVSTKMREKAEQGYYPSIAPIGYKNERINHRSYLQINPEKAAFIKMIFELYATRDYSFNTLAAKMREMGFKMGKKTPCSRRNIEDILKNPIYIGDFIWKGKRYYNGKHEPIISRELFVMCQRIMEERSTAHAQKHNFLFTNLIKCKKCGCYMVGEIKKEKYIYYHCTGNRGGDCKKGSYIRENVIEDAILDVLSNFELPTDALDIVKRCLKNEMESQNYYNETRIKELEKDIEKTKNRLNKLFDLYLDGEILEEIYKQKNKELQNMLDEYLLRYSSYTKTGVELLKLSEGLFELCKDAKKLYLRGNIEERRRLLKILCSNFYYDGQEVIIAIKKAFQPLVKIAYLLKLGRRCQNSNLKLYVNEFIKEIKENAETFNIVEINTLLKVA

SEQ ID NO: 10044 - protein, 528 aa, Unknown
  Description of Unknown: Integrase B10045 sequence
  cd00338,PF13408,IPR011109,IPR038109,PF07508, Coil,PS51736,G3DSA:3.40.50.1390,PTHR30461,IPR006119, IPR036162,PTHR30461:SF3,PS51737,IPR025827,PF00239, SM00857,G3DSA:1.10.10.2600,SSF53041
VAIKKDESRQLIRAVIYARYSSSGQREESIEGQIRECRAFAKRNGFTIVGEYADRALTGRTDKRPDFQRMLRDAERGAFEAVLCWKMDRFARNRYDSATYKYRLKKCGVRLYYAAETIPEGPEGIILESVMEGYAEYYSENLSQNVKRGNYESAKELKTLGLTLLGLRKGADGRFEIDPETAPVVRRIFEEYAAGIPAKDIYKKLNDEGYRTTRGGRFNKNSIRRIIQNERYAGVYLFKDMRVEGGIPAIVDRDLWEKCQKVAAQHHVSPAAERGVSYLLTTKLFCGHCGEAMTGESVSSIYYYYVCNGRRAHRCKKKRVQKQWIEDLIVRELAALIHSDEFIEAVADSCVEYQQRTRDTADLDALERRQRENEQAIRNTLAAIDAGIITDSVKSHLVELEAERADLERGIAQLLIAEPDVDREQVIYFLERFRDGDLDDPGYRQFLVDTFLNAAYLYDDDRILLVLNYTQEGERVTLELAEAAAEDDGVKISCFAPSGPPNGANTKKARELVLHFVEKAVAVLIELR

SEQ ID NO: 10045 - protein, 446 aa, Unknown
  Description of Unknown: Integrase B10046 sequence
  cd00338,PF13408,IPR011109,IPR038109,PF07508, PS51736,G3DSA:3.40.50.1390,IPR036162,IPR006119,PTHR30461, mobidb-lite,PTHR30461:SF3,PS51737,IPR025827,PF00239, SM00857,G3DSA:1.10.10.2600,SSF53041
MARNIIRIKASNIKQLERKKVAAYVRVSSGKDAMLHSLSAQISYYNDYIQKRPEWEFVGIYADEGMTGTKDNRKEFQRMLQDCRDRKIDLIITKSISRFARNTVTMLEVVRELKDINVDVYFEKENIHSISGDGELMLTILASFAQEESRSVSENCKWRIRKGFLEGELVNLRFMYGYNIDDGEITINEEEAEIVRMIFNDYLNGMGTTSIAKKLSQMKVERPRGGKWNSERVAEILRNEKYAGVALLQKKYVEDHLTKTLVRNKGDLPQYYVENSHPAIIDKDTFEKVQYIMEERRNKFAGKKVPYPFTSKLICENCGKKYRRKLSHGRVYWVCSTYTRHGKDYCNSRQIPEEILLEITSEVLEIDIFDETLFNEKIEHIEICDSNILNFVFRDGEIIQRTWEHKPRSKSWDEEARQGARERALKQWEERNHGGSKDGNGNTCQE

SEQ ID NO: 10046 - protein, 528 aa, Unknown
  Description of Unknown: Integrase B10047 sequence
  cd00338,PF13408,IPR011109,IPR038109,PF07508, Coil,PS51736,IPR036162,PTHR30461,IPR006119, G3DSA:3.40.50.1390,PTHR30461:SF3,IPR025827,PS51737,PF00239, SM00857,G3DSA:1.10.10.2600,SSF53041
MPRKRSTLPSGSIGVIYGRYSSHNQKDISIEQQVALCRELAAERGIEIKEVYADRAISGKTDKRPAFQKMLRDSTSGTFHYVIAWKSSRIGRNMLEAMVNECRLADNGVRILYVEEDFDDTAAGRFAKRSMMNVNQFYIENMAEDVKRGMNSNAERCLVNGPAPFGYKTEDHHYVIDEPAAAIVREIYERAARGEPFVDIYTDLNRRGLRTRKDGEWGRSSFQAILHNEKYRGVYIFDETRIENGMPRIVSDSMYFKVQEVLRMKKNPQGRHRINGDYLLTGKLYCGHCKKPMVGISGTGKGGDMHYYYTCNGKRQHSGCDKKNVRRDFIEQEVARGIVEYVLQDDMINWIAEATVNYHKTHRDETDFDKLNDQMSDIDKSLGNLMKAVEEGLNSESVKERIKELEKEKKHVKSKLFDITANYPEVTKQEVVAWLTGLKSGDIEDKKFQSELFNTFISAVYLYDDKRIKIVFGMPGGGKSTENNLPDDFDDLEENVCIDSATGHQYVHQTNFSIVMIGFMFVLSYKHI

SEQ ID NO: 10047 - protein, 527 aa, Unknown
  Description of Unknown: Integrase B10048 sequence
  cd00338,IPR011109,IPR038109,PF07508,Coil, PS00397,PS51736,G3DSA:3.40.50.1390,IPR006119,PTHR30461, IPR036162,PTHR30461:SF3,PS51737,PF00239,SM00857, G3DSA:1.10.10.2600,IPR006118,SSF53041
MKNVILYVRVSTDEQAGRGYSLRDQEQKLLTYCQNNNFNVLHVFREDYSAKTFKRPEFKKLLEYCKKNKKDIHQLIFIKWDRFSRNTAESYQMIGVFNELAIQVNAIEQPLDLTIPEQGLMLAVYLSMPEVENQRRSLNVISGMRRAFKEGRYVGSAPKGYDNGKDAAKKPILIPNDDAKYIQEAFELMATGNYQRNEVFFKLKAKGFKSSKSVFANIINNHLYYGGVYIKAYKDEKETIVDGIHEPIITKALFDKVQQVLRNRKRGKQKAPKTYNEDFPLKGFLHCPICNKQMTASKSKGRTQYYSYYHCISPCKGRYTSEEVHQQVNDFLSDLSFDKQFQELYFEIIKEKLTEDTKQKALGAKHYENLNSIEDKLIKLQDLYIDGDMDKAGYESAKERYENIKAELKSKEMSSEDNKKLIELYNRATKKFIDIDNQYNNSTIEQKRKIIGSIFEKNIQFENKKVRTANLNPILNEISSINKGLRAKTKKDLTKKTVKSSMVIAEGFEPSTACLEGIIKKYFKVLK

SEQ ID NO: 10048 - protein, 527 aa, Unknown
  Description of Unknown: Integrase B10049 sequence
  cd00338,IPR038109,Coil,PS51736,IPR036162, PTHR30461,IPR006119,G3DSA:3.40.50.1390,PTHR30461:SF3,PF00239, SM00857,G3DSA:1.10.10.2600,SSF53041
MSKKKSKEKVVEFSKLTNKVAAVWTRVSTERQADTNGSLESQRRICTEYAESHAIRIKKYYGGTNESAKVEGKLYREMIAEVARDKEINIILVYSFDRFSRAGYEAMMTKAYLKAKGIYVVSATQATDPDSAAGGFMEDVIFLFNQFENNLRKDKCITGMVECLRNGNWYSKPPLGYDKLKVGREHVLTVNEKGKILRNAFIWKATEGIKDIEIVHRLKGLGLSIDRKHLNKILHNPFYCGYIQHSLLGDEIIKGNQEILIDEAIFNKVNDISNAGYEHKEITEPFPLKRHIICSDCGGYLTGYTVKARGRDYYKCNKKGCKSNHSTEKLHQKYINLLNEYNIPDGLIPILTDVLRKVFEEYNQNKGETKKVLLKRKTECENRINTVKVRFGLGEINSEIYTATMSELNSRLAEIRRELEDAGKNLSNMMKYINQTIEMSCKLGGLWSDSNFSNRQKIQNLVYPSGIYFDKENDDYRTENENEVFKIFRRFTASCEGGKEKATTDFARLSPSVGMRRLERPTPTSRT

SEQ ID NO: 10049 - protein, 527 aa, Unknown; identical to SEQ ID NO: 10007
  Description of Unknown: Integrase B10050 sequence
  cd00338,PF13408,IPR011109,IPR038109, PF07508,Coil,PS51736,IPR036162, IPR006119,PTHR30461,G3DSA:3.40.50.1390,PTHR30461:SF3, IPR025827,PS51737,PF00239,SM00857,G3DSA:1.10.10.2600,SSF53041

SEQ ID NO: 10050 - protein, 527 aa, Unknown
  Description of Unknown: Integrase B10051 sequence
  cd00338,PF13408,IPR011109,PF07508,G3DSA:3.40.50.1390, IPR036162,PTHR30461,IPR006119,mobidb-lite,PS51737, IPR025827,PF00239,SM00857,SSF53041
MTSTNSRTARPARRKLSTSYSYVPDWAEEHNAAMPADAPIIDLYARLSKNRYGKLEKIEDQIDAGRYEVLVPRRWRIGMVHVDNSLSAWNKNVRRPAWEHLLDRLGSRAAAGAGVYHQDRLMRQPRDLEKLIDLAEFHGSLFASVHGAKDLNDSDDRHYLRGQVNAACKSSDDTSRRTKNRNTRLRERGRLTGGPRAFGFPGVDRTATPDDDGHRPRVAAATVAAERAAILDASKRVAAKVELAKIAADWNVAGLRTATGIEWEAITVRQVLSRGRNAGRLEHEGKVIGRVVGEEPIVDDELFARVQAVFAARRRGRAASGRYLASRLIFCAECGNGLTGRPHGKQGRYERQRAYICEKSPRGGCNKIFIHVDGVDEVLRRFVIGRLSDPKLAERLSKIAREHAQRTEAIASELAEIDTLRRALSDRLGRREIKLDAYDAVCAPLAADEAKLLAELATLEAADDPQLREVRHEAHRDEITAEWDAPDADRRAMLETALRGYRVQVKPHGKYAARRFDPRRVEIMKAG

SEQ ID NO: 10051 - protein, 437 aa, Unknown
  Description of Unknown: Integrase B10052 sequence
  cd00338,PF13408,IPR011109,IPR038109,PF07508,PS51736,IPR036162, G3DSA:3.40.50.1390,IPR006119,PTHR30461,mobidb-lite,PS51737, IPR025827,PF00239,SM00857,G3DSA:1.10.10.2600,SSF53041
MKKTIRVIEPTIPLLKKKKRVAAYARVSSGKDAMLMSLSAQVSYYSELIQRNSEWEYAGVYADEATTGTKEDRTNFQKLLKACRNGEIDIILTKSISRFARNTVTLLEAVRELKKYGVDVYFERENIHSLSGDGELMLTILASFAQEESLSASENQKWRIKKNFEEGKPWTYGMLGYRYNGEYYELIPEEAEVVRKIFAYYLEGLGYNAICKRLNAEGIVTRNNNKWSQNSVSKILKNYTYTGNLLLQKTFRENHITKKTRVNRGELPKYHAEDTHEAIVDIDTFMAVQNEMARRLKGFEHKSQVQKTYPFTHKMVCDCCGAYYRRKITKTRVVWICATFNQKGKALCQQSKQLPEETLIALCNDVLGLVEFNEQIFINKVSKIRILDNNRVQFLLSNGKTEERTWKDRSRSDSWTDEMKETARQRTLQRYAPKEVE

SEQ ID NO: 10052 - protein, 527 aa, Unknown
  Description of Unknown: Integrase B10053 sequence
  IPR038109,IPR006119,PS51737,PF00239,G3DSA:3.40.50.1390, PTHR30461,IPR025827,SM00857,G3DSA:1.10.10.2600,SSF53041, IPR011109,PF07508,PS51736,mobidb-lite,cd00338, PF13408,Coil,IPR036162,PTHR30461:SF3
MAKKQKPSMVPITAAVYARYSSSNQNDASIEQQIAECKAYALQNNLTVVAEYEDRAMTGRNDKRPGFQRMIRAAERHEFQVLLTYKSNRLARNMLDALRYENKLDKAGVKVVYCKEDFGDNAAGRLALRMMMSINEFYSDNLSEDVKRGMLDGAQKCKVVGSIPFGYKKGPDDRMVIDEATAPIVVEIFKRVLNNEAYMDIARDLNERGLKTSQGKPWGKGSFLGILRNERYTGTYIFKDVRIEGGMPQIIDREVFDAVQEIRKERNAFTGRHRSNNDFLLTGKLFCGQCLSPMVGISGRGRHGDVHYYYSCNGKRLQKSCDKKNERKEFIEEEVTRAIMTVVLDDDMMEWMVDTIMAKAEEMKEASKLGYYEAQLSETQKQIANILRAVELGIIADEFKERMAQLQSDKQTLQGKIALEKRDLLQVDRLRVIHFFEQIRNGNPADPAFQHRIIRDFVLAVYLYDGYFKLVVNFTGKNRAYKVPFSIGTSSTDTTDLSTDEVETSTEMSTEEMGKGLYKRTFAPLKR

SEQ ID NO: 10053 - protein, 527 aa, Unknown
  Description of Unknown: Integrase B10054 sequence
  cd00338,PF13408,IPR011109,IPR038109,PF07508, Coil,PS51736,G3DSA:3.40.50.1390,IPR036162,IPR006119, PTHR30461,PTHR30461:SF3,IPR025827,PS51737,PF00239, SM00857,G3DSA:1.10.10.2600,SSF53041
MESAVIYARYSSDNQRDASIDQQVKACTKFAADRGLEVIKVYEDRALTGRTDRRPSFLQMIKDSSKRRFQFVIVYSLDRFSRNKYDSVMHKHTLKENGVTVLSAMEHITDDPTGALMESILEGFAEYYSRELSQKINRGLSDNAEKGIVNGSVPLGFRRGKDGYPEIVEEEAEIVREIFRRVAEDEPFIRIIEDLNRRGLKTKVGHEWNRSSFNRILSNDRYIGVYRYKQYVHENGFPAIVDRDLFYSVQKKVKEKPNARGTGMRRKTEYGTYLLTGKLICGKCGALMTGISGVGRHGDRCFYYSCVRKKNDHACDKKNVRRDPVELAITSHLQQMLMDDDLIEWMADQTVAYQGTGRDEDEITAKEDRLKEITRKRENILKAIEDGIYTASTKDRLRELEDEDNSLRMELAAIKAEQNSMITKDMILSYLETLRDGDVTNKSFQQLMIDSFLAKAIVYDDEIKLIFNLTKEHEEATIPLEFDGKGGAGENTPQGLFKLCTSPQHGLKQTPVFFINGWFVASFPFAG

SEQ ID NO: 10054 - protein, 527 aa, Unknown
  Description of Unknown: Integrase B10055 sequence
  cd00338,IPR011109,IPR038109,PF07508,Coil, PS51736,G3DSA:3.40.50.1390,IPR006119,PTHR30461,IPR036162, PTHR30461:SF3,PS51737,PF00239,SM00857,G3DSA:1.10.10.2600, SSF53041
MGSIKPNGLYCAYLRKSRRDMELEALGQGETLARHERQLSDLADRLGIRVARWYREIVSGDTISERPQVRQLLEDVGAGLWDGVLVMDVDRLGRGDSIDQGVIMQTFMYAGVLIVTPDKVYDPADDSDAEFFEIKLFFSRREYAMIKKRMQRGRLASALDGCYMGARPVYGYERVKLQGRKGWSLKPVPEKADIVRAVFDWYAHGMDGRDVGAAVIADRLNGMGLRTDLGHRFEPSYIRHMLQNPVYIGKVQWNQRTTQYAIRDGKRVSTRPKCADPILVDGQHEPIIDRALFDHVQQMFATHEKRPKNKMAQVANPLAGLVVCSECGRMMQYKGDKTRRNGLLGCVTQRCPTAGTYIDVVEGVVLDGLRAWVDAYEAKGDAPTPAPFADACASAAARAQLTDQLATLQQQSARLYDLLEQGVYSIATYRERRADLDARLADVQAALAALDAPPKPDPIAAILPQVRTVLGSYDITATPAEKNALLRSVIDHITYTKTQRCQRNNAPTDHLNLTLYPRVTPEETSDI

SEQ ID NO: 10055 - protein, 438 aa, Unknown
  Description of Unknown: Integrase B10056 sequence
  cd00338,PF13408,IPR011109,IPR038109,PF07508, PS51736,IPR036162,IPR006119,G3DSA:3.40.50.1390,PTHR30461, PTHR30461:SF3,PS51737,IPR025827,PF00239,SM00857, G3DSA:1.10.10.2600,SSF53041
MERIVETIKSRYDPKMKPKRVCAYARVSYEKETLLKSLAAQVSYYRTFIQNHAGWQFCGVYADEPISGTKENRKQFLEMVEECRKGNIDMIITKSISRFARNTVVLLETVRELKAMGVEVFFEEQNISSFTTEGELMLTILAAYAQEESFSVSENMKWRIKKCFEEGKPWSGTIYGYRLINRRFEIIPEEAAVIKKIVGYYLDGLGYVKISKLLNDAGLRTRFGGLWNHGGVSAILKNYNYTGNLLLQTSYSSDYLTKKPKRNKGELPMYHALDTHEAIIPLETYNFIQAEMERRKQRFSKHGDRRNKVRYPFVGMIKCPCCGVHYRRKKTYYTVAWVCSISSQKGKEFCGQTQTIPEDILISTTCEVLGTNELDEAMFRARVEKIIPTQNNVLLYKMKNGQEIIKEWQYHSRKASWTEEKRKEFGEQLKEKRRQCRK

SEQ ID NO: 10056 - protein, 527 aa, Unknown
  Description of Unknown: Integrase B10057 sequence
  cd00338,PF13408,IPR011109,IPR038109,PF07508, Coil,PS51736,G3DSA:3.40.50.1390,PTHR30461,IPR036162, IPR006119,PTHR30461:SF3,PS51737,IPR025827,PF00239, SM00857,G3DSA:1.10.10.2600,SSF53041
MYEEIKTACLYLRYSSSNQTEQSIEGQMHVCQDFCKRHNIRIVEMYIDRATSASKDIEKRVEFLKMIKDSEKGNFDAVIVYKLDRFARSRYDSATYKYRLKRNGVQLVSATENITQDPEGIILESVLEGMAEFYSAELSQKINRGMRESAMKHNSIGGAIPLGYKTVDKKLIVDETTAPIVREAFQMYADGESVAEICRTFNNRGYKTSKGTRFGKSSFTKIFRNEKYIGVYKYHDYRAEDVIPPIIDKALWDRVQVRVGKIKKAPARNKARHTYLLTGKLFCGHCGSAMNADGNSNGYLYYRCYGKKNLDKQCNKRNMEKNLIERLVAQDAMSFLTDEYIEKIATIACDRNKQEIESDSPIPVIRDRIRQVDVSLNNLLKAIETGSAPDMLVKRMGELETEKKDMEVQLKKEMAHQVYIDKEQVIFWLEKFREGDINDEEFCQTVIDLFVNSVTVWDEPDDKFKITIAYNLTSIPQKTYRLSKDGRLSDYASNTPPLSANPMILGSLMIHTFTVTVHPQKRGKKTV

SEQ ID NO: 10057 - protein, 446 aa, Unknown
  Description of Unknown: Integrase B10058 sequence
  cd00338,PF13408,IPR011109,IPR038109,PF07508, PS51736,IPR036162,PTHR30461,IPR006119,G3DSA:3.40.50.1390, PS51737,IPR025827,PF00239,SM00857,G3DSA:1.10.10.2600, SSF53041
VKRGDYMARIIRKIEPSVLKLPTKKRVAAYARVSSGKEAMLHSLSAQVSYYSEFIQKHRGWEYVGVYADEALTGTKENRAEFQRLLTDCRNGKIDMIITKSISRLARNTVTMLETVRELKQLNVDVWFEKENIHSISGDGELMLTILSSFAQEESLSVSENCKWRIRNNFKDGISNTFAILGYNFEKGNITVNETEAKIIKIIFTNFLSGMGRVSIIKKLNEMGIRPKNGGAWDSTKIREILKNEKYCGDLLLQKVFIANHLTKINKTNNGELPQYLVKNNHEPIIDREVFDRVQVEMESRAKRYEAKSTTVATYPFTGKIVCGVCGKNYRRKLNNAGTKYQKAVWICSTFNTLGKTHCQSKQIPEGILTLLTAETLGITEFDERIFMQNIKEIRVQSSNLLIFVLNNGDTIEKQWQNKSRSESWSDEAKELARQKSIERMNSQCY

SEQ ID NO: 10058 - protein, 435 aa, Unknown
  Description of Unknown: Integrase B10059 sequence
  cd00338,PF13408,IPR011109,IPR038109,PF07508, PS51736,G3DSA:3.40.50.1390,IPR006119,PTHR30461,IPR036162, mobidb-lite,PTHR30461:SF3,IPR025827,PS51737,PF00239, SM00857,G3DSA:1.10.10.2600,SSF53041
MDRIIKQVVFAAPTIITALKVAAYTRVSSGKDTMLHSLSAQVSYYSKYIQEHPGWIYCGVYSDEAITGTKESRKNFQKLLQDCKAGKIDLVITKSISRFARNTVTLLENIRELKNLGVGVFFEEQNINTLTADGELMLTILASYAQEESLSASENAKWRIHKDFEKGILPKNVQNIYGFNRTEDGGFEIIPEEAEIVKDIFNLYLEGFGFLKIAQHLNELGVESNTREKWSDKKVKYILSNEKYVGDLLLQKSFVVDHLTKKCKNNNGEKPQYYVKDNHQGIVSREIFEAVQEEIKRRQLKYGKQLTVVPTYLFTGKMQCGICGKNYRRKIIRGKPIWRCPTFDRFGKKECPSKQIPEDILIDLTMEVLGTKTVDMRVFNKKISKMFLPSADRIIFEFTDGHTIKKTWQNRSRSQSWTDEMKEQARQHTLKRRKY

SEQ ID NO: 10059 - protein, 527 aa, Unknown
  Description of Unknown: Integrase B10060 sequence
  cd00338,PF13408,Coil,PS51736,IPR036162, G3DSA:3.40.50.1390,PTHR30461,IPR006119,PTHR30461:SF3,IPR025827, PF00239,SM00857,SSF53041
LNFAIYSRKSYFTDTSESTKMQVDACQEYIERHHDDVESVTIYEDDGYVRSEIDRPGMNRLRQDVADGLIDCVVVYRIDRITSKMDDFCIFYAFLKDRGVKFVTVKDGIDTTTPIGEAMMYLAVIFSGIEVENDTLRITDNMNHLAASGYWCGGKPPLGLKIQEIFVGGRKSHKILVIDEEAKAWKDELVRIFLDNHLTLQNLETYCRQQGIKSMNGKFLSTTQLYNILRAPQCVAATAKMYDYYESLGCQIDEGSPREKWDGSCAIMVYGRTTEKRIDGKKKHTIASPEEWRVSLAKWAPYMSDEIYLSILSQFGKNKIDKKMKHETTLLKGVLRCKCGRLMSLARKPKVDGSVTTWYHCPKRERAGVEACDCSAIKADLIDEKVMEIFRAIELDPKTLEKYVGVSVKAPADATEAARKALKTVEGKIARLTDALAENGASAAAKYIVQQIEELDAEASRIRRKIAEDSAAVRRAQKELKSTKEKRVDIIRLCEHYDDFTMAEKNEIARAVIKSATWDGETLKILL

SEQ ID NO: 10060 - protein, 527 aa, Unknown
  Description of Unknown: Integrase B10061 sequence
  cd00338,PF13408,IPR011109,IPR038109, PF07508,Coil,PS51736,G3DSA:3.40.50.1390, PTHR30461,IPR036162,IPR006119,PTHR30461:SF3, PS51737,IPR025827,PF00239,SM00857,G3DSA:1.10.10.2600,SSF53041
MSTAKKKLTTCEPKTAVAYARYSSAQQRDVSIEQQLRDIRAYAEREGYKIIYEYADHAKSGFKNVERRTQFQAMIQAAASGAFDTVIAWKVDRFGRNRRESATYKGQLADNGVKVVYAMEPIPDGAAGVLTEGMLESLAEWYSRNISENTKRGQLDNAVKGLYNGHVAYGYRRSADNRFEIYEPEAAVVRRIFDLYAQGHSFADIVRELNDDGILTKYGNPYQKASVLYILTNDNYIGTYHFADVRIPNSLPPIIDMDLWERAQEQRRKTYKKHGWAPEDYFLSGRCTCGLCGSPIYGAYGSGRGGKRYQYYHCKGIKTKPRICTSHYMHKEDIEKPIFDFLFNKILKGSLLDDYIGMVSDVLKARQATSPKRQLEAELSDTTRRIDNITRAISEGIWSKQTAAMLEDLNKRAEELEKKIAYHKMTDEKIIADSRIRFIMEKVADGKRDDPEYLKTVINVLVNHVRIFDHWLEVAINATGAIEQIPPEILPPLDVLPDGNRFEFCKVNAPSLYVLEPYPVIVFKIAI

SEQ ID NO: 10061 - protein, 527 aa, Unknown
  Description of Unknown: Integrase B10062 sequence
  cd00338,Coil,IPR036162,IPR006119,PTHR30461, G3DSA:3.40.50.1390,PF00239,SM00857,SSF53041
MMQNLSPFKQGDKVVGYCRYSGGEEQGLKNTSTDEQEAAIRQFCDANRLNLVRVYADPFVSGRSTKGREHYLEMMSDLLHDKKHRSGIIGIIAWDFERMNRNVDQAQLDAAQLRMAGYKIYSLQQPIMDNSPFARVMEAMYFASAQNQSDMISADVRRALQNNFQKYKVIPRSCIPDGWIAVPVDMGFFSNGKPRIGYKAEPDPDLAPRIRDAIEQRLHGATLEEMRIIIGGVFISKTREMVRRLMFKPLLYGSFTYGGTTMVNYCEPIISKETYDNLQVYNDFAPREHQKPQGHFSKNRPLLSDLLYCGVCGKKAFLDRRRAKGRLYETYYCNDKHVGFRREILDKLVVQKGIELLSDQQYQKDLEAVISSIKSPFEKSSDTTSVNSELAKIDQKISRISRAIEETDEPPATLVKRLAELEKERAAISSQLQSFDDADARDKILAEMDRIRLSILEVLKNEKSTTEEIRNALSLFIHSVVIYPGSRVLIRHTLPGMAVGSTMSGVVSAPPEGVSVYSQLLESWYQV

SEQ ID NO: 10062 - protein, 527 aa, Unknown
  Description of Unknown: Integrase B10063 sequence
  cd00338,Coil,PS51736,G3DSA:3.40.50.1390,IPR006119,IPR036162, PTHR30461,PTHR30461:SF3,PF00239,SM00857,SSF53041
MKPTSPLASPTHACCYLRSSKDRHDLSLDAQRRALQDYAHNQSLTLVAEFADAVESGKDDDRPGFQSLLRALRDPARDWAVILALDTSRIARRRHLALIFEHEAEKAGVRILYKSVPDTDPITGMLLRSILQAMDEWHSLTSKAKGLAGMAESIKQGWRAGGQAPRGYRLEHQPTGTLRDGQPVLRSKLVPGPEAAAVAAYLQARAAGKPRGIASQLSGITGSLNELEWQALTYAGHTTWGMHHEHRPGGYVGGVKRRPRAEWHLTRDTHPPLITDAEAEAILTRLAARAGLRTRAGDRVYLLSGLLQDTHGQPFAGETSKGQAAYRLGKGRRIAARLIEGAVLDQVFADLAAPEVAKAIADRMRQAAAPASKPRDLAGLRRKLATLDGKIGKLVELIADAGTAAPAYQRAIAGMELERATLATELEQAATESHQAEVIRAWTPADVARLLASLRNAMETDLAEDRTLAAREAMAGLVDRITLDLGSRAWEIHYKLHTGVKMASPRGSRLAPVVWISRGTLPRRRAA

SEQ ID NO: 10063 - protein, 527 aa, Unknown
  Description of Unknown: Integrase B10064 sequence
  cd00338,PF13408,IPR011109,IPR038109,PF07508, PS51736,IPR036162,IPR006119,PTHR30461,G3DSA:3.40.50.1390, PTHR30461:SF3,IPR025827,PS51737,PF00239,SM00857, G3DSA:1.10.10.2600,SSF53041
MTKKKAPQPKSGKAVIYARYSSHNQREASLEQQIAECKKYAEKNGYTVSDIYQDAAVSGRTDDRPAFKRLMKDAEKEKFDYIIAWKSNRIGRNMTQTMTNMAKLAEYGVECLYTEEDFDNTASGRFALRNMMNVNQFYSENMAEDIRRGLMDNAEKCMVNGMTPLGLKRGEDGRYAIDEPSAAVVRQIFDRILHGWTITEVMTDLNNRGIKTRYGNEWKHQSFNKLLSNEQYIGVYKYSGVRIEGGIPPILDKEVFEGVQKVLGEKKRPRGKKRDTADYFLVGKVFCGKCESPMTGISGTSKTKAKHYYYACNAKHYDHTCDKKNVPKDDLEFSVGLGVKTLLQDQGLVDWLLGGYDDIIRQIREESKVSTLEGQLAEVTVSLDNIMKAMEAGAFNDVIIKRMNELADTKKDIEQAIAVETEALKTFSVDKLRENLYKFRDGDLEDERFLRDLIQNFVRRVLVFDNEIRISFYFGEEKTFPLVKREAGAIVRENVTMLHHSIISRTLLYADHVEITVPIQKRGTVPE

SEQ ID NO: 10064 - protein, 527 aa, Unknown
  Description of Unknown: Integrase B10065 sequence
  cd00338,IPR011109,IPR038109,PF07508,Coil, PS51736,G3DSA:3.40.50.1390,PTHR30461,IPR006119,IPR036162, PS51737,PF00239,SM00857,G3DSA:1.10.10.2600,SSF53041
MPQAVAYCRLSDANERSGSIANQKRKVIEYCERYGLELLQTFVDDGKSGWTFDRPGFKELEDFCKKNKAIQYLIIPHFDRFSRADPIDAMVKERYFRDKLNVKVLQVSEPPETDVLNPTYQIIRFMQAFVANEERNRIIDRTISGMRHSLMNGRYCSKAPFGYLNSHDENNKPIIVIDKDKVDIVKTIFRDYIAGVPVEEIRSKVKKQGFNQQGRSSIQRIVTNPLYAGLIRVPAYKHQPEAIVKGIHEPIVSESDYWSCIDIGKPHKFHQTEDVPLKGVLHCECGKLFTAAPSKGKLGKYYWYYFCNTHRKGNYSAIKIHTSFVQLLQALSFTKEEADLLKVKFIEGMEKFKQEKGKALMTIGLKINKVESQITQIETKYLLNNVSEETYKKVIQEKRIELSHLSNERVKYEADNTVLNQRMEKILSVITDIAFMWERMPLDLKQKFIKVVFGQNLQYTGGTYRTQYLHPAFLPKALILKEKGLLTLSTTLLNSEVLLPSAPSFTAAEPSILDLTDLYSIFGELVA

SEQ ID NO: 10065 - protein, 527 aa, Unknown
  Description of Unknown: Integrase B10066 sequence
  cd00338,PF13408,IPR011109,IPR038109, PF07508,Coil,PS51736,IPR036162, IPR006119,PTHR30461,G3DSA:3.40.50.1390,PS51737, IPR025827,PF00239,SM00857,G3DSA:1.10.10.2600,SSF53041
MKKDLISAVAYCRVSTKSTDQKNSYDAQIKFFREKAEELGYELVKGIGTFGDGIFADRGISGKALTKRIEFKKLTEQVKTLKFKAILVTNASRLARNAVDGMNVIREIKPYDAYIHFLKENLKSCNHSDEFLIDFFMMFSQNELREMSKKIQDGVRKAQGKGVWTAPPPYGYNRLNGYLQINEEEKQVVELMFFLYAEIGYSIDKLVRELNGICIPTKKEKKWQHTTIRHIIENPIYTGLQINHQTEMKDIFINLIEKINEHGQIRNYFEHLQIIDKEIFIKAQEIKKERSQMVENGKKYSSTNVLSNIFFCKYCNASMKRMQRSDKKGQFYYVCSNCHKDRAICKYYNYIKGEEAFDKIMKDVKSFAENIKGRTNLKELYQFYIDKYLNKNFVNKLPEIESEIERLENRKKNYQIMKADGELSKNDFSDRMNEVESELKNLYRNRDKILNIEKEIENIWDIYNYLISTIQNFDIRKSSNGDIKKIITKVEIKTVDNEKLIEVQLNNGLEKDFSTISNEYNMQFIDF

SEQ ID NO: 10066 - protein, 527 aa, Unknown
  Description of Unknown: Integrase B10067 sequence
  PS00397,IPR038109,IPR006119,PS51737,PF00239,G3DSA:3.40.50.1390 ,PTHR30461,IPR025827,SM00857,G3DSA:1.10.10.2600, SSF53041,IPR011109,PF07508,PS51736,IPR006118, cd00338,PF13408,Coil,IPR036162,PTHR30461:SF3
MFTTMAPQAAAVYCRVSSEAQQERQTIENQIEFARKYCDLNNIDIIEIYKDDGITGTLPLDERPAGFQLLQDAKAGKFKLLLIFKLDRLGRSTRVILNAVHDLDAMGVKVRSMTEPFDTSDASGRFLLTILAGVADLERSNILQRMGLGTARAAKEGKYLGGNTPYGYRVDKDGYFEPNHDIIPNINMSEVDVIQLIYDTALEGVSTVKIADRLNALGVPTLYTLRKRKSKKPNLKWLGSTVYRILKSTTYKGIHCFAKKSKHIEREVPPIISVEKWDKVQSILSSNQVKIKGNHIKRNYLLRGIIKCEHCGRAYTGLNKGKHSYYTDNGRFHYNVYGMDKKCFGKTIRQEAVEDVVWESCLEYIRNPKLIVEPIQKEINQSDKVKKEIALVHAKIVSNDAENQRLIDLYKAGLIDLQAVSGEFKKVKDEKAFLQAELDKLEKQLRDYDFIGQVDEAIDLLELLRQKVDTPDVSFEMKRAVVETMISKITVNSSSEKGVFITIYFRFGDKKGGYLCTRFAVRIIIYK

SEQ ID NO: 10067 - protein, 437 aa, Unknown
  Description of Unknown: Integrase B10068 sequence
  cd00338,PF13408,IPR011109,IPR038109,PF07508, PS51736,IPR036162,IPR006119,PTHR30461,G3DSA:3.40.50.1390, PTHR30461:SF3,PS51737,IPR025827,PF00239,SM00857, G3DSA:1.10.10.2600,SSF53041
MIQKTITTIEPLPQLERLIRVAAYARVSSGKDAMLHSLSAQITYYQNYIVSHQGWEFAGVYADEALTGTKDNREEFQRLIQDCKDGKIDLIIVKAISRFARNTATLLETVRLLKSLKVNVYFEEQNLYTMSAEGEMVLTFLASFAQEESRSVSENMKWRIRKDFEQGLIWGSKPQLGYRVVDRRLVLVPEEVDLVKRIFSLYLDGYGFQAIANILNAEGLTGIHGVRWSKMTVDHILKNYNYTGDLILQKTFRIDHLSKKKKKNNGEVDQFLVENAHEPIISKEDFMRVQELIEQRARYFKTKKKPNTIHPFTGIIKCGICGKGFRRKTQKPRIWWACSTFNTQGKDHCSGKSIPEETLIEETKKVLGVESVTIDIIKKKLDHIEAFDGNKLVFYLKNGKVVETTWKDRSRRQSWTPEMKEIARQRALEQHRRKEGK

SEQ ID NO: 10068 - protein, 526 aa, Unknown
  Description of Unknown: Integrase B10069 sequence
  cd00338,IPR011109,IPR038109,PF07508,Coil, PS51736,IPR036162,PTHR30461,IPR006119,G3DSA:3.40.50.1390, PTHR30461:SF3,PS51737,PF00239,SM00857,G3DSA:1.10.10.2600, SSF53041
MKLFDNDGPRNNRIRGHVDKYAIYLRKSRADEEAEQSDNEDTLSRHRRILTDLAARKGYYVEKIYEEVISGQTIEARPEIQQLIKDCYEGKYKGIIVIEVTRLSRGSQGDAQIIMDCLKYSNHNNGILVITPTKTYDIAHSAEDEEYMEFELFMSRREYKMINKRMDRGRKQAVVEGNYMGSSRPYGYNIIKGKKLRTLVPNDDEAPIVKMIFDWFVNENMTTGKIAEKLTLMGIPTYHDEKEWSKHTINNLLVNPVYKGKVRWNNRMAVKTMVNGELVRIRPRRNISDQYMEYDGKHMKYALVSEEMFEKAGKRFTIDRTKSNTKLANPLAGLLYCKKCNTPMRRTTHENSKYNTKERYQHKYTKLCKVKSASIPDVLNAVAYGLKLYIEDFEMQMKDLPSVNKNTIASQIDALNKELLKTQKRLSKLFEAWEDEQISNNEFVDRKTVNNEKIENIKQQISELENTIPEKEELETKTILLSDALKALTDDSVEAKEKNIYLKQIIEKIDYSRENEKEFILDITLK

SEQ ID NO: 10069 - protein, 432 aa, Unknown
  Description of Unknown: Integrase B10070 sequence
  cd00338,PF13408,IPR011109,IPR038109,PF07508, PS51736,IPR036162,IPR006119,G3DSA:3.40.50.1390,PTHR30461, mobidb-lite,IPR025827,PS51737,PF00239,SM00857, G3DSA:1.10.10.2600,SSF53041
VERTITKMPVLPKMPVRKRVAAYTRVSSGKDAMMHSLSAQVSYFSSMIQSNPEWEYVGVYSDEAISGTKDTRENFMRMVEDCRAGKIDMVITKSLSRFARNTVTLLRIVRELKDLGVDVFFEKENIHSTNGDGELMLTILASFAQEESRSVSENCKWRIRNDFAKGIATSWCFMYGYRIKKCVVTIHEKEAAVVRWIFHQYIEGVGTAAIARLLRRHNVKSYFGGVWTAQRVRNLLKNEKYSGDMLLQKRYVVDHLTKVCKHNHGELPQYFVEGSHPAIISRETYQKAMAIMRVNFLKNNISAEAPPHYVFTQKIVCDKCGKNYRRRTSAYEKAWNCATYLEMGKAYCHTKKIPEDILMREAAYVLRIDEFDPDVFTEQIAEIRVPEDNKLVFVFYDGRRVETHWQDKSRRDSWTPEMKKKASEAEARRRQK

SEQ ID NO: 10070 - protein, 526 aa, Unknown
  Description of Unknown: Integrase B10071 sequence
  cd00338,PF13408,IPR011109,IPR038109,PF07508, Coil,PS51736,G3DSA:3.40.50.1390,PTHR30461,IPR006119, IPR036162,PTHR30461:SF3,IPR025827,PS51737,PF00239, SM00857,G3DSA:1.10.10.2600,SSF53041
MNAVIYARYSSYTQTERSIEGQIEDCTRYADGNNFVIVGQYIDRARSGTSADARPDFQRMIRDAEKRQFEAVLVYKLDRFARNRYDSAIYKAKLKKAGVRVVSVTEAISEDPEGVILEAMLEGLAEYYSRNLSQNVKRGMKIAREHGTFTGGRLPYGYGLDGKKVIVDEHEAEAVRYVYSEYARGSTMREIVEELNRRGYKPRTGAKFTTNSFQSVLRSKKYIGQYTFAQEASECAYPRIIEDELYYAVQDRFAAVRRAPAAGKAKIAYLLQGKLFCGHCGANMVGESGRGKGGAVYHYYACANRKKRHTCKKKNEKKDVIEQYVIDQTLEYVLEPERLDYIAGRVAAEYEKEFSDSSILTLQKQLAQIEREMDDCVDVLLEVRKNAFLTQKITEKVQTLTDRKSEIELDLSKLKIACKNRLSQEEIKKWLKSFASGDPLDEEYRRRIIDIFVNAVYLYDDKIVIYYNVKGGKQVTYSEMLEDTAAAEMSECSDSAGSAPPLLAISEKLRLRSVSFGIAIQRREGR

SEQ ID NO: 10071 - protein, 526 aa, Unknown
  Description of Unknown: Integrase B10072 sequence
  cd00338,IPR011109,IPR038109,PF07508,Coil, PS51736,G3DSA:3.40.50.1390,PTHR30461,IPR006119,IPR036162, PTHR30461:SF3,PS51737,PF00239,SM00857,G3DSA:1.10.10.2600, SSF53041
MKLFDNDGPRNNRIRGHVDKYAIYLRKSRADEEAEQSDNEDTLSRHRRILTDLAARKGYYVEKIYEEVIFGQTIEARPEIQQLIKDCYEGKYKGIIVIEVTRLSRGSQGDAQIIMDCLKYSNHNNGILVITPTKTYDIAHSAEDEEYMEFELFMSRREYKMINKRMDRGRKQAVVEGNYMGSSRPYGYNIIKGKKLRTLVPNDDEAPIVKMIFDWFVNENMTTGKIAEKLTLMGIPTYHDEKEWSKHTINNLLVNPVYKGKVRWNNRMAVKTMVNGELVRIRPRRNISDQYMEYDGKHMKYALVSEEMFEKAGKRFTIDRTKSNTKLANPLAGLLYCKKCNTPMRRTTHENSKYNTKERYQHKYTKLCKVKSASIPDVLNAVAYGLKLYIEDFEMQMKDLPSVNKNTIASQIDALNKELLKTQKRLSKLFEAWEDEQISNNEFVDRKTVNNEKIENIKQQISELENTIPEKEELETKTILLSDALKALTDDSVEAKEKNIYLKQIIEKIDYSRENEKEFILDITLK

SEQ ID NO: 10072 - protein, 437 aa, Unknown
  Description of Unknown: Integrase B10073 sequence
  cd00338,PF13408,IPR011109,IPR038109,PF07508, PS51736,G3DSA:3.40.50.1390,IPR006119,IPR036162,PTHR30461, PTHR30461:SF3,PS51737,IPR025827,PF00239,SM00857, G3DSA:1.10.10.2600,SSF53041
MKEKKITKIEALSKLPKKTRVAAYARVSNGKDAMLHSLSAQINYYKKMIQDNNDWQFAGVYADEALTGTKDSREEFQQLLEDSKAGKIDMIITKSISRFARNTMTLLETVRELDKLNVDVFFEEQNIHSISSEGEMVLTLLASVAQEESRSVSENMKWRIKKEFQQGEIWGGRSPLGYNLKNKAFRVIPKEAELVQLIYKLYVDGNGAEAICQILDAKGIKPKESKKWGPTSIIKILSNRNYTGDLLLQKTYLNNHLSKKQVINKGELDRYLVKGNHEAIISNELFDKVQKLKHQRAIKNKSNLPKKKTFLHGLIQCGICGSTYTPKKMRKKDIWICSKSASKGQDVCDSKLVPHNIIVEASNHILEMDQNNEATFKSKVTKIIVQENRMLEFHMKDGKILNYRWKHKSRSKSWTPEMKEQARLRALEQHHGGGENA

SEQ ID NO: 10073 - protein, 526 aa, Unknown
  Description of Unknown: Integrase B10074 sequence
  cd00338,IPR011109,IPR038109,PF07508,Coil, PS51736,G3DSA:3.40.50.1390,IPR006119,IPR036162,PTHR30461, PTHR30461:SF3,PS51737,PF00239,SM00857,G3DSA:1.10.10.2600, SSF53041
MGKIRLNGLYCAYLRKSRRDVELEALGRGDTLARHETQLRALAERLGVRIAMTYREIVSGDTLAERPEARRLLEDVNAGLWDGVLVMDVDRLGRGDSIDQGVIMQSFLYSDTLIVTPDKIYDPSDDSDAEFFEIKLFFSRREYAQIKKRMQRGRLASAMDGCYMGTRPVYGYERVRRQGRKGWTLRVVPEKAGIVLNIYDWYAHGMNGRDAGTLVIADTLNRMGLRTDLGNPFEASYIRQILRNPAYIGKVQWNQRQTVYKIVDGRRVKSRQISDNRILVDGCHEPIVPVELWRQVQAIFDSHGKRPFNANAPVSNPFAGLVLCPVCGHHMQRKPSPSRRGDFLYCPTQRCPTTSAYIAAVEAATLDVLRGWVAEFDAADDAPDAAHSAASAVSAADAARKQRADQRAALQTQLSKQYDYLEQGVYTIAEFKARREELQQKIAALDAADARPDTPAVDPRRLIAPKARSVLEAYSLTASPADKNALLTSVIDHIEYHKTQRGLRNNKPGDNLSIVVYPRLPSNPDL

SEQ ID NO: 10074 - protein, 433 aa, Unknown
  Description of Unknown: Integrase B10075 sequence
  cd00338,PF13408,IPR011109,IPR038109,PF07508, PS51736,G3DSA:3.40.50.1390,IPR006119,PTHR30461,IPR036162, IPR025827,PS51737,PF00239,SM00857,G3DSA:1.10.10.2600, SSF53041
MNRTVQRVVFKNPPKPQATRVAAYGRVSSGKDAMLHSLSAQVSYYSGLIQSHEGWLYVGVYTDEAITGTKEQRDGFQRLMEDCRAGKIDLVITKSISRFARNTVTLLEAVRELKLLGIGILFEEQNINTLTSDGEFMITILASYAQEESLSASENQKWRIKKNFEEGMPWNGRMLGYRYDHGIYKVVPTEAVIVKRIFAEYLSGKGCVAIVNLLNNEGIPSPLGGKWGKTAIMKILRNYAYTGNLLLQRFYRNNHLEKITLPNHGERPMYHVEKSHEAIITIEEYTEVQRLIALRGEQFHKNGGSRNRYPLSGRIVCAGCGQKFRRKTTATGIVWICSTYSYQGKDACPAKAIPDETITQACKEVLGIDEVTADALDSRLTAIRADKNNTLVFCFKDGEEIVKRWYDRSRSESWTDEMREAARNRIKERVVNG

SEQ ID NO: 10075 - protein, 526 aa, Unknown
  Description of Unknown: Integrase B10076 sequence
  cd00338,IPR011109,IPR038109,PF07508,Coil, PS51736,G3DSA:3.40.50.1390,PTHR30461,IPR036162,IPR006119, PTHR30461:SF3,PS51737,PF00239,SM00857,G3DSA:1.10.10.2600, SSF53041
MTVFEMNRSIENALNPKMEQYAIYLRKSRADMEAEKLGEGETLARHKKILTELAARKGLYIGEIYQELVSGETIEARPEIQRLIQDCYAGKWAGILIVEVSRLSRGNQGDAQVILDCLKYANRNNGVLVITPTKVYDVAHNHDDEEYMEFELFMSRREYKMIKRRMDRGREQAVVEGNYMGSYRPYGYNILKTKTARTLVPNEDEAPIVKYIFEWTVKENLSPRKIAERLDSMNVPTYSGDPEWSAATIKTILTNPTYKGKVRWNDRMQVKTMVNGEIVRSRPRSSHSDKYMEYDGKHKDNALVDEETFKAASSRFYADRTKANYKLQNPLAGIMICKHCQKMMQYQAYKHRPTTEPRFLHRQSKMCKVKSAVASDVMNAVVHSLKLYIEDFSMKVDNLPDVDENTIVAQIEGFQKKILQSKRKLAKIFDDYENEVYTANEFVERKAKHNADIESFEKQIIELENSIPEKEEYEDMIISISEALDHVLDPDLDADIKNEYLKRIIDRIEFSRENDEEFILDVFLKP

SEQ ID NO: 10076 - protein, 526 aa, Unknown
  Description of Unknown: Integrase B10077 sequence
  cd00338,PF13408,IPR011109,IPR038109,PF07508, G3DSA:3.40.50.1390,PTHR30461,IPR036162,IPR006119,PTHR30461:SF3, IPR025827,PS51737,PF00239,SM00857,G3DSA:1.10.10.2600, SSF53041
MDTVIYARYSAGPRQTDQSIEGQLRVCTDFCKQRGLTVVDTYCDRHISGRTDERPEFQRLIADAKKKKFAAVVVYKTDRFARNKYDSALYKRELKRNGIQIFYAAESIPDGPEGIILESLMEGLAEYYSAELAQKIKRGMHESALKCQSTGSGRPLGYRVDEQKRFQIDPEAAQAVQIIFDRYIQGESNEAICELLNVRGFRTVQGNLFNKNSINRIIKNRKYIGEYRYQDIVVEGGVPAIISRETFCLAQAEMERRRTRKRPKSPKAEYLLAGRLFCGHCKTPMQGVSGTGKTGNKWYYYYCANTRGKTKTCDKKQVSRDRLERAVVDFTVRYVLQEDVLADLARKVYAAQERQNDTAAEIAVYEKKLADNKKAISNVLRAIESGTATQTLPARLQELENEQVVIEGELAFLRGHKLEFSEDQILFALTKHLEPYPGETEQDYRRRIICDFVSEVYAYDDRLLIFFNISGADGKLKSADLAQIEVSEFDERSVSSTKSIAGRTPAAMITVLSYGFVLATRLESRL

SEQ ID NO: 10077 - protein, 526 aa, Unknown
  Description of Unknown: Integrase B10078 sequence
  cd00338,PF13408,IPR011109,IPR038109,PF07508, Coil,PS51736,G3DSA:3.40.50.1390,IPR006119,IPR036162, PTHR30461,PTHR30461:SF3,IPR025827,PS51737,PF00239, SM00857,G3DSA:1.10.10.2600,SSF53041
VIAIRKTKKAACRPKTAVAYARYSSAGQRDVSIEQQLRDIRAFADREGYTLIHEYADHAKSGFHHTAARADFLAMLSAAETGAFDTIITWKVDRFGRNREEAALYKGQLRRLGVSVVYAMEPIPAGAAGVLTEGMLEAIAEWYSRNLSENVTRGHRDNAAKCISNGCPIYGYRRGPDGRYILQQEEAAVVRSVFSRYGQGFSAATIAAELSAAGMKTVRGCAFSPQSIIRMISNERYIGTYIWADVRVPGGMPAIITPQEWEAAQRMKEKTGRHVEQGQTDFLLTGKAFCGHCGAAMIGDSGTSKTGATHYYYTCQGHKSRKGCNKKSLRKEYLEDAVLRFIVDHCLTGPEREKIADAVIAAQREEEKKSPLASMEKELTETQKKIDNVNSAIESGIWNSSTAVRLKALEDVAADLRLSIDKLKFSQSQLLTRDRVLFFLDKMARYNLADPHRRKQLFDTFLNAVYVYDGYAHIVINCVEGNSRVPLSDLEALDLPPVPPGSDNVTGGAPFVTHPNSRIVIYTIAV

SEQ ID NO: 10078 - protein, 526 aa, Unknown
  Description of Unknown: Integrase B10079 sequence
  cd00338,IPR011109,IPR038109,PF07508,Coil, PS51736,IPR036162,IPR006119,G3DSA:3.40.50.1390,PTHR30461, PTHR30461:SF3,PS51737,PF00239,SM00857,G3DSA:1.10.10.2600, SSF53041
MYIIPQLTPIETLLYSRKSRTDDPNMSVEEVLENHEKILNDWIERNLPGMGPIPQENRYHEVVSGETIDSRPKMKELLKRIESPKVKAILCVEPQRLSRGDLEDIGRLVKLLRYTNTIVITPTFTYDLRDDHDRDSFERELKRGNEYLEYSKKIMRRGRELAVERGCFIGNIPPYGYDRIMIKEGNRKCYTLTPNPEQAKVVKMIFEWYRDGLGSHRIAAKLNELAIPTTKGGKWHAESLNKMRKNEHYIGKVFWNHRKTVRTIEDGELVTSRPINNEYMSFPGKHEPIIDMELWNAVQEIRGQIPPVKRSKETVNEFAGIVYCTCGYAMSLRTYKQKDGSERSAPRLLCTNQHECSTASCTVEEMQNEVVKILQDAIKDFELRIERDASDSVAFHRELVANLEKRLVDLNALEVSQWEKYTMEGMPKHIFDMLNEKVLKEKAEVEQALCTAKDSVPEPIDYENKKAMFSDALDALRDPVVPAKYKNMLLKRCICRINYYRQKKPKEYGNRWGEAAPMELDVHLTV

SEQ ID NO: 10079 - protein, 526 aa, Unknown
  Description of Unknown: Integrase B10080 sequence
  cd00338,PF13408,IPR011109,IPR038109,PF07508, PS00397,PS51736,IPR036162,IPR006119,G3DSA:3.40.50.1390, PTHR30461,PS51737,IPR025827,PF00239,SM00857, G3DSA:1.10.10.2600,IPR006118,SSF53041
LAEKRKALIYARVSTLRQERKDLSIPGQIKRCREKLEELGYTPVRVFEEAKTASESADRRPAFQEAITMCLDKTQGIEAFCVLDSSRFARHRVDSVVYKHELRQRGVKIVYTMRDVDENDIGDMMSEGMEEIFNAVSAILSGRKAKMGMLDKAEKNGLYPGGAPPIGYRWKSAPQGKVFDPDPKWAPLIRRIFGLVLEGKGVIEIAKILRDEGITTPKGKPWRTTSLARLLHNVKYKGDWSYLHVYKKGAHTPIVDPDTFGQVQKIMEARAPNKKGDRTPANPKLYFSGVLYCGECHSRMDSDTGKSKNGRLYFYYVCSGRRKITNECPGLRIPAREFDTSVREWFIRHLISENNVLRCIEALREMIQEHNEGLEYKDKSFQSQISEIDARIERLYTILETSDEFDLSDLAPRIKGLERAKKELREERALVQPLSLPEADERLISTISGELYDLVLNMTPEEFSRCLKKMGVKIFAYKSRKLRITVSPSNFVAEVFAADDRWRAACVSGANTQRITILQRGALYED

SEQ ID NO: 10080 - protein, 526 aa, Unknown
  Description of Unknown: Integrase B10081 sequence
  cd00338,PF13408,IPR011109,IPR038109,PF07508, Coil,PS51736,IPR036162,PTHR30461,IPR006119, G3DSA:3.40.50.1390,PTHR30461:SF3,PS51737,IPR025827,PF00239, SM00857,G3DSA:1.10.10.2600,SSF53041
MSENAVVYARYSSRRQQEQSIEGQLAAAKKYADGKGYTIIAEYCDRAKTGRNDRRAEFQRMLSDCAKRKFSVIIVWKVDRFGRNRYEIAMSKARAKKYGVRVEYVAENISPGPEGVILESVLEGLAEYYSLQLSQNVSRGKLESAKKHHVIGGFLPYGFRAASDKSYELDPDQAPIARQIFERYAAGETVSQLLIWLDESGIRNARGTKFTKTTLPRMLKDERYIGTYTFKDIIRDEDAIPAIVDKKTFQKVQVMLKKNKRMPSHAWDYTEYLLTGKLFCGHCGSMMAGMSGFGKLGTKYGYYACSDRRHGGSCKKKNVRQDWIEPLVIEETMKLLQDEDLFQQIVDAAWSFYQEEAAANEEIDAMASELHDVEKGISNLVKAMEAGAISDALVSRLQDLEDQKAGLEKAIAQAELEAGPELTRDHIEFFLLKFREKDPEKEEDRKALIDTFVNSIYLYDDKMTMTFNYRPGGTGEMKQITLSDLDDGVRLSTHLFQWTGHSRTLSGEPITVRVWRHVIIITIDLI

SEQ ID NO: 10081 - protein, 526 aa, Unknown
  Description of Unknown: Integrase B10082 sequence
  cd00338,PF13408,IPR011109,IPR038109,PF07508, Coil,PS51736,G3DSA:3.40.50.1390,PTHR30461,IPR036162, IPR006119,PTHR30461:SF3,IPR025827,PS51737,PF00239, SM00857,G3DSA:1.10.10.2600,SSF53041
MGKVTVIPATRDFHTGVVKNSIYRKRVAAYARVSTDHEEQRTSYEAQVDYYTKYIQGRADWEFVRVYTDEGITATNTKHRDGFNEMIADALAGKIDLIITKSVSRFARNTVDSLTTVRKLKEKGVEVYFEKENIYTLDSKGELLITIMSSLAQEESRSISENITWGKRKFFADGKVYLPYKRFLGYKKGEDGLPEIVPEEAEIIRLIYSLFLEGKTTCAIADILTQKGIPTPSGKLVQWSFSTVESILTNEKYKGSALLQKVFTVDFLTKKRKANEGEVPQYYIEDSHPAIIPPVEFEMVQEEMRRRKRISHNYSGNNIFASKIVCAECGGYYGPKVWHSNDKYRRIIYRCNRKYSKGEHKCETPILTEDGIKAAFITAFNLLIAKKEEVLEQCRYMQALLSDTTEIDAELGAAVEEMNFVKELLIKCVENNTKVQQDQEEFWNKYNLLEQRYEKAKTRVEELQVIRKEREHKLENIGGFMFEIHERDDALEAFDDRLWCVTVETVKVQTDGKFTVVFKNGLEIVV

SEQ ID NO: 10082 - protein, 526 aa, Unknown
  Description of Unknown: Integrase B10083 sequence
  cd00338,IPR011109,IPR038109,PF07508,PS51736, IPR036162,PTHR30461,IPR006119,G3DSA:3.40.50.1390,PS51737, PF00239,SM00857,G3DSA:1.10.10.2600,SSF53041
MNNLNPNGLYCAYLRKSRRDVELEAMGQGETLARHEKQLTDLAARLGIRIARTYREIVSGDTIAERPQVQQLLQDVNAGLWDGVLAVDVDRFGRGDSIDQGVIMQSFMYARVLIITPDKIYDPADDSDAEFFEIKLFFSRREYNMIKKRMQRGRLASAVDGCYMGSRPVYGYERVKLQGRKGWSLKAVPQKAAIVRSVFDWYAHGMDGQDVGAAVIADRLNQMGLRTDLGNRFEPSYIRHMLQNPVYIGKVQWNQRTTKYAIRDGKRVHSRPKNADPVLVDGRHEGIIDPALFARVQQMFASHEKRPKNKQADVANPLAGLIVCAQCGRHLQLKGDKNRRAGFLGCVTQRCPTCATSIDVVEGVVVDALRGWISAHEARADAPTPQPRADVCATEAARAQLTDQLIDLQAQRKKNFDLLELGVYDVPTFKERRADLEARISEVQSALAALDAPPKPDPVAVILPQVRTVLGSYDLTATPAEKNALLRSVIDHITYAKTQRCFRNNAPTDHLSLTLYPRVPSDVDDV

SEQ ID NO: 10083 - protein, 428 aa, Unknown
  Description of Unknown: Integrase B10084 sequence
  cd00338,PF13408,IPR011109,IPR038109, PF07508,PS51736,IPR036162,PTHR30461, G3DSA:3.40.50.1390,IPR006119,mobidb-lite,PTHR30461:SF3, IPR025827,PS51737,PF00239,SM00857,G3DSA:1.10.10.2600,SSF53041
VIQKVAFPQKKPFLLKRTAAYARVSSGKDAMLHSLSAQVSYYNQLIQSNPEWLFCGVYADEALTGTKENRAEFQKLLNRCRRGEIDLILTKSISRFARNTVTLLETVRELKTLGVDVYFEEQRIHSMSSDGELMLSILASYAQEESYSASENKKWQMRKDFEQGKVGSMRMLGYRRTKSGKLEIVPEEAEIVRMIFLYYLSGMGKLAIAKKLNEQQICTVRGCAWTTEDVRRTLRNEKYTGNLLLQKSFRENHITKKKVANIGQLPQYFVAGSHEAIISQEQFDAVQKQMAERQKKYAGSCTINRYPFTQKIRCACCGKYYRRKTTVTGVVWICSTYNTKGKKYCPTAKQIPENTLISACCDVLEISEFDAERFAEQIEQIQIPAPNELQFCFSDGTEQTVSWKDRSRSESWTAEMREKARQKKWRQS

SEQ ID NO: 10084 - protein, 526 aa, Unknown
  Description of Unknown: Integrase B10085 sequence
  cd00338,PF13408,IPR011109,IPR038109,PF07508, Coil,G3DSA:3.40.50.1390,IPR036162,PTHR30461,IPR006119, PTHR30461:SF3,PS51737,IPR025827,PF00239,SM00857, G3DSA:1.10.10.2600,SSF53041
MSENAVVYARYSSRVQQEQSIEGQLAAAKKYADEKGYTIIAEYCDRAKTGRNDRRAEFQRMLSDCAKRKFSVIIVWKVDRFGRNRYEIAMNKARAKKYGVRVEYVAEHISPGPEGVILESVLEGLAEYYSLQLSQNVSRGKLESAKKHHVIGGFLPYGFRAASDKSYELDPDHAPIARQIFEKYAAGETVSQLLIWLDESGIRNARGTKFTKTTLPRMLKDERYIGTYTFKDIIRDEDAIPAIVDKKTFQKVQIMLKKNKRMPSHAWDYTEYLLTGKLFCGHCGSMMAGMSGFGKLGTKYGYYACSDRRHGGACKKKNVRQDWIEPLVIEETMKLLQDEDLFQQIVDAAWSFYQEEAAANEEIDAMAAELHDVEKGISNLVKAMEAGAISDALVSRLQDLEDQKAGLEKAIAQAELEAGPELTRDHIEFFLLKFREKDPEKEEDRKALVDTFVNSIYLYDDKMTMTFNYRPGGTGEMKQITLSDLNDGVRLSTRLFQWTGHSRTLSGEPITVRVWRHVIIITIDLF

SEQ ID NO: 10085 - protein, 526 aa, Unknown
  Description of Unknown: Integrase B10086 sequence
  cd00338,PF13408,IPR011109,PF07508,Coil, PS51736,G3DSA:3.40.50.1390,IPR036162,PTHR30461,IPR006119, PTHR30461:SF3,IPR025827,PF00239,SM00857,SSF53041
LNFGIYTRKSYFTDTSDSVKMQLETCEEYIRRIFDHVDSITPYEDDGFVRSDIDRPAMNQLREDVADGLIDCVVIYRIDRVCSDMMDFCTFYTFLKEKGVKFVTVKDGIDTTTPIGEAMMYLAVIFSGLEIGNDALRIRDNLNHLAARGFWCGGSAPFGYDIIEVGAGGSKKHKTIVKNEEQHEEKERLIDILLDNNFTLQQMETYCRQQGIKSQNGKFLSTTQLHQIFRSPYCCPDSAEIYDYYEKKGCIIDEGSPRELWDGKHGVMVYGRTKEIRVNHKKKHIQAPPEEWRVSIGYHEPTISAERWLQVQDHFGKNKFEKKKKHETTLLKGVLRCKCGRLMTLARKSRADGSVGTWYHCPRRERAGVEACDCKAIKAELLDEEVLKIFRAIEHDPEVLKKYIREEKKTTDSGDKIKKKIAETEKKIGKLTSALAASAKSSAAKYIIAEIEDLDVELMRLKREEAAALQEKRRNAQSLQSAENKRKTIMELLANFDSFTMDEKNEIAKSVIREATWDNETLFIML

SEQ ID NO: 10086 - protein, 439 aa, Unknown
  Description of Unknown: Integrase B10087 sequence
  cd00338,PF13408,IPR011109,IPR038109, PF07508,PS51736,IPR036162,PTHR30461, G3DSA:3.40.50.1390,IPR006119,mobidb-lite,PTHR30461:SF3, IPR025827,PS51737,PF00239,SM00857,G3DSA:1.10.10.2600,SSF53041
MEIEKIAALPKLKRKIRVAAYARVSSGKDAMLHSLSQQVSYYNNYIQRHNDWMFVGVYSDEAITGTKEDRAGFQRMLADAKKGLIDLVITKSISRFARNTVTLLKSVRALKDLNVGVYFEEQNINTLSGSGELMITILGSFAQEESKSASDNQKWRIKANFEAGIPWGAKLYGYKFVKDHLEVIPEEAKVIKKMTDYFLEGLGSAGIARRLNKEGILTRAGKAWGESSIRVILGNYYYTGNMVLQTGFRENHITKKRVNNNGEKPKYVVEEAHEAIIPIDTFNKIQEELKRREAISNHSHGPTITPFSKMIVCGKCGCSYKRKTTRYKHIWCCRTNVEKGASLCNAKMVPEDVLYELSKEVLNINEFDEDLFKDKIKQIKVLDNNEVVFILSDDTEILKCWTPKSRSEAWTKEKRELARQREITRRSTNAKDNSNTTED

SEQ ID NO: 10087 - protein, 526 aa, Unknown
  Description of Unknown: Integrase B10088 sequence
  PF13408,IPR011109,PF07508,Coil,PS51736, G3DSA:3.40.50.1390,IPR006119,IPR036162,PTHR30461,PTHR30461:SF3, IPR025827,PS51737,PF00239,SM00857,cd03768, SSF53041
MRFASYTRKSIYSDKSDSVDNQWRMSQDYAEMHFHGQIDSFQRYCDEDFTGANTNRPDLQRLMSDVKNGMVDVLIAYQLDRISRDVKDFANIYSILEEHNVKFVSIKENIDTTTPIGRAMMYVTVVFAQMERETIAARVTDNMIGLAKKGFWTGGNPPRGYVRQRININGRNHVSIVPDPEGTAYVLKIFDTFLDNNFSLQSMERYFMNNKIRTESGAFFSSTQIYKILTMPYCVEATPEVYNYYENKGCVMDPDSPREKWDGSHGVMIYGRSTEKNHKHELQSPNKWIVCVGTHEPFMSADKWLAVQNKLSKNKFIKTMKYDVPLLKGILRCSCGSIMCVSRKKKVNGDISSWYYCLKRMRQGEDACSSSQIKVDLLDEKVLDIFRSIQHDPSLVNDFVQKDEQKTPLVSSKDISAQITTYETKIGRLAATLALASNESSSATKYIVSEMEKLDKELQELKHELSVSLIEERNHSNEVLNTTGKVSEISRLIDGFSDFTSTERNSIMKNVLSGCTWNGETLFVTF

SEQ ID NO: 10088 - protein, 526 aa, Unknown
  Description of Unknown: Integrase B10089 sequence
  cd00338,PF13408,IPR011109,PF07508,Coil, PS51736,IPR036162,IPR006119,G3DSA:3.40.50.1390,PTHR30461, PTHR30461:SF3,IPR025827,PF00239,SM00857,SSF53041
MNFGIYTRKSYFTDTSDSVKMQLETCEEYIRRIFDQVDSITPYEDDGFVRSDIDRPAMNQLREDVADGLIDCVVIYRIDRVCSDMMDFCTFYTFLKEKGVKFVTVKDGIDTTTPIGEAMMYLAVIFSGLEIGNDALRIRDNLNHLAARGFWCGGSAPFGYDIIEVGTGGSKKHKTIVKNEEQHEEKERLIDILLDNNFTLQQMETYCRQQGIKSQNGKFLSTTQLHQIFKSPYCCPDSAEIYDYYEKKGCIMDDGSPRELWDGKHGVMVYGRTKEIRVNHKKKHVQAPPEEWRVSIGYHEPTMSAERWLQVQDHFGKNKFEKKKKHETTLLKGVLRCKCGRLMTLARKTRADGSVGTWYHCPRRERAGVEACDCKAIKAELLDEEVLKIFRAIEHDPEVLKKYIREEKMTTDSGDKIKKKIAETEKKIGKLTGALATSAKSSAAKYIIAEIEDLDVELMRLKREEAAALQEKRRNAQSLQSAEYKRRAIMELLANFDNFTMDEKNEIAKSVIREATWDNETLFIML

SEQ ID NO: 10089 - protein, 526 aa, Unknown
  Description of Unknown: Integrase B10090 sequence
  cd00338,IPR011109,IPR038109,PF07508, Coil,PS51736,G3DSA:3.40.50.1390,IPR006119, IPR036162,PTHR30461,PS51737,PF00239, SM00857,G3DSA:1.10.10.2600,SSF53041
VENFISDDNRPYAMYLRKSRKDLEAEEHGEGETLARHLNILEILAKNMKIAVFDEYIYKEIISGETIEARPRMQELLDKVEQGFFKGVLVVEIERLARGDSIDQGIVARAFKVGNAKIVTPVKIYDPNNEFDEEYFEFGLFMSRREYKTITRRLQTGRIMSAKEGKFVGSTPTYGYSKTKLKGQKGYMLIVNDQESKIVKLIFDLYINKKMGSSKIAKQLDDLSIMPRRGIHWSYSTIQDILSNTHYIGKIKFNNRVTVKNIKNGKIEKSRHKYANQEVIYVDGLHESIIDNDTFEKAQELKKNKYITRKSVNLNLKNPLAGILKCKKCGLTITKGNVRGKSYLYCKNQYCDNIGNYLDNIEDKILSFLEIWLKDTNLIIPNIKNDNSLTLKQDILKNKENLLNISKLKIDNIYDLFEEKVYDKNIFLERSNKMNETISTLIEEIKKLKDEINSLNSLQVDSITFIPKLEYVLRNYKKTDDIETKNKLLKDIIDKIYYLKDTKGNRWHDESFEIWILPKIKSNFIL

SEQ ID NO: 10090 - protein, 526 aa, Unknown
  Description of Unknown: Integrase B10091 sequence
  cd00338,PF13408,IPR011109,IPR038109,PF07508, Coil,PS51736,IPR036162,IPR006119,PTHR30461, G3DSA:3.40.50.1390,PTHR30461:SF3,IPR025827,PS51737,PF00239, SM00857,G3DSA:1.10.10.2600,SSF53041
MSENAVVYARYSSRRQQEQSIEGQLAAAKKYADGKGYTIIAEYCDRAKTGRNDRRAEFQRMLSDCTKRKFSVIIVWKVDRFGRNRYEIAMNKARAKKYGVRVEYVAENISPGPEGVILESVLEGLAEYYSLQLSQNVSRGKLESAKKHHVIGGFLPYGFRAASDKSYELDPDQAPIARQIFERYAAGETVSQLLIWLDESGIRNARGTKFTKTTLPRMLKDERYIGTYTFKDIIRDEDAIPAIVDKKTFEKVQIMLKKNKRMPSHAWDYTEYLLTGKLFCGHCGSMMAGMSGFGKLGIKYGYYACSDRRHGGSCKKKNVRQDWIEPLVIEETMKLLQDEDLFQQIVDAAWSFYQEEAAANEEIDAMASELHDVEKGISNLVKAMEAGAISDALVSRLQDLEDQKAGLEKAIAQAELEAGPELTRDHIEFFLLKFREKDPEKEEDRKALIDTFVNSIYLYDDKMTMTFNYRPGGTGEMKQITLSDLDDGVRLSTRLFQWTGHSRTLSGEPITVRVWRHVIIITIDLI

SEQ ID NO: 10091 - protein, 437 aa, Unknown
  Description of Unknown: Integrase B10092 sequence
  cd00338,PF13408,IPR011109,IPR038109,PF07508, PS51736,G3DSA:3.40.50.1390,IPR036162,IPR006119,PTHR30461, PTHR30461:SF3,IPR025827,PS51737,PF00239,SM00857, G3DSA:1.10.10.2600,SSF53041
MGRKITKLAVSEPIPTRKRVAAYARVSSGKDEMLHSLAAQVSYYKEYIQSQQGWEFAGVYADEAVTGTKDNRAEFIRLLADCKAGKIDMVITKSISRFARNTVTLLETVRGLCELSIDVFFEEQNLHTASTNGELLLTILASYAQEESRSVSENCKWRIRKDYQEGKLTGGVHMYGYDFRDGMLVVNPQEAEVVRMIFRDYLSGMGRNAIMRKLIRLGVPTKLGGRWAENTVASILTNEKVVGDLCLQKSFISDHLTKQKRVNRGELPKYYVEGAHEAIIDRATFDAVQAEVARRAYESKPASREPRNEFSGIIRCGRCGANFNRKINGIGTKYAKANWACATYTTHGKDHCAAKRIPEDILRQKCAEALGSAAYNAVDFMARVAAITIPEDGVLVFTFKDGMQKTILWEKHSRRDSWTHEMKNKAKDEAQRRLGNG

SEQ ID NO: 10092 - protein, 526 aa, Unknown
  Description of Unknown: Integrase B10093 sequence
  cd00338,PF13408,IPR011109,IPR038109,PF07508, PS51736,G3DSA:3.40.50.1390,PTHR30461,IPR006119,IPR036162, PTHR30461:SF3,PS51737,IPR025827,PF00239,SM00857, G3DSA:1.10.10.2600,SSF53041
VRVCRDYVERAGGRIADDLVFADVAISGTTSARPGLQALLAAVETGTVDVVVTEDLSRIGRDVGINDRVLKSLRSHGARLLAINDGIDSRQHSAKLLGTIKSAMAEGYIDEIKHRTRRGMDGLFGAGMSTGGKTYGYRSVPAGDASGRMRLEIDNEQAAVVRRVFGWYVAGVGIRMIAERLNTSAILSPRGGKWSHTTVNSMLANDIYQGVVFFNKRQYERDSASGKRGKSMRARSEWLRDDRPDLRIVDAITWDRAASKRADTHKTYTQGKRPKAGYPLSGLLVCDVCGDFMTIGGGSPGRRYYWCSAYRKGHGCTNTQSILEQSLRKWVLDQIRDTAGAPKLLEAMRAAWASSLGSKDREIKSEITQRRAALTRTETQISALLEYVADGNATPSILAKLKEKEDYAELQRATLVRLAAELGSVPMIPSIEQMRAFLRELPEAAQIRPVESRELLRGMVRDAVIRCRPARDGYDVEFKLVPSALLGIGIAPTVAGTMSSGSCGGAIVPLGIMADVIISGTCPLVY

SEQ ID NO: 10093 - protein, 526 aa, Unknown
  Description of Unknown: Integrase B10094 sequence
  cd00338,PF13408,IPR011109,IPR038109,PF07508, Coil,PS51736,G3DSA:3.40.50.1390,IPR036162,IPR006119, PTHR30461,PTHR30461:SF3,IPR025827,PS51737,PF00239, SM00857,G3DSA:1.10.10.2600,SSF53041
MNTVIYARYSAGPRQTDQSIEGQLRVCTDFCKQRGLTVIDTYCDRHISGRTDERPEFQRLITDAKRKKFEAVVVYKTDRFARNKYDSAVYKRELKRNGIQIFYAAEAIPDGPEGIILESLMEGLAEYYSAELAQKIKRGMHESALKCQSTGSGRPLGYRVDEQKHFQIDPESAQTVQTIFEQYIKGESNAAICELLNSRGLRTAQGKPFNKNSINRIIKNRKYIGEYRYHDIVVEGGMPAIISKDTFNLAQAEMERRRTRKAPKSPKAEYLLAGRLFCGHCKGPMQGVSGTGKSGNKWYYYYCGNTRGKNKTCDKKQVSRDRLERAVVDFTVRYILQEEVLEELARKVHAAQERQNDTASEIAFYEKKLADNKKSIANVLRAIESGAATQTLPARLQELENEQAVILGEISFLKGKRLAFTEDQILFALMKHLEPYPGESEQDYRRRIISDFVSEVYLYDDRLLIYFNISSENGKLKSADLSNIEGGEFDEGLVRSTNLITGRTPEVTIVVLPYGFVLATQIKDRL

SEQ ID NO: 10094 - protein, 526 aa, Unknown
  Description of Unknown: Integrase B10095 sequence
  cd00338,PF13408,IPR011109,IPR038109,PF07508, Coil,PS51736,IPR036162,PTHR30461,G3DSA:3.40.50.1390, IPR006119,PS51737,IPR025827,PF00239,SM00857, G3DSA:1.10.10.2600,SSF53041
MSTAKKKLTTCQPKTAVVYARYSSHGQRDVSIEQQLRDIRAFAEREGYTIIHEYADRAKSGFKNSDRRAEFQAMLMAAASGAFDTVIAWKVDRFGRDRRESSMYKGQLADVGVSVVYAMEPIPDGAAGCLTEGMLEAIAEWYSRNLGENVRRGQHDNALKCLSNGHIPLGYTTGADHHLVIKEDEAATVREIFELYSEGYSLSAIEKKFESEGIRTKKGCVFRKMSLLGILENEAYIGVYRFGDIRIPGGMPAIIDQDLFDLCQEQRKKTARHARACNQTYLLSGKTFCGFCGTKMYGASANSSKRRFNYYVCNKKKAGRFCPDSRSIHKEALEGPVIDIAFNRILQGERLDQLISMSVDILNRKKESSTVSQLEKERRDILRRIDNITLAISEGIWTKQTASLLDELNKRADNLQKEISYCHMTGKQHDHEMRLRFMKEKLANGDMTDPYCLQTLVNTFINSITVYNDYARIVLNLEENIDTIPIDELPPLSKLPDWSNFAFGNVGQGQLYALETHPVIAFKIAI

SEQ ID NO: 10095 - protein, 444 aa, Unknown
  Description of Unknown: Integrase B10096 sequence
  cd00338,PF13408,IPR011109,IPR038109,PF07508, PS51736,G3DSA:3.40.50.1390,IPR006119,PTHR30461,IPR036162, mobidb-lite,IPR025827,PS51737,PF00239,SM00857, G3DSA:1.10.10.2600,SSF53041
VENKERIVERVQFPDAQKVKLLRTAAYARVSSGKDAMLHSLSAQVSYYNKMIQSNPEWLFCGVYADEALTGTKENRQNFQKLLSECRAGRIDLIITKSISRFARNTVTLLETVRELKELGVDVYFEEQNIHSISPDGEFMLTLLGSYAQEESYSVSENQKWRIRKDFEQGRLGSITMLGYKRDENGTLIIVPEEAEIVRMIFNDFLSGMGKNAIANKLLAMGIPTKGGGLWTAWSVRRILKNEKYCGDILLQKSYRENHITKRKMPNHGELPQYYVEEAHEPIISKETFIAVQNLLQEKKEYFTPDKPTTVTYPFTGMIHCGCCGKYYRRKVQKYRTLWICWTYNARGKKFCPKSKQIPEDILYDKVCEVLQLDEFDNEVFQSEIESILVPRPNVLTFLFKDGHEQTVHWQDHSRSEAWTAEKRSQAAECGKKGAAAKERRRKK

SEQ ID NO: 10096 - protein, 525 aa, Unknown
  Description of Unknown: Integrase B10097 sequence
  cd00338,PF13408,IPR011109,IPR038109,PF07508, Coil,PS51736,IPR036162,IPR006119,PTHR30461, G3DSA:3.40.50.1390,PTHR30461:SF3,IPR025827,PS51737,PF00239, SM00857,G3DSA:1.10.10.2600,SSF53041
MKKTNKKTRAVIYIRYSSHKQADSFSIEYQVSECTKFIEMQGYTLEGTYIDEAKTGKKTAGRDAFDSMIFDASQGKFDKIVVFSFSRSFRNTRDALNYNHDLMEKHGIMIESVIERIDMSDPHGKFSGTNLFAMHELQADIIAAHVKSGMYFAAQQGYYLGGFVPFGYELFGTGEFSRGKERKKYRPNDSEAAIVREMFDLYADGFSLDFVQTMLRTKGIRGRRGDIIGKQTVARILKNPFYIGTREYSIKGYEPIVVENIIPKIIDLETWHKVQARHAENKPAQPRRTKRLYSLTGKITCAKCGGHMFGTYKGDKRSTNWHYAYYHCANKKIKGTCDALNVRKDQIDAYCLEQIKKHILNEEAMRSIAEQIAAAAGDSSEEMMAAQNKAIKRRDKVAGILKNIKKDVYEGEITKEQGDELSADYSKELLELENTLSTLRAALASAISSESVYLYLQELLSYYGADNDELTKMLFDKLIDKILVHDDRIEVHLIVFPFARSGDNKPLGQPHYSLSLDTTRKDLKA

SEQ ID NO: 10097 - protein, 525 aa, Unknown
  Description of Unknown: Integrase B10098 sequence
  cd00338,PF13408,IPR011109,IPR038109,PF07508, Coil,PS51736,IPR036162,IPR006119,G3DSA:3.40.50.1390, PTHR30461,PTHR30461:SF3,IPR025827,PS51737,PF00239, SM00857,G3DSA:1.10.10.2600,SSF53041
MNIAAYCRVSTDKTDQLNSLEAQKAFFAEYTQRTGDTLVRLYADEGISGTKIKNRKEFLRMMADAEHGLFEMVVVKDISRFARNTVDLLQSIRKLKSLGVETQFLTANMTSMGNSEFVLTIFGALAQEESANTSKRVKFGKKMNAEKGRVPNIVYGYDKTIGDYFNLTINQEEADVVRQIFYWYTREGYGSAKISILLNQRGLKTKRNCSWNQNGVRRILNNELYIGKIINGKEEVIDFLTGKRTERNEEDWLIVDRPELQIVDSQTFEQAQQIMASRTELFKLSHERQSNKHLFSTLIRCKECGWSFRRTVRTYKNTYVRWVCSHHNGRGESECSNRITIDEEELVTVLQEYFANLLRFKKDVILYVIKEFQRVYRAKDENVEYEKELNAQIAKLQKSRQKYMNMYADDLITREEVNEKIGGMRKEIERLENELKMVAFHLTKAEHLEAVLRQTFKEIEDIADVRQMTNAQLKRIIQKIEIDKDGNVDIYLRLFSDLGLEETVLVNDICTQGCNKIERFIWAIK

SEQ ID NO: 10098 - protein, 416 aa, Unknown
  Description of Unknown: Integrase B10099 sequence
  cd00338,PF13408,IPR011109,IPR038109,PF07508, PS51736,G3DSA:3.40.50.1390,IPR006119,IPR036162,PTHR30461, PTHR30461:SF3,PS51737,IPR025827,PF00239,SM00857, G3DSA:1.10.10.2600,SSF53041
VAKIKQITRLPVSRPKLVKVAAYARVSTSTCRQLSSISAQVSYYSRLIQSTPGWDYAGVFIDEGTTGTKMRGRQGLADLMALAHDGGVDIVLCKSISRLARNTVDLLQIVRKLKNLNVSIRFERENIDTSTNDGELLLTLLASFAQEESASLSANVKWAIRNRYKDGGTNSFFIYGYVWTQGKFVINHDEAQIVQRLFSNYLEGISPEKTANQLNSEGLRSRGGGLFHGSVLRRMLENERYKGCQLLQKTFNKTIRSTSRTPNDGVLTKYWVEQALPVIIEPALFDKVQQEIARRRQIGPAATPSLNTGVFTGRIRCGTCGRNYQRKTRRYASGNYYHYWRCWSACKGQGNPCGGHNLRETMLQSICATTLNLEEFDEHAVENHIVIIEAFPDHLMIHLRDARSIKIALDKQGRLT

SEQ ID NO: 10099 - protein, 525 aa, Unknown
  Description of Unknown: Integrase B10100 sequence
  IPR038109,IPR006119,PS51737,PF00239,G3DSA:3.40.50.1390, PTHR30461,IPR025827,SM00857,G3DSA:1.10.10.2600,SSF53041, IPR011109,PF07508,PS51736,mobidb-lite,cd00338, PF13408,Coil,IPR036162,PTHR30461:SF3
MQQALNAVIYARYSSHSQQEQSIEGQLRDCYAFAEREGLHVVGEYIDRAITGRTDERPDFQRMIDDASKKQFQRVIVWKLDRFARNRYDSAHYKAKLKKYGVKVISATENISDEPEGIILEGLLESMAEYYSANLSKHVRRGQRESIINGTYLGGVPPIGYKVENKRLVIDERTAPTIRYMFEQYAKGVSKRQIIDELNARGIRNKKGKPLTLSSMQAALRNEKYIGIYRYNGQEVTGGCDALIDEATFRKVQERLDKVKHAPAAAKAKIDYLLQGKAFCGYCGTRMVGESGRGKMGSTYHYYACGKRKKEHTCKKKNEKKDFIEWYIVEQTVEYVLTPDRMDYIAAALVAQYEKDFGDNRITDYEKQLERINGEIRSLVDTLAVCPPSARQPIFDKMELLDVQKTDLEIDIAKLRVAARVRPSEEQIKAWLKQFCKGDLDDMEFRERIIDVFISSVYLYDDKVIIYYNIEGGKQVSYMEMIESTEEPPFADDPQGSSGVRISNDTPRQKSTSFDRSLSILLFHS

SEQ ID NO: 10100 - protein, 525 aa, Unknown
  Description of Unknown: Integrase B10101 sequence
  cd00338,PF13408,IPR011109,IPR038109,PF07508, PS51736,G3DSA:3.40.50.1390,IPR006119,IPR036162,PTHR30461, PTHR30461:SF3,PS51737,IPR025827,PF00239,SM00857, G3DSA:1.10.10.2600,SSF53041
LRAVIYARYSAGPRQTDQSIEGQLRVCTDFCKLKGLTIVGEYCDRHISGRTDERPEFQRLIADAKKKNFEAVVVYKTDRFARNKYDSAIYKRELKRNDIQIFYAAESIPEGPEGIILESLMEGLAEYYSAELAQKIKRGMTESALKCQSIGSGRPLGYYVDDQKRFQIDPESSQTVQIIFDMYIKGESNAAICELLNSRGLRTVQGNPFNKNSINRIIKNRKYIGEYKYQDIFVKDGMPRIISDEVFTLAQREMEKRRTRKKPKSPKAEYLLAGRLFCGHCKEAMQGVSGTGKSGRKWYYYYCANARGKRGCDKKQVTKDGLERSVVDLTVNYILQEDVLRGLAQKVYAAQERQNDTAAEIALYEKQLADNKKSIANILKAIESGTSTKTLPERLQELEEQQTVLLGEIAYLKSKKLDFDEDQILFMLMQYLEPFENETEQEYHKRIITCFVAEVYVYDDTLRIFFNISNPDGKLQSTDLEKIEGQEFDERIISSTNLIAGRTPKVELIILPYGFVLASHLTSPL

SEQ ID NO: 10101 - protein, 525 aa, Unknown
  Description of Unknown: Integrase B10102 sequence
  cd00338,PF13408,IPR011109,IPR038109,PF07508, Coil,PS51736,G3DSA:3.40.50.1390,IPR006119,PTHR30461, IPR036162,PTHR30461:SF3,IPR025827,PS51737,PF00239, SM00857,G3DSA:1.10.10.2600,SSF53041
MARKITMIPQTINPQTRTAMDTRTKRKVAGYARVSTDYEEQITSYEAQVDHYTNYIQSRDDWEFVKVYTDAGISATNTRHREGFNQMVEDALAGKIDLIITKSVSRFARNTVDSLTTVRKLKEKGIEVHFEKEGIYTLDSKGELLITIMSSLAQEESRSISENVTWGQRKRFADGKVSLPYSHFLGYKKGEDGLPEIVPEEAEIVRFIYRSYMNGQTSYAIAKTLTERHIPTPAGKENWRQSTIESILTNEKYKGSALLQKKFTTDFLTKKTKINEGEVPQYYIEESHEPIISPEDFEEVQAEFTRRKKLGRKYSGSTMFSAKLVCGDCGHFFGSKVWHSTSKYRRVIWQCNNKFKGEHFCSTPHLYEDEIKIRFISAFAAFFQNREMVLETCRMLLEDLSDTSALDTKIEMLTMELNDIGTLIREHIQKNAESVQNQDSYNLRYDELTEQYERKKGLLQKMQQKRIEHQSRIESMASFLRTLEKTNEPIDYFDDSIWRTTIEKVTVFHDGRMVFQFVDGTEIEA

SEQ ID NO: 10102 - protein, 525 aa, Unknown
  Description of Unknown: Integrase B10103 sequence
  cd00338,IPR011109,IPR038109,PF07508,Coil, IPR036162,IPR006119,PTHR30461,G3DSA:3.40.50.1390,PTHR30461:SF3, PS51737,PF00239,SM00857,G3DSA:1.10.10.2600,SSF53041
MFTYHGVTISANEILKYSRKSRTDDPLLTIEEVLEKHERILNEWCERNLGETVPACNSFQEIVSGETIEARPDFQKILRLIESPKYKAILVVDTQRLSRGDLEDAGRLIKLLRYTNTFVITPDMAFDLSEEYDRERFKRELERGNDYLEYYKKINWRGRLESVRSGYYIGSIAPYGYDKDTIPDGRKKRPTLKINEREAEAVRLIFDLYVNQDMGMTNIAHQLNGLGYKTRKGELWKTVTIRDILLNVHYIGKIKWNWRKAVNVVADGEISKTRPKSKDYYIFDGKHPAIIDEELFERAQAKLGKNPRTNTSHKLRNPLAGLVYCQCGKAMAYRQYKDTDGNDRCAPRLLCNNQMYCHTQSVTYDEILDKVKDVLRACISDYKLKIKNEGTNTLINKNNQIKRLESKLEELNKKELSQWEKYSEEAMPKAIFEKLNAKVLAEKESTLKALEMARSTAPTVEDFKERLMLFTDALEALQNPEAPAELKNRLLKNCIKKIVYTRPKGGNRWKSEGFELDITLNVQPI

SEQ ID NO: 10103 - protein, 525 aa, Unknown
  Description of Unknown: Integrase B10104 sequence
  cd00338,IPR011109,IPR038109,PF07508, Coil,PS51736,IPR036162,PTHR30461, G3DSA:3.40.50.1390,IPR006119,PTHR30461:SF3,PS51737, PF00239,SM00857,G3DSA:1.10.10.2600,SSF53041
MISEQTKSEISGKYVGSPDQYAMYLRKSRADLEMEALGEGETLTRHKNMLEALAAKHDISMNQITVYKELVSGDSLDERPEALRLLADVFAGKYKGVLVVEIERLARGNTKDQGEVADAFTFSNTHIITPAKVYDPNNEFDQEYFEFGLFMSRREYKTIKRRLEAGKLQSVKEGNYLLSVPPYGFDILKKSRKERTLVEKPEESKIVRMIFDWYTEDRKPTSWIANQLNIMKVPSRSGREWARATVKDILFNAHYIGKVSWGKQQTIKEKDPVTGKVVKRRKNSGNEQHYEGKHEGFISEEQFWKVRTIYGSNAPAKVNTALVNPLSGILRCCDCDRAIGFQRYGDNRIPRFQHPFGKACKKNSIFQPVVMDALIESLENDIADCQVKMEAKEDHSEVLHHEAVIQSLEAELEKLEKRKRKLLDSWESEDGMYTKDEFIERKQMYTKNIDDLKTKIAEAKKNAPAPVDYSEQITTLHAIINCIKNEDVDAKTKNVFLKRFIEKITYDTIDNGVNKKVPVLEVYMK

SEQ ID NO: 10104 - protein, 525 aa, Unknown
  Description of Unknown: Integrase B10105 sequence
  cd00338,PF13408,IPR011109,IPR038109,PF07508, Coil,PS51736,IPR036162,IPR006119,PTHR30461, G3DSA:3.40.50.1390,PTHR30461:SF3,IPR025827,PS51737,PF00239, SM00857,G3DSA:1.10.10.2600,SSF53041
MARKITMIPQTINPQTRTAMDTRTKRKVAGYARVSTDYEEQITSYEAQVDHYTNYIQSRDDWEFVKVYTDAGISATNTRHREGFNQMVEDALAGKIDLIITKSVSRFARNTVDSLTTVRKLKEKGIEVYFEKEGIYTLDSKGELLITIMSSLAQEESRSISENVTWGQRKRFADGKVSLPYSHFLGYKKGEDGLPEIVPEEAEIVRFIYRSYMNGQTSYAIAKTLTERHIPTPAGKENWRQSTIESILTNEKYKGSALLQKKFTTDFLTKKTKINEGEVPQYYIEESHEPIISPEDFEEVQAEFTRRKKLGRKYSGSTMFSAKLVCGDCGHFFGSKVWHSTSKYRRVIWQCNNKFKGEHFCSTPHLYEDEIKIRFISAFAAFFQNREMVLETCRMLLEDLSDTSALDTKIEMLTMELNDIGTLIREHIQKNAESVQNQDSYNLRYDELTEQYERKKGLLQKMQQKRIEHQSRIESMASFLRTLEKTNEPIDYFDDSIWRTTIEKVTVFHDGRMVFQFVDGTEIEA

SEQ ID NO: 10105 - protein, 525 aa, Unknown; identical to SEQ ID NO: 9619
  Description of Unknown: Integrase B10106 sequence
  cd00338,PF13408,IPR011109,IPR038109,PF07508, PS51736,G3DSA:3.40.50.1390,PTHR30461,IPR006119,IPR036162, PTHR30461:SF3,IPR025827,PS51737,PF00239,SM00857, G3DSA:1.10.10.2600,SSF53041

SEQ ID NO: 10106 - protein, 525 aa, Unknown
  Description of Unknown: Integrase B10107 sequence
  cd00338,PF13408,IPR011109,PF07508,Coil, PS51736,IPR036162,IPR006119,PTHR30461,G3DSA:3.40.50.1390, PTHR30461:SF3,IPR025827,PF00239,SM00857,SSF53041
MNFGIYTRKSYFTDTSDSVKMQLDTCRDYIERSFEEVTSVTPYEDDGFVRSDIDRPAMNQLREDVANGLIDCVVIYRIDRVCSDMMDFCTFYTFLKERGVKFVTVKDGIDTTTPIGEAMMYLAVIFSGLEIGNDAIRIRDNLNHLAARGFWCGGMAPFGYDILEVDVGSKKHKTLVKNEEQHARKMELIRILFERDLSLQQMETYCRQNGIKSWTGKFLSTTQLHQIFSSPFCCPATPEIYDYYAEKGCIMDEGSPRDMWDGSHGVMIYGRTTEKRVNRKKKHIQAPPDQWRVSIGYHEPTLDAETWLRIQGHFGRKKFDKKMKHETTLLKGVLRCKCGRLMSLARKKHVDGSVVTWYHCPKRERAGVEACDSKAIKAELLDEKVLEIFREIEHDPEAVRKYVQEEKKTADSGDQIRKKIHETEKKIGKLTAALATSEKSAAAKYIIAEIEELDAELVKLKRKEAEASLEKRRNAAMLKSAQEKREEVVRLLANFDDFTMDEKNEIARAVIREAVWDNETLFIVL

SEQ ID NO: 10107 - protein, 525 aa, Unknown
  Description of Unknown: Integrase B10108 sequence
  cd00338,PF13408,IPR011109,IPR038109, PF07508,Coil,PS51736,IPR036162, IPR006119,PTHR30461,G3DSA:3.40.50.1390,PTHR30461:SF3, PS51737,IPR025827,PF00239,SM00857,G3DSA:1.10.10.2600,SSF53041
MDKTPAVIYARFSSENQRQESIEGQIRECRIFAERNGFDVIAEYTDSALTGRTDQRPGFQKMVKDAEKRQFKMVIVWKLDRFARNRFDAATYRAKLKKYGVEIVSAKEFIPEGAEGIIVESLMEGMAEYYSANLAENVRRGLYESALQRKALSKMPYGFRRSADGKYEIDPETAPVVQRIFQEYIDGKTPRDIAADLNADGLLNSVGRRFQLNNIQLILRNEKYTGMYRYGDIEDPEGIPAIIPADLFQRAQDLRAARYRRRSPRVDNLYLLSGKTFCGLCGRLMTGEYAKSKTGDLHYYYYCRGAKMHECDAKRIKRDLLEDLIKEELTKILTSGEFQEEITAMILEHPDEEQEALRRNIEIQKKSLAEEARKHENMLKAIENGIFSAGLSKRLQTAEKRISGLQRELAEMQLQVLPPITREDIEFSFYELNRMRSESPLNWQKIIDILVSRIYVFPDHIVILLNHPGANNRITVDLETLKSSTEPQDGQPFDTLSNQALVWWFGCPALWVPLQGLHNCKIRAI

SEQ ID NO: 10108 - protein, 447 aa, Unknown
  Description of Unknown: Integrase B10109 sequence
  cd00338,PF13408,IPR011109,IPR038109,PF07508, PS51736,G3DSA:3.40.50.1390,IPR006119,PTHR30461,IPR036162, mobidb-lite,PTHR30461:SF3,IPR025827,PS51737,PF00239, SM00857,G3DSA:1.10.10.2600,SSF53041
MRKITKLETKKIDLPKLKRVAAYARVSVERGRTLHSYSAQVSYYNDLIQKNPEWEFAGVYADLGISGTGIEKRNDFKRLLQDCEEGKIDIILTKSVSRFARNTVDLLKVVRHLKKLGIEVRFEKENINSLTGDGELMLSILASFAQEETISISNNVKWGIRKKFEKGIPNGGFIIYGYRWKNKKLEVVPEEAEVVRYIYDNYLQNKAYQKVASELNELGYKAYKGGKFSPSSVREILSNITYTGNLLLQKYYIVDPIIKKEKKNTGELNQYYVENSHEAIISMEQFEAVQKEFERRNKLGQRANQSLHITCFTSKVKCPLCGKSYRRSGKKNRMGKDYTYYVWVCRTKSEKGAKYCGAKVIPEEELKIAACNALGWNEFDSDLFDETIEKVVPIGEDMIEFYPYDGGVIKQEWHSTARQRGWNEERKRTTTEKRLKTLEARKNAKEC

SEQ ID NO: 10109 - protein, 525 aa, Unknown
  Description of Unknown: Integrase B10110 sequence
  cd00338,PF13408,IPR011109,IPR038109,PF07508, Coil,PS51736,IPR036162,PTHR30461,IPR006119, G3DSA:3.40.50.1390,PTHR30461:SF3,IPR025827,PS51737,PF00239, SM00857,G3DSA:1.10.10.2600,SSF53041
MYEDIKRVCLYARFSSHNQTEQSIEGQVRVCKEFCQRKGFNVVETYVDRATSASHDIEKRTSFLKMISDSAKGKFQAVVVYKLDRFARSRYDAATYKYRLKKNGVVLISATENITNTPEGIILESVLEGMAEFYSAELSQKITRGLRESALKQNSAGGQIPLGFKVENKKYVIDEETAPIVREAFQRYADGEAVADICRDFNLRGYKSSKGAEFGKCSFTRMFKNEKYIGTYVYGKYKFENAIPAIIDMKTWRIVQARMNKQKKTHTRGKQKYHYLLTGKIFCGHCGYQMSGNSSGSVDYGFYQCYGKASYKSSCNKKNINKDIIEELVIKDALSLLTDERIQEIAKVACNTNKTYIQEETNLYKIKDKLHEVEVSLSNITKAIESGEAPVTLVKRMNELEAEKRTLLKEQKKESSDVVQLDEEQVIYWLSQFKNGDIHDEEFCRNVIDLFVNSVTVWDEPDETQKVVIAYNLQSENKKTYRLNPDGKSATDMNGNTSVLNPNPLIVNGVLLHSLSIGERNPSCA

SEQ ID NO: 10110 - protein, 525 aa, Unknown
  Description of Unknown: Integrase B10111 sequence
  IPR038109,PS00397,IPR006119,PS51737,PF00239,G3DSA:3.40.50.1390 ,PTHR30461,IPR025827,SM00857,G3DSA:1.10.10.2600, SSF53041,IPR011109,PF07508,PS51736,mobidb-lite, IPR006118,cd00338,PF13408,Coil,IPR036162,PTHR30461:SF3
VIPAAIYARVSTEDQAERYGLAGQLHELRAAAAARGYVIPSGMEFVDDGHSGATIDRPALHRLREVAKARAVDVILVHDPDRLSRRLAHQLVLLEDLERAGVRVEFLSVERTDGAEGRLLLNVRGAIAEYEREKIKDRTLRGKREKARRGLVVGGPVPFGYRLDAGSAGGLAIREDQAAIVRLLYAGLVDAGRSIRGLVLELRASGIPPARGAAWSKTSVRRLLTDPLYRGQAYFNRRARTGSSRRWRPEADWIVVAVPAIVTADLWARAAARLADNKTAAAGRPASRVYLLRGLLRCGSCGRALEGLPSHGRRFYRCAGRQRLAEPRCTAPLRAADRLEAALWAAVTGLLRQPQVLTAKVEAWQLAAGVRDVELRSEVVHLTAELGRLTRQEQRTLDLYVEADLEVPGLRERLERLRARRRAVQARLDQAQAASTRTQDAAAQQGAVQRACEAVLLGLEAAPPEVRQQILRALIDRITVSQDHVTVEGLLPSGPGGLESSRPSTRSAQFQPRPAFRLVVPMGAR

SEQ ID NO: 10111 - protein, 525 aa, Unknown
  Description of Unknown: Integrase B10112 sequence
  cd00338,G3DSA:3.40.50.1390,PTHR30461,IPR006119,IPR036162, PF00239,SM00857,SSF53041
VNASPFQPGDLVVGYCRYSGGEEQGLKNTSTDEQEQAIRAFCEQNGLVLVKVYADPFVSGRSTKGRDHYLEMMSDLLHEKRKKNDVKGCLVWDWERMHRNVDQAMLDASRLRMAGYKIYSLQQPIVDNGPFARVMEAMYMASAQNQSDMISADVRRALQSNFQKYKVIPRSCIPDGWIPVAVDMGFYSNGQPRTGYRAEPDPDLAPRIKNAIEKRMKGATIEEMTMIIGGIFANKPREYIRRLMLKPLLYGMMTYGGTTIEDYCTPIIDKDTFDRLQLYNEYAPKEHVKPQGHYSKNRPLLSNLLYCGVCGKKAFLDRRRAKGRLYETYYCNDKHVGFRREILDKFVIEKGIELLSDEQYRKDVRSITEGLKTPFPSRPDNLSLTAEIAKIDRKIARISSAIEDTDDAPATLVKRLSELEKERAELMSQAATADPDTTDSILAEADRLRLSIIDVLKNEKSGLEEIRTALSLFVSSVVIYPEHRVLIRYTLPGMAEVASTTTRKVSAPPRAVSVYSQLIESLFIL

SEQ ID NO: 10112 - protein, 525 aa, Unknown
  Description of Unknown: Integrase B10113 sequence
  cd00338,PF13408,Coil,IPR036162,IPR006119,G3DSA:3.40.50.1390, PTHR30461,IPR025827,PF00239,SM00857,SSF53041
MTPNNSPFKIGDKVVAYCRYSGGEEQGLKDTSTDEQEAAIRRYCDDHGLDLVKVYADPFVSGRSTKGRDHYLEMMSDLLHAKRKKTGIEGLIAWDFERVHRNYDQAQLDAARLRMAGYKIYSLQQPIIDNGPFAHVLEAMYFASAQNQSDMISADVKRALQHNFVTHKVIPRSCIPDGWIAVPVDMGVYSNGEPRIGYKAEPDPDMVEPIRQAVQARIAGAPIREVKHLLGEAFARHPEKVEKLFVKPLLYGSMTYGGTTIEDYCAPIIDRATFDRLQVANSAGKAKVRRPGSGAYSKDRAMLSGLCFCGVCGERAYINRRTAKGRVYESYYCNHKHAGFRKELLDQLILDAAEDLLTGEKYETSKAALMRSMVRDQAQKAQDAEAIRQQISVIDRKIDGLTEAIADNPHSRALALKLADLEAKRENLSASMESPAEAQFEAFGDVLDDLRDNTLSILKDEKSSTDDLRTALSLFVSAITLYPNGEVVITHTLPGLAKVESELSGLPTAPPEAEALYSQFHIHAW

SEQ ID NO: 10113 - protein, 525 aa, Unknown
  Description of Unknown: Integrase B10114 sequence
  PS00397,IPR038109,IPR006119,PS51737,PF00239,G3DSA:3.40.50.1390 ,PTHR30461,IPR025827,SM00857,G3DSA:1.10.10.2600, SSF53041,IPR011109,PF07508,PS51736,IPR006118, cd00338,PF13408,Coil,IPR036162,PTHR30461:SF3
MKRAVIYARVSTERQADDGLSIESQIEACQRKAGELGAVVVHVFKDEGISGTTRARPGFRNAIQRCEAGDVHYLLCWSSSRFARDQHDAITFKRELVASGTKLVYAQSTIDLDSMEGWMLDSFQQVVDESYSRQVSADTKRSMIKAAREGFFMGGRVPFGYQVVPAGDGKRRRLAPLEHEATVIRQIFRLALEGRGAYFIALQLNLQGLKMRGKNWSKNTVLHMLKSEVYVGNVIYNKFHRKGRGQRPPEAWVRVPSHEPLVSQADFDQVQSGLDDRTPFNGRSPGNVQHIFSGMLRCGLCQASLQMTNGTGRGGKLYHYYACRGSCQGKPCRFKNLPADSFDEWMLSELLDKVLNVDVIQGVLDRLDEAATRWVKDRAARRTAMVLELRNAEHKRDKLFELMESLGKDTPDLRGTLERVNQLTDQVQRLELGLVQLEDEPDPMVGTPRVTAQEAADIMRRTVTQNSDVRAVRAFVATILEWIDVEADQLVVHYKPDCLVQVDGQPVRSKHKWLPDLGSNQGPTD

SEQ ID NO: 10114 - protein, 525 aa, Unknown
  Description of Unknown: Integrase B10115 sequence
  cd00338,PF13408,IPR011109,IPR038109,PF07508, Coil,PS51736,IPR036162,IPR006119,PTHR30461, G3DSA:3.40.50.1390,PTHR30461:SF3,PS51737,IPR025827,PF00239, SM00857,G3DSA:1.10.10.2600,SSF53041
MPAVQVIPAKKTKIAVAGINITKRRVAGYARVSSDTEEQLNSYEAQVSYYTETINAKPDWELVKVYTDEGISAVNTKRREGFKAMINDALDGKIDLIVTKSVSRFARNTVDSLSTIRKLKEKGVECYFEKENIWTFDNKGELLITIMSSLAQEESRSISENVTWGKRKSMADGKISLPWSSFLGYEKGEDGLPKIVPEQAVIVQRIFKMYMSGLSFNVIAKQLTANGIPTPKGKKVWQMATVRSILQNETYRGSKRLQKTLTVDFLTKQKKINNGELPMFYIEKSHEPIIPPDEWDAVQVEIERRKVLGRPLSCHSPFATRIICGECGGYFGSKLWGSNTKYKRTVWQCNDKYKEKGMVKCTTPHISEDQIKDGFITAFNKLMSTRDNIIDDCCLAQKLLCDTDEIDKELVELEHELEIVDALAHQSIEENKRSVIDQAEWSERNVKYLQRYDNATNRIEELTKQKNEKIGKSKMLELFIKSIEQQELVITDFDESVWNMSIDKAIVGSYAELTFKFKNGVEITV

SEQ ID NO: 10115 - protein, 463 aa, Unknown
  Description of Unknown: Integrase B10116 sequence
  cd00338,PF13408,IPR011109,IPR038109,Coil, PS51736,G3DSA:3.40.50.1390,PTHR30461,IPR006119,IPR036162, PTHR30461:SF3,IPR025827,PS51737,PF00239,SM00857, G3DSA:1.10.10.2600,SSF53041
MYMTQSAPELYGVRVVKYIRCSHDDQVLHGDTLEAQNEILDDFIARNHCVLIDTFIDEALTARKKYTNRKEFVRLLDGVRRHDFDVILFTKLDRWFRNIGDYHKIQEVLEANGVQWKAVTESYDTTTTNGRLHINIRLSVAQDECDRDSDRIKDVFAFKLKNKSFVTGSVPRGLMLDAEKHVVPDPEWKQFALDAFDMLEVTGSVRKSLFALQERYSCIYSYSSFIRMLKNPLYKGMYRDDPQFCDPLIDPDRFDHIQTLIKKNVRQRRSGTQFIFSGLLTCDVCGRSIAGYTTGRRRKDGSITRKPRYRCTAWNMNHSCTNNKSWMEEVLEDRVLALVRPSLSAYIADYDVEDGGGRGRNPAADAARIRTKLKKLYDLFMDDLIDRDLYKSEYDQLNAQLQEALTAADHPRKDVSELKKFLSQPWEDVYKDFSVQEKNAFWKSFVDTMRIREDGSIADIIFL

SEQ ID NO: 10116 - protein, 525 aa, Unknown
  Description of Unknown: Integrase B10117 sequence
  cd00338,PF13408,IPR011109,IPR038109,PF07508, Coil,IPR036162,IPR006119,PTHR30461,G3DSA:3.40.50.1390, PTHR30461:SF3,PS51737,IPR025827,PF00239,SM00857, G3DSA:1.10.10.2600,SSF53041
MIKNKIPSCSPRTAVAYARYSSAGQRDVSIEQQLREIHAFADREGYTIVHDYADHARSGFKNTSARTAFQSMMAAAENGTFDTVISWKVDRFGRNREESALYKGRLRRFGVKVVYAMEPIPEGSAGVLLEGMLEATAEWYSRQLSENVTRGMTDNAHRCLYNGTRILGYSRGPDGHYVLNPEEAAVVRNIFQLYRSGLSAASICRQLNAQGLKTSRGKSFSPESLLRILSNERYTGTYIWGSIRVPDGMPAIVDQKTFQEAQRMKTKTARHVEQGAVDFLLTGKAFCGHCRSAMIGDSGTSKAGNRFYYYSCQAHKARKGCQKKSIGKDRLEDAVIDFVLDYVLSDAMIEKNADAIMALQAEELKSSPLAAMEAEQAEVKKQIDNINNAIAAGVWSTSTVEKLKALEATAENLRVSIETLRFSQTQLMDRDRVIFFLHQFTKGDRNDPLRRQHLIQTFVNSVYVYDDHLWIVVNNTEGNFRYNLPDILPEESPGDSSPGCSDSVSSGVPNVLHPNTRVTAFRLAI

SEQ ID NO: 10117 - protein, 525 aa, Unknown
  Description of Unknown: Integrase B10118 sequence
  cd00338,PF13408,IPR011109,IPR038109,PF07508, PS51736,G3DSA:3.40.50.1390,IPR006119,IPR036162,PTHR30461, PTHR30461:SF3,PS51737,IPR025827,PF00239,SM00857, G3DSA:1.10.10.2600,SSF53041
MTPAIYARYSSDNQRETSIEDQLRAGAARCEREGWPAPRCYTDAATSAGTPTLLRDGGARLMADIRAGLIDILIIEALDRCWRDIVDQERTVREIERHGVRIIGMQDGYDGQREGREVHRGIMGVLNEEQLRIIGKKTHRGLAGQVARGLRAGGLPYGYLSAAADGGHRLAPHPEHAPVVLEIYQRFAAGESPRAIAHALNFRRVPSPRGSTWALSAITGHAGQQSGILRNPIYRGDYVWNKSRWVKNPDTGIRARIERPESEWQRQTLPELKIIDDDLAAAVRARLRGPRARGKGRPARSPWSGLLRCGHCGGPLIVADARCYGCGRHKDRGATVCPGLRIPRPLLESRLLDIAREHLTSPAAVATLRAEIARLTREHNATHGQRATHAHRRLADLEKQIPRLVDAIASAGWSPALIERLNQAETERAALIAEKTTAPDAPTAEIVPRLMERYQAALDRLPDMIARTPDTARDALRELLGEITVIKDQAGDVWAELPEYGGGMLLNVVAGARFVIKKRRRYRVA

SEQ ID NO: 10118 - protein, 525 aa, Unknown
  Description of Unknown: Integrase B10119 sequence
  IPR038109,IPR006119,PS51737,PF00239,G3DSA:3.40.50.1390, PTHR30461,IPR025827,SM00857,G3DSA:1.10.10.2600,SSF53041, cd17753,IPR011109,PF07508,PS51736,cd00338, PF13408,Coil,IPR036162,PTHR30461:SF3
MARKRESSTRAVIYARYSSHAQNDQSIDGQLHDAYAFAERNGYTVIGEYIDRALTGTKDTRPDFQRMIRDAEKGQFQLVIVWKLDRFARNRYDSAIYKAKLKKSGVRVVSVMENLTDGPEGIILEGILESMAEYYSANLAENVRRGMSELVRRGLFPGGPVPLGYRVENHRLVIDERTAPIVREMFRRYADGEGPAEIARDLNRRGYKTQTGQAFTPSSFKLISNPAYVGRYTYAGEVVEGAADAMIDEETFRRANERRTMNRRAPAQHKAADRYLLSGKAFCGHCGKPMIGESGRGKLGTVYHYYACAQKKKTGACRKHNEKKDFVERFVCEQTVRYILDPERQQLIAERVVDAYNREFNDGQVEALERRLRRIDADLNKLVDNLLDLPKSAREKVISRMEQLDAEKAEAEADLAKARITAGIRITAAQVTAWIRSFADGDLEEPDFRQKLIDTFVNSVYLYDDKLVIFYNLRGEAPSTIPTKQDVDSAVEGSDFEGDGVPPIPKSEPRLIWVHRMMGIVILRG

SEQ ID NO: 10119 - protein, 525 aa, Unknown
  Description of Unknown: Integrase B10120 sequence
  cd00338,PF13408,IPR011109,IPR038109,PF07508, Coil,PS51736,IPR036162,IPR006119,G3DSA:3.40.50.1390, PTHR30461,PS51737,IPR025827,PF00239,SM00857, G3DSA:1.10.10.2600,SSF53041
MAGRIRAAVYARYSSHSQTEQSIEGQVHAAEELCRRKGYELVEQYCDRAKTGRNDNREAFQRMLKESAKRRWQVLIVWKVDRIGRNREEIAINKYRLKKNGVTVEYAAENLPDTPEGVILESVLEGMAEYYSLQLSQNIRRGIKESAVKGKRNGGTMALGYKRGEDGKPVIDERTAPAVRYAYEHYAAGETEAEIIRALNEKGYRTSRGQEFQRTSLRTVLKNPAYKGLFTALGGEVVIEGGCPPIVSEELWDRVQAVRASGAARRGSERAGRHEFILTGKLFCGHCGRPMTGITGTSHTGARHTYYICHGRKTHSGCRKRSEPCQYVEELVIRETLELLKDEAVVDEIVQAVYAYYEQTDTETDDLEGLRAGIRDAQRRRANLIRSLEQGAPYDVLASRMKEIEDEEASLRSELDRLEALASERLTEDHIRFFIERFRDMDHSDRKVQRLLVHTFINAVYLYDDGPVKIVYNFSEHTEVVPLSEVDGLGDPTVRLEASVLHFGAHRRTIMYRGCAYVILFIPRH

SEQ ID NO: 10120 - protein, 525 aa, Unknown
  Description of Unknown: Integrase B10121 sequence
  cd00338,PF13408,IPR011109,IPR038109,PF07508, Coil,PS51736,G3DSA:3.40.50.1390,PTHR30461,IPR006119, IPR036162,IPR025827,PS51737,PF00239,SM00857, G3DSA:1.10.10.2600,SSF53041
VATPEKQITIIPGVIKYTEGFESGYPGKRKVAAYARVSTGSEEQLTSYEAQKDYYEMKIKENPVWQYAGIYADEGISGTSTKGRVQFNKMVSDALSGKIDLIITKSVSRFARNTVDSLTTIRNLKEHGVEVFFEKENIYTLDAKGELLISLMSSLAQEESRSLSQNISWGKRKRFADGKVSLPYKHFLGYEKGENGHPKIVEEEAEIIRLIYKMFLAGNSAHTIAKHLTSEGIKTPAGCDVWQQTTVLSILRNEKYKGEAILQKTFTADYLTKKVKDNTGEVPKYYVQYSHPAIISPDVYDLVQLELERRKNSKGYITSKNALSGKLICGECGATYGSKLWHSNSKYKRTVWHCNQRHKKYCKTPPLNDWEIHAAFVDELNRLVENKDELTGRLESMLAGVLDSTQYNARLRRQKAQRDACLNELNSLIRRNATVALDLEAYEKEFTKLSDEFEETRATCERLSERIDNLERRRVQASAYLEKIRNLPGVIESFDENLWNGLLDRVIVNSKKDMRFIWKDGTGEE

SEQ ID NO: 10121 - protein, 431 aa, Unknown
  Description of Unknown: Integrase B10122 sequence
  cd00338,PF13408,IPR011109,IPR038109,PF07508, PS51736,G3DSA:3.40.50.1390,PTHR30461,IPR006119,IPR036162, IPR025827,PS51737,PF00239,SM00857,G3DSA:1.10.10.2600, SSF53041
MGRVITKTVPAAPSLAKRQRVAAYARVSSGKEAMLQSLAAQVSYYSALIQRRADWEYAGVYADEALTGTKDSRPGLQRMLAACRDGKVDMIITKSISRFARNTVTLLETVRELKLLGVDVYFEEQNIHSMSGDGELMLTILASYAQEESLSASENCKWRIRKQFENGELAGLRFMFGYRIVKGKVEIDTEQAAVVRMIFEDYIGGMGGGKIAKKLKDMNVATVHGATWDAERVIVILKNEKYAGNALLQKKYVADHLSKRKIWNKGALPQYFAEGTHPAIIDAATFDRAQAVMEERRRSCGTKGDTGSRYPFSGVILCVNCGKKYKRKSSGEKAAWQCASYLQEGKAACPAKQIPEAVLCSTGAEVLGLDEFEADIFKERIAEIRVTEFNTLLFEFCDGHAIEKVWQDRSRRESWTIEMRQAACEKAKGRQ

SEQ ID NO: 10122 - protein, 525 aa, Unknown; identical to SEQ ID NO: 9982
  Description of Unknown: Integrase B10123 sequence
  cd00338,PF13408,IPR011109,IPR038109,PF07508, Coil,PS51736,IPR036162,PTHR30461,IPR006119, G3DSA:3.40.50.1390,PTHR30461:SF3,PS51737,IPR025827,PF00239, SM00857,G3DSA:1.10.10.2600,SSF53041

SEQ ID NO: 10123 - protein, 524 aa, Unknown; identical to SEQ ID NO: 9625
  Description of Unknown: Integrase B10124 sequence
  IPR038109,IPR006119,PS51737,PF00239,G3DSA:3.40.50.1390, PTHR30461,IPR025827,SM00857,G3DSA:1.10.10.2600,SSF53041, IPR011109,PF07508,PS51736,mobidb-lite,cd00338, PF13408,Coil,IPR036162,PTHR30461:SF3

SEQ ID NO: 10124 - protein, 524 aa, Unknown
  Description of Unknown: Integrase B10125 sequence
  cd00338,PF13408,IPR011109,IPR038109,PS00397, PF07508,Coil,IPR036162,IPR006119,PTHR30461, G3DSA:3.40.50.1390,PTHR30461:SF3,IPR025827,PF00239,SM00857, G3DSA:1.10.10.2600,IPR006118,SSF53041
LPDEPEDKSPSTSELYHFWYVLTRGVFFIPKINTLDQGDDIMTTQSTVEIGAAYIRVSTNDQTELSPDAQLRVILESAKADGYVIPKEFVYIEKKGVSGRRADNRQEFQRMVATAKTQPCPFKRLYLWKFSRFARNQDESVFYKSVLRKKCGVEIKSVSEPIADGMFGRLIESIIEWFDEYYSFNLSGEVMRGMTEKALREGYQCSPSLGYAAVGEGKPFIIIEKEYVIVEFIHQSFHKGKDMTAIAREANDMGFRTKRGNRFDRRGIYRILVNEFYNGIVVWNGIKFQGAHETRPSITDIFESNQQRIKEEYRPKSRRETSSCQHWLSGILKCSVCGASLSYNRSNDQKKRPDFFQCWKYGKGVHRESCSVSVKKAEEAVLTSLRQVMADQSVQYEYIRKPDQKVISEESRLSEALEKVAMKEMRVKDAYESGIDSLEEYKANKLRLQDERTHILDELEQLKETPDEPEGPDMQEILKRITTVYDLLMDPDIDNVTKGNAVRRIIKKIVFDRQMNEFHFYYYA

SEQ ID NO: 10125 - protein, 524 aa, Unknown
  Description of Unknown: Integrase B10126 sequence
  cd00338,PF13408,IPR011109,IPR038109,PF07508, Coil,PS51736,G3DSA:3.40.50.1390,IPR036162,IPR006119, PTHR30461,PTHR30461:SF3,PS51737,IPR025827,PF00239, SM00857,G3DSA:1.10.10.2600,SSF53041
VRAFIYCRFSSHKQQELSIEGQRDICLEYAQKHNITVVGEYIDRARSARTENRADFRRLIRDATAGVVDCVLVWRYDRFFRDRAESALYRRQLEAAGVRLISVTEFIPDGSAGVITQGMIETVAEYFSAKLSEDVSRGMNKAAQHCQVTGSAPLGYRPGPDKRWQIDPVGAELVRRIFEWYDSGQPMEQLARQFNQEGHKTAKGVAFNRSSFSTILRNKKYIGIYEYNGTVSVAGGCPRIIEDDLFFQVQRRLEANRHRPGAYKAQASYYLSGKLFCGLCGSPMTGTAGTSRHGVRHHYYTCNNRRAKVCDKKNERLEPIEAAVLQAALDVLTDENIAYISKEVERRCAENSDSIALLSSLRAQLADVERQIKNIGAAIAQGIITETTKQLLMDAEADRAGLRQQIEKAKVQASLEVKAEAVACWLDGFRHGNRNDPDFRREVYGALVHSVFVYDDYLKIIFNVDRAGAVVVPFSAVEKAAVSESPRAVSGSYLERSGVPKKQIPKWVSAFLHMQRKGLEWFYP

SEQ ID NO: 10126 - protein, 524 aa, Unknown; identical to SEQ ID NO: 9776
  Description of Unknown: Integrase B10127 sequence
  cd00338,PF13408,IPR011109,IPR038109,PF07508, PS51736,IPR036162,IPR006119,G3DSA:3.40.50.1390,PTHR30461, PTHR30461:SF3,IPR025827,PS51737,PF00239,SM00857, G3DSA:1.10.10.2600,SSF53041

SEQ ID NO: 10127 - protein, 524 aa, Unknown
  Description of Unknown: Integrase B10128 sequence
  IPR038109,IPR006119,PS51737,PF00239,G3DSA:3.40.50.1390, PTHR30461,IPR025827,SM00857,G3DSA:1.10.10.2600,SSF53041, IPR011109,PF07508,PS51736,mobidb-lite,cd00338, PF13408,Coil,IPR036162,PTHR30461:SF3
MAKTVTTIPATISRFTSSPINENKKRRTAGYARVSTDSEEQNTSYEAQVDYYTNYIKSRDDWEFVEVYTDEGISGTNTKHREGFKRMLADALAGRIDLIVTKSVSRFARNTVDSLTTVRQLKEKGIEIYFEKENIWTLDSKGELLITIMSSLAQEESRSISENVTWGQRKRFADGKVTVPFNRFLGYDRGEDGNLIVNPEQAATVNLIYSLFLQGMTPFGIASKMTADGVLSPGGKERWNAGSVRSILTNEKYRGDALLQKSYTVDFLTKKKKVNEGEIPQYYVKNNHPAIITPDVFDMVQRELARRGQSRGRHSGIHLFSGRIKCAQCGNWYGSKVWHSTDKYRRTIWRCNHKFKNDEICTTPHLTDEEIQNFYLSALRKLLADKDEIIAAFELAQDAAFDLSALTAERDELQNELLVVSELMHQCINENAHIALDQADYQKRYNGLTDRFDKAKTRLEAVTGEISDKQARQATIEAFLDELKRLDGVTEFQHALWYSLADFMTVYSKDDVWVTFKDGTVIQA

SEQ ID NO: 10128 - protein, 524 aa, Unknown
  Description of Unknown: Integrase B10129 sequence
  cd00338,IPR011109,IPR038109,PF07508,Coil, PS51736,G3DSA:3.40.50.1390,IPR006119,IPR036162,PTHR30461, PS51737,PF00239,SM00857,G3DSA:1.10.10.2600,SSF53041
MQAIAYIRISTKDQSNFSIEGQQRYITDHCAKNNMHLQQTFIDDGRSAKNFDRPNWKALEQFIQHHKQVNYLVVVKYDRFSRNTAKGLQKIEELERRYNIVIISIFEQVFIDYDSPYFFKQRADMLVQAEFELHVIRDRTKFGIHQALSNGRFIGKAPVGYTNARDEKNKPIIIINPATAPIIHQIFIDYLAGHPFGFIRQKAIAAGLKSKDRSFIPAALTNPLYAGMVHVPAYRKEPAKTIDAQHPAIISKHQWYEVQRRLQTRKNPKVQMADEVPLRANVAHTCGRMLTAGKSKGQRQYYWYYKCNTCPRTNYSAITMHKKFDEMLRGLSFNQQHIQYLISEAETQLSQRQQQSTNAIVALRKELQQTMQDMEAMEEKYIRNQIKADTYEKFHHRYSSQIAALNYRVKQHGADAGQQWRAFRSGLHHLENLQWLWQNATLMQKHEFLRLVFNSSLYYNGEVYRTPYIMEIFHHNLLTLKQKNLLHIDEAGLSLVKSMECAPTSTPIEKTELLLSLFNNIKTA

SEQ ID NO: 10129 - protein, 524 aa, Unknown
  Description of Unknown: Integrase B10130 sequence
  cd00338,PF13408,IPR011109,IPR038109, PF07508,Coil,PS51736,IPR036162, IPR006119,PTHR30461,G3DSA:3.40.50.1390,IPR025827, PS51737,PF00239,SM00857,G3DSA:1.10.10.2600,SSF53041
MNESVCIYLRKSRADREAEAHGEGETLARHERILLDLAKKKEYIVGAIYREVVSGETIADRPVMQQLLHEVESGMWDGVLVVEVERLARGDTIDQGVVSRAFQYSDTKIITPTKIYDPNNEFDEEYFEFGLFMSRREYKTIKRRLNAGRISSVKEGKYCGNKPPYGYERVKLEKEKGYTLRPVPTQAEIVKMIYTWYSGDGCEQIGVAKIARKLNEMGIESALGGDWTPASIQGILTNPVYIGKIRWNGRKTVKTIQNGQVIKTRPRSKDTLICEGLHPAIISEDLFNSVQEIRKKNPPRPVSIANSIRNPLAGIVYCSKCGRAMVRRPYQKRGQEDTLMCPYTSCPTVSSKLSLVEKAVIDGIKEIVEEYKLNNDINASSKDIDCVITSKQNLIHEKENELESLNAQKAKQYDLLEQGIYTTEVFLERAKTISASIQSCSDTIEKLKEEIKHDQNIIKQQSDFIPRCEELLDNYWSLDTESKNKMLKSLIEKVAYSKDTKNAYGKGNEIGFQLDIFPKIQKNN

SEQ ID NO: 10130 - protein, 524 aa, Unknown
  Description of Unknown: Integrase B10131 sequence
  cd00338,PF13408,IPR011109,IPR038109,PF07508, Coil,PS51736,G3DSA:3.40.50.1390,PTHR30461,IPR036162, IPR006119,PTHR30461:SF3,PS51737,IPR025827,PF00239, SM00857,G3DSA:1.10.10.2600,SSF53041
MKAVIYARYSSHGQTEQSIEGQLRDNYAWAKQQGITVIAEYIDRALTGTKDQRPDFQRMIEDAAKRQFEMVIVWKLDRFARNRYDSAIYKAKLKKYGVKVVSVKENITDSPEGIILEGLLESMAEYYSANLSQNIRRGQRESMAKGTYCGGPVPYGYKVANKKLVIDDKAAEVIRYVFDQYAQGVPKKEIIDELNRRGVRGKTGKPLSITAFQRALPNPAYVGRFTYKGEVIPGLSERIIDDDTFQKVQERLKLTARAPAANKAKVEYLLQGKAYCGHCGAPMIGESGRSRNGETYNYYACADKKKKHTCKKKNERKDFIEWYIVEQTMQYILTPARAARVAKAVVQEYKKEFSDSRVDDLDKALKQIDRELDKLVDALVDSPKVAHKKIYARMETLEAQKAEMETDLARLRIAQEIQLTETEVRAWLKKFCTGDPLDEEFRKRIIDVFINAVYLYDDKLITFYNIRGGKQVSYIDLINSADLPAPECSDLKAYAPPNASKSEPQYVFVNGVFGCIFHRKKDED

SEQ ID NO: 10131 - protein, 524 aa, Unknown
  Description of Unknown: Integrase B10132 sequence
  cd00338,PF13408,IPR011109,IPR038109,PF07508, Coil,PS51736,IPR036162,PTHR30461,IPR006119, G3DSA:3.40.50.1390,PTHR30461:SF3,IPR025827,PS51737,PF00239, SM00857,G3DSA:1.10.10.2600,SSF53041
MNGVIYARYSSERQTEQSIEGQIRECTQYAEANNITVIGTYIDRAISGRTDDRPDFQRMLRDSKKGAFECVIVWKVDRFGRNREDIAKNKAILRRAGVQVLYAREHIPEGAEGIILEGLLESLAEYYSAELREKIERGMRESAYKCQFNGSAPPFGYRVDADKHFVADPEEAAIVRGIFEAYASGRSMADIRRDLIERGVKTPKGNAFSYTVLTRMLRNRRYLGEYRWREIVVPDGMPRIIDDVLFERVQRELAKNKAAPARARGESAVRFLLTGKVFCGHCLGTMTGDSGTSCAGRTYYYYSCYNHKIRRTCRKKSVKKEWLEREVVRLTAERVLTDEMIGRISARLAELQREEYEQASALGYLESRLRECSAAISNILRAIEAGIFTETTGARLRELEGQRAQLQADIARESIRPVPMMQAEIAYCLERFRGGDVEDPDYAAQIIETFVDKVLVYDDKIVITYNFSGDGRTLEAAVIDRAASEAECSDKVTGGSPRRDNSNKTVFFLPQVFGIVALIKPPRG

SEQ ID NO: 10132 - protein, 524 aa, Unknown
  Description of Unknown: Integrase B10133 sequence
  cd00338,IPR011109,IPR038109,PF07508,Coil, PS51736,IPR036162,IPR006119,PTHR30461,G3DSA:3.40.50.1390, PS51737,PF00239,SM00857,G3DSA:1.10.10.2600,SSF53041
MLKYNSETNLDSDIDSDIDKYAIYLRKSRADLEAEKIGDGETLARHKKILTDLAARKGLYVSKIYEEIISGETIEARPEIQKLIQDCYDGKYRGILVVEVTRLSRGNQGDAQTIMDCLKYSNYNKGLLVVTPTKTYDIVHSQEDEEYMEFELFMSRREYKMIKKRLERGRMQAIVEGNYMASHRPYGYNIVKTKTGRTLIPNKDEAPIVKLIFDLAADNVPLLTIARHLKDMGVPTYNGDYYWSRVSVKRILENPVYIGKVRWNNRTTIKTMVDGKIETRLTTLNKNHYMEYDGKHKKYALTDEETFAKVNSRLTETRTKYDYKLVNPLAGLLRCKKCGRVMNLRTYDSRKYNVSPRYNHDGSPYCKLSSVMYTDVIDTLIRSLELYIEDFKIEINNDFQHDNTNIQMQIQTLKREETKLKQKITKLFDSWENGILNDNEFIERKVINNESLENIQRQIRDLEKSIPEKIDYKEKIILLSNAVESLRDDTVSAKIKNDYLKEIISTIEYSRERPGEFILDIELL

SEQ ID NO: 10133 - protein, 524 aa, Unknown
  Description of Unknown: Integrase B10134 sequence
  PF13408,IPR011109,PF07508,Coil, PS51736,IPR036162,PTHR30461,IPR006119, G3DSA:3.40.50.1390,PTHR30461:SF3,PS51737,IPR025827, PF00239,SM00857,cd03768,SSF53041
MRFFNYGRKSIYSDSSDSIDNQFRMCREHCELRYSGQVDSWERFSDEDFTGANTDRPGLQQMLDEIRAGCCDVLVVYQLDRLSRDVRDFANIYSLLQDCHVEFVSLKENIDTTTPIGRAMMYVTVVFAQMERETIAQRVNDNMIGLAKKGYWTGGNPPYGYIRQRIEIAGRKHVTLIPDPEGVKYTLKIFDDFLENNYSLQSMETAYRRAGVKTARGAFFSTTQLHKILTTPLYAENTQEIYDFLEGRGYKMDPDSPREKWDGRHGIIVYGRTTQKNKKHQIAPVGDRLVCIGYHEPFVPADKWLAAQARLHRNVFQKTNKYDIPLLKGVLRCKKCGVLMQVARKKLVNSVSSHYYCLTRMRRGIEVCDGRMLKCEVLDERALAVFQEIEANPTAIKNYVAETERPREVPGVSEIKRKIGLQESRIGRLTASLAEAGESSAMKYILAEIERQDLSLQALKRQLDMARASDREEKRRERSAEQRAAVIARLIRGFAEFTASEKNEIVRAVVRECTWDGETLFLRL

SEQ ID NO: 10134 - protein, 439 aa, Unknown
  Description of Unknown: Integrase B10135 sequence
  cd00338,PF13408,IPR011109,IPR038109,PF07508, PS51736,IPR036162,IPR006119,PTHR30461,G3DSA:3.40.50.1390, mobidb-lite,PTHR30461:SF3,PS51737,IPR025827,PF00239, SM00857,G3DSA:1.10.10.2600,SSF53041
VENRERIVERVQFPNAPKIKLLRTAAYARVSSGKDAMLHSLSAQVSYYNNMIQSNPEWLFCGVYADEALTGTKDTRENFQKLISECRAGNIDLIITKSISRFARNTVTLLETVRELKELGVDVYFEEQNIHSISPDGELMITILASYAQEESYSASENQKWRIRKDFEFGKVSTVIMLGYKRNPEGILEIIPDEAETVRMIFADFLNGIGRQSIANKLNELNILTKNGCQWTSEAIRRILNNEKYCGDLMLQKFYSENHITKRKMVNNGVVRMIQVEDAHPAIIDKETFLRVQEIMQEHQRFAAKIPTTSIYPFSGMIKCGCCGKSYRRKTTVTGIVWICNTYNKKGKRFCPTAKQIPEEKLIAACCEVLNTDSFDEEVFHSKVEQIIIPKPNNIRFLFSDGLERTVTWQDRSRSESWTPEMRARTGQQTRERSKKCRK

SEQ ID NO: 10135 - protein, 524 aa, Unknown
  Description of Unknown: Integrase B10136 sequence
  cd00338,PF13408,IPR011109,IPR038109,PF07508, Coil,PS51736,IPR036162,IPR006119,G3DSA:3.40.50.1390, PTHR30461,PTHR30461:SF3,IPR025827,PS51737,PF00239, SM00857,G3DSA:1.10.10.2600,SSF53041
AGQREESIEGQVRECRAYAKRLGMKVGEVYADRALSGTSDARPAFQKMIKDAEAGAFDVIVCWKHDRFARSRYDAAVYKNRLKHAGVRLEYVMEPMVEGAQGVLIDSVLEGFAEYYSANLSENVKRGLYESALKRWTLGQICFGLREAPDKTWEIDPETGPVVKEIFERYAGGEQSATIARDLNERGFRTRSGRPFVVSSIYNIIKNPKYKGLYVYEDIEDPEGIPAIVSPELWEKANMNKDERKRAPNSRRLPGQNFILSGKLFCGECGAPMTAGGGRSKSGAYYDYYVCNNRRRGGSCRKEYAKKQWIEDLVVSLLVDSVLSDEMLEWIVDQFMQHQAAEMETSDVPRLKAELADVEKRRSTLLRNMQAVELDVRTMSDLSASLSELGDRAAQLEDAIAREEEMVKPFDRATVDAWLRMFRDGDVNDPTWRSSLVRVFLRAVWLFDDRVVLDLNYTGEEEGCVTFEIARDAAGRLDEAGGVDVLKLPPLVCQTSSIPKARAFTFLSGRALMVAKVSRSRLSY

SEQ ID NO: 10136 - protein, 524 aa, Unknown
  Description of Unknown: Integrase B10137 sequence
  cd00338,PF13408,IPR011109,IPR038109,PF07508, PS51736,IPR036162,PTHR30461,IPR006119,G3DSA:3.40.50.1390, IPR025827,PS51737,PF00239,SM00857,G3DSA:1.10.10.2600, SSF53041
MNRLDPSGLYAVYLRKSRKDVEMEALGHGETLSRHEQALGDLAARLGIRVAQTYREIVSGDTIAERPEVRRLLEDVNAGMWDGVLVMDVDRLGRGDSIDQGVIMQSFLYSSTLIITPDKIYDPSEDSDSEFFEIKLFFARREYNMIKKRMQRGRLASAMDGCYMGSRPVYGYERVKLQGRKGWSLKVVPEKAEIVRAVYDWYAHGMDGRDVGAAVIADRLNQMGLRTDLGKRFEPSYIRLMLQNPVYVGKVQWNQRQTVYHIEDGKRVKSRPRSDNMILVDGHHEAIIDEKLWKEVQAMFATHEKRPKNVNAVTVNPLAGLVVCSCCGHHMQRKPAPNRQGDFIYCPTQRCPTCSTYIPAVENAILDGLRAWVSRYEASPDAPAPAPSADASASAAARAQLTDQLATLEAQAGKLFDLLEQGVYDVQTFRARRADLDARIAATKDALGKLDAPAPVDPIAAILPQVRTVLGAYDLSSAPADRNALLRTVIDHVQYKKAQRGYRNSAPGDNLEIQLFPRIPTDDD

SEQ ID NO: 10137 - protein, 524 aa, Unknown
  Description of Unknown: Integrase B10138 sequence
  cd00338,PF13408,IPR011109,IPR038109,PF07508, Coil,PS51736,G3DSA:3.40.50.1390,PTHR30461,IPR036162, IPR006119,PTHR30461:SF3,IPR025827,PS51737,PF00239, SM00857,G3DSA:1.10.10.2600,SSF53041
LDNLNLANVVIYARYSSAGQNDQSIDGQLSKCREYAQQRGYRVVGEYCDRALSGRYAETRPEFQRLIADSAKRAFDFVLVWKLDRFSRDRYDSAIYKKKLRANGVRVLSVTEGVGDSSESVLLEAILEAMAEEYSRQLAQNVRRGMRQNAEKGLSLGGLAPLGYRVMNKQYEINEDEARIVRFIHEQYADGAGQKQIVADCARLGYRNQRGNPLTLAAVKRILANDRYIGRYDYLGDIVIEDAFPAIVSKELKKRVRDRLNANAKAPGHAKAKVEYLLHGKLFCGECGAPMIGECGRGRHGATYYYYTCAARKKQHTCKKRNERKDELEACIVDYIGSCVLTDSWIDGAAERVVAEYQKSYDASGIKPLEKQIRDADKEIDQLVDALISATAEAARRRINERIETAEARKQALEADLASLRIASRVQIKKEDIVVWLNQFRTGDRSDLEYRKKVIDLFVNSIYLYDDTFKLFLNVTDSTQITYSDSLALAPPSVSDFGASGVPDMHLSEHIIFVNGVIGMIVQR

SEQ ID NO: 10138 - protein, 524 aa, Unknown
  Description of Unknown: Integrase B10139 sequence
  cd00338,PF13408,IPR011109,IPR038109,PF07508, Coil,PS51736,G3DSA:3.40.50.1390,IPR006119,IPR036162, PTHR30461,IPR025827,PS51737,PF00239,SM00857, G3DSA:1.10.10.2600,SSF53041
MNESVCIYLRKSRADREAEAHGEGETLARHQRILLDLAKKKEYIVGAIYREVVSGETIADRPVMQQLLHEVESGMWDGVLVVEVERLARGDTIDQGVVSRAFQYSDTKIITPTKIYDPNNEFDEEYFEFGLFMSRREYKTIKRRLNAGRISSVKEGKYCGNKPPYGYERIKLAREKGYTLRPVPAQAEIVKMIYTWYAGDGCEQIGVAKIVRKLNEMGIESAQGGDWTPASIQGILTNPVYIGKIRWNGRKTVKTIQNGQVVKTRPRSKDVLICEGLHPAIISDDLYNSAQKIRQKNPYRPISIKNTVRNPLAGIVYCSKCGRAMVRRPYQKHGQEDTLMCPYTSCSTVSSKLSLVEKAVIDGIKEIAEEYKLNNNINVSSKAIDSTIISKQNLINEKENELKSLNSQKAKQYDLLEQGIYTTEVFLERAKTISASIQSCSDTIEKLKEEIKHDQNIIKQQSDFVPRCEELLDNYWSLDTESKNKMLKSLIEKVVYSKNTKNAYGKGNEIGFQLDIFPKIQKND

SEQ ID NO: 10139 - protein, 524 aa, Unknown
  Description of Unknown: Integrase B10140 sequence
  cd00338,PF13408,IPR011109,IPR038109,PF07508, Coil,PS51736,G3DSA:3.40.50.1390,IPR006119,IPR036162, PTHR30461,PTHR30461:SF3,PS51737,IPR025827,PF00239, SM00857,G3DSA:1.10.10.2600,SSF53041
LNAVIYARFSSHSQREQSIEGQLRDCYEYAKRYDINIVGEYIDRAISGMTDDRPDFQRMIADAPKKQFERIIVWKLDRFARNRYDSALYKHKLKQYGIRVISAMENVGEGDESILLEALLEASAEYYSLDLKKKILRGQRETIAKGRWCGGPIPYGYKAVDGKLVADEKTAPIIRYVFEQYAQGVPMKEIIDELKRRGVRSSRGGELTYTTFSRALTNPVYIGNFMYKGELVPGVAEALIDEDTFNKVQIIVKANAHAPAANKAKVEYLLQGKAFCGHCGSHMIGESGRSRNGDNYYYYSCAARKKKHSCRKKNEKKDFIEWYVVEQTLQYVLTPARMRDIAKAVVAEYDKEFAGSRVEEYEKAIKQYERELDKLVDALVDAPKVAHKRIYEKMETLETQKASMENELVKLRIASEIRFTEEEVRAWLRHFCTGDLFDPEFRRNIIDTFINCIYLYDDRIIIFYNIKGGKQVSFVDLAESLDSESESSGSDLNANAPPFNIKSEPAYIFVNGVFGCIFPRNDVE

SEQ ID NO: 10140 - protein, 524 aa, Unknown
  Description of Unknown: Integrase B10141 sequence
  cd00338,PF13408,IPR011109,IPR038109,PF07508, Coil,PS51736,G3DSA:3.40.50.1390,IPR006119,IPR036162, PTHR30461,PTHR30461:SF3,PS51737,IPR025827,PF00239, SM00857,G3DSA:1.10.10.2600,SSF53041
MAVVYARFSSAKQHETSIEGQLAAAQKYAEKKGYTIIREYCDRAKTGTNDNREAFQQMLHDCAKHQFSVIIVWKVDRFGRNREEITFNKYKAKKHGVRVEYVAENVVDGPEGVILESVLEGMAEYYSLQLSQNVRRGLLEAAKKHHVPGGRAIAFGYRAAADKTYEIDPVTGPIAKKIFEMYAAGSTEFEIIRYLNEQGHRTQRGVAFNRSSLKRMLHNELYIGTYIYKDIIRDEDAVPALVDKDTFRKVQDMLKINKRMPSHKWSYSDYLLTGKLFCGKCGSSMVGKSGTSRTGDKHCYYGCWNRHNGKGCDKQNVRQDYIEPLVLEKIHEILHNPEIFQLIVDKTWEFYLKQDTEQTEIQAMQTELAGVEKGIANLVKSVESGMPFDLIQTRLDELNGQKAALKKALADRELAKGIKLTKERIEFFLETMRDMDTDNLDAKKRLIDTFVNAIFLYDDHFLITLNFSGDGNTVKVEDIEKATTDGTSEVFDCSRSPVPERPTGEPLRLIWYMHLDVFAIEGLL

SEQ ID NO: 10141 - protein, 437 aa, Unknown
  Description of Unknown: Integrase B10142 sequence
  cd00338,IPR011109,IPR038109,PF07508,PS51736, IPR036162,IPR006119,G3DSA:3.40.50.1390,PTHR30461,mobidb-lite, PS51737,PF00239,SM00857,G3DSA:1.10.10.2600,SSF53041
MERLIQKIEPSVDISHKLRNVAAYARVSSGKDAMLHSLSAQVGYYSELIQSNPEWRFCGVFADEAITGTKESRPEFQKMLAECRKGKIDLIITKSISRFARNTITVLETVRELKMLGIDVYFQEQNIHSISADGELMLSILSSYAQEESFSASENQKWRIRKDFEQGKICNIRMLGYRRTTNGSLEIVESEAEIVRFIFLNYLSGNGKLLISNKLNEMGIATINGCEWTTADIHRILQNEKYAGNMLLQKRFRENHLTKRMIRNDGQLPKYFVEESHLAIIEKSIFDAVQKKLEEQHQRFSTSKSVVSYPFTGKIQCTCCGKNYRHKITATGNVWICATYNTRGKKYCPTAKQIPESTLISVCCEILSITEFDANIFENQVEKILVPAPNKLIFQLTNGKCINTTWKDRSRSESWTEEKRAAAAESSKTRRWKKCQK

SEQ ID NO: 10142 - protein, 524 aa, Unknown
  Description of Unknown: Integrase B10143 sequence
  cd00338,PF13408,IPR011109,IPR038109, PF07508,Coil,PS51736,G3DSA:3.40.50.1390, IPR036162,IPR006119,PTHR30461,PTHR30461:SF3, PS51737,IPR025827,PF00239,SM00857,G3DSA:1.10.10.2600,SSF53041
VRAFIYCRFSSHKQQELSIEGQRDICLEYAQKHNITVVGEYIDRARSARTENRADFRRLIRDATAGVVDCVLVWRYDRFFRDRAESALYRRQLEAAGVRLISVTEFIPDGSAGVITQGMIETVAEYFSAKLSEDVSRGMNKAAQHCQVTGSAPLGYRPGPDKRWQIDPVGAELVRRIFEWYDSGQPMEQLARQFNQEGHKTAKGVAFNRSSFSTILRNKKYIGIYEYNGTVSVAGGCPRIIEDDLFFQVQRRLEANRHRPGAYKAQASYYLSGKLFCGLCGSPMTGTAGTSRHGVRHHYYTCNNRRAKVCDKKNERLEPIEAAVLQAALDVLTDENIAYISKEVERRCAENSDSIALLSSLRAQLADVERQIKNIGAAIAQGIITETTKQLLMDAEADRAGLRQQIEKAKVQASLEVKAEAVACWLDGFRHGNRNDPDFRREVYGALVHSVFVYDDYLKIIFNVDRAGAVVVPFSAVEKAAVSESPRAVSGSYLERSGVPKAVISETDITAFGIFGKKGLEQFN

SEQ ID NO: 10143 - protein, 524 aa, Unknown
  Description of Unknown: Integrase B10144 sequence
  cd00338,PF13408,IPR011109,IPR038109,PF07508, PS51736,G3DSA:3.40.50.1390,IPR006119,IPR036162,PTHR30461, PS51737,IPR025827,PF00239,SM00857,G3DSA:1.10.10.2600, SSF53041
VTAPVTLSRIVAYLRKSRDDGEDSVEAVLARHERILQDWCRRTYDAPLPPEKILREVQSGETIESRPVMQDLIRRVQNREVDGVLVVELQRLSRGDFLDIGELERLFQFTRCQIITPTRTLSLADDYDRQYFEMELLHGREYLSYVKKILRRGVEQSCREGNYVSAVAPFGYQRATVNRKPTLAGDPREAPIVRMIFEMYAHEQIGPTVISDRLNALGLTTRDGGEWNPAKLRHIIENPVYTGKIRWGFRRGEKEYRDGEVVTVKRRHDGEDVILVDGRHPALISDDLFREAQDVSRGRKIPAANRPKEMRNPLAGLLRCGNCGHTMTAVPTRHYKSTELIDYTMRCTYSRGCHMRGAYLREVMGVLCATLSASLRDLDVDAGEEKPESPAADMRKVYADELAEIGRQRERLFGFLERGVYTDEIFLERRAKLDEREGEITAALSRIDAQAEDADHAEALRANLAACLALIDDPDTPPAELNAALKKIIDRITYTRAPASPAEMSGPPSRFRFFICDAVIASRG

SEQ ID NO: 10144 - protein, 524 aa, Unknown
  Description of Unknown: Integrase B10145 sequence
  cd00338,IPR011109,IPR038109,PF07508,Coil, PS51736,IPR036162,PTHR30461,IPR006119,G3DSA:3.40.50.1390, PTHR30461:SF3,PS51737,PF00239,SM00857,G3DSA:1.10.10.2600, SSF53041
MRIAAYVRYSSENQSAASLQDQARNCRAYCERAGWADPTIYQDAAISGSRKDRPGYQRLMADATRFDVILVDDLSRLSRDSIEAQQQVRRLKFAGVRVIAVSDGIDTADKGHKLGVGLRGLMGELYLDDLRDKTHRGLTGRAMAGASAGGLPYGYRITSVGEREIDEGQAAVVRRIFDDYIAGATPRAIAAALNREGIPSPRGRTWALTAIRGDIRRGIGILGNPIYVGQQVWNRSRWVKHPETGRRIRQERPEAEWITTHLPDLAIVTQAQWDAAQARQRGRTKASGGAGRPARHLLSGLLRCGGCDGPLVVVDRYNYGCARAKNAGTCPAPIRLAIRDAERELLAGIRAELLTDKAFQRFQRAVAARLREAGPDVDAVRRRVQQATRDRDNVMAAILQGIVTPTTKAALEKAEGEIKTAEAELRSAEAMQPAKMLPRARERWNALANDLGNRARGNDKARQAIAAAIGTATVRNENGDLVAEVAVASSGPEQGTQICVVAGARSVPYLLEPFRVVLRRASRE

SEQ ID NO: 10145 - protein, 433 aa, Unknown
  Description of Unknown: Integrase B10146 sequence
  cd00338,PF13408,IPR011109,IPR038109,PF07508, PS51736,G3DSA:3.40.50.1390,IPR036162,IPR006119,PTHR30461, mobidb-lite,PTHR30461:SF3,IPR025827,PS51737,PF00239, SM00857,G3DSA:1.10.10.2600,SSF53041
MKVDIIAPTKHKKYRLINVAAYARVSDAKDAMLNSLAAQVEYYTAYIQGTPGWSFAGVYTDKGITGTKSDRPEFQRLIADAKAGKIDKIVTKSVSRFARNTVDLLDTVRMLKELNIDVFFQKENIHTLSGEGEVMLTILASFAQEESKSVSDNCKWRIRSGFKEGRINALTMSGYRRSDDGSFTVVPEEAEVIRTIFNMCLDGKGCQSIANFLNEHHKASRCNGQWSPSGIRYILSNEKLTGRLILQKTYRKDHLSKTKKVNDGELPRYVVDCHHEPIISPDTFARTQRELARRKGAINVRTGTASMFTGKIVCGSCGKNYKRKCVGHSTGYVWICSTYNLKGKAYCPKAKRIPEQVLFTESAKVLGLEEFDAAVFEAEIEKVVVPEPNRLEFRFKNGTIGNVEWQDRSRKESWTDEMKEKARRRGLCTKQQK

SEQ ID NO: 10146 - protein, 524 aa, Unknown
  Description of Unknown: Integrase B10147 sequence
  cd00338,PF13408,IPR011109,PS00397,PF07508, Coil,PS51736,G3DSA:3.40.50.1390,IPR006119,PTHR30461, IPR036162,PTHR30461:SF3,IPR025827,PS51737,PF00239, SM00857,IPR006118,SSF53041
VIAVPAVRAALYARVSSAAQRDAHTIENQLRALPAFAAAQGWTVTETYVDDGRSAKAGQLERREGFARLVRDAEARRFDVLVVADVDRLTRTDSLEERARILGPFQRLGIRIVTPAGGELDLRTLVGELYVTLQAIVAAEENRKRAERVKAGKARAIAEGRKPAGPTPYGLAYARAAGAWSIEPARAAIVREIFARVIAGESCMVIADDLHARGAPPPRGPWTRHKVWQLARSPHAMGRWAADKRRRLVIDVPPIVDEATWHAAQAKLIEHGKRGLRRTRHVYLLEGLAVCGRCGSPIAIRSAALGGSPAAYVCRARKLARRGEARCSAPIVPVADLDGRLWARLAEVLEDPQLADLVQRRSGELAADRRGWHEDVAGYRAELARLGRASAGVLRRLSRELVPEEVGEAELAAIARQRAAVAAQLQAAERAADGPDELERAPTAWLEAIRELAGDGTPTERQRVVRELLQPGAVIDGTDVRLTLRVPVGASRGAGGGSAGAPSLAVAPGCRMHHENGLRIRLVA

SEQ ID NO: 10147 - protein, 524 aa, Unknown
  Description of Unknown: Integrase B10148 sequence
  cd00338,PF13408,IPR011109,PF07508,Coil, PS51736,G3DSA:3.40.50.1390,IPR006119,IPR036162,PTHR30461, mobidb-lite,PTHR30461:SF3,IPR025827,PS51737,PF00239, SM00857,SSF53041
MSQRRGPRVLGATRLSRYTDATTSPERQESAVETVSDAIGGHVVGWARDMDVSASKVSPKDRPELGDWMNRPQDYDVIAWWRLDRAVRSMADMADLGRWAKEHKKRLIFAEGPGGTRLELDMGSPMSELIMMLLAFAAQMEAEAISERVTGAREYLRSVGRWSGGRVPFGFIPVPHPTEDQGWWLGLHEDSEETPGTAPIARQMVAMVLSGKSYHQVSEWMNAAHPGITPANHRRKLAGRDIDPKARWNPGMVSTWIKNPLLNGRLQFEGSAVRNADGETVKCGDALIDDGTWRRLVKVTTKKADTGAERRSDAHPLLGVLYCGSCGGRLYQGWLAPGPNRKESVRQYRCAAKTHGRKCRKPAYVVADPVDRYTEREFLARAGSVNVVEVITTPGIDHTDEIEELKADIADLAERLTGMRGAAADAVGKQLQSRSDRLERLQAAPVIPPRHEEVPTGETYAAQWARETVEGRRDMLKAAGARVVVGETYRGARDPEKRLTFALGQPDDPDDAEAAELAALVLTV

SEQ ID NO: 10148 - protein, 524 aa, Unknown
  Description of Unknown: Integrase B10149 sequence
  cd00338,PF13408,IPR011109,IPR038109,PF07508, Coil,PS51736,IPR036162,IPR006119,G3DSA:3.40.50.1390, PTHR30461,PTHR30461:SF3,IPR025827,PS51737,PF00239, SM00857,G3DSA:1.10.10.2600,SSF53041
MRTAAYARYSSDQQRDASLEDQLRNCRAYAARQGWPAPEEFTDAAMSGARNDRPGYLRLIAAAGRLDVILVDDLSRLSRDSIESAQAVKRLTFAGVRLIGVSDGVDTGRKGHKVDVGLRGLMSELYLSDLADKTHRGLSGRALDGASAGGLAYGYRVTSVGYRDIDPDQGAVVRRIFAEYLDGKSARAIAAGLNADRIPSSRGGTWAMTAIYGDTKRGIGILVNPIYRGLQVWNRSHWEKHPDTGRRIRKERPPSEWITKELPELAIVDAATWQAVQDRLGGSRQPHHGRPKAGRPPSHLLSGILRCGTCGGPLVVLDRYRYGCSVHKDRGDAVCNSRLRIPRTATEAALLSGIKEQLLSEAAFQRFQRRVAAALKSAAPNLDAMKRKLADSERERDNVMAAIRAGIITPTTKADMVRAERQVATAIAELERMRGFQPAQMLPRARDEWRKIVDTLENYARNVPAARAALRKMLGDQVTIKEKAGDLYAEIAGSSDSQINVVAGAGFGLHLSGRIEIPLRLRRA

SEQ ID NO: 10149 - protein, 524 aa, Unknown
  Description of Unknown: Integrase B10150 sequence
  cd00338,IPR011109,IPR038109,PF07508,Coil, PS51736,IPR036162,PTHR30461,G3DSA:3.40.50.1390,IPR006119, PTHR30461:SF3,PS51737,PF00239,SM00857,G3DSA:1.10.10.2600, SSF53041
MDAIGYARLSDKNESSNSIKSQVKRIEEYCAANKLTLLKTFIDDGRSGWTFDRPGFKELEQFCKKNKAVQYLVIPHFDRFSRTDPIDAMVKERYFRDTLNVKVLQVSEPVDIDVNNPTYLIVRFMQAFASNEERNRIVDRTITGMRYSLSQGRYCSNAPFGYKNSRDEMGKPLLIVDEERAPVIRFIFNQYLKGEGLEEIGRLAKAKGFTRSGNSAITRILQNPIYAGLVNVPAYKNQPARVVKGLHVPIVSENDYYMAMDKLSGKNFRHQNNEAVPLRGVVKCHCGKLLTAAPSKSKTGKYYWYYFCNDHRKANFSANKMHGQLLAILDELTMDKESAERIAAASRAAINEQINTSTKQLMKLDLAIQKAGHAISAIEEKYLLQPDISQATYNKVIKEKRIQLNELQAQRAAFSTDAYVLLEQLNIALSTLTSLRQRYEQLDVLHKQIFFKQGFGSNMTYTDGIYRTPFINPIFNANALVLKEKGLLIIEQPSENIALDNECAAGGTSTELAALFALAKLFVA

SEQ ID NO: 10150 - protein, 524 aa, Unknown
  Description of Unknown: Integrase B10151 sequence
  PF13408,IPR011109,PF07508,Coil,PS51736, IPR036162,PTHR30461,IPR006119,G3DSA:3.40.50.1390,PTHR30461:SF3, PS51737,IPR025827,PF00239,SM00857,cd03768, SSF53041
MRFFCYGRKSVYSDHSDSVDNQEGMCRDYVSSRFPGEVDSFICFQDEDFSGANTDRPGLKEMMRRVRARECDALVVYQLDRLSRNVRDFSNLYAELDSLSVKFISLKENIDTATPIGRAMMYVTVIFAQMERETTAVRVLDNMRGLSKKGYWTGGNPPTGYVRQRVVEDGRKHVIIVPDPDGVAYVRKVFSDFLSMNCSLQHMETAYRDAGVRTITGKFFSSTQLYKILTMPFCVEATPEVYDFYAAKGCQMDPGSPRSAWDGSVGVMIYGRSTERNKKHELQPPSEWIVSLGRQEPFIPASEWLEVQSRFTHNKCIKDSRWPVPLLKGVLRCGKCGTLMQVARKARVDGSCSSWYYCRKRMREGADVCDMRHIKCEILDDRVLEVFRGIAADPDLIQKYVERSEPAAGPDLAAINQKIAAQERKIEKLAASLALADGSSAARYIISEMESLDAGLSSLRQEATAAEAAVREKRAAAASAKEKAEEIRRLISGLDGFTPKERNEIVRSVVKSCAWDGETLFLSL

SEQ ID NO: 10151 - protein, 524 aa, Unknown
  Description of Unknown: Integrase B10152 sequence
  cd00338,IPR011109,PS00397,PF07508,Coil, IPR038109,PS51736,G3DSA:3.40.50.1390,PTHR30461,IPR006119, IPR036162,PS51737,PF00239,SM00857,G3DSA:1.10.10.2600, IPR006118,SSF53041
MNKKRCIIYVRVSTEEQIKGFSLDAQENEDTAFANNLGYEVIKIFREEGISASSLNRPVLQKMMQWGYEHKGEFDAVVFWKWERISRGTEEDYVVLGKFFTTCGIKPLSVTECNDESAEGELLRWITKGINLYELRKISQRTKLGMRQVARTGRKPAGVPIGYKNITNPDDTKSIIVDEKTAPFIHKAFEMYATGNYSTESIEDFLYKNGIRNKKGNRYTKVDYMLKNIFYIGKFIWSGQLYEGTHTPIIERELFDAVQSKFGFKKPKTHDLYFPYTTMIKCSHCGKHYLTAEMKRGAHNSGQYIYYKCRCGVKAIKQDELEIEFMRMLDDIYIPPHEIEALKDGAKEILDAIKDFENKLETPAQIQNSIDIINTRIKKAYKDKLDGNSLGMSEDEWNKMISEWIKEKDYLQIKLNDRIEKSKILYDKLHLLMMFMNKLPELFRLAEPRIKREIIQTCCRTLSYDGKNLYIEQFPLFKELKKWKNSIYGAAIGTIVEPKILLKLIENDEQTNHLLLKIKGLIAA

SEQ ID NO: 10152 - protein, 523 aa, Unknown
  Description of Unknown: Integrase B10153 sequence
  PS00397,IPR038109,IPR006119,PS51737,PF00239,G3DSA:3.40.50.1390 ,PTHR30461,IPR025827,SM00857,G3DSA:1.10.10.2600, SSF53041,IPR011109,PF07508,PS51736,IPR006118, cd00338,PF13408,Coil,IPR036162,PTHR30461:SF3
MRVGIYIRVSTDEQAKEGFSIPAQSRILEAQAIIKGADDIVKYVDDGYSAKNLNRPHVQRLISDCKARKLDAVIVWKLDRLTRSLRDLLMLIDDVFRANGVEFISSTETIDTSTPSGRLMVNILGAFAQNERENTSLRTRTVMLELSKTGKHLGGRPPYGYTVNTDGFYEIEPNESKAVRMAFEIKAGGGSYSEIISALAAAGHTSRSGKPFERNTLYSMLRNEKYTGVYIYNRATAADENGHRNNWTSKPEEEIQRIPGGMPAIITSELWEAVRTMSQEGKALGGKNSAKNIYLLSGRVRCAICGKGMTITNGGRNRDGTYWRAYRCKNKCVKGIEFQKLESCVVDFLVSAASGDDLLQQLLNIADDFNSAAAEDSAASINALRSNLTSLQRERDNLLKLAAKSDDPPVSLLDEIQRRDREISAVKSQIEAAERASVVIHKDELTKRFRALYNLRSCTKEKQKAVIKDIVDHVTIYDDHIDISMITTSASGPDPIHAAIVKLLTLTISKNFISSHNLPKRFL

SEQ ID NO: 10153 - protein, 523 aa, Unknown
  Description of Unknown: Integrase B10154 sequence
  cd00338,PF13408,IPR011109,IPR038109,PF07508, Coil,PS51736,IPR036162,IPR006119,PTHR30461, G3DSA:3.40.50.1390,PTHR30461:SF3,IPR025827,PS51737,PF00239, SM00857,G3DSA:1.10.10.2600,SSF53041
MKKQSLPSCPPRTAVAYARYSSAGQRDVSIEQQLADIRAFAKREGYTLVHEYADHARSGFKNASARTAFQSMMAAADSGSYDTVICWKVDRFGRNREESALFKGRLRRRGVRVLYAMEPIPEGSAGVLLEGMLEATAEWYSRQLSENVTRGMTDNAQRCLYNGTKTLGYVRGSDGRYALQPDEAAVIRYIFDLYCSGYSAAQICKRLNDRGVRTSRGCLWKPESLLRVISNERYTGVYIWGDVRVPGGMPAIIDQSVFEEAQRMKKKTSRHVEQGAVDYLLTGKAFCGLCCAAMIGDSGTSKDGTRHHYYTCQARKARKGCKKRSLKKDYLETLVIEYVLNVVLSEENIAENVRVIMAQQQEELKTSPLPAMEAEYDETQKKIRNINNAIAAGIWNASTSAVLKELEDTAENLRVSIEMFRYSQAQLMDPDRVAFFLHQFVKGDRADPLFRRHVIETFINAIYVFEDHIDIVTNNCEGNQRFPLADLQDDDYDPGSLCSDTLVSGVLMITHPNTQVSIHRIAI

SEQ ID NO: 10154 - protein, 523 aa, Unknown
  Description of Unknown: Integrase B10155 sequence
  cd00338,PF13408,IPR011109,IPR038109,PF07508, Coil,IPR036162,IPR006119,G3DSA:3.40.50.1390,PTHR30461, PTHR30461:SF3,PS51737,IPR025827,PF00239,SM00857, G3DSA:1.10.10.2600,SSF53041
MKKTVAPSCSPRTAVAYARYSSAGQRDVSIEQQLREIHAFADREGYTIVHDYADHARSGFKNASARTAFQSMMSAAENGTFDTVISWKVDRFGRNREESALYKGRLRRFGVKVVYAMEPIPEGSAGVLLEGMLEATAEWYSRQLSENVTRGMTDNANRCLYNGTRILGYSRGPDGRYALDPEEAAVVRHIFQQYCSGFSAASICRQLNAQGVKTSRGKSFSPESLMRILSNERYTGTYIWGSIRVSEGMPAIIDQKTFQEAQAMKKKTARHVEQGAVDFLLTGKAFCGLCRSAMIGDSGTSKAGNRFYYYSCQSHKARKGCNKKSIGKDRLEDAVIDFVLDYVLSDEMIEKNADAIMALQAEELKSSPLAAMESEQAEVKKQIDNINNAIAAGVWSSSTVEKLKALEATAENLRVSIETLRFSQAQLMDRDRVIFFLHRFTKGDRNDPLHRQHLIQTFVNSVYVYDDHLWIVVNNTEGNFRFDLPADLQEEVPDAALCSDSVSNGVPDVLHPNTRVTAFRIAI

SEQ ID NO: 10155 - protein, 523 aa, Unknown
  Description of Unknown: Integrase B10156 sequence
  cd00338,PF13408,IPR011109,IPR038109,PF07508, Coil,PS51736,IPR036162,IPR006119,PTHR30461, G3DSA:3.40.50.1390,PTHR30461:SF3,PS51737,IPR025827,PF00239, SM00857,G3DSA:1.10.10.2600,SSF53041
MEVVLYLRYSSDRQNEQSIEGQRRVCEKYCESMGYTIVGEYADRAMSAMKDTDKRVNFQRMVKDSEKRLWQGVIVYKLDRFARNRYDSATYKARLKKNGVRVISATENISDNPEGIILESVLEGMAEFYSKELSQKITRGMYESALKCNSCGGHISLGYKIENKKLVIDPKTAPIVRKAFDMYANGHTVAYICQVLNEAGYRTKTGSLFNKNSFHSIFRNRKYIGEYKFMDVVVEGGVPAIIDKETFEKVQVILNRKAQAPARGKALVDYMLSGKVICGHCNKLATGTASTSHTGRKYFYYTCSGRRGHNGCTKTPIRKELLEEAVVNDTVEMLTPEVIEYLADLAVKASEKERQDYTLISSLQAEISEYEKSIERLLKLVENGADSPTLSKRLNELEKAKRSAERSLVKEEAEYFLLDKDQVVFFLTQFTQGDKADPEFQRRIIDLLINSVIVWDDEDDGDGTHKITITYNLTPRKSKTITVKDLSKVGCVFQPDKPTITSKYAPYLIGQIVFAINVKHRFE

SEQ ID NO: 10156 - protein, 523 aa, Unknown
  Description of Unknown: Integrase B10157 sequence
  cd00338,PF13408,IPR011109,PF07508,Coil, PS51736,G3DSA:3.40.50.1390,PTHR30461,IPR006119,IPR036162, PTHR30461:SF3,IPR025827,PF00239,SM00857,SSF53041
LNFGIYTRKSYFTDTSDSVKMQLSACQEYIDRVFDDVTTVTPYEDDGYVRSDIDRPAMNRLREDVGAGLIDCVVIYRIDRVCSDMMDFCTFYTYLKEHEVKFVTVKDGIDTTTPIGEAMMYLAVIFSGIEIGNDSIRIRDGMNHLAARGFWCGGMAPFGYDIVEVDLGAKKHKTLVKNDEQHEEKERLVDILLTNDFSLQALETYCRQQGIRSQRGAFLSTTQLHQILRSPFCVADTPEIFDYFQELGCIMDEGSPRELWDGQHGVMVYGRTTEKRVNRKKKHVQAPPEEWRVSIGYHEPTMSAERWLQVQDHFGRKKIDKTMKHETTLLKGVLRCKCGRLMGLARKKKVDGTVSTWYKCPRRERAGDCDMGQIKAELLDEKVLEIFREIEHDPDVVKRYIKEEKQTTGSGDKNKKKIQETEKKIDRLVASLGSAKNGPAAKYIVAEIEKLDVELATLKRAEAEALQEKRRNAVTLRNAQEKRLLICEMLANFDNFTMEEKNEIAREVIQSATWDGETLFIML

SEQ ID NO: 10157 - protein, 523 aa, Unknown
  Description of Unknown: Integrase B10158 sequence
  PF13408,IPR011109,PF07508,Coil, PS51736,IPR036162,PTHR30461,IPR006119, G3DSA:3.40.50.1390,PTHR30461:SF3,IPR025827,PS51737, PF00239,SM00857,cd03768,SSF53041
MRFFSYGRKSVFSDKSDSIDNQFRMNREYCESKFSGQVDSWQQFSDEDFTGANTSRPDLQRMLSFIKGGFCDVLVVYQLDRLSRDVRDFANIYALLEEHGVMFISIKENIDTTTPIGRAMMYVTVVFAQMERETIAARVTDNMLGLAKKGYWTGGNPPVGYVRKHIVVNGKKHCSIEVDPEGARYVTQIFDTFLAYNCSLQGMETRFKNQGIRTQNGKFFSTAQLHKMLTMPYCVEATPEVYDFYAAKGCIMDPGSPREMWDGSVGVIIYGRSTEKNKKHQAQPPEKWTVCLGKHKPFMPAEKWLAVQSRFTQNKCIKDAKWPVPLLKGVLRCKCGNLMQVSRKKKVDGTCSSWYYCRKRMRQGVDACDMGQIKCDLLDEEVLELFRGITADPALIQKFVKAEAPADVPDLKAAQARVSACERKIGRLAASLALAEDSAASKYIIAEMERLDVELGALKREASLAEMESHRAAASAKDAKATAAEIAKLIHGLEGFDDKEKNAIARAVIQECTWDGERLFITL

SEQ ID NO: 10158 - protein, 523 aa, Unknown
  Description of Unknown: Integrase B10159 sequence
  cd00338,PF13408,IPR011109,IPR038109,PF07508, Coil,PS51736,IPR036162,IPR006119,PTHR30461, G3DSA:3.40.50.1390,PTHR30461:SF3,PS51737,IPR025827,PF00239, SM00857,G3DSA:1.10.10.2600,SSF53041
MKKTKAVIYIRYSSHKQRESFSIEYQVDECTKFIETQGYELVDKYIDEAKTGKKVAGRDAFDKMLFDASQRKFDKIIVFSFSRSFRNTREALNCNHDLYEKYGIVIQSVIEPIDMTNPHGKFSGTNLFAMHELQSDITAAHVRSGMHVAAQQGYYLGSTVPFGYELYGTSEFSRGKERKKFRPNEAEAKIVREMFELYADGFSLNFIQTSLRTQGVKGRRGDIMGHQTIARILKSEFYIGTRHYHVKGYDPLVLKNCVPAIIDMDLWHRVQARHSENKLPKPRRTKRLYSLTGKIICAKCGGHMFGTYKGDKRSDNWHYAYYHCANKKNKGTCDALNVRKDQIDQYCLDQIKKHILNEEAMRSIAAQISTAAGDSADDMQAKRDKLSKRKEKIEGILQKIRRDVYEEKITEAQGDADSAYYKQELLDVENALISLQTALRGAISPEAVYLYLSELLTLHGSNNDELIKNLFDKLIEKIVVHDDRIELHLVVFPFAHTGDCASSGQPYVCLSAEISRKDLRNRA

SEQ ID NO: 10159 - protein, 523 aa, Unknown
  Description of Unknown: Integrase B10160 sequence
  IPR038109,IPR006119,PS51737,PF00239,G3DSA:3.40.50.1390, PTHR30461,IPR025827,SM00857,G3DSA:1.10.10.2600,SSF53041, IPR011109,IPR015967,PF07508,PS51736,cd00338, PF13408,Coil,IPR036162,PS01300
MKRAVFYGRYSSDRQTEQSIEGQRRVCEEFAKAEQIQIVGEYIDRATSGTSTEHREQFQKMLKDSKNGGWDYVLVYKLDRFARSRYDSAISKQQLKKNGVKVLSATERITDSPEGILIEGLLESMDEYFSRELSRKCKRGIRESIIKGHNFGGRVLYGYDRKDKRFVINEEQAVNVRRIFKSYLSGCTIQSIADQLNADGYRTNYGNEFKRYTVSDILHNDKYTGIHYIDGIEEPETCPAIISQTTFERVKEKLNQSAHRSREHTTGHTYALSGLLQCGVCGRYVCGSSVERKYFYYACRSREHAENSVHIHADKLEQVVIDALQTFFTEEQVSTLAERLYQIYTTDMDGKPDRSKRLNEIEKQVQGTVNALIACPSSKALQEKLTQLEEQKAEIEKMPILQPQLKKEHFENYFHWLALRLEHIEDRQTFFHTVIHKVLVYPEKAVIILNMTDEMADPPKREQVEAFMSNVGEVSLYPCPNCTIVKPSPSRFCDICTAPQRSNAISLIWNFCPSSSMKFSIKP

SEQ ID NO: 10160 - protein, 523 aa, Unknown
  Description of Unknown: Integrase B10161 sequence
  cd00338,PF13408,IPR011109,IPR038109,PF07508, Coil,PS51736,IPR036162,IPR006119,G3DSA:3.40.50.1390, PTHR30461,PTHR30461:SF3,PS51737,IPR025827,PF00239, SM00857,G3DSA:1.10.10.2600,SSF53041
MPKTKKTACRPKTAVAYARYSSAGQRDVSIEQQLRDIRAFADREGYTLVHEYADHAKSGFHNTAARSDFLAMLAAASSGQFDTVIVWKVDRFGRNREEAAIFKSQLRRSGVSVLYAMEPIPAGAAGVLTEGMLEAIAEWYSRNLSENVTRGHRDNAMKCISNGCPIFGYRRGPDGRYILQQDEAAAVRSIFTRYAQGFSAAAIAADLNAAGMKTVRGCAFSPQAIIRIISNERYVGTYIWSDIRVPGGMPAIVTSKEWEAAQRMKEKTGRHVEQGQTDFLLTGKAFCGHCGAAMIGDSGTSKNGATHYYYTCQGHKSRKGCRKRSLRKEYLEETVLRFIVDQCLTGPEREKIADAIIEAQKQQEKKSPLASMEKELHETQKKIDNVNRAIESGIWNSSTAVRLKSLEDAAADLILSIDKLKFSQSQLLTRDRLLFFLDKMAHYDLSSPARRKQLIDTFLNSVYVFDDYAHVVINCVEGNATITLADLNDLDLPPAPWCSDSVTDGAPFVTHPNTRMVIYTIAV

SEQ ID NO: 10161 - protein, 523 aa, Unknown; identical to SEQ ID NO: 9632
  Description of Unknown: Integrase B10162 sequence
  cd00338,PF13408,IPR011109,IPR038109,PF07508, Coil,PS51736,IPR036162,PTHR30461,IPR006119, G3DSA:3.40.50.1390,PTHR30461:SF3,PS51737,IPR025827,PF00239, SM00857,G3DSA:1.10.10.2600,SSF53041

SEQ ID NO: 10162 - protein, 523 aa, Unknown
  Description of Unknown: Integrase B10163 sequence
  cd00338,IPR011109,IPR038109,PF07508,Coil, PS51736,IPR036162,IPR006119,G3DSA:3.40.50.1390,PTHR30461, PS51737,PF00239,SM00857,G3DSA:1.10.10.2600,SSF53041
MKAIAVLRVSTETQQIEDQKRELVAFARDNGYEEKDLVYVEAIGASAIKLDQKYMDMADKIKALILQGGIDCVFVWEISRLGRNEVILMGFKEFFIKHKVQFICKNPSLRLLDDDGRVNTGTELAFSLFSTMSKQEMEEKKARFKRAKDSLRKKGMYAGGNTIRFGYKVGDDQHFIVNEEEAGVVRLIYDLYSTGNYSAWTLSEELKERGLFLDTCKILRILKSVAYIGDEVSESGVHYPPIVPRELWEKCSKIRGENRLYMKRGERIVLCAKLVRCFNCGAICSSNSRHYACCRHANKRGCTNGTVLRQDVVDDLAWRIASMLHMDYLMDLNENKVQEYKKELSVTQEKLREAERKMQDYVAKKDRIVDTFLEGLIDRNKRDLALLKLKDDISAHQSHLSSLQAKERAILGMIESAENPDALTNFVAALDKMDSEKKFDIIHRHIESITGEPISYGKRDPRTKKGNAIRIEIKSIYGKTYQFMYFPKYYENHNLYIYNGERWVPDYVTKVGHLKPFSSHETQ

SEQ ID NO: 10163 - protein, 523 aa, Unknown
  Description of Unknown: Integrase B10164 sequence
  PF13408,IPR011109,PF07508,Coil, PS51736,G3DSA:3.40.50.1390,IPR006119,IPR036162, PTHR30461,PTHR30461:SF3,IPR025827,PS51737, PF00239,SM00857,cd03768,SSF53041
MRFFSYGRKSVFSDKSDSIDNQFRMNREYCESKFSGQVDSWQQFSDEDFTGANTSRPDLQRMLSFIKGGFCDVLVVYQLDRLSRDVRDFANIYALLEEHGVMFISIKENIDTTTPIGRAMMYVTVVFAQMERETIAARVTDNMLGLAKKGYWTGGNPPVGYVRKHIVVNGKKHCSIEVDPDGARYVTQIFDTFLAYNCSLQGMETRFKNQGIRTQSGKFFSTTQLHKMLTMPYCVEATPEVYDFYAAKGCIMDPGSPREMWDGSVGVIIYGRSTEKNKKHQAQPPEKWTVCLGKHKPFMPAEKWLAVQSRFTQNKCIKDAKWPVPLLKGVLRCKCGNLMQVSRKKKVDGTCSSWYYCRKRMRQGVDACDMGQIKCDLLDEEVLELFRGITADPALIQKFVKAEAPADVTDLKAAQARVSACERKIGRLAASLALAEDSAASKYIIAEMERLDVELGALKREASLAEMESHRAAASAKDAKATAVEIAKLIHGLEGFDDKEKNAIARAVIQECTWDGERLFITL

SEQ ID NO: 10164 - protein, 523 aa, Unknown; identical to SEQ ID NO: 9629
  Description of Unknown: Integrase B10165 sequence
  cd00338,PF13408,IPR011109,IPR038109,PF07508, Coil,PS51736,IPR036162,G3DSA:3.40.50.1390,PTHR30461, IPR006119,PTHR30461:SF3,PS51737,IPR025827,PF00239, SM00857,G3DSA:1.10.10.2600,SSF53041

SEQ ID NO: 10165 - protein, 504 aa, Unknown
  Description of Unknown: Integrase B10166 sequence
  cd00338,PF13408,IPR011109,IPR038109,PF07508, PS51736,G3DSA:3.40.50.1390,IPR006119,IPR036162,PTHR30461, PTHR30461:SF3,PS51737,IPR025827,PF00239,SM00857, G3DSA:1.10.10.2600,SSF53041
MPTIKKIKPRAAIPTARKRVAAYARVSVGTEMLLHSLSAQVSHYSSLIQNNPEWEYAGVYADEGVTGTSTAHRDGFNRLMDDCNAGKIDLILTKSISRFARDTVDCLNAIRHLKDIGVEVRFEREGISSFTADGELLLTLLASFAQAESESIAANVRWAVRKGFEEGIPNGHKAPYGYVWDNGMFRVIPVQGEVVKHIYRRYLAGDSAYKIAKDLKAHGIVGQSGNPMCDSTIKDIVTNISYTGTMILQKNYFTENHGRRRNKGELPRYAVEDMYEPLVSMEDYEKAQAIRRHRAEESPNANAHLTKFSGIVRCGNCGCGVSRRTSGGAKKWVCNTRERKGIDVCDMRPVMENELETAAESAVGVRDDAEFRRIVSAVFIYGDRIEFRLTNGKSKTIAREYGCRTGFSGKLVCSECGAKLTRDTWRKRGRGTVAKIKVWICTAPRSSCSLRRVTEEELRRAAVSILDSDECEPAFAEQVRRAVISNRDIRFELKNGEVRTWQRE

SEQ ID NO: 10166 - protein, 523 aa, Unknown
  Description of Unknown: Integrase B10167 sequence
  cd00338,IPR011109,IPR038109,PF07508,Coil, PS51736,G3DSA:3.40.50.1390,IPR036162,PTHR30461,IPR006119, PTHR30461:SF3,PS51737,PF00239,SM00857,G3DSA:1.10.10.2600, SSF53041
MSDLDPRGLYCAYLRKSRRDEELEALGQGETLARHEHALKDLAARLGITIGHFYREIVSGDTIAQRPQVQQLLADISAGRWDGVLAMDVDRFGRGDSIDQGIIMQSFIYSGVPIITPDKIYDPTSEADSEFFEIKLFFSRREYAAIKKRMQRGRLASVMDGCYQSPRAPYGYERYKLPGRKGWSLRPVPEKAAIVRSVFAWYADGMDGQDAGSGVIAAHLNAMGLRTDLGRPFEPSYIRGMLQNPIYIGKVRWNQRKTQYKIIDGRRVATRPHSQDVILADGLHEPIVDADLFTRVQAIFAAHEKCPKNTQRQQVNPLAGLVFCAVCGRALQLTPSPDRADFLKCPSTGCPTARTYVHVVEAAILSELSRWTVEFTPADVPADPDPDAAARAAALKQLTDQRAQLSGQLTRLYDLLEQGIYSADLYRQRHADLSARLADLDATLAQLSAAPRPDPRASLVPRLRTVLDAYQAAPDPATKNALLRTVLDRVVYHKTQRCYRNDPPGAHLTLEIYPRQPSDDDDF

SEQ ID NO: 10167 - protein, 446 aa, Unknown
  Description of Unknown: Integrase B10168 sequence
  cd00338,PF13408,IPR011109,IPR038109,PF07508, PS51736,IPR036162,IPR006119,PTHR30461,G3DSA:3.40.50.1390, PTHR30461:SF3,IPR025827,PS51737,PF00239,SM00857, G3DSA:1.10.10.2600,SSF53041
MNRVVRKLKPKIPAIPQRMRVAAYARVSNDKESMVESLVAQVGYYSAHIQRNPQWIYVGVYADEGLTGTKDNRPEFQRLIADCYAGKIDMVITKSLSRFSRNTLDTLKILRELKQKGVDVFFERENIHSNSGDGELMLTILSSFAQEESRSVSENCKWRIREKMKQGELVGLRDMYGYVIERDSVSIEPRQAEVVRQIFNWYISGDSSVVIARCLNTAGELTLNHAAWSAKHVREILANEKYTGNALLQKSYITDYLSKRKKRNHGQVPQYYVEHSHPAIVDTDTFETARELLKSAGERNKPNSPVNARYPFTGKIICGNCGKSFQRKTTKGRVGWLCATYLERGRSACPVKQIPEAALLDACAQTLELPSFDEVEFRNKISRIEVTGVNSLSFVFTDGTIRTAAWKDRSRSESWTDEMKQAARKKSLAIKEALNGGSNTETGNEN

SEQ ID NO: 10168 - protein, 523 aa, Unknown
  Description of Unknown: Integrase B10169 sequence
  IPR011109,PF07508,Coil,PS51736,G3DSA:3.40.50.1390, PTHR30461,IPR006119,IPR036162,PTHR30461:SF3,PS51737, PF00239,SM00857,cd03768,SSF53041
VRFFCYGRKSVFSDKSDSVDNQLHMCLDYCESKFHGKIDSWECFSDEDFTGANTDRPQLQLMFSRIRENAADALVVYQLDRLSRNVRDFSNMYAVLEEHGVMFISIKETIDTTTPIGRAMMFVTAVFAQMERETIAERVSDNMLGLARKGYWTGGNPPVGYVRKSIVEHGRKHVTIVPDPEGVDYVNRIFDTFLSSNRSLQVIETQFKNSGIKTLSGKFFSSTQLYKILTMPFCVEATPEVYDYYANKGCIMDPDSPREKWDGSVGVMVYGRTTGKNKKHQLQPPEKWTVCLGHQEPFMKADKWLLVQSRFSEHKCIKDAKWPVPLMKGVLRCKCGSLMSVSRKKRVDGSCSSWYYCRKRMRQGVSYCDMGQTACDKLDSRLISIFRDIAADPKLINQYLQKTEDKPLRDPKAILSSITSCDGKIGRLTASLALAESSSISKYIIAEIKRLDSEKSRLQKELTDIEHESKRKMAREKDSLKAIAEISRLMSGLDGFNDKERNEIVRSVVKTCTWDGVNLFITL

SEQ ID NO: 10169 - protein, 436 aa, Unknown
  Description of Unknown: Integrase B10170 sequence
  cd00338,IPR011109,IPR038109,PF07508, Coil,PS51736,IPR036162,IPR006119, G3DSA:3.40.50.1390,PTHR30461,mobidb-lite,PS51737, PF00239,SM00857,G3DSA:1.10.10.2600,SSF53041
MPKKVRKMPQKPRLEQPKKVAAYARVSTGKDAMLHSLSSQVSYYSSLIQNHAGWLYAGVYSDEALTGTKDSRSGFQNLLSDCRAGKVNLVLTKSISRFARNTVTLLETVRELKVLEVDVFFEEQNIYTMSAEGELMLTILASYAQEESLSASENQKWRVRKGFENGELLNWRFLFGYSISKDGIEIDTATAPIVREIFARVIDGETFGAISKNLNSRGVPGALGGKWCAQRIRETVGNEKYTGNAMLQKHYRNNHLEKKKCRNTGELPMFFAEKTHPAIIDMDTFNAAQVVLQRMKEAAQGRPRPQKSEFTGKIYCPFCGKYYKRNTCNGSVGWNCSTFLTEGKAYCHGKKIPEATLQAVCAQVLGTETYNSTVFDMQVDHIEVPEGNRLRFVFKDGSTVERTWADRSRRESWTSEMKQAAAERTRIQRREKQCQE

SEQ ID NO: 10170 - protein, 445 aa, Unknown
  Description of Unknown: Integrase B10171 sequence
  cd00338,PF13408,IPR011109,IPR038109,PF07508, PS51736,G3DSA:3.40.50.1390,IPR006119,IPR036162,PTHR30461, mobidb-lite,PTHR30461:SF3,IPR025827,PS51737,PF00239, SM00857,G3DSA:1.10.10.2600,SSF53041
MNRVIHKVQPTIPAIPQRMRVAAYARVSNDKMAMVESLAAQVSYYSAHIQRNPQWIYVGVFADEGLSGTKDNRPEYQRLISDCYAGKIDMVITKSLSRFSRNTLDTLNILRELKQRGVDVFFERENIHSNSGDGELMLTILSSYAQEESRSASENIKWRIRKKFEQGEISGWCQLYGYTIRRGKVAIDAYKADIVRRIFSEYLAGDSATVIAKRLRLEGVHCEQGGQWKQFTVSEILRNEKYTGNQLLQKTFTKDHLSKRAKKNQGELPLYLVENAHPAIIDAETYQRAMRRMEGNQKTAKRPEPKMDNQLFRRKIICSHCGRHFIRKNTNGTPGYVCSTYSAEGKDFCLSKKIPESTIVEFSLKALGIPEFDKELFDKEIDHIVARYPNDLVFVFRDGHTCEYTWEDRSRAESWTEEMKIAAAEKTRSRKRSNSHGSHQESHED

SEQ ID NO: 10171 - protein, 523 aa, Unknown
  Description of Unknown: Integrase B10172 sequence
  IPR038109,IPR006119,PS51737,PF00239,G3DSA:3.40.50.1390, PTHR30461,IPR025827,SM00857,G3DSA:1.10.10.2600,SSF53041, IPR011109,PF07508,PS51736,mobidb-lite,cd00338, PF13408,Coil,IPR036162,PTHR30461:SF3
MKAVIYARYSSDNQREESVEAQINAIEEYANKNNHIILKHYIDRELTGTNDNRPSFQSMIKDSKTGLFDLVLIHKTDRFSRNKADSAIYKRMLLENGVKVIPVAESFISDSPFGVVMEGMLEGWAEYYSLNLSTEVKKGQNSNIRKFDTIGKVKHNGGKPPFGYVIDSEGYYVIDDHEAIAVRKIFDMYLNGYVYKDVMEWLDQLGYRTKYGKPFGKTSIHGILHNPKYCGVYTYRNKKRVYVGGRYKDIENPDKIVIDGGIPAIVSKEDFERIQLIMAENNKNSKRSASKEIFILSGKVFCSKCGSKLESNSYMGGRDRKHQYRNYRCSGRKKGLECDLKPYDKETLEMDVCLQLEKDVFNDDQIDILSKEIYEAFKKQSSTSVSTLKSYNTKKASLERQIENLTTALANGAAFNSVYSKLSDLEHQKDMLEFEIKREQYSSDRIMSLESIRDILLVGKDMHLKTDKEKTTLINMFVERIVLGDTLEVRLNFKPDRYMDSGGEGNRTPVRKPVHESFSHQSH

SEQ ID NO: 10172 - protein, 523 aa, Unknown
  Description of Unknown: Integrase B10173 sequence
  cd00338,PF13408,IPR011109,IPR038109,PF07508, Coil,PS51736,G3DSA:3.40.50.1390,IPR006119,PTHR30461, IPR036162,PTHR30461:SF3,IPR025827,PS51737,PF00239, SM00857,G3DSA:1.10.10.2600,SSF53041
MALAQNITVIPARRTIGTQKPAAKVQKTRVAAYCRVSTEYEEQESSYEVQVEHYTNYIKSNPEWEMVEVYADDGISGTNTAKREGFNRMIEDCKAGKIDMILTKSISRFSRNTVDCLKYTRELKDMNIAVFFEKENINTLDAKGEVLMTIMAALAQQESESLSANVRLGIQFRNQQGKVQINHNWFLGYTKDEDGKLVIVPEEAAVVQRIYAEYMDGKSFLQIKRGLEADGVLNGAGHKKWHESNIKQILTNEKYIGDALLQKTYTVNTLEKKRVANNGIAPKYYVEGSHEAIIDKDVFLRVQAEIARRANILADGKKRIYSSRYALSSIVFCGHCGDIFRRIKWNNRGCKSTVWRCVSRVLKKSSGIDCPARTIKEEVLQAAVVTAVNDAWSRKESILPELRENIRSVLEEDTDQKIAEVDAAVKLKQAELLDAGRDQEKIDEIGDAIMQLREERQQILTQAAMRKDVKDRIEDLATFLDEQTQAVTEYSDALVRRLIERITVYDEMLVVEFKSGLEIEVDA

SEQ ID NO: 10173 - protein, 523 aa, Unknown
  Description of Unknown: Integrase B10174 sequence
  cd00338,PF13408,IPR011109,IPR038109,PF07508, Coil,PS51736,G3DSA:3.40.50.1390,IPR006119,IPR036162, PTHR30461,PTHR30461:SF3,PS51737,IPR025827,PF00239, SM00857,G3DSA:1.10.10.2600,SSF53041
MEVVLYLRYSSDRQNEQSIEGQRHVCEKYCADMGYTIVGEYADRAMSAMKDTDKRLNFQRMIKDSEKHLWQGVIVYKLDRFARNRYDSATYKTRLKKNGVKVISATEAISDNPEGIILESVLEGMAEFYSKELSQKITRGMHESALKGNSCGGHISLGYKIENKKIVIDPKTAPIVRQAFEMYANGHTVAEICQTLNAAGYRTKSGAAFNKNSFHSMFRNKKYIGQYKFMEVVIDGGVPAIIDEETFNKVQAILAKKAQAPARGKAIIDYMLSGKVFCGHCGMPMVGTASTSKTGRKYFYYSCQGRRGHNGCEKTPVRKEFLEKAVVEDTLEMLTPEFIDYLADLAVKASEQERKENTLIPSLKAEISEYEKSIERLLRLVENGAESPTLSKRLNELEKAKRSAERNLAKEDSSYFLLEKEQIVFFLNQFVSGDKSDPEFQSRIIDMLVNSIIVWDNKENDDGTQDITITYNLTPKKERKITIKDLSKIECVFHPDKSTITSKYAPYIVGRMSFAINVKHRFE

SEQ ID NO: 10174 - protein, 523 aa, Unknown
  Description of Unknown: Integrase B10175 sequence
  cd00338,Coil,G3DSA:3.40.50.1390,PTHR30461,IPR006119, IPR036162,PF00239,SM00857,SSF53041
MASPFQQGDKVVAYCRYSEGDEQGLKNTSTEEQADAIRKFCDENRLQLVTIYADPFASGRSVHGRDHYLEMLSDLLHKKRTDIAGVVLWDYERYGRNYDQATLDAARLRMTGYKIYSLQQPITDNSPFAKVMEAMYMASAQNQSDMISADVRRALQNNFQKYKVIPRSCIPEGWIAVPVDMGTYSNGEPRIGYKAEPDPVLAPRIAKAIVMRMKGATLDEMKTIIGGIFSNKQRIYMKRLMARPLLFGQMTYGGTTLDDYCTSIIDKETFDKLQIYNKYAPREHERPQGHFSKNRPLLSDLLYCGVCGKKAFLNRRTAKGKLYETYYCNDKHVGFRRVILDKLVIEKGIELLSDEQYQKDVEDIIAGLQSPFSSNPNNNTLTTEIAKIDRKIERISSAIEDSDEPPATLVKRLSELEKERAELSSQLNAVDNEKAHENILKEFDTIRKSIIEILKNEKSTTDELRNALSLFIHSVVIYPENKVLIRHTLPGMASVASTASEKLQRPQSVLYCYSQLLETLCIL

SEQ ID NO: 10175 - protein, 522 aa, Unknown
  Description of Unknown: Integrase B10176 sequence
  cd00338,PF13408,IPR011109,IPR038109,PF07508,Coil,G3DSA:3.40.50 .1390,PTHR30461,IPR036162,IPR006119,PTHR30461:SF3,IPR025827, PS51737,PF00239,SM00857,G3DSA:1.10.10.2600,SSF53041
MKKPTTPTCSPKTAVAYARYSSAGQRDVSIEQQLADIRAFAKREGYTLVHEYADHARSGFKNTSARTAFQSMMAAAESGSFDTVISWKVDRFGRNREESALFKGRLRRFGVKVLYAMEPIPEGSAGVLLEGMLEATAEWYSRQLSENVTRGMTDNAHRCLYNGTRILGYKRGPDGRYAIDPEEAGVVRHIFDLYSRGYSAARICRILNNEGLKTSRGKPFQLEGMLRIIRNERYTGVYIWGDIRVPDGMPAIIDRSTFEEAQRMIKKTARHIEQGVGDYLLTGKAFCGYCGAAMIGDSGTSKDGTRHHYYSCQGHKARKGCKKKSIPKDRLESIVINYVMDSVLAEENIQATVDLIMALQAEEMKSSPLAAMESEYAEITKQIDNINNAIAAGIWNSSTSAKLKSLEDSADNLRVSIEMMRFSQAQLMDRDRVEFFLRQFTKGDRDDPDFRRHVIETFVNSVYVYDDHLKIVTNNHEGNQRFPLEALPDDSGPDLSCSDKLNCSVPIVTHPNTAVTIFRIAI

SEQ ID NO: 10176 - protein, 522 aa, Unknown
  Description of Unknown: Integrase B10177 sequence
  cd00338,IPR011109,IPR038109,PF07508,Coil, PS51736,IPR036162,PTHR30461,IPR006119,G3DSA:3.40.50.1390, PTHR30461:SF3,PS51737,PF00239,SM00857,G3DSA:1.10.10.2600, SSF53041
LTVFEKNNAIEAAFSKDIYAMYLRKSRSDDPDESVEETLDKHKRILTDLAARKGLFIGKIYAEVVSGAESVDARPEIQQLIQDCYAGLYRGIIIKEVTRLSRGSQGDAQKIMDCLKYSRMNNGVLVVTPTKTYDIAHNSDDEEYMEFELFMSRREYKMINRRMQSGKDQCIVDGEYMASYRPYGWNIIREGKKRTLTPNPEEYDIGKMMYAWKIEGVTCYKIAQRLTTMGVPTYTGESQEWSKETVKTFLQNPVNMGKVRWNDRMQIKVMQNGKLKTSRPRTSHSDHYMLYDGIHKDKAMVTEEEWKLANKDFKPDRTKANLKLTNILAGLLCCPKCGKMMHYQSNAHRPGTAARFCHPPVQSCKVKSALAEDVLKAVAHSLRMYIEDFELKINGLPSVSADSVILQIEALNKELRKIQRKLDKLFDDYEDEIYSANEFVERKAKHNERIVAIKEQIAALEDTIPEKEEYEDKVMKLTDALNSLEDDSIEAEDKNRYLKEIVDKIEFSRENGLEFILDVYLK

SEQ ID NO: 10177 - protein, 522 aa, Unknown
  Description of Unknown: Integrase B10178 sequence
  cd00338,PF13408,IPR011109,IPR038109,PF07508, Coil,PS51736,IPR036162,IPR006119,PTHR30461, G3DSA:3.40.50.1390,PTHR30461:SF3,IPR025827,PS51737,PF00239, SM00857,G3DSA:1.10.10.2600,SSF53041
LISLKSQREAIQKYCKEQGWVVVQDIISDTASGAILNRPGLHKLRKLMRDKALDTVIAYAVDRLSRNQNHVGILLDEAETHGVTLDFVTEKFESNPMGRMVLALRSFMAELEREKISERTGRGKIERAKAGKIPHGTNIGCYGYIYSKDTGVRTINEEQAVVVRWMFEQSASGKSTHYIANQLAERGVTSLSGKLWNPRTVLNILRNDVYTGRTYTGRREWIKVDGKRSRTMKTDPATWVEIIGASPRIVSDELFAAAAQRLDNPHFRPVSRKGRDFLVTGFLSCAFCSSPMSGHTVKGKYGPHHYYRCAGTLGAHYRPKICKAKELPAIPIEEHVWGDIKTILDNPDLILLQLASQDGVNESLTAEIKLKEKRLDRLDAEQVLIIRAYRDPNLDKAKIEQETALLKKQKEMLSKDVTELRLRQRGLKRSAENQAAAVEHVRAMRQALGSFDYEMKRLALAALDVKVVITPGEVPSIQVQTSLRTEKFTTIGQTSACSSHGSETVTLITGQASWITRKWLPA

SEQ ID NO: 10178 - protein, 522 aa, Unknown
  Description of Unknown: Integrase B10179 sequence
  cd00338,IPR011109,IPR038109,PF07508,Coil, PS51736,G3DSA:3.40.50.1390,PTHR30461,IPR006119,IPR036162, PTHR30461:SF3,PS51737,PF00239,SM00857,G3DSA:1.10.10.2600, SSF53041
VGGRAAIYARFSSHNQRGESIEIQVEKSRAYCAENDLRVVATYCDFAQTGTNTDRAEFQRMMADAKRGLFDFVVIYKVTRIMRNRDEMAMARIMLRRCRVEILYAGEDISDGSAGVLQLGMLEVLAEYESALDGERIRDGIQKNAERCMANGCVRYGWDIVDGRYVVNEEEAAAIRLGVRMVLSGKSVADVVRAWEPYRTKRGGKWRFQTVRRILMRRENGGEYRYAGVVVPGGMPAIVPMDDEERVIRMLEDSHRPRAKTEAWDFPLTGKLYDGRDGGLMTGTSGTGKSGRPYHYYRCRSCGRTVRRDVVEKRVADAVREALGSAGSRERIARMLADAEEERADEKPLSETIKGELTKIETAFSNIWAAIESGIAPPGGKERIDALKQRQALLKDELRTAEALEAARLDYDRALFWLEGMAAAEVDDAQLLRTFVARVVLGGPDDDDGLRVAFTFDDSAGLGDNPSLPDAIGPGGEVFDRMNASSTNSYRQVDTYIYLPFYSQSVPRRIELCAGRGRKENA

SEQ ID NO: 10179 - protein, 522 aa, Unknown
  Description of Unknown: Integrase B10180 sequence
  cd00338,IPR011109,IPR038109,PF07508,Coil, PS51736,G3DSA:3.40.50.1390,IPR006119,PTHR30461,IPR036162, PTHR30461:SF3,PS51737,PF00239,SM00857,G3DSA:1.10.10.2600, SSF53041
VTVFETNDIIETSMPKMDVYAIYLRKSQSDDPSETVEEVIKRHKDILSQHAARRGLYIGEIYQEVVSGENIDARKEFQRLIKDCYAGKYRGILVIEITRLSRGNQGDAQVVLDMLKFSNNNRGVLVVTPTKTYDVANNSDDEEYMEFELFMSRREYKMITRRMLRGKEQAIVEGQFMNSHRPYGYNIVKTKKFRTLEPNPEEAPIIKQIFEWTVKDNMTAYEIAKRLDAMGVPTYTRSAEWSRETIKAFLTNPVYVGRVRYNDRMEVRKMVDGKIVKSRPRSNHTDRYMEYEGLHKAHALVDEETFKAASSRFYSDRTKGELELKNPLAGILYCPNCDKAMVYQGFDKRPNVAPRFRHAQSNNCKVKSVIVTDVLDAVIHSLKLYIEDFEMQSDNTQTIDEAAIAAQVDTLNKELRKSERILAKLFTSWEDETISDNEFVQRKAVHNERIASIKQQIEALEDTIPQHEELEDRIIQFREVMDALKDDTLSAEAKNMALKSIIERIYFSRENNAEFFLDIQTK

SEQ ID NO: 10180 - protein, 522 aa, Unknown
  Description of Unknown: Integrase B10181 sequence
  cd00338,PF13408,IPR011109,IPR038109,PF07508, PS51736,IPR036162,IPR006119,G3DSA:3.40.50.1390,PTHR30461, PTHR30461:SF3,IPR025827,PS51737,PF00239,SM00857, G3DSA:1.10.10.2600,SSF53041
MGNVMLIPARRQVGNTARKQEDEKPKLRVVAYCRVSTDSDEQATSYEAQVEHYTEFIQKNADWEFAGIYADDGISGTNTKKREEFNRMIDDCKDGKIDMIITKSISRFARNTLDCLKYIRQLKDMNIPVQFEKESINTMDAKGEVLITIMASLAQQESQSLSQNVKLGLQYRYQQGKVQINHNRFLGYTKDADGNLVIDPEQAEIVKRIYREYLEGLSMDKISAGLEADGILTGAGKPKWHTSTINKILRNEKYIGDALLQKTYTTDFLNKTRVKNNGIVPQYYVEGNHEAIIPKDIYLQVQEELVRRRVVKTSANGKKRSYSCNHCFSQMIICGECGEMFRRLHWNNRGCKSIVWRCISRLEPTGQECHARTVNELVLQDVVVAAINQMLGDKSGYQAQLQLNIAAVIRASQATSLDNIDSKLMALQQELLQKANSKEAYDEIADEIFRLRELRQQTTVDTAARDEQIKRINDLQDFIAQQTAHLTEFDESLVRRWVKQITVWDDHFTIELKSGVSIDIDA

SEQ ID NO: 10181 - protein, 521 aa, Unknown
  Description of Unknown: Integrase B10182 sequence
  cd00338,PF13408,IPR011109,IPR038109,PF07508, PS51736,IPR036162,PTHR30461,IPR006119,G3DSA:3.40.50.1390, PTHR30461:SF3,IPR025827,PS51737,PF00239,SM00857, G3DSA:1.10.10.2600,SSF53041
VVRITKIEATQSFATQQKTRVAAYARVSTDSDEQLLSLETQKEHYETFIKDHQDWEYAGLYYDEGISGTKIEKRDGLLRLLKDCEDGKIDRVITKSISRFSRNTTNTLEMVRNLSKLGVYIFFEKENIDTEHMSSELMLSILSSIAESESRSISENSKWSVKRRFEEGTFIISYPPYGYANIDGEMVVVPEEAEVVREMFCMALSGMGSHIIANTLNERGIKSKKNCRWHASTVKGILRNEKYTGDVIFQKTFTDESFNRHTNYGEENMYLCKNHHEAIISHETFDMVADAMARRGQEKGNGGDTDRYQNRYSLSGKIICGECGSTFKRRNHYKPSGDYIAWSCRGHLDDKDSCSMLYVKDDVIKLAFVRMMNKLQVGRQQIMKPFVDGLRGFNNRDRLHQINELESKIESNSEQQQVLVNLMNAGYIEPDIYHAEHNVLVLEADALVKEKQQLSQSISGDLNHLTEAEKLQRFLAKMEDITEYDADLFAEYVENITVQDRETFTFNMKCGLKLTERVVLE

SEQ ID NO: 10182 - protein, 522 aa, Unknown
  Description of Unknown: Integrase B10183 sequence
  PF13408,IPR011109,PF07508,PS51736,G3DSA:3.40.50.1390, PTHR30461,IPR036162,IPR006119,PTHR30461:SF3,PS51737, IPR025827,PF00239,SM00857,cd03768,SSF53041
MRIFIYARKSVFSDKSDSVDNQLRMCREYCDAHFPDAERTYCEYSDEDFSGKNTDRPDLKRMMDRISEADMLIVYQLDRLTRSVRDFSNIYQILNDNSVSFVSVKEAIDTSTPIGRAMMYIIVIFAQMERETTAARVADNMLGLAKKGWWTGGNPPIGYIRTRVEQDGRRHVLIVPEEEGAKYVRWLFSFFLRGGYSLQGCETALKHQGVRAPGGGFLSTVQIYQILTSPVYAPATQEVYDYYAARGCRMDDGSPRELWDGSVGVMVYGRTSEASGKHRKMPPEAWTVCLGHHEPIIDAETWLAVQAQMGHNKIERKKKHPIRLLKGTLRCGCCGTLMQVSYKQKADGYSAWYYCLKRMRQGPEACPMGHIKCELLDEKILDVFRQYEADAATIRAAVIREDEEREAIDPEPIRAKLRGAETRLARLTAMLGECSSEAQEKAVFAEVGRQAEKVEALKAELSDVLRAETRRAMDEADIDRRVREIQEMIRGLDGFDAEERNAIVRKVFRVCTWDGETLRLGI

SEQ ID NO: 10183 - protein, 521 aa, Unknown
  Description of Unknown: Integrase B10184 sequence
  cd00338,PF13408,IPR011109,IPR038109, PF07508,Coil,PS51736,IPR036162, IPR006119,G3DSA:3.40.50.1390,PTHR30461,PTHR30461:SF3, PS51737,IPR025827,PF00239,SM00857,G3DSA:1.10.10.2600,SSF53041
VKKITKIDGVQNNSTIKKELRVAAYCRVSTGSDAQLESLETQKIHYERYINSREDWKFAGLYFDEGITGTKAEKRPELLRLITDCEARKIDFVITKSISRFSRNTTDCLALVRKLQSLNIPIFFEKENINTGSMESELFLAILSSMAEGESASISENSKWSIKRRFQNGTFKLSYTPYGYDWDGANMIINPAQAAVVKRIFADILSGKSTNAIADELNAEKIPSKKNTNWTSSTIRGILANEKYTGDVIFQKTYTDENFNRHTNYGEVDQYMASDHHEAIISHADFEAANALVSQRALEKGVKKGSDKYQKRYAFSGKIICGECGDTFKRRIHTCTTYKYVAWACNTHLKDKSTCRMKYVRDNDIKAAFVTMLNKLIYGHRLVLVPYLKALENFSGDEALQRIQHLELLLDQNSEQRETLTKLMAQGYIDQILYNQETNALLLQAETYRSDIEAITICMTGDSAKVTETNLLLHFVSHADMLTTYSEELFESYADHVEITGRNEIKFVMKCGLTFTERIGD

SEQ ID NO: 10184 - protein, 522 aa, Unknown
  Description of Unknown: Integrase B10185 sequence
  cd00338,PF13408,IPR011109,IPR038109,PF07508, Coil,PS51736,IPR036162,G3DSA:3.40.50.1390,IPR006119, PTHR30461,PTHR30461:SF3,PS51737,IPR025827,PF00239, SM00857,G3DSA:1.10.10.2600,SSF53041
MADTPKLNAAFYGRYSAGPNQTESSIEGQRRECYARAKSQNAVIRKDYIDRHISGQTDQRPQFQQLMKDVKKGLYNVVYVYTIDRFSRNKYDIAKYKNEMRKAGCRLISAKEYVPAGPEGIILESVLEGMAEYYSKELSRKVSRGMYESALKHRHIGGVVPFGFVLNKNKKYKADPVKAPIVREIYERYVKGEPAVEICKSLNNRGIATSLDKKFNKSSLNRILSNPKYIGTYTYKRAYIDEITQEKKTELIEFKNVIEPIISEELFIKAGQRMELNKRTSKRNKNKPQVEFLLTGKLFCSKCHAPYTGDSGTSKNGNSYYYYTCANKKSKRGKEACRSKSFPKDKLEEFVAQYTRDDILSTEVINWLAEQIVSLQGEQKDDLQIRTLIQQKKEVESKIQNIMLAIENGIFTPTTKDRLEALEESKRNLEYNIDVERFKNDAPMETKDSIIFYLNQFKNGDIKDLDHQRQIINSFIETIILDEEQMIIQYRYSDAANGTREIAIKNTFDVFECVLNGGRYVT

SEQ ID NO: 10185 - protein, 522 aa, Unknown
  Description of Unknown: Integrase B10186 sequence
  cd00338,PF13408,IPR011109,IPR038109,PF07508, Coil,PS51736,IPR036162,PTHR30461,IPR006119, G3DSA:3.40.50.1390,PTHR30461:SF3,PS51737,IPR025827,PF00239, SM00857,G3DSA:1.10.10.2600,SSF53041
MKKSAAPACNPKTAVAYARYSSAGQRDVSIEQQLQDIRAFAQREGYNIVHEYADHARSGFKSATTRDAFQAMIRAAKTGTFDTVLIWKTDRFSRNREDSARYKGQLKRLGIRTIAAMEPIPEGSAGILLESMLEATAEWYSQTLSENVSRGMYDNARRCLHNGVRVLGYSFGDDGHYVIDPEGASIVRRIFDRYVAGYSAAMIARELNGQSLTNINGRPFTTTNILWTINNERYIGIYHWGDVRIPDGMPAIISNQQFEEAQRMKTKTSRHIEQGTVDYLLTGKAFCGHCGAAMIGDSGTSRTGDRHYYYSCQAHKARKGCDKKSIGKEYLEDAVINFILDHVLQEPEINRIADAVTKAQAEAVKSSPLAALKSDLAEVKKKIANVNGAIAQGIYTSSTLDMLRDLEAEAADIQKSIDFVSFSESQLIDHDRVIFFLRQSVKGDRSDPGFRKYIINTFVNAVYLFDDHFKLVINNVDGNLRYPLDALPDGSDSESFGPPNTTYPNHRITIYVIPLEPDKKRA

SEQ ID NO: 10186 - protein, 522 aa, Unknown
  Description of Unknown: Integrase B10187 sequence
  IPR038109,IPR006119,PS51737,PF00239,G3DSA:3.40.50.1390, PTHR30461,IPR025827,SM00857,G3DSA:1.10.10.2600,SSF53041, IPR011109,PF07508,PS51736,mobidb-lite,cd00338, PF13408,Coil,IPR036162,PTHR30461:SF3
MPRKKKLQEVGGLRLVAYYRYSNGGQQTEQSIEGQRRDCEAYAKAHGYKIVHEYIDRHISGKSDSRPAFQQMISDSDSHLFDAVICWKTDRLARSRYDSIIYKTRLRRNGVKILYAAETVVDGPEGIIIEGLMESLAEYYSAELAQKLRRGQRESALKCIALGGNRSFGYDIGPDKHYCINEKQAPAVRYIFEQYAAGATAADIVRELTARGYRTSRGNPFNKNSICRIITNEMYLGVYKYADIRIEGGVPAMIDRELFNRCQTQLAFNRAHGGGKGAPRADYVLVGKLDCGLCGHAMKGASATGHTGSKHYYYTCTQHVEKKCPKTSIEKNYLEQIIVDGVAKYVLTPEKISQIVDCMMELQAKEQEPKGNPEKDALEAELAECRRKQNNILEAIEEGGSARLAARLRTLEEQEAQLTFALGEINNAPTPPQFSREALTFMFEQFRREEDEVDEEYRRRILDTFVSSILLYEDLAEVKFNITDQKTGDFERVILPISANKKPPEDDDITSNSEGSTALRLV

SEQ ID NO: 10187 - protein, 521 aa, Unknown
  Description of Unknown: Integrase B10188 sequence
  cd00338,PF13408,IPR011109,IPR038109,PF07508, PS51736,G3DSA:3.40.50.1390,IPR036162,IPR006119,PTHR30461, PTHR30461:SF3,PS51737,IPR025827,PF00239,SM00857, G3DSA:1.10.10.2600,SSF53041
VKKVTKIDGVQKNTAINSKLRVAAYCRVSTGSDAQLESLEAQKSHYEQYINSREDWQFAGLYFDEGITGTKAEKRPELLRLITDCEAKKIDFVITKSISRFSRNTTDCLALVRKLQNLDIPLYFEKENINTGSMKSELFLAILSSMAEGESASISENAKWSVKRRFQNGTYKLGYTPYGYDWYGKNMIINPEQAAVVKRIFADILSGKSTNAIADELNAEKVPSKKNNHWTASTIRGILANEKYTGDVIFQKTYTDENFNRHTNYGEVDQYMAPDHHEAIISHSDFDAANALVNQRAAEKGIEKGSDKYQQRYAFSGKIICGECGDTFKRRIHTCNTYKYVAWACNTHLKDKKSCHMKYVRDDEIKVAFMTMLNKLIYGYRLVLIPYLKVLENSSGDEAIQRIQHLELLISQNSEQREALTKLMAQGYIDQILYNQETNALLLQAETYRSDIEAITIGMTGDAAKVTETNLLLHFVSHTDMLTAYSEELFENYADHIEVISRNEIKFAMKCGLTFTERIGD

SEQ ID NO: 10188 - protein, 522 aa, Unknown; identical to SEQ ID NO: 9746
  Description of Unknown: Integrase B10189 sequence
  cd00338,PF13408,IPR011109,IPR038109,PF07508, Coil,PS51736,G3DSA:3.40.50.1390,IPR006119,IPR036162, PTHR30461,PTHR30461:SF3,IPR025827,PS51737,PF00239, SM00857,G3DSA:1.10.10.2600,SSF53041

SEQ ID NO: 10189 - protein, 522 aa, Unknown
  Description of Unknown: Integrase B10190 sequence
  cd00338,PF13408,IPR011109,IPR038109,PF07508, Coil,PS51736,G3DSA:3.40.50.1390,IPR036162,IPR006119, PTHR30461,PS51737,IPR025827,PF00239,SM00857, G3DSA:1.10.10.2600,SSF53041
MDVVLYMRYSSDRQNEQSIEGQHRVCKQFCDANGYNIVDVYIDRALSAFHDTTKRVEFQRMITDSEKHQWQGIVVYKLDRFARNRYDSAIYKAKLKKNGVRVISATENISDNPEGVLLESVLEGMAEFYSKELSQKITRGMYESAHKCHSIGGHIPLGYKIVDKKLAIDPLTAPIVREAFEMYAEGATVSEICDVFNNKGYKTAKGSEFNKNSFRAMFKNERYIGVYTYKDLRIEGGVPAIVDNDIFETVQKRLKTNAKAPARGKAVVDYVLSAKLFCGHCGKPMNGESGTSHTGKRHHYYACSSRKTFHNCDKKSIQKDYIEYVVAQKVQELLTPETIDYYAECAVKACQDEIANSTLLPSIRNQIKEIDKSINRLIRMVEQGAESHTLTARLNELEKEKKAAEKRLLKEQSTIIELDKEIVVYWLSKFLQGDIEDADFRRHLIDTLVNSVFVYDNPDGTTNLDIACNLTSGKHLKVTLSDVKSNGFGFGVLESTIKKRTPSGVLFWCVIRGDLNPMRVFA

SEQ ID NO: 10190 - protein, 522 aa, Unknown
  Description of Unknown: Integrase B10191 sequence
  cd00338,PF13408,IPR011109,IPR038109,PF07508, PS51736,G3DSA:3.40.50.1390,PTHR30461,IPR006119,IPR036162, PTHR30461:SF3,IPR025827,PS51737,PF00239,SM00857, G3DSA:1.10.10.2600,SSF53041
MIVALYARYSSDNQREESIVAQLRACREYCKRKGYSIVHEYADEACTGTNDNRPQFQQMLADAEAGLFEIVVAHKLDRIGRNAYDFYKNSHRLQAAGVKMEFAAQEIPDTPEGGMMKAVMAGMSEWYSANLSREVKKGKRENLLAGKAAGGVPLYGYDIGPDKRYIINEAEAVAVRTMFDMYAGGSSYGEILEWLNSHGYRTKRGKPFGKNSLYDLMKNRRYIGWSVGGRHRRTGKPRNSHAPDDDGVVIVKDVCPVIIDEKLFERVQKRMEANRHKNGGRQKAKVPYLLSGYVFCDVCGGAMVGGATTNTKGVRTRYYRCETHMRKGKTVCANRAVNADDLERDVLDQLRAVLYDEGVLDTLVEKVQVEYAKLQKNEKASVDMMTEARDKARKQLDNFYDRIRAGVPFDEIDEAEFQRTKDAFRTAEHNLKQIETRGHLPKMPPAKIKEYIQTTFGGMVNEKSTINYRALLENLVDSIRVAPSTVTVKLKVRCSWCARSDVGSIAFIIDFVISRPASRRSA

SEQ ID NO: 10191 - protein, 522 aa, Unknown
  Description of Unknown: Integrase B10192 sequence
  cd00338,IPR011109,IPR038109,PF07508,Coil, PS51736,G3DSA:3.40.50.1390,IPR006119,IPR036162,PTHR30461, PTHR30461:SF3,PS51737,PF00239,SM00857,G3DSA:1.10.10.2600, SSF53041
MKAIGYIRLSDEDQSNYSIEGQERQIKEYCNKNNLELLKIYQDNGENSYTFDRKAFGTLEKEIKQAQFLIVYHLDRFSRNMAEAMLKVSQYLERGIRIRDVTEELTMDDYDPNVFMMRTLKFMQAEMELHNIRRRTRKGMVDAALAGRHANVAPVGYNNARDERNKPILTIDEEKGFIIRIIFREYLNGMGVEELRRMASRYGFKHKGNSAIQRILANPVYAGFVKVPATKTQPAHLVKGLHTPLISEQDYWLVQERLQGKTMSIQNREDVPLRGVLQCSCGRKFTAGNSKGKTRYYWYYVCHECRQNLSAKCLHKQFDELLDNLSFDPKDLQLLKQKLSAKLNDYIKNRGDKIRQAEKQLKLVEEKISSVEIKWLTKPDVSEASYNKVISELRADQSRLYKEITKANTNQQAYWDKMNNLLLILSDLRSHFEKLELEKKHQFINWVFDSSLSHDGEIYRTPFINDLFAHNTLTLKEKGLLEIVAPVIKLGETPIRTRDGSSIEHFPDILTHLDRLLAIFAA

SEQ ID NO: 10192 - protein, 522 aa, Unknown
  Description of Unknown: Integrase B10193 sequence
  cd00338,IPR011109,IPR038109,PF07508,Coil, PS51736,G3DSA:3.40.50.1390,IPR006119,IPR036162,PTHR30461, PTHR30461:SF3,PS51737,PF00239,SM00857,G3DSA:1.10.10.2600, SSF53041
MTNLHMPIGSARVYQDRNRPRKAVFYGRVSTEHEAQLSALENQMQWYDDQLRYHPNWMLVERYIDEGITGTQAKKRPAFLRMIEDARAGKFDLIVTREVCRFARNTVDTLVTTRELKNIGVEVYFVEDNIWTMDGDGELRLTIMATLAQEESRKVSERVKAGQHVSREKGTLYGSGNILGYDRAGDTYVINEDQAETVRMIFDMYLHEGIGTGKIAQRLTELGRLNASGLNKWSHAVISRILNNQTYMGVMAYGKSYSNNYLEQKRINNRDKTTYICVEGNYPAIVNQEDWYKAQEIKAGRMMESFNPETGKKVRHAVPEKRDLWGTRLRCSCGCSFRKNRWHRNINAPNSYGYQCYNILNNGSAKQRRAAGADDTGYCDQPMIADWKLELMGKAILEKYLGQHQELIQYTIDLIQQCGRNRKPRESNIANIHARMEQIRIRKERLLDMRTGGELTKEEFLAQRRKLDAELQKLTMKAESVNVIQPQERLIEEALQEMLDFSHPKPNPALIRKFVSKIVPDG

SEQ ID NO: 10193 - protein, 519 aa, Unknown
  Description of Unknown: Integrase B10194 sequence
  cd00338,PF13408,IPR011109,IPR038109,PF07508, Coil,PS51736,IPR036162,PTHR30461,IPR006119, G3DSA:3.40.50.1390,PTHR30461:SF3,PS51737,IPR025827,PF00239, SM00857,G3DSA:1.10.10.2600,SSF53041
LKKVTKIAETASSKVKLKKIRVAAYCRVSTDSDAQLESLEAQKTHYENCITSRDDWEFAGLYYDEGITGTKKDKRPELMRLIGDCKAGRIDFIVTKSISRFSRNTTDCLELVRKLLDLNIPIFFEKENINTGSMESELFLAILSGMAESESVSISENSKWSIQKRFENGTFKCSYPPYGYDWDGEQMVINPEQAAVVKEIFASLLSGKGTHAIADDLNRRGVSSKRGGRWTATTIRGMLSNEKYVGDCLFQKTYSDSQFVRHNNHGEQTQYMVTDHHEPIISRDDFEAAKAFISQRASEKGVTKGTDKYQNRYAFSGKIICGECGDTFKRRIHSCTDHKYIAWCCNTHIKDMDRCHMLFVKDDALKQAFTTMLNKLIFSHRQILKPYLESLKTSSSDDSLHRIQQIQTLLAQNTEKRETLTMLMTQGIIDPVLYSQETNELLSQADSFRDEIEALKNEVSGDVNKVTETTALIHFAEKSAMLQEFDKDLFDRYVKRIIVHSRNDIRFELKCGLTLRERK

SEQ ID NO: 10194 - protein, 520 aa, Unknown
  Description of Unknown: Integrase B10195 sequence
  cd00338,PF13408,IPR011109,IPR038109,PF07508, PS51736,G3DSA:3.40.50.1390,PTHR30461,IPR036162,IPR006119, PTHR30461:SF3,PS51737,IPR025827,PF00239,SM00857, G3DSA:1.10.10.2600,SSF53041
LTTITKIEAKKQKTDCKLRVAAYCRVSTSTDEQLESLDAQRKHYDQLIRRNREWTYVGIYYDEGITGTKKDKRPELLRLLEDCREGKIDLVLTKSISRFSRNTTDCLEMVRALSSYGVGIFFERENINTLTMEDEFILTVLGSLAENESISISENEKWSIQKRFEKGTFRQGMAPYGYRQEGTTLVINDDEAKVVRFIFDEAYRGIGAHKIAKELNEKGIPSMLRDRWHSGTIKQMLQNERYVGDALYQKTYADENFVRHANHGERGMYLHQGHHEAIVPREEFDRVQELIAQHRSERGIGIDTDKYQNRYVFSGKLICGECGGHLKRKIIQGRVEGPLIAWVCQTHIQDKTKCSFISIEDASIRAAFTTVTNKLIFSQNELLVPFVQGIQGINQSDVGDEIAKINKKLEENTEKSQKMAILASEQLLDPLVFRKAQAELSAERADLNSRKAVLGVQLQQNYHGISESGKLLKKIRGMRITEDFDEEFFTEFIKAVHVYSRTELGFEFTCGLVFREEVNR

SEQ ID NO: 10195 - protein, 520 aa, Unknown
  Description of Unknown: Integrase B10196 sequence
  cd00338,PF13408,IPR011109,IPR038109,PF07508, Coil,PS51736,G3DSA:3.40.50.1390,IPR036162,PTHR30461, IPR006119,PTHR30461:SF3,IPR025827,PS51737,PF00239, SM00857,G3DSA:1.10.10.2600,SSF53041
LKKVTKIAQNTANLTEQTKLRVAAYCRVSTDSDEQLESLDAQIKHYESYVNANPEWEFAGLYYDEGISGTKKEKRPELLRMIADCEDRKIDLIVTKSISRFARNTTDCLELVRKLLDLDVFIYFEKENINTGSMESELMLSILSGLAESESVSISENNKWSIKRRFQNGTYKISYPPYGYDNVDGEMVINKSQAKIVRFIFAEILSGKGTHKIANELNRRKVPTKKGGRWTSTTIRGMVSNEKYTGDAIFQKTYTDEHFNRHRNDGEKEQYLVRNHHEPIVSHEIYEAAQLAIEQRCKEKRIEKQSEKYQSRYPFSGKIICAQCGGTFKRRTHTSGKHPYAWCCFTHIQDKQKCSMKYIPEPDLEYAFVTMMNKLVFGHEAVLKPLLVSLRGMNSDDTLENIRVIDIKLEENEKQRNVLVGLMTKKYLEPAVYNKSNNELLQEAERLRRQKESITRFLNNDFQSLNAVSALLQYVSKESMLTSFDGELFTRFVERIHVYSRTEIGFELKCGITLKERLVR

SEQ ID NO: 10196 - protein, 520 aa, Unknown
  Description of Unknown: Integrase B10197 sequence
  cd00338,PF13408,IPR011109,IPR038109,PF07508, Coil,PS51736,G3DSA:3.40.50.1390,IPR006119,PTHR30461, IPR036162,PTHR30461:SF3,IPR025827,PS51737,PF00239, SM00857,G3DSA:1.10.10.2600,SSF53041
LKKVTKIAQNTTNLTEQTKLRVAAYCRVSTDSDEQLESLDAQIKHYESYVNANPEWEFAGLYYDEGISGTKKEKRPELLRMIANCEDRKIDLIVTKSISRFARNTTDCLELVRKLLDLDVFIYFEKENINTGSMENELMLSILSGLAESESVSISENNKWSIKRRFQNGTYKISYPPYGYDNVDGEMVINKSQAKIVRFIFAEILSGKGTHKIANELNRRKVPTKKGGRWTSTTIRGMVSNEKYTGDVIFQKTYTDDCFNRHNNNGEKEQYLVKNHHEPIISHDDFEAAQSIIEQRGKEKGLEKQNTKYQNRYPFSGKIICGQCGGKFKRRSHSSGRHRIAWCCSTHIADIKKCSMKYVPESDFEYAFVTMMNKLIFGHAVVLKPLLVSLRGMSSDETLESIQAIDKKLEENVEQRNVLVGLMTKKYLEPAVYNKSNNELLQEAERLRRQKESITRFLNNDFQNLSEVSALLQYAAKASMLKGFDGELFARFVERVLVYSRTEIGFELKCGITLKERLVR

SEQ ID NO: 10197 - protein, 522 aa, Unknown
  Description of Unknown: Integrase B10198 sequence
  cd00338,IPR011109,IPR038109,PF07508,Coil, G3DSA:3.40.50.1390,IPR006119,IPR036162,PTHR30461,PF00239, SM00857,G3DSA:1.10.10.2600,SSF53041
MVLGMKTQAIATHRQAIIWGRFSSAKQEDGDSEASQNRYNRECAKRKKIQVIAEHFDRGISVKAGPTPNFRKILKDLPTGVGIICRDLDRISRGHVIDAMAYLKNEIVSKGHFVITSTDDIEYNEETINQTSTLVVGSTKATIAYGENEKRIRGVRDAKKAAYQLAREGKPAPLGPWIPPHLKYDFETKQYVQRHDKGSPLPNKQVIEKIFNAYVKDNGVVAICKMLNDENIPTFRFKKAKGWSQATIWQLLRYEGLIGVLNIKGERIPKAFPPAISEDLFYKVQRILGTHKHGNYSAENVRNVFRGICHCKKCGVSMRVLNGDYLQCRGSMLGKCDINQVVKWTEMEMALLYWFVEEAGPSLLKRDNDTQSAIQTLDAKKNTLARRIGATIDLLDAGLAVNEVRKRLERLEAEKRDIEAAITTQKAKASDEKAMPETFGALYDYVERAMDGDKAVRKEIAAIVPTIVKDVRVDLSDKWFPSFDVELVNGTIHEWQYDVQEFAIDTKGKYHVTEGGYVGKAE

SEQ ID NO: 10198 - protein, 452 aa, Unknown
  Description of Unknown: Integrase B10199 sequence
  cd00338,PF13408,IPR011109,IPR038109, PF07508,Coil,PS51736,G3DSA:3.40.50.1390, IPR006119,IPR036162,PTHR30461,PTHR30461:SF3, PS51737,IPR025827,PF00239,SM00857,G3DSA:1.10.10.2600,SSF53041
VRTRINKIDADEQILKLQRVCAYARVSSEKEAMLQSLSSQVSHYNKMISSNPKWQFIGVYADEGISGTKEDRPEFKRMVDDAKAGKIDLIITKSISRFGRNTETVIRTIREMNALGVDVYFESQNLHTLSTDGEFMLTLLASFYQEEARSVSENMKWRIKKDFEKGISWGARDFYGYKVVNKNFIVVPEQAEVIQRIFNLYIGGLGILAITKQLNQDGIKPMHSKLWSYGSILQILKNNSYTGDLILQKTYLENHLTKKKVKNNGEFHQYHVEDNHESIISKETFKETQTIRNQRANRFKTNVKRTTNAYPFTNKIKCGCCGGGYQHKTTPKHDFWICTTYNTQGKAFCSESRRIPEKSLYETLNEYLGTTSFDERKFNKKVNYMVAQKDNKIELHLLNGTVDEITWKEISRKDSWTPEMKEKARKNTKKANENRRVLKWEKLESYHQPSIH

SEQ ID NO: 10199 - protein, 522 aa, Unknown
  Description of Unknown: Integrase B10200 sequence
  cd00338,PF13408,IPR011109,IPR038109,PF07508, PS51736,IPR036162,IPR006119,G3DSA:3.40.50.1390,PTHR30461, PTHR30461:SF3,IPR025827,PS51737,PF00239,SM00857, G3DSA:1.10.10.2600,SSF53041
MAHARIYIRRSDDDQSTYSPEAQARECRRWCAEHGHEIVEPLYVDDDLSGKREDRPRFQQLLADAKADPGSLIVAHKFDRIARDTEALLRIIYKELLPRRVQVESVMERIDPYTPLGKMMLTVSGGVSTYHIDNLSTEVKKGLHEKAARGGWIGLPPYGYCSQYDYDRRGERVRGSDRLVPSDDADTARLIFNLYASGNHSDSSLRDELNERGVTLLHPKTGMRVPFQRDSIGGILRNPAYIGVVRCGRQWYDGAHAPLIDRSLWDRCQAIRARRTAQRGGRAPVRGTGGLLSEIAFCGLCGARLRWWMAGNHSKGRQGYYRCAAHVAYGRLACDAPMIQAKRIEALVLALIGDLDIPAHMRDQVIFEVNRRVIARATPVSPDQARTRRQLERLKADWRAGDRDDLDEATYRAERRRLEHVLMDVAPASQVEFDVPRALALLKDAPALLAASAMEQRRGILQQVVEVVWLQKDEVTAVRPSPLLLPLLVAADHLRVTSTGIEAAPRRSALWLAYGVSALSPV

SEQ ID NO: 10200 - protein, 522 aa, Unknown
  Description of Unknown: Integrase B10201 sequence
  cd00338,PF13408,IPR011109,IPR038109,PF07508, Coil,PS51736,IPR036162,PTHR30461,G3DSA:3.40.50.1390, IPR006119,PTHR30461:SF3,PS51737,IPR025827,PF00239, SM00857,G3DSA:1.10.10.2600,SSF53041
VRKVTRIDGNNALQAFKPKVRVAAYCRVSTDSDEQMASLEAQKDHYESYIKANPDWQFAGIYYDEGISGTKKENRTGLLRLLADCENKKIDFIITKSVSRFARNTTDCIEMVRKLTDLGVFIYFEKENINTQRMEGELVLTILSSLAENESLSIAENSKWSIRRRFQNGTYKISYPPYGYDYVDGKLFINKEQAEIIKRIFSEALDGKGTQKIADGLNSDKIPTKRGSHWTATTIRGILNNEKYTGDVLLQKTYTDENFKRHYNHGEKDQYMIKDHHEAIISHEEFEAAQEILRQRGKEKGVIKGSSKYQKRYPFSGKIKCAECGSSFKRRIHGSGNRKYIAWCCTKHIKDASSCSMKFIREDAIHQAFVVMINKLIFGHKFILRPLLQSLKKTNYSDNITKIQEMETKIKENTERVQVIMGLMAKGYLEPALFNTQKNELLKEAAILKEQKEAIKRAIDGSQTILVEVEKLLKFATKAEKQINAFESEIFENFIEEIIVFSQEEIGFKMKCGLNLREMLVK

SEQ ID NO: 10201 - protein, 522 aa, Unknown
  Description of Unknown: Integrase B10202 sequence
  cd00338,IPR011109,IPR038109,PF07508,PS51736, IPR036162,IPR006119,G3DSA:3.40.50.1390,PTHR30461,PTHR30461:SF3, PS51737,PF00239,SM00857,G3DSA:1.10.10.2600,SSF53041
MIAVGYARLSDKDSSSNSIKSQMRRIEEYCERNKLTLLKIFVDDGKSGWTFDRPGFIDLENFCKKEKSVQYLIIPHFDRFSRTDPIDAMVKERYFRDKLNVKVLQVSEPIDLDTNNPTYVIVRFMQAFASNEERNRIVDRTMTGMRYSLTQGRYCSMAPYGYKNSRDENGKPLIIPDEERAHLIKFIFREYLRGNGIEEVKRMAKVNGYTQGGKSAIARVLTNPVYAGMINVPAYKHTPARLVKGIHAPLISENDYWMTQEKITGKNHRTHNRDEVPLRGVLRCHCGRYMTAAPSKGKSGKHYWYYFCESHRKINLSANRLHAQFEDILDHLSIPENDLIILRDSAIQELNNYISDRTGELMRIGIQIEHIQKAIEAIEEKYLLQADITPAIFNKLVKVKRIELSELQAKQAALKTDTVEHYNRLYFLFSKLSDLKSQWLSLDLTAKQFFIKQVFGLNLTYRDGVYRTPFIHPLFALKGLSDRGLPLVIETKTATEVAVNLECAPGGNLLEHLLSLANVFAA

SEQ ID NO: 10202 - protein, 522 aa, Unknown
  Description of Unknown: Integrase B10203 sequence
  cd00338,IPR011109,IPR038109,PF07508, G3DSA:3.40.50.1390,PTHR30461,IPR036162,IPR006119, PS51737,PF00239,SM00857,G3DSA:1.10.10.2600, SSF53041
MDVNSTSPTAVTKIDVMLVVLYLRLSDARNETTSFADREAKLREHADRRGWTVLRVEVENDVTRGSSKSASAFKRRRVLQPDGTYAMRVWRPGFQAVLEDLKAGRAQALLTEDLDRAMRDPRDLEDLIDVVERHKCSADSLSGSLRFTAGGTDSEITMARIMVSMANKSSRDTARRVAAARERKATAGEWGGGIRPFGFLADGVTIDPVEAAEIVKACEQVTADVPLRQIAADLRRRQIPTVKGTRWTAEALRDILMRPRNAGILVYRPEADRRREGTTKRYYTRENEVGRAPWEPIVPEDTWRAVVAKLTDPNRAMKPGPANRWLGSGIYLCVCGTAVEVLQGTKRPPAYRCRNTGSGDGGKHTVRRVAIVDEYVIKTVVHILSRPDAADLFDSPMPADVNLGELRSQLTVLRERKKSFATDYADGLIDREAMLAGTARITHRMEEIQGVLASHTDRSPWASLIGIDDVRAVWDELSLGMQRQIVRTLITVTILPMPSRGRVPFDPASIRIEWVATRGARK

SEQ ID NO: 10203 - protein, 522 aa, Unknown
  Description of Unknown: Integrase B10204 sequence
  cd00338,PF13408,IPR038109,Coil,G3DSA:3.40.50.1390, IPR036162,IPR006119,PTHR30461,PTHR30461:SF3,IPR025827, PF00239,SM00857,G3DSA:1.10.10.2600,SSF53041
MQVSNNHPFSLNSPVVAYLRDSGHEDQELSVAQQEAAIRAWCEQNGLILTRVFIDEAAPGSSTVGRETFQALIGHFHNPACREAGVILWKYNRFARDIDDAQFYKADLRRRGYIIHSLNDSVPAGLDGRFFESAIDWMNARYLEDLSTDTKRGLHHIMDQHGALGGVPPRGFMREPVEIGLRRDGRPHIVHRWVPYPDLIDQVRLAFELRAMGASYAEITRQTKLYKNKNSWPTFFCNKIYIGVMEFGDRLIEDYCDPIVPKAVWDAVQARQKVLSRRNTMSVKSHPRRVASRFLLSGLAQCGLCGSPLNGDTATAKGIYRYDYYTCSRANRRGDCPATKIPRQALENSVLDSLSDYILEPNHIQELTTELENNASHAVEQVEQRKQDLNKKLSSVRRKIDNLVDVIADQGRSAGALHTKLTELEAEEGQLLAERVQLTPRAKKLRPTEEIQDLVNEIRGLRAENNTTRLRDILRGLIDRVEIKRDEDRISGTIWYFTPVLALGECPRRSPLHSLNFDFVLT

SEQ ID NO: 10204 - protein, 521 aa, Unknown
  Description of Unknown: Integrase B10205 sequence
  cd00338,PF13408,IPR011109,IPR038109, PF07508,Coil,PS51736,G3DSA:3.40.50.1390, IPR006119,IPR036162,PTHR30461,PTHR30461:SF3, IPR025827,PS51737,PF00239,SM00857,G3DSA:1.10.10.2600,SSF53041
MKKITKIEGNTANSFIKPKTRVVAYCRVSTGSDEQLVSLQAQKAHYESYIKANPEWEYAGLYYDEGISGTKKENRSDLLRMLSDCETGRIDLIITKSISRFARNTTDCLEMVRKLIDLGVHIYFEKENINTSSMESELMLSILSGLAESESISISENTKWAIQRRFQNGTFKISYPPYGYQNIDGQMIINPKQAEIVKYIFAEVLSGKGTQKVANDLNQKGIPSKRGGRWTATTIRGILTNEKYTGDVILQKTYTDSHFNRHTNYGEKNMYLVENHHEAIISHEDFEAVDAILNQRAKEKGIEKRNSKYLNRYSFSSKIICSECGSTFKRRIHSSGRREYIAWCCSKHISHITECSMQFIRDEDIKTAFVTMMNKLIFGHKFILRPLLNGLRSQNNAESFRRIEELETKIENNMEQSQMLTGLMAKGYLEPAMFNKEKNSLEAERESLFAEKEQLTHSVNGIFTKVEEVDRLLKFTTKSKMLTAYEDELFKNYVEKIIVFSREVVGFVLKCGITLKERLVN

SEQ ID NO: 10205 - protein, 521 aa, Unknown
  Description of Unknown: Integrase B10206 sequence
  cd00338,IPR011109,IPR038109,Coil,G3DSA:3.40.50.1390, PTHR30461,IPR006119,IPR036162,PS51737,PF00239, SM00857,G3DSA:1.10.10.2600,SSF53041
MWGRHSRYRLPMSTLADTTPGTQEQPLRAGIYGRASQDRSKRGRSVRDQIADCRRECSTRGWTVVDEYIDLDRSASRHARKVREDYTRLVADIQAGKLDMLVSWESSRVSRDLDVYVKLRNLCTDTGVLWCYNGTIYDMRKGADRTTTAIMAMMAEAEADSMQERSARTTRLSAGRGTPHGRIPFGYARRYDPDDGHLLGQVPHPVHADVVLDLFQRAADRETVRSLTATLCQHVPRASTRGLTYLLQNRTYIGLRSHFGQHVKATWEPIVPEALFWRVQEIIVNPERRTSRDTRALHLLSGIAMCGVCKENTPPDQPLPGLRLVRPGAQPRRVSRYCCKPGSHVATGAERLEAYVEEHLMVWFKSPEAATAFASRDDGALEEARGRAARIRVQLQEARAMAAEFDDTTGMPLLSIASLADMERRLAPMAARAEEDLRRLAAVGDPVLDQLLADPERAEAVWERLGMEKRRHAVRNLVNVTLHKAAAQGIRSLDESRVTLTFVSQPGFTSRPTIRRPPVEG

SEQ ID NO: 10206 - protein, 521 aa, Unknown
  Description of Unknown: Integrase B10207 sequence
  cd00338,PF13408,IPR011109,IPR038109, PF07508,Coil,PS51736,IPR036162, IPR006119,PTHR30461,G3DSA:3.40.50.1390,PTHR30461:SF3, IPR025827,PS51737,PF00239,SM00857,G3DSA:1.10.10.2600,SSF53041
VKKVTKIESVQNAKTVKQKLRIAAYCRVSTGSDAQLESLDVQKSHYERYITSRDDWQFAGLYYDEGITGTKTEKRPELLRLIADCEAKKIDLVITKSISRFSRNTTDCLELVRKLLSLNIPLFFEKENINTGSMESELFLAILSSMAEGESASISENAKWSIKRRFQNGTFKLSYAPYGYDWDGTNLTVNPEQAKTVKRIFSDVLSGKGTNTIADALNAEAVPSKKNGRWTSSSVRGILANEKYTGDVIFQKTYTDDNFNRHKNHGEVDQYMMANHHEAIISHEDFEAANALVDQRALEKGIQKGNDKYQQRYAFSSKIICSECGNTFKRRIHSCATYKYVAWTCNTHIDDKNACSMKYIYDEELKAAFITMMNKLIYSHKFLLKPYLKVLENSSGEEAVQRIQHLERLLEQNSEQRETLTKLMAQGYIDQILYNQEMNALLLQADSYRSDIETITTSMTGDAAKVTETAMLLQFVSHSEMLTEYSEELFEEFADHIEVQSRNEVRFILKCGLTFTERMGD

SEQ ID NO: 10207 - protein, 433 aa, Unknown
  Description of Unknown: Integrase B10208 sequence
  cd00338,PF13408,IPR011109,IPR038109,PF07508, Coil,PS51736,G3DSA:3.40.50.1390,IPR006119,IPR036162, PTHR30461,PTHR30461:SF3,PS51737,IPR025827,PF00239, SM00857,G3DSA:1.10.10.2600,SSF53041
MPRAITIVPKPPKLEQKKRVAAYARVSSGKDAMLHSLSAQVSYYSDLIQNHDDWLYVGVYADEAKTGTKESRADFQRLIADCRAGKIDMVITKSISRFARNTVTLLQTVRDFKAWGVDIFFEEQNIHTMSGDGELMMTILASYAQEESRSASENQKWRIKRNFEEGMPWNGAMLGYRLKNGRYEIIPEEADLVRRIYNEYLSGDGYLTIAKRLNEDGIPSRFGKQWGQSVISKILSNYTYTGNLILQKTFRENHITKKTIINNGELPKYHAENAHDAIIDMETFQAVQAEKTRRAARFLKKPAPKKAYPFTSLLVCDGCGKNYRRKVTKTGPVWVCGTFNSMGKAACASKQIPEETLQAVTAEVLGQVDFSEELLRRLIKSILVCNGNVLIFRFFDGSEITRIWKDRSRRQSWTVEMKATARQKALERRNQNA

SEQ ID NO: 10208 - protein, 521 aa, Unknown
  Description of Unknown: Integrase B10209 sequence
  cd00338,IPR036162,PTHR30461,IPR006119,G3DSA:3.40.50.1390, mobidb-lite,PTHR30461:SF3,PF00239,SM00857,SSF53041
MSKRNIEKLTESFEKNTIKKSNAIIYLRSSTQKQNEETNNQHSIKTQFALCKEYVLRNNFNIYRVIQDVHRANDIKTLKINDIPNKYSNVHLIVADPSRICRDFEQGAIFMNKCRNSNIIIHSVRDQSTSDTSLGKRKIMDLLMVANDESETFSKRIKTTMQLKKRNGSFIGGNPTYGYKLYNISNKDGFSIQKMIPNENEQLIIDLIIKLHIGSDIASFYTLFRKITGNDKKLYHNGKQWTDIKKYECTYAYIANFLNENNILKRGKEWKSTMIGYIIYQNGSKVQKQLNADISSYESSKNESSESESSESESSESESSENESSENESSENESSESEIEIKRKVYSPNNNIKRVITKNNTKSTEAFDSSDEEFLSKNAPIKKCVQSNSSNIKKKVPKPITKTSIELSSESSSEEEFLSKNAPIKKCVQPNSSNIKKEVPKPITKTSIELSSESSSEEELLSTPIKKCVSKKTIEMETESSEEEKVVTKKASTESRLNLLDIKVNRIYDMIMKMNKNSKNK

SEQ ID NO: 10209 - protein, 521 aa, Unknown
  Description of Unknown: Integrase B10210 sequence
  cd00338,IPR011109,IPR038109,PF07508,PS51736,IPR036162,IPR006119, G3DSA:3.40.50.1390,PTHR30461,PTHR30461:SF3,PF00239,SM00857, G3DSA:1.10.10.2600,SSF53041
MQTLIGAYNTSNASTAAMAAAYVRMSTEHQQYSTENQLDTIRLYAATHALEINKVYTDAGKSGLRLEGRDALKQLFFDVEKGLANYSTVLVYDVSRWGRFQDPDVSASYEVRCRQAGVSVQYCAEQFTNDGSPVSNIVKSVKRMMAGEYSRELSVKVFAGQSRLIQLGYRQGGQAGYGLRRQLVDGHGSPKNELDLGEHKSIQTDRVILVPGPPAEIEMVHNIYRLFVEEGRSEREIADWLNSQRVLNDRGRAWSRGTVHQVLINEKYIGNNVWNHTSFKLKQTHTQNPPEEWIRANEAFCPIVSVILFKAAQSIIQTRSYRMPDEEMLHALKAIYQRTGYLSGIVIDESEGCPSSSAYQQRFGSLLRSYSLIGYSPARDYRYIEANKRLRQMHPLLLQQTTQKIADVGGKVTVDPCTDLMVVNQEISISLVLSRCHVSPTGSKRWNVRFDYGLSPDLTIAVRMKEQEEAALDYYILPTIDIETPRLRLAESNQANLEIYRFDTLEILSELARRSEFRRVA

SEQ ID NO: 10210 - protein, 403 aa, Unknown
  Description of Unknown: Integrase B10211 sequence
  cd00338,PF13408,IPR011109,IPR038109,PF07508, PS51736,IPR036162,IPR006119,PTHR30461,G3DSA:3.40.50.1390, PTHR30461:SF3,IPR025827,PS51737,PF00239,SM00857, G3DSA:1.10.10.2600,SSF53041
MMTPQKPKLRVAAYARVSDSRLHHSLSTQISYYSRLIQSHPDWELVGVYYDEGISGKEQVNRQGFQNLLQACDEGKVDRIITKSIARFGRNTVDLLSTVRELRLKNIGVTFEKESIDSLSSDGELMLSLLASVAQEESQNISQNVKWRITKKFEQGIPHTPQDMYGYRWNGENYVIEESEAAVIRQVFEWYLNGDSVPTITKRLNDQGVLTRLGNPFTVASVREFFKQEAYFGRLVLQKTYRSDFSRNPKRNKGQRNKYIIEDAHEPIVSKVYFDRVLAEKKRRYELSHKESHIHKGICREMIRCAHCHELMITRVDSKRVHRTVRYCCRTRDRFGKDSCISKTLSEKRLLATLESHLGFTPDKEWVTSNIKELTYDSEANQLKVNPLEGRNYVLEVRKEHFL

SEQ ID NO: 10211 - protein, 521 aa, Unknown
  Description of Unknown: Integrase B10212 sequence
  cd00338,PF13408,IPR011109,IPR038109,PF07508, Coil,PS51736,IPR036162,IPR006119,G3DSA:3.40.50.1390, PTHR30461,PTHR30461:SF3,PS51737,IPR025827,PF00239, SM00857,G3DSA:1.10.10.2600,SSF53041
MMRSGAMIRKVFRYMRVSTDQQAEHGYSLEAQDQVLRDYAAGHQLEIAASFVESESAFTSGKRPEFARMCAALRVRSDVNAVLVYKLDRLARNMTDFALLTEDLGATLISMTEGEVSDRDSGTSLIGGIHAVVARHYSQQLSQRVALGLKTKARRGEWPTYAPTGYVNKRDGRDAWIEPDQSSAPIITKLFTMYAHTQMSVAEVAAWARAAGLRSRYGGKIYKSAVHKMLQDPIYRGAVVWHGEEYPGKHEAIVDPQTWRAVQDKLHGRTGPRRQHRHFPFRDTFTLTCAYCGGQITASRITNRHGGEYVYYHCTRSTRCKGGKCEQPFWREDVLSERLRCIVEGIHVPGPVVSRLLREFRENAEQAERTRKAKLIQLKAEQRRLEEMRNALLLEKIEQIIEPKQWADVDRDLAARGAVVADEIEGMSGGARCPNDVAATFKLLKLAPIRYNKWGHEERAELLQALASNCVLSRENVLPNYRPPFDAVASAVETGDWLGVMDVVQTHARGAEPAARLVGVA

SEQ ID NO: 10212 - protein, 521 aa, Unknown
  Description of Unknown: Integrase B10213 sequence
  cd00338,PF13408,IPR011109,IPR038109,PF07508, Coil,PS51736,G3DSA:3.40.50.1390,IPR006119,PTHR30461, IPR036162,IPR025827,PS51737,PF00239,SM00857, G3DSA:1.10.10.2600,SSF53041
MPTAYSYARFSSDRQHESSIEAQQDATRKWAEAHGVTIVHEYCDRGISGTTDERPEFQKMIAACRIRKVDFVLVHKHDRFARNRYDAVIYGRIIEQTGARLVAVAQDFGETPEAVIMEGLMQAWSEYYSRNLSTETKKGLRVRAMKGLSLGGFVPFGYQLAEDGSMEIADDEAIWVRAFFDAYLSGGFQDAVRRANMAGVRGRKGVRLTPHGVMKMIRNPVYRGAYRVTVGGEETLIEDHHPAIVSPEIWKEAKTIMEARIKVRSEEDKTYLLTGMVRCGICGKRIRAQTQLHGGKEYVYYGCRESGSHPDGKALRSIQAAALDDAARQYVRAILTPEARQAAAAALAEYIDGRKKDAKQRGPDAKKRIRALEKKIDSIVENMSSGVLPPSVLKRLGEQVTELETEIEAQRELMNAPPDPDMPSIEEFFAGAAAIDENMPIDEQQRIIRRFISVITLTNDEIAIESTFADWLKDRGITIYTKKPLPDPARILGINLARQSLSAPSLFDIMIINLCKLRKAA

SEQ ID NO: 10213 - protein, 521 aa, Unknown
  Description of Unknown: Integrase B10214 sequence
  cd00338,PF13408,IPR011109,IPR038109,PF07508, PS51736,G3DSA:3.40.50.1390,PTHR30461,IPR036162,IPR006119, PTHR30461:SF3,PS51737,IPR025827,PF00239,SM00857, G3DSA:1.10.10.2600,SSF53041
MAAVIYARFSTEHQSESTIVDQLRRCRDYARARGLEVVAEHTDEGISGAAIGNRPGVRAALEALASGDVLLVVDTTRLSRSQDLAPLLARLRHRGVRVVGVLDGFDSESKTARMQAGLSGIMSEEFRASIAARTHSALDMRAREGRATGGRCYGFDRAGAVVEAEAEVVREIFRRVAEGETQKAIAAELNLRGVPAPGASWSRRVRRSDGVWMTPTLNAMLANERYVGRVVWNRSLWRRDPDSGVRQRVERPESEWVVRPGPAIVDDETFRRVRERAAPRKIYGGRPGGGPRYLLSGLLVCGDCGGRLVATGRGGSHYYCGTHRQGGPAACPNATGARRAVAERVLLEPIERELLSPEAVELAVGLIRGWSRAARARAASPPEVSEVEGRIARLEAQIAAGTIEREDVLPALAALADRRRSLISGGWRRASGRPGVDAAEAGAAYARAVQAMREVLTDGPVDRARAALSRLLGDVVCSREGGVLVARVALSARPLVEAAGLSWSGSGGALLLREKAVRLAA

SEQ ID NO: 10214 - protein, 501 aa, Unknown
  Description of Unknown: Integrase B10215 sequence
  IPR038109,IPR006119,PS51737,PF00239,IPR037285, G3DSA:3.40.50.1390,PTHR30461,IPR025827,SSF140560,SM00857, G3DSA:1.10.10.2600,SSF53041,IPR011109,PF07508,PS51736, cd00338,PF13408,Coil,IPR036162,PTHR30461:SF3
VAVSRNVTVIPAIKRIGNNKNSESKPKLRVAAYCRVSTDSDEQASSYEIQIEHYTNYIKRNKEWELAGIFADDGITGTNTKKRDEFNRMIEECMAGNIDMIITKSISRFARNTLDCLKYIRQLKDKNIAVFFEKENINTMDSKGEVLLTIMASLAQQESQSLSQNVKLGIQYRYQQGEVQVNHKRFLGYTKDENKQLVIDPEGAKVVKRIYREYLEGASLLQIARGLEADGILTAAGKAKWRPETLKKILQNEKYIGDALLQKTYTVDFLSKKRVKNNGIVPQYYVENSHEPIIPRELFMQVQEEMVRRANLRGGKGGKKRVYSSKYALSSIVYCGQCGDIYRRVHWNNRGYKSIVWRCVSRLEEKGSECTAPTINEETLQAAVFKAINELLANKEPFLSTLQKNIATILNEENDNTTDDIDRKLEELQQQLLIQAKSKNDYEDVADEIYRLRELKQNALVENAEREGKRQRIAEMTDFLNEQSCELEEYDEQLVRWLIER

SEQ ID NO: 10215 - protein, 521 aa, Unknown
  Description of Unknown: Integrase B10216 sequence
  cd00338,PF13408,IPR011109,IPR038109,PF07508, Coil,PS51736,IPR036162,IPR006119,G3DSA:3.40.50.1390, PTHR30461,PTHR30461:SF3,PS51737,IPR025827,PF00239, SM00857,G3DSA:1.10.10.2600,SSF53041
MPKITKIPASISRYTSAPIDAPVKRKVAAYARVSTDSEEQLTSYAAQISYYTEYIKGREDWEFVGVYTDEGISGCSTKRREGFQRMISDAMAGKIDLIITKSVSRFARNTVDSLTTIRLLKENNVECYFEKENIWTFDGKGELLLTIMSSISQEEARSISENVTWGHRKRFADGKVSVAYSRFLGYDKGSDGKMVVNPEQAEIVKLIYRLFLEGMTPHTIAIHLTEKGIKTPGGKDKWNATTIRRILTNEKYKGDALLQKEFTVDFLTKKTKKNCGEIPMYYIEDDHEAIIDPAVFDMVQQEMERRKTGASRYSGVSIFSSKIKCGECGGWYGAKVWHSTDQYRKVIYRCNNKYNDERCTTPHIMEEEVKTVFLKSLNKLLANRDELIENVKLICDKLTDTSELEAEKEKYAEEMSLVADMVQAAMLENARIALDQEEYRQKNDVLSARFEAAKKKHDELAMQIEEIETRGQNLRHFQETLESLNGQVTEFDSTLWGSLVDYITVYENGEKTVTFRDGSVI

SEQ ID NO: 10216 - protein, 521 aa, Unknown
  Description of Unknown: Integrase B10217 sequence
  cd00338,PF13408,IPR011109,IPR038109,PF07508, Coil,PS51736,IPR036162,IPR006119,PTHR30461, G3DSA:3.40.50.1390,PTHR30461:SF3,IPR025827,PS51737,PF00239, SM00857,G3DSA:1.10.10.2600,SSF53041
MPKITKIPASISRYTSAPIDAPVKRKVAAYARVSTDSEEQLTSYAAQISYYTEYIKGREDWEFVGVYTDEGISGCSTKRREGFQRMISDAMAGKIDLIITKSVSRFARNTVDSLTTIRLLKENNVECYFEKENIWTFDGKGELLLTIMSSISQEEARSISENVTWGHRKRFADGKVSVAYSRFLGYDKGPDGKMVVNPEQAEIVKLIYRLFLEGMTPHTIAIHLTEKGIKTPGGKDKWNATTIRRILTNEKYKGDALLQKEFTVDFLTKKTKKNCGEIPMYYIEDDHEAIIDPAVFDMVQQEMERRKTGTSRYSGVSIFSSKIKCGECGGWYGAKVWHSTDQYRKVIYRCNNKYNDERCTTPHIMEEEVKAVFLKSLNKLLANRDELIENVKLICDKLTDTSELEAEKEKYAEEMSLVADMVQAAMLENARIALDQEEYRQKNDVLSARFEAAKKKHDELAMRIEEIETRGQNLRHFQETLESLNGQVTEFDSDLWGSLVDYITVYENGEKTVTFRDGSVI

SEQ ID NO: 10217 - protein, 521 aa, Unknown
  Description of Unknown: Integrase B10218 sequence
  cd00338,PF13408,IPR011109,IPR038109,PF07508, Coil,PS51736,G3DSA:3.40.50.1390,IPR036162,PTHR30461, IPR006119,PTHR30461:SF3,PS51737,IPR025827,PF00239, SM00857,G3DSA:1.10.10.2600,SSF53041
VRSVIYARFSTEHQSESTILDQIRRCREYADARGWPIDGVFTDEGISGAALGNRPGARAALERLETGDVLLVVDTTRLSRSQDLAPLLTRLRHRGVRVLGVLDGFDSNSGTARMQAGLSGIMSEEFRASIAARTHSALDMRARDGRATGGKCYGFDRGGGIVEAEAEVVREIFRRVAAGEAQKAIAGDLNARGVPAPGASWSRRVRRADGVWMAPTLNAMLANERYAGRVVWNRSAWRRNPDSGVRERVERPEAEWIVRDGPELVDRETFDRVRAIAAPRRLFGGRPGGGPRYLLSGILVCGECGRRLVATGRGGSHYYCGTHKSGGAAACSMSVGARREVAERVLLEPIERDLLSPAAVELAVEVIRRLDREARVRAVEPAEVAEVERRIARLEGQIAAGSIEREDVLPALAALEDRRRAARAGAWRRSSGRPGVDAAAAVAAYTRAVVSMRDALTAGPVARAREALHRILGDVVCRPVDGALVASVGLDPRPLLEAAGISWSGSGGALCHREIALRLSA

SEQ ID NO: 10218 - protein, 521 aa, Unknown; identical to SEQ ID NO: 10181
  Description of Unknown: Integrase B10219 sequence
  cd00338,PF13408,IPR011109,IPR038109,PF07508, PS51736,IPR036162,PTHR30461,IPR006119,G3DSA:3.40.50.1390, PTHR30461:SF3,IPR025827,PS51737,PF00239,SM00857, G3DSA:1.10.10.2600,SSF53041

SEQ ID NO: 10219 - protein, 521 aa, Unknown
  Description of Unknown: Integrase B10220 sequence
  IPR038109,IPR006119,cd09865,PS51737,PF00239,G3DSA:3.40.50.1390 ,PTHR30461,IPR025827,SM00857,G3DSA:1.10.10.2600, SSF53041,IPR011109,PF07508,PS51736,cd00338, PF13408,Coil,IPR036162,PTHR30461:SF3
MPVVTKIPARLHPATFVPLESTAKRKVAGYARVSTDSEEQQTSYAAQVSYYTDYIQKRPDWEFVGVYTDEGISATNTRHRDGFNRMIADALDGKIELIVTKSVSRFARNTVDSLTTVRKLKEKGVEVYFEKENIYTLDSKGELLITIMSSLAQEESRSISENVTWGQRKRMADGKVSLPYSRFLGYRKGEDGLPEIVPEEAEIVRFIYRSFMHGSTPHHIAETLTFKNIPTPGGKEVWTTSTIESILTNEKYKGSALLQKKFTVDFLTKKTKVNEGEVPQYYVKESHPAIIPPEEFELVQAEYLRRKRLGRKYNSKSIFTARLVCACCGGYYGSKVWHSTSKYRRVIWQCNHKFQNGEKCTTPHLYEEHIKDKFILAMNQILENKDEIIENCLLLSEHFTVSDDTAIEAVTQEMDVVAELTRNLIQQNSVKPMKQELYKSEYEKLVQRYESLKAKRDALVSKKEAMESKLKFILHYAETLRGQDVITEFSEDLWLKAVDHVTICKDGGMVFLFKDGSKITV

SEQ ID NO: 10220 - protein, 521 aa, Unknown
  Description of Unknown: Integrase B10221 sequence
  cd00338,PF13408,IPR011109,IPR038109,PF07508, Coil,PS51736,G3DSA:3.40.50.1390,IPR006119,IPR036162, PTHR30461,PTHR30461:SF3,PS51737,IPR025827,PF00239, SM00857,G3DSA:1.10.10.2600,SSF53041
MPKTEEKQAVKAVIYARYSSDRQREESIEGQLRVCEDYARRNNITIVHTYADRAMTGRSDQRPEFQMMIRDAATMSFNIVLVYKLNRFARNRYDSARYKHKLKQYGIRVVSAMENIADDPSGILLESLIEGMAEYYSAELAENVTRGMTENALEGKWAGGIVPLGYKLDEKHHLVIDEPKAAIVRQIYQLALEGHNQKYIIDELNKHHYTNSAGRPFSYNTLRVILKNERYTGTFIWRDIRKENAIPVIIDKMTFEAVQKHMQFRKKNHIRSCSKDFHLTGKLFCGRCSSKMVGVSGTSKQGVLYYYYACTSHLKKKCPSKNIRQDALENLICKITTQILSKPEAIKAIAKQAMKMQKDKKESLEIQSLQNQIADINKKLKNCIQAVENGLISETMTNHIKNYENRLQGLKDEVSRQKLLEGSIHLTEQHIEFFFYSISQKLKTADKYKSILLSSLVRCVIVHENYIEIQFNYKNELPILQNPVKVESSYLNQMVTIPIEHTNMRLFMYSDYFSVRIRRIA

SEQ ID NO: 10221 - protein, 429 aa, Unknown; identical to SEQ ID NO: 9549
  Description of Unknown: Integrase B10222 sequence
  cd00338,PF13408,IPR011109,IPR038109,PF07508, PS51736,G3DSA:3.40.50.1390,PTHR30461,IPR036162,IPR006119, IPR025827,PS51737,PF00239,SM00857,G3DSA:1.10.10.2600, SSF53041

SEQ ID NO: 10222 - protein, 519 aa, Unknown
  Description of Unknown: Integrase B10223 sequence
  cd00338,PF13408,IPR011109,IPR038109,PF07508, Coil,PS51736,G3DSA:3.40.50.1390,IPR006119,IPR036162, PTHR30461,PTHR30461:SF3,PS51737,IPR025827,PF00239, SM00857,G3DSA:1.10.10.2600,SSF53041
VKKVTKIDKIQPSKAAKRKLRVAAYCRVSTDSDAQLESLETQKMHYENYINSRDDWEFAGLYFDEGITGTKADKRPKLMRLIDDCKAKKIDFVITKSISRFSRNTTDCLSLVRTLLNLNIPVYFEKENINTGSMESELFLSILSGLAEGESTSISENNKWGIKKRFENGTYKLGYVPYGYRWENGEIIVDPEQAVIVKRIFSELLAGKGTDAIAKSLNSENVPTKKGGRWTSTSIRGILTNEKYTGDCIFQKTYTDSNFNRHRNDGQLDQYYVTDHHEAIISHEDFDAAAALIEQRANEKGILRGSDKYQQRYAFSGKIICGECGDTFRRRIHSSTYGKYPAWVCNTHLADTSKCSMLYLRDDDIKLAFATMMNKLIYCHKLVLKPYLESLQANTSDEAFLRIQQLEILLEQNAEQRETLHKLMAQGYIDQILFTQENNALLTQANDFRSDIEALNRSVTDDTSKVYETERLIHFCERGEMLPEYNEDLFELFVDHIEVYSRKSIGFVLHCGLTFKERI

SEQ ID NO: 10223 - protein, 521 aa, Unknown
  Description of Unknown: Integrase B10224 sequence
  cd00338,PF13408,IPR011109,IPR038109,PF07508, Coil,PS51736,G3DSA:3.40.50.1390,IPR006119,IPR036162, PTHR30461,PTHR30461:SF3,PS51737,IPR025827,PF00239, SM00857,G3DSA:1.10.10.2600,SSF53041
MTTAVIYARYSSSNQREESIQGQIRDCLAYAERNGITVLREYTDSALTGKTDKRPSFQQMIKDSERHSFQVVLVWKLDRFARNRYDSAMYRNVLKKNGVRLVSVMENISDSPEGIILEGLMESLAEYYSANLSENVKRGLYDSALERKIISQPTFGYKRGADGRYEIDELTAPIVRRVFHEYANGKPYMAIVEDLNRDGIRTLRGNKFNRNSLRKLLRNEKYIGVYRYRDILDENGIPPIVSKELFDSVQHEVKRRTFTKKRITREESDPYLLTGKLFCGHCGSQMVGESARSKTGKTYHYYTCAGTRHQSRNGCKKRRVHRDWLEHEVIRIVNEYILTDEFIQTLTKRIMEIQKQDMESEILKLLKSELTATEAKIANLMKAIEAGAGFSESIRTRLSELESLRDDQNRRISLESHRQPQFTAEQISDYLTRLRRADKTDSDSQRLIINALIKRIYLFDCDDPAEQKISIEINYGDISDPVTHDEIVRIMRPLLCVSVDRRTMNVRRSILIIDSIKKDRT

SEQ ID NO: 10224 - protein, 521 aa, Unknown
  Description of Unknown: Integrase B10225 sequence
  cd00338,PF13408,IPR011109,IPR038109,PF07508, Coil,PS51736,G3DSA:3.40.50.1390,IPR006119,PTHR30461, IPR036162,PTHR30461:SF3,PS51737,IPR025827,PF00239, SM00857,G3DSA:1.10.10.2600,SSF53041
MPKTKKATCSPKTAVAYARYSSAGQRDVSIDQQLADIRAYAEREGYTIVHEYADRAKSGFKNSSARVEFQAMLSSAPLGGFDTIIAWKVDRFGRNRRESAIFKGQLADHGVRVIYAMEPIPTGPAGVLTEGMLESIAEWYSRNLAENVSRGMRDNARRGLSNGYRILGYKRGPDGHYIIDPDNASVVRRIFERYNQGYSAAAIAKELDAAGLRTAFGARFSPVHILRIITDERYTGVYIWSDIRVPGAMPPIIDSDTFERAQEMRQKTGRHIEKSPADFILTGKVFCGLCGRPMVGDSGTSKTGAAHYYYSCTGHKSRAGASRTCDKKSVRKDDLENQVINFVYDRCLSGPEREKITDAVITAQKEYDKASPRAAMEAELKETEKKISNLNDAIEQGIWNSSTSIRLKSLEDSAETLRRSLAEMDFSRSQLLNRDRILFFLDKMAKYDRDNPDRRKQLIHTFINSVFVYDDKLKIVINAVEGNTTLTLPDIPESSGNDTNGVLIVTHPNLRIIIYTIPLAG

SEQ ID NO: 10225 - protein, 521 aa, Unknown
  Description of Unknown: Integrase B10226 sequence
  cd00338,PF13408,IPR011109,IPR038109,PF07508, Coil,PS51736,G3DSA:3.40.50.1390,IPR006119,IPR036162, PTHR30461,PTHR30461:SF3,PS51737,IPR025827,PF00239, SM00857,G3DSA:1.10.10.2600,SSF53041
MTTAVIYARYSSSNQREESIQGQIRDCLAYAERNGITVLREYTDSALTGKTDKRPSFQQMIKDSERHSFQVVLVWKLDRFARNRYDSAMYRNVLKKNGVRLVSVMENISDSPEGIILEGLMESLAEYYSANLSENVKRGLYDSALERKIISQPTFGYKRGADGRYEIDELTAPIVRRVFHEYANGKPYMAIVEDLNRDGIRTLRGNKFNRNSLRKLLRNEKYIGVYRYRDILDENGIPPIVSKELFDSVQHEVKRRTFTKKRITREESDPYLLTGKLFCGHCGSQMVGESARSKTGKTYHYYTCAGTRHQSRNGCKKRRVHRDWIEHEVIRIVNEYILTDEFIQTLTKRIMEIQKQDMESEILKLLKSELTATEAKIANLMKAIEAGAGFSESIRTRLSELESLRDDQNRRISLESHRQPQFTAEQISDYLTRLRRADKTDSDSQRLIINALIKRIYLFDCDDPAEQKISIEINYGDESDQVTHEEVVRIMRPLLCVRIDRRTQMIRRSILIIETIKKDRT

SEQ ID NO: 10226 - protein, 519 aa, Unknown
  Description of Unknown: Integrase B10227 sequence
  cd00338,PF13408,IPR011109,IPR038109,PF07508, Coil,PS51736,IPR036162,IPR006119,PTHR30461, G3DSA:3.40.50.1390,PTHR30461:SF3,IPR025827,PS51737,PF00239, SM00857,G3DSA:1.10.10.2600,SSF53041
MKKVTKIDKIQPAKNAEDKLRVAAYCRVSTATDAQLESLEAQKNHYENYINSRDDWCFAGVYYDEGITGTKASKRPELMRLLADCKAKKIDFVITKSISRFSRNTMDCLKIVRTLLNLNIPVYFEKENINTGSMESELFLSVLSTMAEGESASISSNNKWSIKKRFENGTYRLSSAPYGYELESGGLQVVSEQADIVKRIFRELLSGKGMYSIAKELNAEQVPTQKGGRWTSTSVHNILTNEKYTGDCIFQKTYADSNFNRHINNGELNRYLIQNHHEAIISHEDFKAATALIEQRATERRIESGSDKYQQRYAFSEKIICGECGNTFRRRIHKGKYNSYVAWVCNTHLSDTNRCSMLFVRDEALKLAFATMLNKLIFSYRLLLKPYLAAMQSNTADEALLRIQYLENQLDQNAEQRSTLHKLMAQGYIDQILYTQECNELLLQARDFRSEIEALNNTVAGDTTKVYETERLINYCKRGEMLTDFNESLFELFVDHILIYSRQKIGFVLRCDLTFEEMI

SEQ ID NO: 10227 - protein, 521 aa, Unknown; identical to SEQ ID NO: 10183
  Description of Unknown: Integrase B10228 sequence
  cd00338,PF13408,IPR011109,IPR038109,PF07508, Coil,PS51736,IPR036162,IPR006119,G3DSA:3.40.50.1390, PTHR30461,PTHR30461:SF3,PS51737,IPR025827,PF00239, SM00857,G3DSA:1.10.10.2600,SSF53041

SEQ ID NO: 10228 - protein, 521 aa, Unknown; identical to SEQ ID NO: 10187
  Description of Unknown: Integrase B10229 sequence
  cd00338,PF13408,IPR011109,IPR038109,PF07508, PS51736,G3DSA:3.40.50.1390,IPR036162,IPR006119,PTHR30461, PTHR30461:SF3,PS51737,IPR025827,PF00239,SM00857, G3DSA:1.10.10.2600,SSF53041

SEQ ID NO: 10229 - protein, 521 aa, Unknown
  Description of Unknown: Integrase B10230 sequence
  cd00338,PF13408,IPR011109,IPR038109,PF07508, Coil,PS51736,IPR036162,G3DSA:3.40.50.1390,PTHR30461, IPR006119,PTHR30461:SF3,IPR025827,PS51737,PF00239, SM00857,G3DSA:1.10.10.2600,SSF53041
MKKITKIEPTVVQTAASKIRVAAYCRVSTEADAQLISLETQKSHYEELISANPNWVFAGLYYDEGVSGTSKEKRPALMRMIEDCEAGKVGRILTKSLSRFARNTTDCLELTRKLLDLGVTIYFEKENLDTGSMESELLLSIMSNLAESESVSISENNKWGIRHRFENGTFKIGYAPFGYNVKDGQMTINEKEAKWVRWIFAEALKGTCSAAIARRLNEMKVPTRRKGNWRGNTIRGVLTNEKYVGDCLFQKTYSDFRFRRHKNHGEYDQFYVTDHHDAIISREDFEAAGALLQQREREKRIKKDELRINNKYPFSGKVVCGQCGSKLQRHINSTGSLKYPVWVCRQHLADARSCSMKYVRECDLEYAFTTMMNKLIFAKREVLDALLDGIRGENHKENLRRIDEIDRKLEQNVDRRQTLTIIMTRGYLEPALFTQESNDLAAEADALTAEKEQLVKEITGSYHKTDALADLTRYAGHAQPCATFDGTLVERFLDHAELRTRNEIVFQLKCGLRLTERIGEI

SEQ ID NO: 10230 - protein, 521 aa, Unknown; identical to SEQ ID NO: 10229
  Description of Unknown: Integrase B10231 sequence
  cd00338,PF13408,IPR011109,IPR038109,PF07508, Coil,PS51736,IPR036162,G3DSA:3.40.50.1390,PTHR30461, IPR006119,PTHR30461:SF3,IPR025827,PS51737,PF00239, SM00857,G3DSA:1.10.10.2600,SSF53041

SEQ ID NO: 10231 - protein, 521 aa, Unknown
  Description of Unknown: Integrase B10232 sequence
  cd00338,PF13408,IPR011109,IPR038109,PF07508, Coil,PS51736,IPR036162,IPR006119,G3DSA:3.40.50.1390, PTHR30461,PTHR30461:SF3,PS51737,IPR025827,PF00239, SM00857,G3DSA:1.10.10.2600,SSF53041
LKKITKIERNTSVASEQPKLRVAAYCRVSTDDEDQLFSLDAQIKHYDSYIKQNPEWEFAGLYYDKGITGTKKEKRPEFLRLITDCESKRIDLIVTKSISRFSRNTTDCLEVVRRLIDLHVFVYFEKENIHTGSMESELMLSILSGLAANESTSISENNKWSVKQRFQNGTFRLSSPPYGYDSIEGKLVINEDQAKTIRMIFSMTLAGFGVGKIAKELNRLKIPTKRSQFWNSSTILGILQNEKYVGDALFQKTFTDACFKRHLNTGERDFYQIKDNHPAIISRADFDAVQTILLQRRKEKSIEKQNPKYQNRYPFSGKILCFECGGKFKRRIHAQCQERIAWCCSTHLFDSDMCSMKFILESNLEYTFVTMMNKLIFGHTIMLKPLLISLRGMSTAEEKAKRKKLEKQLDEITEQRNVLLGLMSKGYLEPAAYTKGNNQLISDAKHLQSQCEQINRLISSGQEYLSELNALLHFVSKASMLEHFDAELFSRFVKQIHVYSRCEVGLELKCGLILRERVVEE

SEQ ID NO: 10232 - protein, 521 aa, Unknown
  Description of Unknown: Integrase B10233 sequence
  cd00338,PF13408,IPR011109,IPR038109,PF07508, Coil,PS51736,IPR036162,PTHR30461,G3DSA:3.40.50.1390, IPR006119,PTHR30461:SF3,PS51737,IPR025827,PF00239, SM00857,G3DSA:1.10.10.2600,SSF53041
MSENAVVYARYSSRGQNEQSIEGQLAAAREYASKKGYTIIKEYCDRAKTGRNDNRAEFQQMLADCAKRKFSVIIVWKVDRFGRNRYEIAINKTKAKKYGVRVEYVAENISPGPEGVILESVLEGLAEYYSLQLAQNVSRGKLESAKKHQAFGGFLPYGFRTGPDKQYELDPERAPIAREIFRRYADGETISQLLKWLNDSGYRTKRGTPFTKTVLPRMLKDERYIGTYIFKDIIHDEDAIPAIVDKLTFQRVQIMLKKNKRMPSHSWDYSEYLLTGKLFCGHCGSMMIGMSGINRHGVKYGYYACANRRKGEGCKKKNVRQDWIEPLVVSEIMKLLRDDALFQQIVDAAWAYYQEERKAQDETVSLRSELGGVNSGIRNLVRAMESGAVSDALIGRLQELEKQKADLEKAIAQAGIAMGPELTRDHIEYFLLHFRTSNVDDVEDRKALVEAFVNAIYLYDDKMTIVFNYRPDGQSMKQVTLEELEGFDSCPAYSSGRVTVELRFRLYRHVVIFTVDLLHTV

SEQ ID NO: 10233 - protein, 521 aa, Unknown
  Description of Unknown: Integrase B10234 sequence
  cd00338,PF13408,IPR011109,IPR038109,PF07508, Coil,PS51736,IPR036162,IPR006119,PTHR30461, G3DSA:3.40.50.1390,PTHR30461:SF3,IPR025827,PS51737,PF00239, SM00857,G3DSA:1.10.10.2600,SSF53041
MIAALYARYSSDNQRAESIVAQLRAGREYCQRRGYTIIKEYADEAYTGTNDRRPQYQQMLADARHGLFEVVIFHKVDRSARNEYDYYRHKRDLMACGVMVEYSGQSIDMSTPEGALMENQMVGLAAYYSRNLSREVKKGLKENVLAGKLTGGKPPFGFTTDAGKHLIPDAGEAAAVQHIFSMYADGHGYSDILAYLNGHGFRTRTGRPFGKNSLHDIFRNRRYIGVCILGKNQKYADGHRNSHRADHSGMIIVEDGCPAIVSRDLWQRVQKRMDHNRHRPGAFRAKHTYLLSGFIHCGLCGGTMAGTGTLSHGHVLRYYRCSAKTNHGKAACANRGVSADRLEPFIVKYLRRVMLSPNILMRIAARVAAIIRESVGTVDDARHRLQQQEAKLSRALERLYDMVEYGEPDEYDRERMAKVKAELTAVRADLRDIKQRKQQETTPADVVAYIRQTFLPLLEQSDKLHIILSALVHDIIVTPSKVRVQFSMAPFECGGFTPERTSKLKLPIVERSWPRWIFDAA

SEQ ID NO: 10234 - protein, 521 aa, Unknown
  Description of Unknown: Integrase B10235 sequence
  cd00338,PF13408,IPR011109,PF07508,Coil, PS51736,G3DSA:3.40.50.1390,PTHR30461,IPR036162,IPR006119, PTHR30461:SF3,IPR025827,PS51737,PF00239,SM00857, SSF53041
VYCRQSIEKRDSLSIDAQAEKCIQYCNYKGLGYEVYKDAGYSGKDIRRPDFERLLDDVKDGKIKTIITYRLDRISRNIADFGSLITLFEKHGVDFISVSENFDTSTPMGRAMVMIVMVFAQLERETIAERIKDNCYYRAKLGRWTGGPVPFGYESSKITESGKEKSVLVVDSDESIIINKIFDMYLNSKSVRKVVADLNGSGIKTKKGSNWTQKTLSCVLRNVLYATNTPDVYNYFTDTGINIVNDITDFDGSLGCMFYGRTKGAGEKQDKYHIIVGEHKGIISGEKWIEAQTIMSKNKAVAPRTGKGTSILSGLIKCGICGYGMLVTQSLMYSRKRADKYPAENITYRYFKCGAKLHQGTCVCDNTAMRVDELEKRVLIGLKKDIKKYINKNIVPIDKTSKFAEEKLRIQNSIYKIDKDISNLIDNLSKSTSSILIAKVEEKLLELESQRNVLNKEIDKLSINISMSKKSQGNIEYLISIMNDFDNIFYNSTSEEQKQILRIFIKQVIVTRGSITLERYF

SEQ ID NO: 10235 - protein, 521 aa, Unknown
  Description of Unknown: Integrase B10236 sequence
  cd00338,PF13408,IPR011109,IPR038109,PF07508, Coil,PS51736,IPR036162,IPR006119,PTHR30461, G3DSA:3.40.50.1390,PTHR30461:SF3,PS51737,IPR025827,PF00239, SM00857,G3DSA:1.10.10.2600,SSF53041
MTNAVIYARYSSSGQREESIKGQLRECNSYAKRNGFTVIKEYTDSALSGTNDKRPAFQRMIADAKSGSFSVVIVWKLDRFARNRYDAAMYRNELKKAGVRIVSAMENISESPEGIILEGLMESLAEYYSANLSENIKRGIYDSALERKKTTRILGYRRGPDGKYEIDPVSGPIVRRAFEEYAAGKSMPEIVEGLNADGLRTKDGTPFKRNTLRTVLRNEKYKGVYRYRDIVDPHGIPAIVSPDLFDKVQKELANRSKNYTKRKTKTGATYLLTGKLFCGHCLAPMAGDSARSRSGEVYHWYTCPHNRYNPKTCNKKRVPKDWLEAEVLRILNTEILTDEFIEHAADAAVEYEKHFDNNSELDGLRLELKQTENKIRNVSAAIATGVITKTLPEMLAELEKQREQIETAIVKKSAGVHEFSRDAIVAYLHELKALSHKDAGSQRHLINACIKSIYVFDTDDPDSLRLVINMNYFDNDAEINHEEIVRIVSSPLHFAVTSRTTVHGRRLLLVRTIKKPAMLMG

SEQ ID NO: 10236 - protein, 521 aa, Unknown
  Description of Unknown: Integrase B10237 sequence
  cd00338,PF13408,Coil,PS51736,G3DSA:3.40.50.1390, IPR036162,PTHR30461,IPR006119,PTHR30461:SF3,IPR025827, PF00239,SM00857,SSF53041
VTDLPWAIYTRVSTDDQAKKGISLDAQLESCRCYAKARGWTVGKECIEPGITGSTMKRPALQDLLAEVKAGKLGGVIVWKLERLSRIMDDVKAMHRLLAEANTDLCSVTENIDTTTPSGRLFFHMLASFNEYDRDNIRERIKAAMTHLRAQGFWTGGHVPPGCQLVAAGERRKLVEDPAVAPLVRPLWSWILGGDGLNVSARRLQDAGVPAPGYVGKASRRGWTPAQAWNLVRSPQVTGILVDAATQASAIQALAGRKTPVRRGSTPKPGARASVASIVAGLLRCPMCGSSMVQATVKQKYRYFRCCLANKNRSLCRQKDPRVELVEAAVVDALEEAINGGRYRDSLLAAKHVSIGQVQEARQAKGRLTVAREQLAGRIAHLARTGQVGTAGFNAALEALGEDAKAIDRRLAEAEAILAVRGVDADNIELALDTIGRALVRFQAADCSPVERAAILREWIQKVEVHPDRVRLFMWGMPENKEPQPFGRGFAPETGLGTPKRTGCKPVLVEIPRGSPANVLR

SEQ ID NO: 10237 - protein, 521 aa, Unknown
  Description of Unknown: Integrase B10238 sequence
  cd00338,PF13408,IPR011109,IPR038109, PF07508,Coil,PS51736,G3DSA:3.40.50.1390, IPR036162,IPR006119,PTHR30461,IPR025827, PS51737,PF00239,SM00857,G3DSA:1.10.10.2600,SSF53041
MPTAYSYARFSSDRQHESSIEAQQDATRRWAEAHGVTIVHEYADRGISGTTDERPEFQKMIAACRIRKVDFVLVHKHDRFARNRYDAVIYGRIIEQTGARLVAVAQDFGETPEAVIMEGLMQAWSEYYSRNLSTETKKGLRVRAMKGLSLGGFVPFGYQLAEDGSMEIVDDEAIWVRAFFDAYLSGGFQDAVRRANMAGVRGRKGVRLTPHGVMKMIRNPVYRGAYRVTVGGEETLIEDHHPAIVSPEIWKEAKTIMEARIKVRSEEDKTYLLTGMVRCGICGKRIRAQTQLHGGKEYVYYGCRESGSHPDGKALRSIQAAALDDAARQYVRAILTPEARQTAAAALAEYIDGRKKDAKQRGPDAKKRIRALEKKIDSIVENMSSGVLPPSVLKRLGEQVTELETEIEAQRELMNAPPDPDMPSIEEFFAGAAAIDENMPIEEQQRIIRRFISEITLTNDEIAIESTFADWLKDRGITIYTKKPLPDPAMLLGINIARASLSDPNLFDIVIGILCNMRIAA

SEQ ID NO: 10238 - protein, 521 aa, Unknown
  Description of Unknown: Integrase B10239 sequence
  cd00338,PF13408,IPR011109,IPR038109,PF07508, Coil,PS51736,IPR036162,PTHR30461,IPR006119, G3DSA:3.40.50.1390,PTHR30461:SF3,PS51737,IPR025827,PF00239, SM00857,G3DSA:1.10.10.2600,SSF53041
MKKVITIEPAKQVTHKVDLPSFTKRRVAGYARVSTDHEDQTTSYEAQMTYYTDYINSRSDWEFVKMYSDEGISGTNTKKRLGFQEMVEDALVGKIDLILTKSVSRFARNTVDSLSTVRKLKEAGVEIYFEKENIWTFDSKGELLITIMSSLAQEESRSISENVTWGRRRQLAEGQVTFSYSQVLGFKKSDTGGFEIDQEEAKIVRYIFHQVLLGNNPNKIARELTAQGIPTPQGKRQWSYGTVKRMLRNEKYKGDALLQKSFTTDFLTKSTKPNEGELPQYYVENNHEAIIKREVFDLVQVELDKLEKKRQTNNIFTGRLFCGDCGSAFGSKVWHSTSKYKRTIYQCNAKYKGEHKCQTPHVTEEEIKGWFLSAMNQLLSNREEIVANTELLIDLAKDTSPLENKIDDLEQQLETIRQDIEDLVDRNARKAQNQDLYQEQYDTLVTAYQERQKELQEATSSLEEQKSKQLSLDGFIQQLKQQEDLITDFNQELWQTSVERLDIKEGKKISLTFKNGVRIDL

SEQ ID NO: 10239 - protein, 520 aa, Unknown
  Description of Unknown: Integrase B10240 sequence
  cd00338,IPR011109,IPR038109,PF07508,Coil, PS51736,G3DSA:3.40.50.1390,PTHR30461,IPR006119,IPR036162, PTHR30461:SF3,PS51737,PF00239,SM00857,G3DSA:1.10.10.2600, SSF53041
MFLLPELKPEEILIYLRKSRTDDPALTVAETVAKHEQMLDDYSMRTFGQLVPEENRFREVVSGETIAARPEMQKVLHLIEQPKYKAILIVEPQRLSRGDLEDIGRLSKLLRYTRTVVITLQYSYDLEDERDRDYFERELKRGNEYLEYSKRIMANGRALSAERGNYTGSRDPYGYKRVFRKDGKRKFPTLEIVPEEAEIVRMVFSMYADGIGATKICSQLNAIGSVPKIGKLWSPPAIYSMLDNPVYNGKIRHGERRTVKTVEDGEIIVRNPHRKDFQVYDGKHEEIISDTLWSAVRKRRDARDLPKVKVSKKLQNPLSGLVFCSCGRMMIRRPYSGRCADRYQCPNQTYCDNASCTMQEMLDAVTSALLNALHDFEASVTADDAGAVDRQSELRKVLTTRLAELENKERALWEKYAEGMPNKIFDDLIAKNEKQKEEVTNMIDQLDSEPEPINYEERVVLFSETLDALRDPDAPAAEVNALLKTCIRRITYSRERGQRKSGTRDGWDVKPMNLQIELNL

SEQ ID NO: 10240 - protein, 520 aa, Unknown
  Description of Unknown: Integrase B10241 sequence
  cd00338,PF13408,IPR011109,Coil,PS51736, G3DSA:3.40.50.1390,IPR036162,IPR006119,PTHR30461,PTHR30461:SF3, IPR025827,PS51737,PF00239,SM00857,SSF53041
MYTLQALYTNKKGSRDQRLPLQNVKQNISRKTAHDDIMSFYILSYQAFFRYQKEGFYMSFFTPNPQLFGLRVVKYIRCSHDDQVLHGDTLEAQDLILEDFIKVNRMILVDTFIDEALTARKKFNKRKEFVRLLSGVKAHAFDLIIFTKLDRWFRNIGDYHKIQEILEANGVQWKAVTENYDTTTTNGRLHINIRLSVAQDECDRDSDRIKDVFAYKLKNKTYVSGSLPRGLKLDAEKHVIIDPEWNCFALDMFDRFEATCSKRDTQLFLQEKYNIRVCYDTVARYLKNPLFKGQYRDDPDFCPATISPERFERIQKLAIRNVRIRHTQQFYIFSGLLICSSCNHYMCGTVTYRRMADGSEKMYKNYRCNFKAQSKLCDRGKTYREADLEEYMLAHIRPALSDYIVKYEVTAASTVQKNPVTEIAKIERKMKKLYDLFMDDLIDKEAYRSEYDKFKAQIEELQKCSTAAPMRSLDSVKKLLSEDWEAVYHTFSDQEKNTFWKSFIESVLVYEDGSMDIRFL

SEQ ID NO: 10241 - protein, 520 aa, Unknown
  Description of Unknown: Integrase B10242 sequence
  cd00338,PF13408,IPR011109,IPR038109, PF07508,PS51736,G3DSA:3.40.50.1390,IPR006119, PTHR30461,IPR036162,PTHR30461:SF3,PS51737, IPR025827,PF00239,SM00857,G3DSA:1.10.10.2600,SSF53041
MKRITKIEENRALSVKKKTRVAAYCRVSTASDEQLISLDTQKAHYEDYIKSNNEWEYTGVFYDEGITGTKKECRDGLNSLIDSCEKGLVDLIITKSISRFSRNTTDCLELVRKLIGLNVTVIFEKENINTDSMESELMLSILSSLAESESVSISENNKWSIQKRFQNGTYIISYPPYGYENADGEMIVVPKQAEVVKKIFEDTLAGKSTHIIAKELNDSGVASKKGRKWTPGAINAIIRNEKFTGDVIFQKTYTDSQFSRHTNDGELNQYLCENHHEPIVSHEIFEKANEVLNQRGKEKGNGERTERYQNRYGFSGRIKCGQCGGVFKRRSHYKPSGSYIAWCCTHHIEDRYSCSMKYITDDGIKAAFLTMMNKLVFAHQRILKPLLHSLQGFDDKNRLLQIQEYETKLEKNMEQRQVLTSVMASGLLEPALFSKKITALILEEKQLQEGKKQMINTVSGDRTKIEALEKLMKFVLGSEMLTEYSDEIFLSHVEGIIVLSREEIVFELKCGLKLKERLVG

SEQ ID NO: 10242 - protein, 520 aa, Unknown
  Description of Unknown: Integrase B10243 sequence
  cd00338,PF13408,IPR011109,IPR038109,PF07508, Coil,PS51736,IPR036162,IPR006119,G3DSA:3.40.50.1390, PTHR30461,PTHR30461:SF3,IPR025827,PS51737,PF00239, SM00857,G3DSA:1.10.10.2600,SSF53041
MKKAVIYARYSSSSQTEQSIEGQIRVCTDFAKQHDFLIVDTYIDRAMTGTNDRRPEFQRMLRDSSEHNWEFVIVYAVDRFGRNDEDYAINKRTLSKNGVSLLSATQITSKNIDGTDNINGILSEGILVALAKYYSAELSQKVKRGQKESLAKGNFLGSFVPYGYDVVDKKYVINETEAEIVRMMYVDYAKGLTAKEIAENLKERGIRNKFGRYFVVNSIMNMLKNEKYNGTLIYGDNVLRNYIPVIIEDSLFEKVQARIVANKRSPARMKAKEEYLLSSKLYCGYCGSLMTGESGTSKTGAIHHYYKCFGKKKGSDCKKKNYKKDALEDLVVNLTIRHILNEKNQCPIIDRIVTIYNNNLKNSAITTSIKKQIDAKHKEIDNILKAIKLGIFTDSTKNELLALENEVKELEEKFELQLAIEEKPLDSYRIKYWFSRFNDIDNADKKRVIIGSFVRKVILYDDKIIIIYNHDGDNQKEYHEDELEEIECSNLTQLAPPQSCPDVLYCMSGFFNEIKSFFNN

SEQ ID NO: 10243 - protein, 520 aa, Unknown
  Description of Unknown: Integrase B10244 sequence
  cd00338,IPR011109,IPR038109,PF07508,Coil, PS51736,IPR036162,IPR006119,G3DSA:3.40.50.1390,PTHR30461, PTHR30461:SF3,PS51737,PF00239,SM00857,G3DSA:1.10.10.2600, SSF53041
MEKVVIYLRKSRADAEAELMGEGETLARHERLLLEVAKKQRINVVDIYKEVVSGETIASRPVMQKLLTEVEHCMWSGVLVIEIDRLARGDTVDQGIMAQAFKYSNTKIITPNKIYDPANEFDEEFFEFGLFMSRREYKTINRRLQAGRIASVKEGKYVGNIPPYGYIRQKLEKEKGFTLLPHPEQAEIVRLIFDLYTGKNEKQIGVSLIVRKLNNLKIPAVNGVWVPATIQGILRNPVYIGKIRWNCRPQIKKVIDGKIKKERPRKKPDECIIANGKHEAIIEIETFELAQQLMSKNKAPCPTGTSVKNPLAGIVKCAKCGRNMVRRPYSNRGQEDTLMCPVTSCDNVSSVLRIVEEKILKYLKKWNNGLMVKIKKQTKTNINISILEKSRDKIEFEIESSKKQLDKTYDLLEKEIYDTDTFLSRSKIIAEKIKELKKDYNKINNEIKKNKNEIQARTQIIPMVSHVVDIYYKLDDPAEKNELLKKVLDKVEYIKTEKGNYNKKEIPTFEITLYPKFPSV

SEQ ID NO: 10244 - protein, 520 aa, Unknown
  Description of Unknown: Integrase B10245 sequence
  cd00338,PF13408,IPR011109,IPR038109,PF07508, Coil,PS51736,G3DSA:3.40.50.1390,IPR006119,IPR036162, PTHR30461,PTHR30461:SF3,PS51737,IPR025827,PF00239, SM00857,G3DSA:1.10.10.2600,SSF53041
MIYIVKGDYMKAAIYARYSSDNQREESIEAQIRAIQEYSQRNQIHIVKIYTDEAKSATTDNRPQFLRMVNDSKLGLFEAAIVHKLDRFARNRYDSAHYKKMLKDNGVKLISVLENLDDSPESIILESMLQGMAEYYSANLSREVMKGMRETAYKGKHNGGIPPLGYGINLDKTYHIIENEAKTVSIIFERFLLGQGYQSIANELNGSGKTTKQGKQFKKNTIRDILLNEKYTGTYVFNRRADGKTLNKIKPDEEIIRVENALPAIITKEQFEKTQNRINGQKTGRRIRVMHYLLTGKLFCGECNKHYTGAGHVKGRDRSDDNPTKYYRYACTGKKGGCQNKPVRKETIEDAVINEIKDKILNDEKIPMWVEQLLEKIKESKSENTNRISEIGKEITKLKNQIDKDFQLYYDDLMDKTILAEKVNTKKEKISLLENELIILNTRNYAPNKDMIIAYLHTMKNNLESGDVNRQQKVIDTLVQCVVVYPDRIDIDIGIDDSGDSDKGTGGEPLLTLSLSILRP

SEQ ID NO: 10245 - protein, 520 aa, Unknown
  Description of Unknown: Integrase B10246 sequence
  IPR038109,PS00397,IPR006119,PS51737,PF00239,G3DSA:3.40.50.1390 ,PTHR30461,IPR025827,SM00857,G3DSA:1.10.10.2600, SSF53041,IPR011109,PF07508,PS51736,IPR006118, cd00338,PF13408,Coil,IPR036162,PTHR30461:SF3
MTNKAIIYARVSSKEQETGGFSIPAQLDFLRNYAQQKGFDIIKTFTESVSAKDKNSRIEYDNMIKFARAQKGGCHILVEKTDRLLRNEFNSAEIIELARTTDISVHLAKESLVLDKNSPPTTFFIFTMFSANSSLYPRNLSNEVKKGMNKKAELGFYPGKTPVGYKNIRIGKQPPQIVVDEEKAPFVIKAFELYSTGNYSFSQIAEILSKENFKMRSRLVKKNNIDVILKNPFYTGDFLYKGMYYSGKHTPLISKELFFQCKKIMEQGKTPYKNKYEFLFNNIIQCADCGQYLTADIKKGKYVYYRCFGNKNNDFRCKTKLLPQTKVEEAVIECLNNIHITQEQKSELLAKIKMCFKSDSQNFANLFEKNSKKIIELKNKIDKLYTDKLDGIIPNEFFIEKYNSWSAEVSQLNEQNNSLMQDADDIIQKCELILELLNQAPSLYLRLDYDNKRLLLKTLFSHFSWDGETLTLHTKKVFELLFKHNFSKMVGDIGQISKFKKDINSENIVLFKNIKKLLVA

SEQ ID NO: 10246 - protein, 515 aa, Unknown
  Description of Unknown: Integrase B10247 sequence
  cd00338,PF13408,IPR011109,IPR038109,PF07508, Coil,PS51736,G3DSA:3.40.50.1390,PTHR30461,IPR036162, IPR006119,IPR025827,PS51737,PF00239,SM00857, G3DSA:1.10.10.2600,SSF53041
MIPAKRRVGNTVKEEDRPKLRVAAYCRVSTDSDEQATSYDAQVEHYTDYIQKNPEWEFAGIFSDDGISGTYTKKRDGFNHMIDECMDGKIDMIITKSISRFARNTLDCLKFIRQLKEKNIPVYFEKENINTMDAKGEVLLTIMASLAQQESQSLSQNVKLGIQYRYQQGLVQVNHNRFIGYTKDNDGQLIIEPEGAKVVKRIYREYLEGSSLLEIGRGLEEDGILTGAGKGKWRPETIYKILHNEKYMGDALLQKTYTINFLNKTRVKNKGLVPQYYVENNHEAIIPRDIFMRVQEEMVRRANLHSGKNRKKRVYSSKYALSSIVYCSKCGEIYRRIQWQAHGKKYIVWRCCNRVENGPGACDAGAIREVDLQSIVIKAINKAFGKRESMKAALVANIESVITDVGGISIDEIDLRLEELQKELLKVANSKVNYDEMADEIFKLRELKQSAMVDSAEREGLKLRIDEMNKFLDEQTEVITEYDEQLTRRLIEKITVYESYFTVEFKSGASVDIYK

SEQ ID NO: 10247 - protein, 520 aa, Unknown
  Description of Unknown: Integrase B10248 sequence
  cd00338,PF13408,IPR011109,IPR038109,PF07508, PS51736,IPR036162,IPR006119,G3DSA:3.40.50.1390,PTHR30461, PTHR30461:SF3,PS51737,IPR025827,PF00239,SM00857, G3DSA:1.10.10.2600,SSF53041
MPRKKAPAAEAPRLVAYYRYSGGSRQTEQSIEGQRRDCEAYARAHGMTILREYVDRHISGKTDDRPAFQQLVADSAAHTFDAVICWKTDRLARNRYDSAVYKKKLRDNGVEILYAAESNISGAEGIIIEGLMEALAEYYSAELAEKARRGMRESALKGKALGSSRPLGLTVDADKHYIIEPTGAEAVRYIFEQYAAGLSSSSIVERLNAMGLRTSHGGPFNKSSINRIIQNEMYRGVYVSKKFDVRIEGAIPAIIDNDLWERAQKMFERNRQSRTPHASRADYILSGKLYCGECGCLMKGVCGRSSGNGQMYHYYACPGRSIGRACTRKNIPQDELEAMVVNSVADLLLEPELLEQIADAIVELQQAEAARPDPEKQALEKSLSDVRSKIQNILTAIENGTSSAALSARLADLEQQESTLSYQLSSLTAKKPLTFTRDQILFLLQQFRVSPSERTKAYCRRLVDTFVDHIELTNTELILYFNLSDETIDKNKKAPRSNPSKESSTEKRLVRVARIELTAS

SEQ ID NO: 10248 - protein, 520 aa, Unknown
  Description of Unknown: Integrase B10249 sequence
  cd00338,PF13408,IPR011109,IPR038109,PF07508, Coil,G3DSA:3.40.50.1390,IPR036162,IPR006119,PTHR30461, PTHR30461:SF3,IPR025827,PS51737,PF00239,SM00857, G3DSA:1.10.10.2600,SSF53041
MKRVLCLYRVSTIGQVDHDDIPMQRIACREFINQHPDWVLVEEISEKGVSGYKTKTEDRDALTRIKEKALAKKFDILLVFMFDRIGRRDNETPFVVQWFVENGIEVWSTKEGEQRFDNHVDKLLNYIRFWQASGESEKTSMRIRTRHLQMIQEGLYRGGLIPFGYKLEFMGRTNKKGQPVRDLVIDEAESKIVKEIYHKSVSDGWGANRIANWLNERGIPTKRQKTFWRATSIRALVRNPIYTGRIRFGGDLSEPFDHLRIIDDDLFGLCDQTIEGRCPRHPDKRVGHLRSTSNGLLTGILYCGSCGERMCFNHNTTVRILADGTKRSYERDVYRCYRKIHSRRTCQGRSTYSAERIEKDILAVVHTYFENIRSKPTLQMLAAAGNRKRSIQQDAIAQAEAALKKAQIELAALEDAITGETNMDLELINSLFPKRRMNLDKAMQEVERLRAELADSEKLESAANHELNMILSWADTFDAASRETQRSIIAMLIDKVVVNTNYHLDIHFRITAQQYLGKAS

SEQ ID NO: 10249 - protein, 520 aa, Unknown
  Description of Unknown: Integrase B10250 sequence
  cd00338,PF13408,IPR011109,IPR038109,PF07508, Coil,PS51736,IPR036162,IPR006119,PTHR30461, G3DSA:3.40.50.1390,IPR025827,PS51737,PF00239,SM00857, G3DSA:1.10.10.2600,SSF53041
MAFCAYVRRSRLDYEAERISHEDTLARQRAILTDLAAANRHVISEYYEEVVSGDTIQDRPRCQQLIADLIAGKWEGVYCTNISRLARGDTSDQGTILRVLQLTGAKVITPEKTLDPANADDQFMAEVSLFLARQEYKSSTKRQQAGKDRSLEEGKCIASKAAYGYRRVKLTGQRGWSLEIQPEEAVVVQSVASWYLYGRNGAPMGITAIATHLTDTGVLPGENGTRWTACRIHRMLTNPVYAGWIRYGYEKVEKTPTLSGYSKRRVINNDCKLRKGIHQAILPQETFDAIQQKLHGYKKHLPVRKGTPLSNPLAGLVFCGECGHVMSHLPSCGRQEAIIKCRTRGCPTVQSYREPVEAAILSTLRQWLDDPGALSAFSTPKPEQDASALPAMETELEKLRRQLDRVQDLFEQDVYTLDDYRSRRSKLDARMQELQSSIAAEKQLLADQPVYATHQELAPAILRLFDGYENATPQQKNDMLKSCISSVVYRKSKTGLVLRGHVYSDPNAFELDVYPLLKKE

SEQ ID NO: 10250 - protein, 520 aa, Unknown
  Description of Unknown: Integrase B10251 sequence
  cd00338,PF13408,IPR011109,IPR038109,PF07508, Coil,PS51736,G3DSA:3.40.50.1390,IPR006119,IPR036162, PTHR30461,PTHR30461:SF3,PS51737,IPR025827,PF00239, SM00857,G3DSA:1.10.10.2600,SSF53041
MYEDIKTACLYVRFSSHNQTEQSIEGQTRVCRDFCKRHNIRIVEIYADRATSASKDIEKRVQFLKMIKDSEKGLFDAVIVYKLDRFARSRYDSATYKYRLKRNGVQLISATENISNDPEGIILESVLEGMAEFYSAELSQKINRGMRESAYKHNSIGGAVPLGYKIEDKKLVIDPKTAPIVKEAFEKYADGETVAEICRQFNARGYKTSKGTAFGKSSFTKIFRNERYIGVYSFHDYRAEDAIPAIIDKDLWDRVQLRVGKIKNAPARNKAKVVYLLSGKIFCGHCGSKMNGNCNAGNYYYYQCYGKKNGNVDCKKKNIRKEFIERLVAQDALSLLTDEYIEQIATIACEKNQHEIELDSALPTIRDRIHQVDLSLNNLLKAIESGSAPDMLVKRIGELEKEKKDLQVQAKKESEDIVELDKAQVIYWLEQFRGGSIEDEEFCRMLIDLFVNSVTVWDEDDNTYKVTVAYNLTSLPTKTYRLNKGGTLSDFTSNAPHQPPDEEKDRHVLRQVISARRRGD

SEQ ID NO: 10251 - protein, 520 aa, Unknown
  Description of Unknown: Integrase B10252 sequence
  cd00338,PF13408,IPR011109,IPR038109,PF07508, Coil,PS51736,G3DSA:3.40.50.1390,IPR036162,PTHR30461, IPR006119,PTHR30461:SF3,PS51737,IPR025827,PF00239, SM00857,G3DSA:1.10.10.2600,SSF53041
MPTVIAIPATRREVRKTNSVQAIRRKVVGYARVSTDHDEQLTSYEAQMEYYTRYIKEHDGWEYAGMYSDEGITATNTKNRDGFNQMVTDALAGKFNLIITKSVSRFARNTVDSLVTVRKLKEAGVEVYFEKENIWTLDSKGELLITIMSSLAQEESRNISENTTWGQRKRFADGKVSVPFGRFLGYDRGENGGLVVNPGQAAIVRKIYSLFLQGKTLHGIKRILEGEGILSPGGKKSWSLTTIRSILTNEKYKGDALLQKSFTVDFLTKKKKKNEGEVQQYYVEGAHEAIVTPAIFEMVQREMERRKGVKGNKYNCTTFLSGKIKCGECGSWFGPKVWHSNDKYRRTVYQCNHKYNGEYKCSTPTITEDDVRCWFVDAVNKIYKNRNDILVDMGAAMSALDHQDELVTKQEELESWLEQKHLEIDALILHNASQTINQDSYQKKFDRLTKEYEKGRDELDSIAAKLGENRSRKEMLHEFIDTIRDKATLVEDIDENLWMALFDCLVVNSMDDVRFILKDG

SEQ ID NO: 10252 - protein, 520 aa, Unknown
  Description of Unknown: Integrase B10253 sequence
  cd00338,PF13408,IPR011109,IPR038109,PF07508, Coil,PS51736,IPR036162,IPR006119,PTHR30461, G3DSA:3.40.50.1390,PTHR30461:SF3,PS51737,IPR025827,PF00239, SM00857,G3DSA:1.10.10.2600,SSF53041
MIPAVIYARYSSTNQREESIEGQLRECHRYAERVGLSVIHEYTDAAISGTSDKRPAFQQMIRDSKKKAFEVVIVWKLDRFARNRYDAAIYRKQLQDNGVRIVSAMETFSDGPEGIILEGLMEAMAEYYSANLSENIQRGMYDSALQRKFLGQPVLGYKKGSDGKYEIDPLTAPIVRRIFEEYASGKSQPEIVASLNADGLRTVRGNRFMRNSLRAVLTNEKYIGMYRYKDIADPKGIPPIIDKPLFDKVQQMIGKRKYQKKTPEGTPRYMLVTKLLCGECGKMMTGESARSKNGSVFFYYSCAGTKSKPKECHKRRVPRDWIESEVIRIITQEILNDEFIDLIADGFMEQQKKDRSGQKLDGLNQQLKVVQKKMDNINRAISEGIWSESTGNMLRELEKQKSELSNAIQKEKLSASASVSRDEVLVILREMRDAATRSEDVAQAMIDAFVFRIYLFDHEDEDKQRVLVEYSPTGYIENALKYVEVISVRAKHNRLHIMGLTRTQWTYGRSVFVEYVITKK

SEQ ID NO: 10253 - protein, 520 aa, Unknown
  Description of Unknown: Integrase B10254 sequence
  cd00338,IPR011109,IPR038109,PF07508,Coil, PS51736,IPR036162,IPR006119,PTHR30461,G3DSA:3.40.50.1390, PTHR30461:SF3,PS51737,PF00239,SM00857,G3DSA:1.10.10.2600, SSF53041
MYKYLMYLRKSRADRDFSDEPVMHTLQRHKKRLDEYCLAHDIIVPESNILYEVAGADSIASRPKMMELLSLVETGEYEGVLCVDMDRLSRGSGADQALVINTFKYSNTKIITPNKTYDFANDMDEQFAELGLFMAKNEYRQIKRRLRQGKIDAVKEGKYPSANPPYGYETYKLKGQKGFSLRIVPEEAEAVRLMFKMFTEDNLGGHRIAKWLNENGYRARNGNVWLAAHVNKILRDPTYTGKVRFAHRVTAKQMKNGKMVTVERNNDENQLICNGLHEAIISEDAFKSAETVRETHFIPHVRKSYSTQNPFAGLLVCAFCGKTLALRSPDPYGRAVFCPTPGCPTKSTYVKYIEEEVLEWLDDWLQEYRMLPDEADHAEEIKARETALKKAEAELKAETAKQNRIYSLLEDGIYSTDEYKARMVESKKRISQIEERISQEQNLISELKQYAAQRDIIAPQLETVVDRYRSLPSAEEKNKLLKGIFVKIVYTKTVGGKTHGKDYELEVFPRIPKHPDLTEE

SEQ ID NO: 10254 - protein, 520 aa, Unknown
  Description of Unknown: Integrase B10255 sequence
  cd00338,PF13408,IPR011109,IPR038109,PF07508, Coil,PS51736,G3DSA:3.40.50.1390,IPR006119,PTHR30461, IPR036162,PTHR30461:SF3,PS51737,IPR025827,PF00239, SM00857,G3DSA:1.10.10.2600,SSF53041
MKKAVIYARFSSHSQTEQSIEGQLRVCEEFAKRNDILILDTYIDRKKTGQNDIRPNFQKMLRDSSNRQWDYVIIYAIDRFARDDGDYGADKKLLRQNGVKILSATEITGTNADGSENLSGILTEGLLVSLAKYYSRELSKKVKRGQFESIQKKLFLGGAVLYGYVVVDKEIKISPPEAQVVREIFDAYANGLTAKNIAFDLKERQITNNKGRYFCVNSIMNMLKNKKYNGVFEYGDYYVEDYYPKIIDDKTFDIVARKIEKNKRSPARMKAYENYRLSGKLYCGHCKSLMTGEAGTSKSGIVHHYYKCFGKKKHNGCKKLSVRKDELENLVASLVLNHILAPDKILDTIENIVISYNEDIKEDCEITILKKELAENNKFINNIITAIKNGIITESTQKELVELEDKKKALNEAIAKKEAEEDFVLTKERVLFYFDEFIKDSLSDEEAKDIIIERLVNKVILYDNKITIVLYNKDDHSFDADIDMVEDLCSDLTQSAPPKSHNPNTIYTKHFIVLDYTFTQ

SEQ ID NO: 10255 - protein, 520 aa, Unknown
  Description of Unknown: Integrase B10256 sequence
  cd00338,PF13408,IPR011109,IPR038109,PF07508, Coil,PS51736,IPR036162,G3DSA:3.40.50.1390,IPR006119, PTHR30461,PTHR30461:SF3,PS51737,IPR025827,PF00239, SM00857,G3DSA:1.10.10.2600,SSF53041
MRAKKKPAMLEPDMQDAVIYTRYSSHNQRDCSIEQQVADCEIFARQNNLRVVKVYADRHLSGTTDNRPQFQQMLKDAAHGHWAYVICWKIDRFARNRYDSATYKFRLKKAGVRVLYAKESIPDGPEGILLESVLEGSAEYYSAALAQNIRRGMKYNAEQCKVNSGSIPFGYCKGPDGRFAIHEANAEVVREIFRKAAAGMPFVDIANDLNSRGLKTSRGGRWNKGSFRLLMNEAYIGVYHFSDTRIEGGMPALIDQGTFWAANERLKANSSVRGRHQDGGDYLLTGKLKCAHCGSYMIGFSGTGKSGELHYYYGCQKRRRERACKKANVPREWIERVVVKAALDYVLRPDVMEWIADAVMEYQEREAASAQLAALTAELEENQKATDNVMKAIEAGIITSTTKQRLLDLEAKAQDLKRAIELEKLSHVRLERDQVLFWLDRFRGGSLQSQEFRRKVIDAFVSVVYLSDDHLRIAFNYSGGSNAEADFDLVMDAEAAVKGRGYLVLLFSDSIGYSRLYFCC

SEQ ID NO: 10256 - protein, 520 aa, Unknown
  Description of Unknown: Integrase B10257 sequence
  PF13408,IPR011109,PF07508,Coil,PS51736, G3DSA:3.40.50.1390,IPR006119,IPR036162,PTHR30461,PTHR30461:SF3, PS51737,IPR025827,PF00239,SM00857,cd03768, SSF53041
MRFFTYGRKSVYKDNSDSIDNQFRMCREYCEMRFPNEIESWQQFSDEDFTGANTNRPGFQSMMALLREDACDVLVVYQLDRFSRDVRDFSAAYAEMQAHHVRFICLDLNIDTSTPIGEAMMYVSAAFGQMERKNIALRVADNMNGLAKKGYWVGGNPPVGYERSRIIVNGRKHVTIVPVPEGVEYMNWLYDYFLSGSYSLQGLETEFRKKGIKAQGGSFFSTTQLHQLLTSPYCCEATPEVYDYYAAKGCKMESPRELWDGSVGVMVYGRTTQKGKSHQKQPPAEWTVCLGYHKPFMPAEKWLAVQGRMTHNACFHKPKYPVPLLRGVLRCSCGALMAVSTKKKTKGVSRWYYCEKRMRKGAEACACSQIKCDLLDEKALEVFREIEADPKLIERYVEKSEKKKGEDPRKLQAKISSTEEKIGRLAASLALAENSTASRYIIAEMESLDSQLRELKHKKADAEADRRKEVSEEKKNSEKVKEIFRLLKGMEGFTAEEKNEIVRSIVKECTWDGETLFILL

SEQ ID NO: 10257 - protein, 520 aa, Unknown
  Description of Unknown: Integrase B10258 sequence
  cd00338,IPR011109,IPR038109,PF07508,Coil, PS51736,G3DSA:3.40.50.1390,IPR006119,IPR036162,PTHR30461, PTHR30461:SF3,PS51737,PF00239,SM00857,G3DSA:1.10.10.2600, SSF53041
MNRPTHLDVFVYLRKSRKDVEEERKALENNTPFDTLAKHRRELLELIRREGHSVIDIFEEVVSGEYISERPEMQELLRRVDDGEIEAVVVMDLDRLGRGDMVDAGTIFRTFRDSETLIVTPTEVIDCTAEGAELLFGFKSMIAREELKLINKRLQGGRRRSAKDGKSITRKPPYGYSRDENLKLFPHPEEAAIVRKIFEMIASGHGRQAVVKHLDSLGIKPPEGGLWEQSTISSIVKNEVYLGHIIWGKEKHLKRNGKRVRKKVPPEQWIRHENAHEAIVRQELFDDANAALRERWRAPTKAGVGLSNPLAGIIKCGICERALYLSRTADRPNPQLRCINPRCQPIQKGVLLPLAEQRILLALDLLAQKSSVSEKELTQSLDDDTDDVIEAKQKQIAQLQQTIEELHSMRETAFEMLEKKVYSEEIFLQRHKSISDKLKEVELAISRLQGEIEEDLRKKKYQKTIVPKVRALLENYNSLPTAEQKNHLLKTIIEKALFIRKKEWTKKDHFEIEIIPRFPV

SEQ ID NO: 10258 - protein, 520 aa, Unknown; identical to SEQ ID NO: 10251
  Description of Unknown: Integrase B10259 sequence
  cd00338,PF13408,IPR011109,IPR038109,PF07508, Coil,PS51736,G3DSA:3.40.50.1390,IPR036162,PTHR30461, IPR006119,PTHR30461:SF3,PS51737,IPR025827,PF00239, SM00857,G3DSA:1.10.10.2600,SSF53041

SEQ ID NO: 10259 - protein, 520 aa, Unknown; identical to SEQ ID NO: 10195
  Description of Unknown: Integrase B10260 sequence
  cd00338,PF13408,IPR011109,IPR038109,PF07508, Coil,PS51736,G3DSA:3.40.50.1390,IPR036162,PTHR30461, IPR006119,PTHR30461:SF3,IPR025827,PS51737,PF00239, SM00857,G3DSA:1.10.10.2600,SSF53041

SEQ ID NO: 10260 - protein, 520 aa, Unknown; identical to SEQ ID NO: 10196
  Description of Unknown: Integrase B10261 sequence
  cd00338,PF13408,IPR011109,IPR038109,PF07508, Coil,PS51736,G3DSA:3.40.50.1390,IPR006119,PTHR30461, IPR036162,PTHR30461:SF3,IPR025827,PS51737,PF00239, SM00857,G3DSA:1.10.10.2600,SSF53041

SEQ ID NO: 10261 - protein, 520 aa, Unknown
  Description of Unknown: Integrase B10262 sequence
  cd00338,IPR011109,PF07508,Coil,IPR036162, IPR006119,G3DSA:3.40.50.1390,PTHR30461,PS51737,PF00239, SM00857,SSF53041
VTALHEARLGAAGMSGVRMPPRRLRVVIYARVSQDSHQGRSVGQQLKIGRERAEEFGWEIVGEFSDNDTSVSEYAGAGMDREDWPKVEAMIRAGGVDIVWLWELSRSTRDRLVWAHLVKACQANNVVIGLNKKLWDVNDPDDMAYLDNLMIRSIHESGTTRKRVLRDIDAHAEEGKPHGYAHYAYTREYDPDTGELVQQVIHPQRAALIVEIADRLLEDKHTPTSIAADLNRRRIRTPRGQLLGETRELKNGRQVRSKGWTHKTVRQLMSSPTLKGKRGYHGRVIEQGGWPAVLAPPRWQAVQEALTPKENNNGRLPREESAMEMLSGIVVCDECGAVVYAVPIKRENVRLYRCAGLGQGAPVHGSRRVKILDEAFESFLFARLEHPDVRTALVPRENRDVLTAAEKQVGELEQELAELYEAVEQGRVSWQMGERAEKPLLKRLEAARVAARPVMVDPLLVELTAGPAVRVWRGWTMAQRRAAVRLLVKEVRMLAVGPVGRRKLPPEQHVKVEWVGVFAE

SEQ ID NO: 10262 - protein, 520 aa, Unknown
  Description of Unknown: Integrase B10263 sequence
  cd00338,PF13408,IPR011109,IPR038109, PF07508,Coil,PS51736,IPR036162, IPR006119,G3DSA:3.40.50.1390,PTHR30461,PTHR30461:SF3, IPR025827,PS51737,PF00239,SM00857,G3DSA:1.10.10.2600,SSF53041
LKKVTKIDENKADITERSKLRVVAYCRVSTDSDEQLVSLDAQIKHYESYINANPEWGFAGLYYDEGVTGTKKEKRSELLRMIADCENKKIDFIVTKSISRFARNTTDCLELVRKLLDLGIFIYFEKENINTGSMESELMLSILSGLAESESVSIAENNKWSIQRRFQNGTYKISYPPYGYDNVDGEMVVNKQQAEIVRYIFASILSGKSTHKIADELNNRKVPTKKGGRWTATTIRGMVGNEKYTGDAIFQKTYTDVHFNRHNNRGEKDQYLIKNHHEAIISHEDFEVAQDIIEQRGKEKGLERQHKKYQNRYPFSGSIICGQCGGTFKRRIHSSGRHRIAWCCSIHIADIEKCSMKYVPESEIEYAFITMMNKLVFGHEFVLKPLLISLRGMSSDDTLESIQAIDKKLEENVEQRNVLVGLMTKKYLEPAVYNKSNNELLQEAERLRRQKESITRFLNNDFQNLSEVSALLQYAAKASMLKGFDGELFARFVERVLVYSRTEIGFELKCGITLKERLVR

SEQ ID NO: 10263 - protein, 520 aa, Unknown
  Description of Unknown: Integrase B10264 sequence
  cd00338,IPR011109,IPR038109,PF07508,Coil, PS51736,G3DSA:3.40.50.1390,IPR006119,IPR036162,PTHR30461, PTHR30461:SF3,PS51737,PF00239,SM00857,G3DSA:1.10.10.2600, SSF53041
MSYCIYLRKSRADSEAEMRGEGETLARHEKALTDFASGAGLTVTKIFREIVSGETIAARPQMQLLLSEVSEGLWDGVIVMDIDRLARGNSIDQGIISQTFLYADTKIITPTKTYDPKNEFDEEYFEFGLFMSRREYKTINRRLQRGRVASVKEGKYVSNKAPYGYERVKIQNDKGFTLRPVPEQAEIVKCIFRWYTDGIILPDGSKKQLGVSLIARELNARKLKAPTGSVWTSQTIRDMLINPVYAGKIRWNWRPTKKKMTNGKIQIERPRSTDFIIYEGLHEAIIPDGTFELATKRMKKNKSRPVRGDKKANNPLAGLVICEKCGRKMQRRPNIKCPDLLICPEPTCNNHASYIHLIETHIIDIISKWSEGQILQGKGSYVIFSEPVDLSGELDTLKKSEATVYSQLNKAYEAFETGIYDATTFRSRSNVLKEKLQQLKQKTDELQNSINQAEESNRIISDFIPKVKKVVEVYNELTDPKTKNDMLSEIIDRILYSKEVRGHGHEEDFSITVYPKLPKV

SEQ ID NO: 10264 - protein, 412 aa, Unknown
  Description of Unknown: Integrase B10265 sequence
  cd00338,PF13408,IPR011109,IPR038109,PF07508, PS51736,G3DSA:3.40.50.1390,IPR036162,PTHR30461,IPR006119, PTHR30461:SF3,IPR025827,PS51737,PF00239,SM00857, G3DSA:1.10.10.2600,SSF53041
MAVSKNVTVIPARKHTRKSKDEEKPKLRVAAYCRVSTDSEEQATSYDTQIEHYTAYIQGHPDWMLAGIFADDGISGTNTKKREEFNRMIDECMAGNIDMIITKSISRFARNTLDCLKYIRQLKDKNIPVFFEKENINTMDSKGEVMLTIMASLAQQESQSLSQNVKLGLQYRYQQGEIQVNCARFLGYTKDENKRLVVVPEEAEIVKRIYREYLEGASMLKIARGLGADGILNGAGNERWHTSNINNILRNEKYIGDALLQKTYTVDFLTKKRVKNNGIVPQYYVENSHEAIIPREVFMQVQEELIRRRIVHTSPNGKTRTFSSNHVFAQIIICGKCGEVFRRVHWNNRGKKSIVWRCVSRLENTGLFCDARTVLESTIEQVLVTAINQTLCDKDSFLTTLRDNIATVINRE

SEQ ID NO: 10265 - protein, 520 aa, Unknown
  Description of Unknown: Integrase B10266 sequence
  cd00338,PF13408,IPR011109,IPR038109,PF07508, Coil,PS51736,G3DSA:3.40.50.1390,IPR036162,IPR006119, PTHR30461,PTHR30461:SF3,PS51737,IPR025827,PF00239, SM00857,G3DSA:1.10.10.2600,SSF53041
MKAASYARFSTDMQREESIEAQLMENRKYAEKHGIIIVKEYIDEAASGQTDNREAFQQMMEDAKKKLFDVIIVHKVDRFARNRYDAAIYKSMLMKYGIKVVYSAQPIDDTPEGSLLEGILEAFAEYYSKNLATEVLKGQKQNAFKAQFNGGFAPLGYDIVNKQYVVNEKEAQIVKEIFDLYLQGYGYKKVAEILNSKGYRNKFGKTFVANSIQPILTNEKYAGIYVFNKTQRKYHGGKRNMKRKKPEHEIIRIENAIPAIVSKETFEAVQREMKRRAPERGKPQTIREYLLSGLVYCSCGNKMSGYSQKRSKDSENYYFYYRCTKCQNSIRAEDVERKVLNVIQTEIFNDIDGLMAKIVDYVSQKEAGIPEELKYLQNELKNTETQINNIVNMITNGIASIQLGKKLQELELYAEGIKNRISEIDVKEKLPTDAIKKWLLELKEKFEKNEDLKQILPIFIDKVIVNKDNILVQTGIKKNLSNANSSSVVPSAPEKSRNVAVSTLLTAFCFLYHFANILQT

SEQ ID NO: 10266 - protein, 520 aa, Unknown; identical to SEQ ID NO: 10194
  Description of Unknown: Integrase B10267 sequence
  cd00338,PF13408,IPR011109,IPR038109,PF07508, PS51736,G3DSA:3.40.50.1390,PTHR30461,IPR036162,IPR006119, PTHR30461:SF3,PS51737,IPR025827,PF00239,SM00857, G3DSA:1.10.10.2600,SSF53041

SEQ ID NO: 10267 - protein, 520 aa, Unknown
  Description of Unknown: Integrase B10268 sequence
  cd00338,PF13408,IPR011109,IPR038109,PF07508, Coil,PS51736,G3DSA:3.40.50.1390,IPR006119,PTHR30461, IPR036162,PTHR30461:SF3,IPR025827,PS51737,PF00239, SM00857,G3DSA:1.10.10.2600,SSF53041
MKKKQSPSCRPKTAVAYARYSSAGQRDVSIEQQLQDIRAYAAREGYTIVHEYADHAKSGFKNTSARVEFSSMLAAAETGTFDTVIAWKVDRFGRNRRDSAIYKGQLRDHGVNVVYAMEPIPTGAAGVLTEGMLESIAEWYSRNLAENVTRGLRDNAAKGLSNGASIYGYQRGADGRYILNPDQAPLVRKVFEKYLAGYSAAVIAKEMNGAGLKGVRGGQISASVINRMISNERYTGVYIWNEYRIPDAMPAIISREDWERAQRMKEKTGRHIENSPADFLLTGKIFCGLCGRPMVGDSGTSKTGSKYYYYSCTGHKARGGYKRVCEKKSVRKDDIEKAVLDFIYDRCLTGPEQEKIADAILEAQKAYDQSSPRAAMQEELKATEKKINNINDAIAEGIWNSSTSIRLKALEDSAEKLRATLAEMEFSRSQLLDRDRILFFLQKMAKYNRDNPDRQYQLIQTFVNAVFVFDDGRLKIAINAVEGQATVQLSDVIESSDNDPIGVLSGSHPNPRVLIYTIAV

SEQ ID NO: 10268 - protein, 520 aa, Unknown
  Description of Unknown: Integrase B10269 sequence
  IPR038109,IPR036280,IPR006119,PS51737,PF00239,G3DSA:3.40.50.1390 ,PTHR30461,IPR025827,SM00857,G3DSA:1.10.10.2600, SSF53041,IPR011109,PF07508,PS51736,SSF48695, cd00338,PF13408,Coil,IPR036162,PTHR30461:SF3
MTKDLIPAVAYCRVSTLSDDQENSFENQKSFFHRECERLGYYLVEDVGTNGIFADRGISAKSMIKRPEFLKMVDSSKTRLFQMILCSNISRFSRNVSDLTDTIRQLKKNNVYVHFIKENLQTNDSNDDFVIGILSQIAQQDIVEMSKKIQFGMREAQQKGIYTSMPPYGYNKIDGYLQINEDEKEVVELMFYLYTNKGFSIDKIVRELNAICIPSKKNKKWQHTTIRHIIVNPIYIGLQINHKSEVKDIFINLVEKINEHEQIKNYFDHLQIIDKEVFIKAQEIKKERSKMADNNKKYSSTNILSNIYTCGNCHASMKRMQRSDKKGVFFYVCGNCHKDRAICPHYNYVTEIEIFKYIADEVEKIDKDEVRRLYQYYIDTNLGLEFRNSLPEIEFKIDKLENRKKNFQVMKADGDISKNDFRDRMNEVENELKDLHRNKDRILNIEREINKIWDTCRKLIDILENFDINNINNDILRILIKELTTATINGKKVNNIKLNTKMDKDFSIIVKEYALQNADL

SEQ ID NO: 10269 - protein, 520 aa, Unknown
  Description of Unknown: Integrase B10270 sequence
  cd00338,IPR011109,IPR038109,PF07508,Coil, PS51736,G3DSA:3.40.50.1390,PTHR30461,IPR006119,IPR036162, mobidb-lite,PS51737,PF00239,SM00857,G3DSA:1.10.10.2600, SSF53041
MADAVIYARYSSERQRDESIEDQIRVCTAEIEAQGDRLVGVYADRALTGTTSQQRAEFLRMVSDASRGGFSKVYVYKLDRFARNRFDSAIYRRELQRHGVALVPVAEHIPDGPEGIILESLMEGMAEYYSANLSQNVRRGLEGNALKCMHNGVKVLGYRNMPDGRYEVDEEKAALVRGIFGMYAQGMSLGRIAEELDAAGERTIFGKRYTPAFISRILHNDKYIGIYRFREVEVEGGMPRIIDDALWDAVQARLGAIHMRSPGRGRCPDPYILTGKLFDRKGRPYRGESGRSRSGRKYCYYQCAETGDAVRKDLIEGVVAEAVSDLLSSGSELSEELADSILACQDKMDERDVQDMERIRKRIESVEKGIGRLVDLVAEGVDPARTAGKISDFEEERAALQAELRELERRCPRLTREMVEFFLIKLLEGDAPLPVVDGFVSMVVIDGGNDPDDDPGGGGPGGGGGGRGVTVYFTVPAGGGRPRIGSSNPSHFERIRTPYELGRWRVVAVKDGFGLSSCFG

SEQ ID NO: 10270 - protein, 520 aa, Unknown
  Description of Unknown: Integrase B10271 sequence
  cd00338,PF13408,IPR011109,IPR038109,PF07508, Coil,PS51736,G3DSA:3.40.50.1390,IPR006119,IPR036162, PTHR30461,PTHR30461:SF3,PS51737,IPR025827,PF00239, SM00857,G3DSA:1.10.10.2600,SSF53041
MKKKQSPSCRPKTAVAYARYSSAGQRDVSIEQQLQDIRAYAAREGYTIVHEYADHAKSGFKNTSARVEFSAMLAAAETGTFDTVIAWKVDRFGRNRRDSAIYKGQLRDHGVNVVYAMEPIPTGAAGVLTEGMLESIAEWYSRNLAENVTRGLRDNAAKGLSNGASIYGYKRGPDGRYILNPDQAPLVRKVFEKYLAGYSAAVIAKEMNGAGLKGVRGGQISASVINRMISNERYTGVYIWNEYRIPDAMPAIISREDWERAQRMKEKTGRHIENSPADFLLTGKIFCGLCGRPMVGDSGTSKTGSKYYYYSCTGHKARGGYKRVCEKKSVRKDDIEKAVLDFIYDRCLTGPEQEKIADAILEAQKAYDQSSPRAAMQEELKATEKKINNINDAIAEGIWNSSTSIRLKALEDSAEKLRSSLAEMEFSRSQLLDRDRILFFLQKMAKYNRDNPDRQYQLIQTFVNAVFVFDDGRLKIAINAVEGQATVQLGDVIESSDNDPIGVLSGSHPNPRVLIYTIAV

SEQ ID NO: 10271 - protein, 520 aa, Unknown
  Description of Unknown: Integrase B10272 sequence
  PF13408,IPR011109,PF07508,Coil,PS51736, G3DSA:3.40.50.1390,IPR006119,PTHR30461,IPR036162,mobidb-lite, PTHR30461:SF3,IPR025827,PS51737,PF00239,SM00857, cd03768,SSF53041
MRFYTYGRKSVYKDNSDSIDNQFRMCREYCELKFPNEIDSWDCFSDEDFTGANTDRPGFQHMMSLIREDLCDVLVVYQLDRFSRDVRDFSAAYSELQAHHVRFICLDLNIDTSTPIGEAMMYVSAAFGQMERKNIALRVADNMIGLARKGYWVGGNPPMGYTKRRVDVEGRRHVSLAVDPEGADRVMSLFDYFLSSGLSLQGLETDFRKRGVKAERGGFFSSTQLHQLLTSPYCCEATQDVYDFFAAKGCKMESPRELWDGSVGVMVYGRSTQKNDVHQKTKPEDWIVCLGLHKPFMPAEKWLAVQGRLNRNKNFHAKKYPTALLRGVLRCSCGALMAVSSKKRLHDVGHWYYCERRMRMGAEVCPRIQIKCELLDNKVIEVLKSIEADPKQIEKFVAASSKRPAADPKKIQTKINAIEGKIGRLASSLSLADNSPAARYIIAEMEKLDAEKRTLQAAKQAADSERRGDMRRERENAQKVKEIAQLLKEIDGFTADERNEIIRSVVKECTWDGETLSLLL

SEQ ID NO: 10272 - protein, 519 aa, Unknown
  Description of Unknown: Integrase B10273 sequence
  cd00338,PF13408,IPR011109,IPR038109,PF07508, Coil,PS51736,IPR036162,PTHR30461,IPR006119, G3DSA:3.40.50.1390,PTHR30461:SF3,PS51737,IPR025827,PF00239, SM00857,G3DSA:1.10.10.2600,SSF53041
MNAVIYARFSSHSQREQSIEGQLRDCYEYARRYDINIVGEYIDRAISGTTDDRPDFQRMIADAPKKQFERIIVWKLDRFARNRYDSALYKHKLKQYGIRVISAMENVGDGDESILLEALLEASAEYYSLDLKKKIKRGQRESIAKGRWCGGPVPYGYKPVDGKLIADEKTAPIIRYVFEQYAAGVPMKEIIDELKRRGVRSSRGGELTYTTFSRALTNPVYIGNFMYKGELVPGVAETLIDEDTFNKVQILVKANAHAPAANKAKVEYLLQGKAFCGHCGSHMVGESGKSRNGDMYYYYSCSARKKKHSCSKKNEKKDFIEWYVVEQTLQYVLTPARMRDIAKAVVAEYDKEFSGSKVEEYEKAVKQYERELDKLVDALVDAPKVAHKRIYEKMEALEQQKTSMENELVKLRIASEIRFTEEEVRAWLRRFCTGDLFDPEFRRNIIDTFINCVYLYDDRIIIFYNIKGGKQVSYVDLAESLESNSEGSGSDLNANAPRKDLQRCKSFFVFTAFFCRIRV

SEQ ID NO: 10273 - protein, 519 aa, Unknown
  Description of Unknown: Integrase B10274 sequence
  cd00338,PF13408,IPR011109,IPR038109,PF07508, Coil,PS51736,IPR036162,IPR006119,G3DSA:3.40.50.1390, PTHR30461,PS51737,IPR025827,PF00239,SM00857, G3DSA:1.10.10.2600,SSF53041
VAAKPSDRYAIYLRKSRADVEAEARGEGETLARHRRALTELAVRRGYNVTMVYEEIVSGDTIASRPQMQALLQAVESGLYTGVIVNDADRLARGDSIDQGIVKQAFYATGTLIITPYKTYDPANESDEDFFDFSLFMARFEYRKIKQRMQTGRARSAAEGNWIGTRIPYGYIRVSRTDRRGYTLAPNPDTAPIVQMIFRWYAYGDDNSGAQMSSNAIANRLHSMGVKTTFGLDFDAGGIRNILKSPVYIGQTSWAKRVKRVHSSNGVRTETREVNPAPIIVENAHPPIIDAQTWDRVQQLFKSHKPLPKNKDAPCVNPLAGLIYCSECGRSMLRKPGVSGRPDHVWCQTRGCPTTGIYIPTLESIILDVLRSWCSMYSEPDAPKSDVTDSRATAAETLRRRVESLEKQLEKMYDLVEQGIYTPAEFIQRSGEVKRRIADAQDQLAALESTPTREEIIRMQLPQIQYVLEAYTMTDDAMSKNQMLKSVILRVIYHKTKKCTRADNPAEHMTLDVYPAYPS

SEQ ID NO: 10274 - protein, 519 aa, Unknown
  Description of Unknown: Integrase B10275 sequence
  cd00338,PF13408,IPR011109,IPR038109,PF07508, Coil,PS51736,IPR036162,G3DSA:3.40.50.1390,PTHR30461, IPR006119,PTHR30461:SF3,PS51737,IPR025827,PF00239, SM00857,G3DSA:1.10.10.2600,SSF53041
MARKKNIAAGQDAVIYARYSSHNQREVSIEQQVSECMKHAAELGLHVVGTYEDRAISGKTDKRPNFQRMMRDAEKGRFQAVVAWKSNRIGRNMLQAMVNEAKLDDYGVKVFYAEEDFDDTAAGRFALRNMMNVNQFYSENMAEDITRGLYDNASKCMANGRQPLGYKRGEDGRVVLDEANAAVVREIFTRVAAGDLFVDIARDLNAQGIKTSKGANWNKGSFQSICQNERYRGIYIYGDVRVVDGIPRIVSDDLWYRVQEAMRMKKNPVGTRHRVGAEDYLLTGKLRCGHCGSYMTGVSGTSRNGELHYYYTCQKRRTEHACDKKNIRRDVIEPAVAQAIKMYCLTDDVIAWIADRTVEYWEKHDNDLQIEALEQQLEENKKATSNMLKAIEMGIITEATRTRMVELETEQSRLSVQLNVAKEDVVKIDREQIISYLELLQQGDIHDRDFQMELFKNFLVAVYVYDDNRMKLVFSCMGDQNSVEIPLETGEDPPDGGLSPDAKMFVLTPDSSTRTKALH

SEQ ID NO: 10275 - protein, 519 aa, Unknown
  Description of Unknown: Integrase B10276 sequence
  PF13408,IPR011109,PF07508,Coil,PS51736, G3DSA:3.40.50.1390,IPR036162,IPR006119,PTHR30461,PTHR30461:SF3, PS51737,IPR025827,PF00239,SM00857,cd03768, SSF53041
MQVAIYTRKSIYTDNSESIHAQISMCEEYCNNNFKNYTVVKFNDEGYTGANTKRPAFKQLLEQIELNTIDIVVCYRIDRISRSVLDFSKFFNLIEEKGIKFVSVTEKIDTTTPSGRAMMYMSSVFGQMERESIAERVKDTMLDMAKNGYWCGGRAPLGYKIANVTIDNKTHKALEFDPKTLFFYKRLVKLFVEENLSLNGVLTRLKHDGILRTPLGGRISTTVIWQILSNPVYAQADEVTYNYFKSKGCNMIADKNKFDGSKALIRYGRTVGSRGKKHQVKKIEDWNISVGLHNYVITSDVYMQIMSKFGVNKINKERKHEIGIVHGILRCKCGSVMRAKVKYDKKYSVSYKHYICRKRYAYGKEACDMPYQNLELIDKAIIDILKSISLDKKLIDAYEEKPATNIASESELKREIVATKTKIENLTKNLALSSTASKYLIEEIERLDTQLNSLNLELSKVEQNKALVNINAKAKEKKYEQICELLENLEELEYKDLQDMLRKLLKECWFDGENLHIKI

SEQ ID NO: 10276 - protein, 519 aa, Unknown
  Description of Unknown: Integrase B10277 sequence
  cd00338,PF13408,IPR011109,IPR038109,PF07508, Coil,PS51736,G3DSA:3.40.50.1390,IPR036162,PTHR30461, IPR006119,PTHR30461:SF3,IPR025827,PS51737,PF00239, SM00857,G3DSA:1.10.10.2600,SSF53041
MSAVQPNKYAIYLRKSRADLDAESRGEGETLARHRIALTQLAERRGLNVVHTYEEIVSGESIQSRPQMRMLLAAIEAGEYAGVIVNDVDRLTRGDSIDQGTVKQAFYSTGTLIITPVKTFDPADEADEDFFDISLFFTRYEYRKINKRMQTGRARSAAEGNTLGARVTYGFNKVKRTDRKGYTLVPDPEKAEIVRMIFRWYADGENGVPMGADLIARRLNDMGLRTSLNVLFTGGGIRNMLKNPAYIGVASWNKRVKRVRVIDGARTVVRENNPEPIIVEGAHEAIVDRALWDRVQKMFSTHAKLPKNTDAPVSNVLAGLIKCSICGKSMQRKPGVSGRPDAIHCNTYGCPTTGIYIPLLEDALLDALRGWLVQYSNPESKPARESGVSSAAAALKKQLDALDGQMSRLHDLLEQGIYTPSVFIQRRDELSCRIANVKAELSRLNTTPTPEEIIVMQLPQIRHVLESYPRTTDLAERNQLLRSVISHVSYSKTRTCYRNDNPTDYMSIDIYPAIPSENR

SEQ ID NO: 10277 - protein, 519 aa, Unknown
  Description of Unknown: Integrase B10278 sequence
  PF13408,IPR011109,PF07508,Coil,PS51736, G3DSA:3.40.50.1390,PTHR30461,IPR006119,IPR036162,PTHR30461:SF3, PS51737,IPR025827,PF00239,SM00857,cd03768, SSF53041
MQVAIYTRKSIYTDNSESIHAQISMCEEYCKNNFKNYTVVKFNDEGYTGANTKRPAFKQLLEQIELNTIDIVVCYRIDRISRSVLDFSKFFNLIEEKGIKFVSVTEKIDTTTPSGRAMMYMSSVFGQMERESIAERVRDTMLDMAKNGYWCGGRAPLGYKITNVAIDNKTHKTLEFAPKTLFFYKRLVKLFVNENLSLNGVLTHLKHDGILRTPLGGRISTTVIWQILSNPVYAQADDVTYAYFKSKGCNMIADKNKFDGTKALIRYGRTVGSRGKKHQVKKIEDWNISVGLHDYVITSDVYMQIMSKFGVNKINKERKHEIGIVHGILKCKCGSVMRAKIKYDKKYSVSYKHYICRKRYAYGKEACDMPYQNLELIDKAIIDILKSISLDKELIDAYEEKPTTNVASESELKKEIVATKTKIENLTKNLALSSTASKYLIEEIERLDTQLNSLNLELSKVEQNKALVNINAKAKEEKYNQICELLENLEELEYKDLQDMLRKLLKECWFDGENLHIKI

SEQ ID NO: 10278 - protein, 519 aa, Unknown
  Description of Unknown: Integrase B10279 sequence
  cd00338,PF13408,IPR011109,IPR038109,PF07508, Coil,PS51736,IPR036162,IPR006119,G3DSA:3.40.50.1390, PTHR30461,PTHR30461:SF3,PS51737,IPR025827,PF00239, SM00857,G3DSA:1.10.10.2600,SSF53041
MYEDIKTACLYVRFSSHNQTEQSIEGQTRVCRDFCKRHNIRIVEIYADRATSASKDIEKRVQFLKMIKDSERGLFDAVIVYKLDRFARSRYDSATYKYRLKRNGVQLISATENISNDPEGIILESVLEGMAEFYSAELSQKINRGMRESAYKHNSIGGAVPLGYKIEDKKLVIDPKTAPIVKEAFEKYADGETVAEICRQFNARGYKTSKGTAFGKSSFTKIFRNERYIGVYTFHDYRAEDAIPAIIDKDLWDRVQLRVGKIKNAPARNKAKVVYLLSGKIFCGHCGSKMNGNCNAGNYCYYQCYGKKNGNVDCKKKNIRKEFIERLVAQDALSLLTDEYIEQIATIACEKNQHEIELDSALPTIRDRIHQVDLSLNHLLKAIESGSAPDMLVKRMGELEKEKKDLQAQAKKESEDIVELDKAQVIYWLEQFRGGSIEDEEFCRMLIDLFINSVTVWDEDDNTYKVTVAYNLTSLPTKTYRLNKGGTLSDFASNAPASLADAAVCRGSFHAVLGGEAGE

SEQ ID NO: 10279 - protein, 519 aa, Unknown
  Description of Unknown: Integrase B10280 sequence
  cd00338,PF13408,IPR011109,IPR038109,PF07508, Coil,PS51736,G3DSA:3.40.50.1390,IPR006119,IPR036162, PTHR30461,PTHR30461:SF3,IPR025827,PS51737,PF00239, SM00857,G3DSA:1.10.10.2600,SSF53041
LKKITRIEQASKGKTEPKKLRVAAYCRVSTDSDEQLESLETQKAHYESYITSRDDWQFAGIYYDEGISGTGKSRRPELERLMQDCKAGKIDMVITKSISRFSRNTTDCLELVRKLLAQNIPIWFEKENINTGSMESELFLSILSSMAADESLSISLNSKWSIKKRFENGTFKISYPPYGYDWDGETMVINPEQAQIVRRIFSETLAGKGTAAIATELNREQIPTKRGGNWSPSVVRGMIANEKYCGDCLYQKTWSDSAYKRHLNHGEQTQYLQQNHHEPIVSREDWEAAQKLISQRADEKNISKGDEKYQNRYAFSGRIICGECGATFKRRINYTTDGSYAAWSCKTHLANKSKCSMLFIRDNDLKLAFGAMMNKLIFAHRLILKPYAESLKRSSTSQTLSRIQHLETGLAENADKRKTLTKLMAQGFIDQVIYSQQTAELLSQADDIRKQIDALKNTTSNEATVLVQAEDLLRFTEKSPMLEAFDDQLFTRFVERIVIRSRHEAVFHLKCGLTLTERM

SEQ ID NO: 10280 - protein, 519 aa, Unknown
  Description of Unknown: Integrase B10281 sequence
  cd00338,PF13408,IPR011109,IPR038109,PF07508, Coil,PS51736,IPR036162,PTHR30461,IPR006119, G3DSA:3.40.50.1390,PTHR30461:SF3,PS51737,IPR025827,PF00239, SM00857,G3DSA:1.10.10.2600,SSF53041
MADTPKLNAAFYGRYSAGPNQTESSIEGQRRECYARAKSQNAVIRKDYIDRHISGQTDQRPQFQQLMKDVKKGLYNVVYVYTIDRFSRNKYDIAKYKNEMRKAGCRLISAKEYVPAGPEGIILESVLEGMAEYYSKELSRKVSRGMYESALKHRHIGGVVPFGFVLNKNKKYKADPVKAPIVREIYERYVKGEPAVEICKSLNNRGIATSLDKKFNKSSLNRILSNPKYIGTYTYKRAYIDEITQEKKTELIEFKNVIEPIISEELFIKAGQRMELNKRTSKRNKNKPQVEFLLTGKLFCSKCHAPYTGDSGTSKNGNSYYYYTCANKKSKRGKEACRSKSFPKDKLEEFVAQYTRDDILSTEVINWLAEQIVSLQGEQKDDLQIRTLIQQKKEVESKIQNIMLAIENGIFTPTTKDRLEALEESKRNLEYNIDVERFKNDAPMETKDSIIFYLNQFKNGDIKDLDHQRQIINSFIETIILDEEQMIIQYRYSDAANGTREIAIKNTFDVFECVLNGGG

SEQ ID NO: 10281 - protein, 519 aa, Unknown
  Description of Unknown: Integrase B10282 sequence
  cd00338,PF13408,IPR011109,IPR038109,PF07508, Coil,PS51736,G3DSA:3.40.50.1390,IPR006119,PTHR30461, IPR036162,PTHR30461:SF3,PS51737,IPR025827,PF00239, SM00857,G3DSA:1.10.10.2600,SSF53041
MTPAVIYARYSSSNQREESIEGQLRECHRYAEAHGFRIVKEYTDAAISGRSDARPAFQRMIREAESGAFSALIVWKLDRFARNRHDAAVYRYQLKKSGVKIYSVMEAISDGPEGIILEGLMESLAEYYSANLSQNIKRGCYDAALKRQVFGKPPLGYVKGPDGRYAIDPETAPIVRRIFEEYVSGRSLHQIREGLNADGIRTARGNSFTENSFHRMLKNEKYIGVYEFQDVRDEHGVPPIIDRNLWDAAQAMLSRVTPRRRHHKAETVPETYLLTTKLYCGHCGSPMTGESGTSKTGQIFRYYSCNGTKSRYRNGCKKKRVPKDWIESEVVRVLMEEILTDEFIEDLADHFVTAQRDETISPELEALRLQLSEVSKKINNINAAIAAGVWSSSTRDMLIELEASRDALAQKVAELEVRPPELPRSLIVDYLYSVKNGDVSDLRDKLIDLFVRRIYLFDADEGRTRAIFELSMDGADGDPVSREVILKFEQSVHSSTSRHLNEHLAVPDRRSVLVAVLLN

SEQ ID NO: 10282 - protein, 519 aa, Unknown
  Description of Unknown: Integrase B10283 sequence
  cd00338,PF13408,IPR011109,IPR038109,PF07508, Coil,PS51736,IPR036162,PTHR30461,G3DSA:3.40.50.1390, IPR006119,PTHR30461:SF3,PS51737,IPR025827,PF00239, SM00857,G3DSA:1.10.10.2600,SSF53041
MLRAVAYCRYSSDNQREESIDAQIRAIKEYCLRNDYSLVRAYTDEAKTGTNDNRKGFLDMIDDSSNGTFDICIVHKLDRFTRSKYDSAIYKKLLKDNSVRVVSVLENLDDSPESIILESVLEGMAEYYSKNLAREVMKGMKETALQAKHNGGMAPTGYDVAPDKTYIINDGEAGIVRKIFKMYIAGNGYGIIAQDLNDNGQCTKLGRLFTKGSIRDILLNEKYTGTYIFNKRLSKKDNHKYKEDSEVIRIEDAIPMIISKEDFIIVKSKMDGKKVGPRMNQKRFYMLTGKIECGECGASYVGAGYVPGRNGKKYPIYSCTNKRSHTCSNKNIRQELLENYVIAQLKENIFNIESIEKITSGIYEKLKEINSSADKEKKSLNIQKKSVQTKIDMAFDMAFDGTISKPLLAKKTNELELQLNAIVQKQYQLENKDYSWLNEKKIKKFLLASMENLEDEDPEVKRKVIETFVHRVIIYADHIVVTYKVEPSESNKTMDSDMVGGGEPYLTISLSIERSELYK

SEQ ID NO: 10283 - protein, 519 aa, Unknown; identical to SEQ ID NO: 10226
  Description of Unknown: Integrase B10284 sequence
  cd00338,PF13408,IPR011109,IPR038109,PF07508, Coil,PS51736,IPR036162,IPR006119,PTHR30461, G3DSA:3.40.50.1390,PTHR30461:SF3,IPR025827,PS51737,PF00239, SM00857,G3DSA:1.10.10.2600,SSF53041

SEQ ID NO: 10284 - protein, 519 aa, Unknown; identical to SEQ ID NO: 9683
  Description of Unknown: Integrase B10285 sequence
  cd00338,PF13408,IPR011109,IPR038109,PF07508, Coil,PS51736,G3DSA:3.40.50.1390,IPR006119,PTHR30461, IPR036162,PTHR30461:SF3,IPR025827,PS51737,PF00239, SM00857,G3DSA:1.10.10.2600,SSF53041

SEQ ID NO: 10285 - protein, 519 aa, Unknown
  Description of Unknown: Integrase B10286 sequence
  cd00338,PF13408,IPR011109,IPR038109,PF07508, Coil,PS51736,G3DSA:3.40.50.1390,IPR006119,IPR036162, PTHR30461,PTHR30461:SF3,IPR025827,PS51737,PF00239, SM00857,G3DSA:1.10.10.2600,SSF53041
MTPAVIYARYSSHNQTEQSIEGQLHDAHAYAEKNEYRIIGEYIDRALTGTKDSRPDFQRMIRDAERRQFEVVIVWKLDRFARNRYDSAIYKARLKKYGVRVVSVMENITDSPEGIILEGLLESMAEYYSANLSENVKRGQKESVSKGWFLGSHVPYGYRVQDHRLIARENEAPVAREIFRRYAAGEQLTAIAADLNARGLRTRAGTSFRASSFDSMVRNSAYAGHLMYNGQEVVGCADALIDQDTFDRAAARRLANRRAPAAAKAKTRYLLQGKIYCGHCGAPMIGESGHGHGGVYNYYTCAARKKTHTCKKKNEKKDLLERYVCEQTLQYILQPDRADHIASAVVVRYNAEFGQDQTADLERRIRKLDADLERLVDDLLALPRSARPRIAARMEQLEAQKADLETDLAKLRVASGIRLTEPHVRAWLRTFQSGSLDDPSFCQRLIDTFVNSVYVYDDRIVIFYNLSGAPPVEQKRVYETLSGEMADGSDLSGYGLPTQVKSEPGLVFVHGLIGLVIGR

SEQ ID NO: 10286 - protein, 519 aa, Unknown
  Description of Unknown: Integrase B10287 sequence
  cd00338,PF13408,IPR011109,IPR038109,PF07508, Coil,PS51736,IPR036162,IPR006119,PTHR30461, G3DSA:3.40.50.1390,PTHR30461:SF3,IPR025827,PS51737,PF00239, SM00857,G3DSA:1.10.10.2600,SSF53041
VKKVTKIKAKQTPAAEKAKLRVAAYCRVSTDSDAQLESLEAQKQHYESYIACRDDWTFAGLYYDEGITGTKKDKRPELMRMIRDCEAGKIDYVITKSISRFSRNTTDCLEMVRKLLALNIPIYFEKENLNTGSMESELFLAILSSMAEGESVSISENSKWSIQKRFKNGTFKISYPPYGYDWDGEQMVVNPEQAENVRWIFDQVLAGRGTQDIAKDLNAKGICTKKGNRWTAHTVRTLIVNEKYTGDVIFQKTYTDSQFNRHVNYGERDQYALTDHHEAIVSREVFAAAGDVIRQHSKEKGIVKGCGKYLNRYCFSGKIICGECGDVFKRRTHYCSEYKYIVWTCSTHLDDKSKCSMKFIHDDALKVAFVTMINKLIFARKLILKPYVQALRKGNNDDSLHRIQELQTLLMENSQQKERLTGFMAQGYIDQILYNEEMNTLLAQADRYNAEIEMLSNSVKGDASHIQAATSLLRFTEKSSMLDFFDEELFEEKVSCIRVLSREKIAFELKCGLTLTERM

SEQ ID NO: 10287 - protein, 519 aa, Unknown; identical to SEQ ID NO: 10222
  Description of Unknown: Integrase B10288 sequence
  cd00338,PF13408,IPR011109,IPR038109,PF07508, Coil,PS51736,G3DSA:3.40.50.1390,IPR006119,IPR036162, PTHR30461,PTHR30461:SF3,PS51737,IPR025827,PF00239, SM00857,G3DSA:1.10.10.2600,SSF53041

SEQ ID NO: 10288 - protein, 519 aa, Unknown; identical to SEQ ID NO: 10193
  Description of Unknown: Integrase B10289 sequence
  cd00338,PF13408,IPR011109,IPR038109,PF07508, Coil,PS51736,IPR036162,PTHR30461,IPR006119, G3DSA:3.40.50.1390,PTHR30461:SF3,PS51737,IPR025827,PF00239, SM00857,G3DSA:1.10.10.2600,SSF53041

SEQ ID NO: 10289 - protein, 519 aa, Unknown
  Description of Unknown: Integrase B10290 sequence
  cd00338,PF13408,IPR011109,IPR038109,PF07508, Coil,PS51736,G3DSA:3.40.50.1390,PTHR30461,IPR006119, IPR036162,PTHR30461:SF3,PS51737,IPR025827,PF00239, SM00857,G3DSA:1.10.10.2600,SSF53041
VKKPVSPSCSPRTAVAYARYSSAGQRDVSIEQQLADIRLFALREGYTIVHEYADHARSGFKNSSARTAFQTMLSAAEKGNFDTVISWKVDRFGRNREESAIYKGKLRKFGVKVLYAMEPIPEGSAGVLLEGMLEATAEWYSRQLSENVTRGMTDNAHRCLYNGTKILGYFRGADGRYALQPEEAAVVRNIFDLYISGFSAARIARQLNSQGVKTARGFPFAPEGILRIISNERYTGVYIWGDIRVPDGMPAIIDLKTFEEAQCMKKKTARHVEQGAVDYLLTGKAFCGHCGAAVIGDSGTSKDGTRHYYYTCQARKARKGCRKKTLTKDYLESRVVDFVLDVVLSDEQIEKTASAILALQAEELKSSPLAAMEAEYSETLKKIANINNAIAAGIWNSSTSAMLKTLEDSAEQLRQSVEMLRYSQTQLLDHDRVIFFLHRFTKGDRNDPLLRRHIIDTFINAVYVFDDHLDIVTNNCEGNQRFPLESLPDPSDECSDCDSSGVPTVLHPNTQVTIFRVAI

SEQ ID NO: 10290 - protein, 518 aa, Unknown
  Description of Unknown: Integrase B10291 sequence
  cd00338,IPR011109,IPR038109,PF07508,PS51736, G3DSA:3.40.50.1390,IPR006119,IPR036162,PTHR30461,PTHR30461:SF3, PS51737,PF00239,SM00857,G3DSA:1.10.10.2600,SSF53041
MPPTDPSEGSTPLTPAAQYVRMSTEHQQYSTENQRDAIAEFAKARGYEIVKTYADDGKSGLRIEGRESLRQMLADVQSGAAPYRAILVYDVSRWGRFQDSDESAYYEYACRRAGIHVEYCMEQFANDGSPVSTIIKSVKRAMAGEYSRELSNKVFKGQCRLIQLGYRQGGPAGYGLRRMLIDVNGTPKGELKRGEQKSLQTDRVILVPGPADELQVVQSIYEQFVKHGKRERAIAESLNEAGIASGCDRPWTRSMVHQILTNEKYIGNNIYNRVSFKLKKKRVVNPPDMWVRVDGAFDAIVDPESFYMARGIIQERNRHFTDAEMLDRLKTLLAVHPELSGALIDETDGMPSSSAYRQRFGSLVNAYRLAGYTPERDFEYLEINRHLRRAHPQLLGDMIQDLQTMGATVERDEASDVLVINGLYSASLYLARCRSTPAGSHRWRFRVPGERSSDIHIIVRMDAANEQPADYFLLPALDIEMPELRLSAFNGASIDTFRFESLEFFFGMAKVVQIEVAA

SEQ ID NO: 10291 - protein, 518 aa, Unknown
  Description of Unknown: Integrase B10292 sequence
  cd00338,IPR011109,PF07508,Coil, IPR036162,PTHR30461,IPR006119,G3DSA:3.40.50.1390, mobidb-lite,PS51737,PF00239,SM00857, SSF53041
VTRRTAVLNPVATARIAELVATLRERDTDPAYATAPRLDTYARISPSADPTAVKVERQTTDVLEMLLRGNYRLGETLIDWNLSAWKPRGKRPAFLSGLARVASGESNGIAAWNSDRLTRQLSEAEQLIAVATVNRAVFLSYSGEFDLSTSDGRMMLRLQTMFAQQESDRKSERLARKYAAQREGEGRSDGLGGYQSTDVFGHGGRDEATLTAERDAIAWAIPEVTNGATWQAVADEWNRRGLSSRGGQRFNVTKVSTILQQPRHAGYLTLGDHGSRTIVGEAHNAVAIVDKATWSRFTAVLASRAERSGGRPAGTTQTHLLGGLLRCAECGNTLLVSGPSYRCNGAIGCRRVTVNAAVLDAVVGEYVVETLSDPRNGHRIAARNSERGRIEVELERVRERKRRFTALYQAGSLDDDEYVRVTTDNATMVRELESRRDALTDDGQPARVHSRDEAEREWSKSEGNREERRELVLSAFPLGIAVRLPTVARVKSTAANTRDRLSRILPGWLESITAQRAA

SEQ ID NO: 10292 - protein, 518 aa, Unknown
  Description of Unknown: Integrase B10293 sequence
  cd00338,PF13408,IPR011109,IPR038109,PF07508, Coil,PS51736,G3DSA:3.40.50.1390,PTHR30461,IPR036162, IPR006119,PTHR30461:SF3,PS51737,IPR025827,PF00239, SM00857,G3DSA:1.10.10.2600,SSF53041
MKKAVIYARFSCGRQTEQSIEGQLRKCHSYAKEHDLVVVKEYIDRARTARNDNRPYFQKMLSDSEDSEWEYVIVYSIDRFSRDDGDYGADKRILRNNGVTLLSATETIGMNADGTENLGGILTEGLLVALAKYYSRELSQKIRRGQYESLQKGQTLGSSAVYGYFVKDKRYHINEDQAVVVREMFELYSKGKSAIDIAEIFAKRGLRNAQGRPFKPNGIMKMLKNPKYIGTYTFGDKVYEDYHPAIVEKNLFYLVQERIEKNKMNPARLKARDEFILTGKLYCGYCKHTMVGESGTSHTGQSYYYYKCSHRKNRKGCEKKNIKKDVLEDIVIEETLKHILNGSIIDDITTEILALQEEQRDLSELVLLKKQLSEISGYINNLLTAIKRGIITESTQAELQKLEEDKKLIEERIVQEEFKDSQKLTKEKIEFWFEQFLHFDKTDKGAREYLVNYFINRIFLYDDRIVIIYNHDGDNRTDLSNEEIEEALSSDLTHDRPPKAHNPNLYITKKFVALVIGL

SEQ ID NO: 10293 - protein, 518 aa, Unknown
  Description of Unknown: Integrase B10294 sequence
  cd00338,PF13408,IPR011109,Coil,IPR036162, IPR006119,G3DSA:3.40.50.1390,PTHR30461,IPR025827,PS51737, PF00239,SM00857,SSF53041
MAKPPRPSDDIDYGSEIQQLVAALRLRDADPAFADAPVIDVYARISKVTDAHDSEKVPRQLVECLRNLMGRTARLGEMFSDAGKSAWKIEGKRPEFDRLMTRIAKGRNNGVLCWHIDRLSRQPWDMEQMIRLVELRKATTNDRYVFASCHGDHLLSNLLELRIKMAFSAEESRRKSERIRNLNAHRRAAGIVKGGPSPFGHRYVDDTHISDAQLDAERMAIKWGIETISAGRSLGAVAREWERRALTTRAGKTFNALNVRAVLMHARHGGLLEHDGKILRSMSNVDAIVSEETYRLMRKVFEGRKRGRQPAEAVHYLSGWVHCDECGGPMVGSTSPGTYSDGTQRRQYRCTPRGCSNVSVDARAAEHYAALHVVKELSDPRNTVLIAARSSALAEMDRRISQLERIRSTLHDKAMANIDSYDFYAEKVEETEKMLAPLWQERRELALAGAMQSSTVQDVESVAQNWSDADPAQRRVMVEQAMPDGFWVAKVGRTRRLRGDDILVRFGRTRGEATSRLC

SEQ ID NO: 10294 - protein, 518 aa, Unknown
  Description of Unknown: Integrase B10295 sequence
  cd00338,PF13408,IPR011109,IPR038109, PF07508,Coil,PS51736,G3DSA:3.40.50.1390, IPR006119,IPR036162,PTHR30461,PTHR30461:SF3, PS51737,IPR025827,PF00239,SM00857,G3DSA:1.10.10.2600,SSF53041
MLKKPRISCQPRTAVAYARYSSAGQRDVSIEQQLKDIRAFADREGYTIVHEFADHARSGFKSASTRAEFQAMISAASSGSFDTVLCWKVDRFGRNREDSAIYKGQLSRLGVSVVYVMEPIPTGAAGVLTEGMLEAIAEWYSRNLSENVKRGMSDNASKCLYNGTTVFGYDGIRNQRYQINEEQAAVVRQIFHLYAEGYSMTSICRLLNDAGQRTESGRPFVYNKVHNILNQERYLGIYIFGDYRIPGGMPAIIDPDLWEAAQRMKQKTSRHYEESPVEYLLTGKAFCGHCGKPMVGDSGTGKSGSTFYYYSCQSKKRRAGCNKKSVRKEYLEDTVISFLLDHVLAGPEVEKIADAILEYQKKRADSSPLRSMESELRNTERKISNTNRAIAEGVFTSSTLEMLRSLEETASNLRISIEARKYAEGQLLDRSRIIFFLGQFSHLDRNDPHDRRFLINTFLNSVYVYDDHLRILVNATESSATIAFSDLPPDSGCSDSDCCRLLLQSHSNTIVILYDVRL

SEQ ID NO: 10295 - protein, 518 aa, Unknown
  Description of Unknown: Integrase B10296 sequence
  cd00338,PF13408,IPR011109,IPR038109,PF07508, Coil,PS51736,G3DSA:3.40.50.1390,IPR006119,PTHR30461, IPR036162,PTHR30461:SF3,IPR025827,PS51737,PF00239, SM00857,G3DSA:1.10.10.2600,SSF53041
MPKEKAVVYARYSSHNQTEQSIEGQLAAARKYASLHDYVIVQEYCDRAKTGTNDNREAFQKMLSDCSKKQFSVIIVWKVDRFGRNREEITFNKYKAKKNGVRVEYVAESISEGPEGVILESVLEGMAEYYSLQLSQNVKRGLLESAKKYQVIGGHTPLGYKTGPDKRYAIDPDTALVVKQIFEKYASGLTMAQLTRWLNDSGYRTPKGKKFTKNSLPRILSNEKYAGVYVYKDLIRQPGEIPAIVDQDLFDQVQNMLKRNKRMPSHSWDYSDYLLTDKLFCGKCGKQMVGKSGYGRHGGKYEYYCCKGRLENSGCDKSHVRKDWIEEKILKEVLFVLNDDVFMNFLIDTIWEYYLKQDTESKEIENMTRKLETVNTAIENLVRSVEDGMPYKLVKNRMVELEEERTAIQKYVAEAELKRGLRLTKEHIAFFLEQFRDLKYKDRKCQTKLIETFVNSIYLYDDELTIAFNYSGENNTITLTDIEKANTCFVRTCSQEQGITHSMRTSVYKTVFLIKVKI

SEQ ID NO: 10296 - protein, 518 aa, Unknown
  Description of Unknown: Integrase B10297 sequence
  cd00338,PF13408,IPR011109,IPR038109,PF07508, Coil,PS51736,G3DSA:3.40.50.1390,IPR006119,IPR036162, PTHR30461,PTHR30461:SF3,IPR025827,PS51737,PF00239, SM00857,G3DSA:1.10.10.2600,SSF53041
MKKPAAPQCSPTAAVAYARYSSAGQRDVSIEQQLKDIREYARRQGLTIVHEYADHAKSGFRHIEARTEFNRMMNAARAGKFAVVIVWKTDRFARSREDAAVFKGHLRRAGVRVLSAMEPIPEGSAGILLEGMLEATAEWYSKTLSENVIRGLADNARKCLWNGNRVYGYGHAADGTYVINEEEAAIVRQIFALYCAGWSAANIAKQLNGQGVTNARGHKWALSGVLNAVGNERYTGVYIYSGHRIEGGMPAIISREEWEEAQKMRKKTSKHYETGAVDYLLTGKAFCGHCGAAMVGDCGTSKTGARYYYYTCQAHKARKGCDKHSVPKQYLEDTVMNYIMDHVLTPEEMDRIADVLMEQQKKRLADSPLPALKAELKEVDDQIDALNDAIAQRIWSKTTVVKLKSLEEQADALREHIEELKYSQDQLLSKKRILFFLHRFAAGDREDPVHREFIIRSFVNAVYVFDDYIKLVVNEVEGNARIPLESLSSDDDQMAGQTVQYPNSATAVYRIELHKKRA

SEQ ID NO: 10297 - protein, 518 aa, Unknown
  Description of Unknown: Integrase B10298 sequence
  cd00338,IPR011109,IPR038109,PF07508,Coil, PS51736,G3DSA:3.40.50.1390,IPR006119,PTHR30461,IPR036162, PTHR30461:SF3,PS51737,PF00239,SM00857,G3DSA:1.10.10.2600, SSF53041
MGAYKNTGALWEYYLVYLRKSRQDDPRETVEEVLEKHETQLQEFALREFGGRIPEGNIYREVVSGESIDDRVEMQKVLARIEDPNVKGVLVIEPQRLSRGDLEDCGRLISDFRYTHTKVVTPMMTYDLENKMDRRFFQDELLRGRDYLEYTKEILRRGREAAVKRGCFIMQNAPYGYNKIKIGKDHTLEPNEDADVVRMIFDWYVNEGLSGYRMAQRLDEMGVPAPKGGKWHKEVISRMVRNPHYIGKVVCNSRPTVTVIENGERRTRRLKAAPEDTIIAEGKHPAIISRDLWDRAQEKVRNTPRLRNGEELSNVLAGLLRCSSCGYMMDRRPLPSGARYFCPARGHKQCFKSVKCDRVLDALRITLEEAELPALRSKVANDEGNARKMQERIIAKLQKQMSDYRDQEDHQYELLETKKYTQELFDRRNAQLRAKMEECEKQLYLARSAMPKSVDYAERVVALEAAIKALHDPDASTTEVNKVLKAIIERIEFTGEPGRGKYGPREGEGIKLEVFLRL

SEQ ID NO: 10298 - protein, 518 aa, Unknown
  Description of Unknown: Integrase B10299 sequence
  cd00338,PF13408,IPR011109,IPR038109,PF07508, Coil,PS51736,IPR036162,IPR006119,PTHR30461, G3DSA:3.40.50.1390,PTHR30461:SF3,PS51737,IPR025827,PF00239, SM00857,G3DSA:1.10.10.2600,SSF53041
MRVVLYMRYSSDRQTEQSIEGQQRVCKAFCESQGYDIVDMYIDRATSAFKDTDKRTEFQRMIKDSEKQLWDAVVVYKLDRFARNRYDSATYKARLKKNGVRVISATENISDNPEGVILEAVLEGMAEFYSKELSQKITRGMYESAHKCHSIGGHIPLGYKIVDKKLVIDEAGAAIVREAFELYANGATVAEICEIFNKKGYRTAKNAEFNKNSFRSMFKNERYIGVYTYKDMRIKGGVPAIVDRETFEIVRKRLVSNAQAPSRGKAKVDYLLSQKLFCGHCGSLMPGESGTSKTGIVHNYYTCGQRKRQHSCDKKPLRKEFIERAVVEDAISILTPETIEELAEMAVKAAEDEINNNSIIPSLRAELAEIQKSINNLIKMVEKGVESDTLADRLKDLEKQKRATEKRLVEAEDDYIILEKDHIVFWLSKFCDGDIEDEDFRRHIIDLLVNSVTVWDEPDGWYKITSVYNLTSNKTKTFRIPKEKSSDLTNLAPPLEDYPNTFFIGVVFGQTRKHRVEP

SEQ ID NO: 10299 - protein, 518 aa, Unknown
  Description of Unknown: Integrase B10300 sequence
  cd00338,PF13408,IPR011109,IPR038109,PF07508, Coil,PS51736,IPR036162,IPR006119,G3DSA:3.40.50.1390, PTHR30461,PTHR30461:SF3,PS51737,IPR025827,PF00239, SM00857,G3DSA:1.10.10.2600,SSF53041
MNAVIYARYSPGPRQTDQSIEGQVRDCMAYAEQNDIKVLKVYADRHISGTDFEKRAEFNKMLRDSEKGQFEAIIVWKIDRFGRDREEIALNKIKLKRHGIKLLYAKEVIPDGPEGIILESLMEGLAEYYVADLRQKVKRGQRESALKGLAVSGMAAYGYKISDEKKYIENEDESWVVKYVFEHYAAGKTATEILDELTKMGVKNRKGSPITKNGIYSMIRNEKYIGKCTYDGIDIPIPALISEELWDAVQSKIIRRPHSSAVYKAPERYLLSLKAFCGECGAMLVGESGYGKQGNKYLYYKCSTRKKKGHSHDCSLKTIRKEQLEDFVVQHTISDVLQDDVIYYIADKVIEINKKHTVNQLLSQLKSALRKAENGRNNLLKAIEDGIYTPSTKERLLELENECEELKVQIAKESIKKPEITKDHVVYWLEMFRKGNIKDEGFKQRLLDVFVHSVYVYNEKVVIAYNYTDNNHDNSIDVPGILEGSDTFVKVRDGVLYPNLSILNEYNIFVLIVNSPAA

SEQ ID NO: 10300 - protein, 518 aa, Unknown
  Description of Unknown: Integrase B10301 sequence
  cd00338,PF13408,IPR011109,IPR038109,PF07508, Coil,PS51736,IPR036162,G3DSA:3.40.50.1390,IPR006119, PTHR30461,PTHR30461:SF3,PS51737,IPR025827,PF00239, SM00857,G3DSA:1.10.10.2600,SSF53041
MRAAIYARFSSHNQTEQSIEGQMRDCLNYANTNGIRVVAEYIDRALSAKTDNRPQFQKMIKDSEKGLFDVILVWKLDRFCRNRYDSATYKARLRRNGVKVISVMESISDEPEGILVESLLEGMAEYYSAELAQKIRRGMRESALKCKVTGSLPLGYKSDADKNIILDEERAPIVRKIYELYADGWCAKDIIEYLNSRGLTTQKGQAFNKNSLPRILSNPRYKGIYIYGDRVVPDAIPRIVDDELWDKVQKMLNKNKKSGATHKARADYLLTTKLFCGHCKSMMIGESGTGKYGEVYHYYKCAAKKNHTLPCDKKNIKKDYIENLVVENIYYNILGNDELIERIADKAMEIQASEKSDGILEALKAELSEKKKALNNLLSAIESGVVTKSTKKRLEELEETVEDLEFEIEKEKAEKPKLERDVIIFLLDQLRDGDLSDVEYRKRLINTFVHKIYLYDDGRLLLVYNFTNREPKLCEEELLALVEGESSDTDASAPPIVTVSETVFFYGLALCQLLNLKK

SEQ ID NO: 10301 - protein, 518 aa, Unknown
  Description of Unknown: Integrase B10302 sequence
  cd00338,PF13408,IPR011109,IPR038109,PF07508, Coil,PS51736,G3DSA:3.40.50.1390,IPR036162,IPR006119, PTHR30461,PTHR30461:SF3,PS51737,IPR025827,PF00239, SM00857,G3DSA:1.10.10.2600,SSF53041
MTNAVIYARYSSHGQTEQSIEGQLHDAYAYAEKNGYNIIGEYIDRALTGTRDARPDFQRMIREAERRQFELVIVWKLDRFARNRYDSAIYKARLKKYGVRVVSVMENITDSPEGIILEGLLESMAEYYSANLSENVKRGQKESIMKGWFLGGHPPYGYRVEDHKLVINEREAPVAQEIFRRYAAGDPISQIAADLNARGYRTRSGTPFRASSFDSMVKNSAYMGRCQYGDQVIDCISVPLIDQETYETALQRRERNRRAPAAAKAKVRYLLQGKVFCGHCGSPMIGESGYGRRGAVYNYYTCSARKKSHSCRKKNERKDPLERFVCEQTLRYILDPERLDDIAQAVVAAYDQDFNGDKIADLERTAARLEAELNRLVDSLMEVPASARKRIGEKMEQLETQKADVETDLAKLRLANGIRLTYDQVNTWLSSFHAGDLDDESFRQKLIDTFVNSVYVYDDRFVIFYNIRGGKSVSPRELHETANKLAGSDLARDGLPNTVKSEPGLVIVHGLIGLVIGR

SEQ ID NO: 10302 - protein, 518 aa, Unknown
  Description of Unknown: Integrase B10303 sequence
  cd00338,PF13408,IPR011109,IPR038109,PF07508, Coil,PS51736,IPR036162,G3DSA:3.40.50.1390,IPR006119, PTHR30461,PTHR30461:SF3,PS51737,IPR025827,PF00239, SM00857,G3DSA:1.10.10.2600,SSF53041
MAKAKRPTCRPKTAVAYARYSSAGQRDVSIDQQFRDIRAYAKREGYRIVHEYADHAKSGYKNASARTGFSAMLSDAEDGRFDTVIVWKVDRFGRDREAAAVSKGTLRRLGVSVVYAMEPIPSGAAGVITEGMLEAIAEWYSRNLSENVSRGMNDNARNCLYNGTKVLGYHRGADGHYAITKEEAGVVRDIFHRYCDGFSAATIAGELNASGLKTPRGCAYTPQTVLRIIANERYLGTYIWGSVRVPGGMPAIVSPDEWEKAQALRKKTTRHYEETPVDFLLTGKAFCGMCGEGMVGDSGTSKSGVTHYYYTCHGKKARKGCRKISLRKEYLENAVIDLIRERLLTGEEKEKIADAIISAEKEEMKSSPLAAMEAELKDVNRRIDNINGAIENGIYNASTSARLRSLEDIAADLLSSIEELRFSQSQLVTRDRVLFFLDQMAAFDTTDPLRRRQLIETFINAIYLFDGYMHVVINCIDGNIRVPLSDLPDLPPCSDNGANAPPVVSHPNTRIVIYTVAV

SEQ ID NO: 10303 - protein, 518 aa, Unknown
  Description of Unknown: Integrase B10304 sequence
  cd00338,PF13408,IPR011109,IPR038109,PF07508, Coil,PS51736,G3DSA:3.40.50.1390,PTHR30461,IPR036162, IPR006119,PTHR30461:SF3,PS51737,IPR025827,PF00239, SM00857,G3DSA:1.10.10.2600,SSF53041
MNAVIYARYSPGPRQTDQSIEGQVRDCMAYAEQNDIKVLKVYADRHISGTDFEKRAEFNKMLRDSEKGQFEAIIVWKIDRFGRDREEIALNKIKLKRHGIKLLYAKEVIPDGPEGIILESLMEGLAEYYVADLRQKVKRGQRESALKGLAVSGMAAYGYKISDEKKYVENEDESWVVKYVFEHYAAGKTATEILDELSRMGVKNRKGSPITKNGIYSMIRNEKYIGKCTYDGIDIPIPALISEKLWDAVQSKIIRRPHSSAVYKAPERYLLSLKAFCGECGAMLVGESGYGKQGNKYLYYKCSTRKKKGHSHDCSLKTIRKEQLEDFVVQHTISDVLQDDVIDYIADKVIEINKKHTVNQLLSQLKSALRKAENGRNNLLKAIEDGIYTPSTKERLLELENECEELKVQIAKESIKKPEITKDHVVYWLEMFRKGNIKDEGFKQRLLDVFVHSVYVYNEKVVIAYNYTDNNHDNSIDVPGILEGSDTFVKVRDGVLYPNLSILNEYNIFVLIVNSPAA

SEQ ID NO: 10304 - protein, 518 aa, Unknown
  Description of Unknown: Integrase B10305 sequence
  cd00338,PF13408,IPR011109,IPR038109,PF07508, Coil,PS51736,IPR036162,PTHR30461,IPR006119, G3DSA:3.40.50.1390,PTHR30461:SF3,PS51737,IPR025827,PF00239, SM00857,G3DSA:1.10.10.2600,SSF53041
MEVVLYLRYSSDRQNEQSIEGQRRVCEKYCESMGYTIVGEYADRAMSAMKDTDKRVNFQRMVKDSEKRLWQGVIVYKLDRFARNRYDSATYKARLKKNGVRVISATENISDNPEGIILESVLEGMAEFYSKELSQKITRGMYESALKCNSCGGHISLGYKIENKKLVIDPKTAPIVRKAFDMYANGHTVAYICQVLNEAGYRTKTGSLFNKNSFHSIFRNRKYIGEYKFMDVVVEGGVPAIIDKETFEKVQVILNRKAQAPARGKALVDYMLSGKVICGHCNKLATGTASTSHTGRKYFYYTCSGRRGHNGCTKTPIRKELLEEAVVNDTVEMLTPEVIEYLADLAVKASEKERQDYTLISSLQAEISEYEKSIERLLKLVENGADSPTLSKRLNELEKAKRSAERSLVKEEAEYFLLDKDQVVFFLTQFTQGDKADPEFQRRIIDLLINSVIVWDDEDDGDGTHKITITYNLTPRKSKTITVKDLSKVGCVFQPDKPTTTSGQGCFVHRCYCNGLTY

SEQ ID NO: 10305 - protein, 518 aa, Unknown
  Description of Unknown: Integrase B10306 sequence
  cd00338,IPR011109,IPR038109,G3DSA:3.40.50.1390,PTHR30461, IPR036162,IPR006119,PS51737,PF00239,SM00857, G3DSA:1.10.10.2600,SSF53041
MSKKCIIWVRCSTERQEIESQKKETIEYAKSLNFDDFVVVGKLGASAYKVNKLYLEMLDEMKSKIIADPDIKAVVCWHLNRMARQEKMAMDIKDFLIEHKVQLYVREPGIKLLKDDGSVDDGAELVYNIFSTMNKQQISELRMKIKRAKKRDKALHKYIGGPVVAYGYKVDENTKQVVPDVKQAEIVNTIYDLYGTGEYSYTTLVKEVNERYGTNFKWNYMKRILDTTRYYDEEKYPPIITELQYKKAEQQRKNCTSRPAQSKHFHFANRLIKCPICGRGYTGNIRDYRCTRVLEHKDRATTISIPNLDGLLWTIAQHLESGKLLKASAKDEYLQNKAVLSAKIEGVAQSLTRLEKRAERGKKMALEGLIEVEEYKAILKECEAAGAEIHSKVDNWKAQIADLDRLINEDTIGMKRILEISDNITELDEKEMRTIVRRWIRRITFDNKGIFEITTLTRVYRCKYNRYGFESRWYTLSGNPIAVKPYIRDKDGAHFGKNRCTVKDLPITLAWLTGSEVV

SEQ ID NO: 10306 - protein, 511 aa, Unknown
  Description of Unknown: Integrase B10307 sequence
  PF13408,IPR011109,IPR038109,PF07508,Coil,PS51736,G3DSA:3.40.50 .1390,IPR006119,PTHR30461,IPR036162,PTHR30461:SF3,IPR025827, PS51737,PF00239,SM00857,cd03768,G3DSA:1.10.10.2600,SSF53041
MGNEKRGEETGPSRVAFYTRISTDEDHQKYSLDAQKDRLEAYCKSQYDDDWRLFKIYRDTESGTHMNRPGLEEMLYDASNKAFDVLLVFRVDRLSRKVRELALMVDELTKYHIALKSITEPFDTANAAGKMMLQMLGVFAEFEHATIVERTKVGMEKKAKGGDFVGGYVPFGYRLEPEKGLVVREEEALLVRKIFQMYALGLEGTQTVVNKLNASGIRKRSGQKWEKHGLLQILRNPLYVGKLRWRECIYDGKHDPIISEDIFKKAQEILKERATEVNGRQWHNGEERLLSGVIMCGKCGTHMVGVSTQKKDRKFPYYLCNKRWKTHDCDQAYVRADLLEKAVMMDITGMFQDEQFMARIWAEANRRLGAEKPDVERELGRVEAQMDRTQKSLDRYFQAFEAGSMKPALCNEKVAGLTARLAELDAERAALNARRQRLSLPALDRDMLAKWLKEFEEVFAAGTNPQRKHLLQRVVKKVLIHDRRTVEVWYGLPNSPSVRTTGGLAPRTQPS

SEQ ID NO: 10307 - protein, 518 aa, Unknown
  Description of Unknown: Integrase B10308 sequence
  IPR011109,PF07508,Coil,PS51736,IPR036162, IPR006119,G3DSA:3.40.50.1390,PTHR30461,PTHR30461:SF3,PF00239, SM00857,cd03768,SSF53041
MRIAIYARKSAFSDKSESVHNQDRMCREYCALHFPGEHIFLNYTDEDKTGANTNRPALQKMMRDVHTGIIDLLIVYQLDRLTRDVRDYCNLSAELNDCGVHFTSVKESVDTSTPIGEALTTLSAVFAQMERKTLSNRVYDNMMGLARSGWWTGGNLPCGYTTRRVVENGKPHTLLVPDPEKAEQLVTVFKLFVERGSSFHSFASFALTNDCFDIFGIPSTSQVRRVITSPYGAPANKDLRNYYLSIGANVIGAESDWDGAHGVMRYGVTDQRNGTTTNPRESWIVCPGRHEPILPADLWLAAQDQVKSNMFCKQAKYPPVLLKGILCCKCGRMMSPVRSRYKDKMYISYRCTRTGEVGRKSPDCVSACRDYVLDEKVLSVFREIERDPEVIKKYSPAAPATDQDALHKKEKEIESLQKKIGNLSSALAINPESTAAKYIIADMESLDSQIQKKQMELAGLRANRLTAAQAEKELAAKQKEIARLVRNLDDLPPEEQNKIARSVLRKCVWDGDTLFLEF

SEQ ID NO: 10308 - protein, 517 aa, Unknown
  Description of Unknown: Integrase B10309 sequence
  cd00338,PF13408,IPR011109,IPR038109, PF07508,Coil,PS51736,G3DSA:3.40.50.1390, PTHR30461,IPR006119,IPR036162,PTHR30461:SF3, PS51737,IPR025827,PF00239,SM00857,G3DSA:1.10.10.2600,SSF53041
MKKTLTACPPRTAVAYARYSSAGQRDVSIEQQLADIRSFADREGYTIVHEYADHARSGFKDLSARQEFNAMIASAAARGFDTVLCWKVDRFGRNRADSATFKQQLALLGISVVYVMEPIPAGAAGVLTEGMLEAIAEWYSRNLSENVTRGMHDNARKCLFNGTRILGYRRGSDNHYEIVEEEAAIVRRIFARYAAGYSAAVIGRELNAAGLRTPRGVPYTEQTLLRIIGNERYSGVYIWGDIRVPDGMPAIISRKEWEEAQRMRTKTARHVEQRATDFYLTGKAFCGRCGKAMIGDSGTSRSGTTHYYYTCQGHKSRSGCDKKNVRKDDLENAVIDFIRNTCFTEPEINRIADAIMEEMEKRKKKSPLAGMEQELSDVEKKISNINKAIAAGVFGDSTLIMLQDLEETAKDLRTNVAMLRFEESKLVERDFVIFNLHKFAQLDPSDPESRRKLINTFLHSVYVYDDHLKIVINAIENAATIPIDPSIIDSLGSDNLSSGVLIVTHPNQILFWYISRM

SEQ ID NO: 10309 - protein, 517 aa, Unknown; identical to SEQ ID NO: 9782
  Description of Unknown: Integrase B10310 sequence
  cd00338,PF13408,IPR011109,IPR038109,PF07508, Coil,PS51736,IPR036162,IPR006119,PTHR30461, G3DSA:3.40.50.1390,IPR025827,PS51737,PF00239,SM00857, G3DSA:1.10.10.2600,SSF53041

SEQ ID NO: 10310 - protein, 517 aa, Unknown
  Description of Unknown: Integrase B10311 sequence
  cd00338,PF13408,IPR011109,IPR038109,PF07508, Coil,PS51736,G3DSA:3.40.50.1390,PTHR30461,IPR006119, IPR036162,PTHR30461:SF3,PS51737,IPR025827,PF00239, SM00857,G3DSA:1.10.10.2600,SSF53041
MSIKTKKPSCSPRTAVAYARYSSAGQRDVSIEQQLADIRAFAKREGYTLVHEYADHARSGFKNTSARTAFQSMIAAASEGSYDTIIAWKVDRFGRNREDSAIYKGKLRRFGVRVLYAMEPIPEGSAGVLLEGMLEATAEWYSRQLSENVTRGMTDNAQRCLYNGTRILGYSRGPDGRYALNPEEADVVREIFRMYASGMAAARICRQLNSMGLRTSRGKPFAPEGLMRIITNERYTGVYIWGSIRVPGGMPAIIDRTTFEEAQRMRGKTSRHIEQGAVDYLLTGKAFCGHCGAAMIGDSGTSKDGTRHYYYTCQSRKARKGCAKKSLPKDYLESAVVDFVLDTVLSEDQIQRTADAVMALQEEELKHSPLAAMEAEYAETQKKISNINDAIMAGIWNTSTSARLRELEDAADTLRVSIETLRYSQSQLIDRDRVLFFLHRFTKGDRSDPLLRRHVIETFINSVYVYDDHLKILINNLEGNQRFPLSDLPPDCSDNVSSGVPIVTHPNTRVTVYLVAV

SEQ ID NO: 10311 - protein, 517 aa, Unknown
  Description of Unknown: Integrase B10312 sequence
  cd00338,PF13408,Coil,PS51736,IPR036162, IPR006119,G3DSA:3.40.50.1390,PTHR30461,PTHR30461:SF3,IPR025827, PF00239,SM00857,SSF53041
MPKGTRAAIYARFSSHNQRSESIDIQVEKSREYCSQNGLDVVRVYSDYAQTGRDVQRVEFQRMMADAKLGLFDYVVIYKVTRIMRNRDEMALARIRLRKAGVEILYAGESLGEGSTRVLNLGMLEVLAEWESAIDSERIRDGINKNAQRGMANGRTHYGWDIVNGYYEVNEREAAVMHRMKNMLFAGSTVAEIKRAVAGERGKRGRPLTHGVITKLLRREQNCGVYDYAGVRIEDGMPALWSREDQDMINSILGSNGRKHNKTRDTNDYPLSGKMWCPECGQYYVGTCGTSKTGRVYHYYKCKKCKRTFRRDAVEEAVLDTVLETIKKPDIRQRIVDVMALYNEMNEEKEEPESKRIEREIKRIDTAFERIWQAIEDGIAPPGGKERVAMLREQKAALEADLRQAQANEGANLSGEAIAAWLDHIAQEPDAAEIIETFVRLIEVDGDELKLYFAFDYWGDDFQPKQKKANPEKGSPNNPMVEPQKIFANPTIAANGREIKVSTNWFCIITLFSSKKS

SEQ ID NO: 10312 - protein, 517 aa, Unknown
  Description of Unknown: Integrase B10313 sequence
  cd00338,IPR011109,IPR038109,PF07508, Coil,PS51736,G3DSA:3.40.50.1390,PTHR30461, IPR006119,IPR036162,PTHR30461:SF3,PS51737, PF00239,SM00857,G3DSA:1.10.10.2600,SSF53041
VAPVNRNLYAIYLRKSRTDLELEAMGEGETLARHYNMLMNLASKHEIHPDQITVYKELVSGDSISERPEMQRLLTDVYTKKYKGVLVVEVERLARGNTKDQGEVADAFTFSGTHIITPSKIYDPNNEFDQEYFEFGLFMSRREYKTIKRRLEAGKLQSVMEGNYILSHKTFGYDIVRESKKVRYLVENPEQSKYVHMIFDWWTEEGKSCDWIAKQMTLMGVTPMKKGKEWSRNTIRDMLKNVIYVGKLKWNDMKTVKKFDSATGQMSKGRVKSAPEDVIIVEGKHKGIISEEQFAKAQARFGTQSHKKTETKLNNPLAGLLRCKDCGKVLAWLEYPDNRTTRLQHKRSFVCNKKSLPAYQVLDSFVEALKEIIADFEIKMESGNDNTELIRHQDIISDLEKELASQEKRKQRLFDSWEADDGTYTKEEFIERKQKYTATIEAIKSKIQEMKKAVPVPVNYAEQIVTLHQMIDCLNDTNLDAQAKNDFLKQYIDRIDYDVIDFGQAKGGQAVLDVYLK

SEQ ID NO: 10313 - protein, 517 aa, Unknown
  Description of Unknown: Integrase B10314 sequence
  PS00397,IPR038109,IPR006119,PS51737,PF00239,G3DSA:3.40.50.1390 ,PTHR30461,IPR025827,SM00857,G3DSA:1.10.10.2600, SSF53041,IPR011109,PF07508,PS51736,IPR006118, cd00338,PF13408,Coil,IPR036162
MKTAVIYARVSSGRQEREGFSIPAQIEFLTEYARQNNFSIEAQFVEAETAKKAGRKQFNNMLKYISEHNIDAILAEKTDRIYRNLKDYLTLDEFKQLEVHLVKENMVISEHSSSHIKFMHGIKVLMAKQYIDNLSEEVKKGKNRKAKEGYYPQQAPVGYINTDGPEGKRIIVPDPANGPFIAKLFTMYNHGTYSIAALRKLLYEEGFNHKGKPYSKARLLAILHDPFYIGKFMYNGALYQGKHEPLVPDEIFYSVQRSFNQSKARKHDTEFLYTGLLKCGHCGCQLTAELKKGKYVYYHCTGKRGGDCKKDYIREEQIDEVFMDLIKKIPNPDSKLFDLIRAGIKETRRLKGEYEEHSVEEIEKQIKRLQARIDNLYTDKLDGRITEEFWKEKHNLWYEEKDQLIEKLKSINNAARTFDEGTNLLENFCKHAPRLYERACPKTKQEILKIIGSNFTYKDKKVSVELTSVFELLLNNPFSKNGGIYKPKLEPLQFIYKLKKALSQEFISSLKALDLAA

SEQ ID NO: 10314 - protein, 517 aa, Unknown
  Description of Unknown: Integrase B10315 sequence
  cd00338,PF13408,IPR011109,IPR038109,PF07508, Coil,PS51736,G3DSA:3.40.50.1390,IPR006119,IPR036162, PTHR30461,PTHR30461:SF3,IPR025827,PS51737,PF00239, SM00857,G3DSA:1.10.10.2600,SSF53041
VEFYRVCAYARVSTKAEKQESSLTSQITYYNNLINSNPQYINMGVYAERKSGANQKKRSQFLAMIQECKNRNIDIIYTKTVARFGRNASQLLKTLEELTRIGVRVIFEMEDIDSIRDQKTIKTAIKSYFAEEELVRDSEAVRFGIQRRFEQGQVSIGNPYPLFGYEYDENRVLKLVPEKAKIVKEIFERFCNNERTCDIIRWLNNNNITTSAGRKWNYNNLSYLLRQEKYTGDAYLQKYYRENGSRYINKGEKPMYVVERWCEPIITHEMFEKAKERRERNSKYERPKGYVPKHDIFRGIIKCGMCGASFNKASERIRKTNAGERLDIAYNCQTRKTKGVRACRNHGINRNTLEDAFIKAFNSMRELLGQQQKMKIKNEEITKIDIKIQELLNKEKVYLQMEVRGLMTDEFKEKYEELITQVMKLEDRKKEIYKYNQSVREKCEYVDKFDKIFKEQQEMKEFNEEICGFMVEQITIVNRNKLLYKFRNGYIADVEVIDYYLERDEIGDVNFYVSTKC

SEQ ID NO: 10315 - protein, 517 aa, Unknown
  Description of Unknown: Integrase B10316 sequence
  cd00338,PF13408,IPR011109,IPR038109,PF07508, Coil,PS51736,G3DSA:3.40.50.1390,IPR006119,IPR036162, PTHR30461,PTHR30461:SF3,PS51737,IPR025827,PF00239, SM00857,G3DSA:1.10.10.2600,SSF53041
MDQIKAVIYARYSSSGQREESIEGQIRECTAYAKKHDMVIVGEYSDHALTGRTDKRPDFQRMIKDSDKHLFDVVICWKMDRFARNRYDSATYKHRLKKNGVKVVYAMEYVPEGPEGIILESVMEGYAEYYSENLAQNIRRGYYENALAGKVLTSPCYGYRKDERGMFAVDPDASLIVKRIFEEYLSGKGTRQIAEDLNAEGWRNSKGRPFGLNTIRYILTNKKYIGHYQYRDIILEDVIPPLVSKEDFEAVQRKLDKKKEAPAAKMAVYALTGKLYCGICGDTVAGEYGTSRNGSQHYYYTCHNRKASHACKLKRQRRDYLEKLISDELIRLIFDDAFIEEVADLVVEFEEKEEASGLLPVYEARRAEIARQVGNITNALALAPTSPALVAKLTELERQLTEVETAIAKESIVTPSLTKDQIIYFFERQRRGDVDSPEFRRTVIDTFMQSAYLYDDHIVINLNYSGTKTPISKALIDDLESSDSQRVSPVRVSPVKSRLCSQTRTLPVLLVTLSLAA

SEQ ID NO: 10316 - protein, 517 aa, Unknown
  Description of Unknown: Integrase B10317 sequence
  cd00338,IPR011109,IPR038109,PF07508,Coil, PS51736,IPR036162,IPR006119,PTHR30461,G3DSA:3.40.50.1390, PS51737,PF00239,SM00857,G3DSA:1.10.10.2600,SSF53041
MAKVILLVRVSTAQQEVEAQRSELVELALADGFKHEDMVIIEGVGASAIKLNELYLQQMDELYQTIESGDIDAVYAWEISRIGRDEVVLMKFKNFLIEHKVQLVVKNPSLRLLNNDGTVNNGIELAFSLFATMSKQEMAVKKERFKRSKARNKAEGKFTGGKIKFGYKLSSSKYFEIDPEKSAVIVEVFNRYVNGASQYELVEDMISRGYLVKNYNRITTSKTVGYWLRDTAYIGQNNYPRIIDDETFNKAQERLQMRHKEHHSKHILFAKGIVKDRNTNATLVAQVPSLTYGCYYVDKFRSVNLNVMEYVAEYSTNILLAERNADEMERNMIAYNDKIADNEKLINVHNEAIKRLENVIERAIEMNINQPKYFPTEKMQAKIKQTEKQIENEKRAIEDLRIENANMRAYLDGNATFINSIKNFSDEKKSEIIHNTIKTIWVDGLDDQKRQIKIEVNNKIGYPVNLKFIYRRHGNELLLWQVWNWDDEHPLELTQGLKSHTRFIRKRYNAKGVSQNG

SEQ ID NO: 10317 - protein, 517 aa, Unknown
  Description of Unknown: Integrase B10318 sequence
  cd00338,IPR011109,IPR038109,PF07508, Coil,PS51736,G3DSA:3.40.50.1390,IPR036162, IPR006119,PTHR30461,PTHR30461:SF3,PS51737, PF00239,SM00857,G3DSA:1.10.10.2600,SSF53041
MRAVGYCRFSSENQRDGFSIEAQKAAIREFCSKNKIELLDFYIDEALTGTNDKRPAFQRMIDDSSDHLFEAVIVHKLDRFSRSVTDTAIYKNHLAKNGVRLISVVEQFGNSPESIILEQVIIGMNAYYSQNLSREVKKGMTQAALNGYVYHKIPFGYKKGDDHKFQINEDEAEVVRLIFNLYAKGYCQKDIIEECFKIAPFRTYTYQFINRVLMNRFYIGEIIVNGKAYRNITPAIISEDLFNRCNDGIKRHSYRRRKEVKGEEFKKTDFILSGLVFDKNGHAFTGSSATGKLGKTYYYYATTKKPIIRYQKEALEHLVLDGICSYIENGMNLEYLASLINEKINQRINKKQMSELARKIKILKNKRSRMQDAYIDGVIELEELKEKNYALVNQINSYQNQLDLLTNSSTVSPEILKKAFKNISDQIKSKNIDSKKLRRLITSFLKKAIIDDDTVRLHLIIQHGDIKVKKLKEKLEQSDFSECSSNHSNGEPYGSQLEIVVMLRKNLNLINQSLLFS

SEQ ID NO: 10318 - protein, 517 aa, Unknown
  Description of Unknown: Integrase B10319 sequence
  cd00338,IPR011109,IPR038109,PF07508,Coil, PS51736,G3DSA:3.40.50.1390,IPR036162,IPR006119,PTHR30461, mobidb-lite,PTHR30461:SF3,PS51737,PF00239,SM00857, G3DSA:1.10.10.2600,SSF53041
MHKAYSYLRFSTADQIHGDSLRRQTTLAKNWCQKNGIPLVENYRDLGVSAFRSKNADKGALKAFLSRVESGAIEPGSYLIVESLDRLSRTDITYALQMFLGIINAGIVVVTLADERVYDKKRINDGNFTDLIISLTILSRANEESRIKSMRSTQAWEAKRGRATTEKITALCPGWLKLSADRKKFEVIPEKAKIVKRIFQMAAQGKGGLHIAQVFQKEKVARMGKGSRWYPTGIKNILDSRAVIGEFQLARTVDGKRVLCDPVPGYYPAVVPMDLYSTVQRIRRIRSSYRGRGQGNPIAGLLYNVMTGRKMIRLVSNEARGYSYLVDAAAPVGAAPRITWHYGRFLEALMGACEAITTCPPSAKKQNQELEDALKRKDEIEAKIPRLVDFISDGFSAGAHEKLRLLEAEKKELESRIAEMKVDNAAPDMDLEQVDWRDASKLKENARAIIERIEVHPQERWFTVKTFDGREVRYTEEGGSIEVLSSEPVSRRKMDKPGRVKKTSPAKNRKRGKARTR

SEQ ID NO: 10319 - protein, 517 aa, Unknown
  Description of Unknown: Integrase B10320 sequence
  cd00338,IPR011109,IPR038109,PF07508,PS51736, IPR036162,IPR006119,PTHR30461,G3DSA:3.40.50.1390,PTHR30461:SF3, PS51737,PF00239,SM00857,G3DSA:1.10.10.2600,SSF53041
MSGLLETTILSPVRRAAAYVRMSTERQTYSTANQMQRIQEYAAEQQITIVAVYEDAGKSGLTMRGRPGLQQLLADVQTKDDFTCILVYDVSRWGRFQDVDESAHYEYICRLNGVQVTYCTEAFQNDDSPYTSIIKAMKRIAAADYSRELSSKVFLAQCRIIKMGYKLGGMAGYGLRRALLDSNGDFIRIMEKGEWKAVQTHRVVLVPGPKHEIEVVNLIFHWYAVDKVGDRRIAIVLNEQNVASESGRPWTGALIRGMIRNEKYIGNLIFNKGSYKLRKTAVRNPPALWVRCDAAFPPIVPLQLFHAARIERSDRNYRYTTEELMQTLQRIYKAHGGVTSALIDRDPDGPACQLFCRRFGSIYAAYELAGIPGPFNAEAIVTRSRTLSIKAEFLDSVKGAIIAAGGTWQATNMPHTLRINDAVTASIRVVRCALDKKWGYHRWRINKRLATGYDFLIAAVLDRHNEEIEAYLLVPAREFENRDISFTELTRASLGKTIRAKLTDFFPPPVELSEQSG

SEQ ID NO: 10320 - protein, 517 aa, Unknown
  Description of Unknown: Integrase B10321 sequence
  PS00397,PS51736,G3DSA:3.40.50.1390,PTHR30461, IPR036162,IPR006119,PTHR30461:SF3,PF00239, SM00857,cd03768,IPR006118,SSF53041
MSTYIYARVSTFDQYVNGNSIDAQCEMCLKHAVNHGMEMGTESNCDLPGVFLDGGKSAYTKKLAERPGGLRLLTVLQPGDVVIATATHRLFRRMGDMVATMDHWVQNKISVRFTDYPMLNTDTANGKAMLYIFAVIAQMKSELTSSRVKEARAMSREKPKVPVQVQPSVPLDTAEHLMTKDVGSIMQEMRREETQSQFKGTVRAYIRVSTKEQTVEQQRQCIERMMPDDLRGAPIEWYSDEGVSAFKTKMVKRPSGSKLLEDLEPGDIVVTWRPDRMFRSLLDMANTTELIHRKGAFLLTVEGGIRTDSPFGKTMVSLLSLLAEVESQEISRSTKQGFFVAVGVSAKARAVFMPKFLSSMKDHHTQKHFCFNRFFTQEDKFNMHVQLSLTGKHYHSLSSACRVISNKWLRRKGLPSMTGIESESVGSYLAKVREMQQQRFSERREALIRVLRRRKGSDRVVYPINVTSSRRVIPNQDRFLRASRRISGRIKNKQALIAIAIRGSDLESNLDLIRRVS

SEQ ID NO: 10321 - protein, 517 aa, Unknown
  Description of Unknown: Integrase B10322 sequence
  cd00338,PS00397,PS51736,IPR036162,IPR006119, PTHR30461,G3DSA:3.40.50.1390,PF00239,SM00857,cd03768, IPR006118,SSF53041
MRTWIYARVSTFDQYLTGHSIDAQVQACLTHVKNHGMTLGLETNSGLPGVFIDGGKSAFTKKFMQRPGGTALASLIRPGDTIVATATHRMFRRTSDLLNMMEGWVAMGVSVVFTDYPMLSTNNANGRAMLSLFGIIAQLKSELTSARMKEAFALSKGKSKKVAPVKPLPPSLAPLPDTNYVEVMLQIAKDRDVSNLRFTGKIRAYVRVSTKDQTVEQQKQCILQQLPEDMRGSEIIWYSDEAVSAFKTNMTKRPAGSKLLADLQEGDILVAWRPDRVFRSLLDMANTTELIHSKGAFIFTVEGGMRTDTPFGRTMVSLLSMMAEVESQEISRSTKQGLMVALATNPAAQRQRLPKYLRESTDTSDQIHFSFNQMFSRQDRMHMYLQLSLTGKQYRDRKMACRVISNKWLKMKGLPQLTGLLSDTHRLYTHKVKQMQKEEFSERRKKLLEVLEGYDKGSNVNYPLNVDTIAWVMRRQEVFLKTARKMAGRIKDKQTLVSLASQCVSADAAVELMEVLK

SEQ ID NO: 10322 - protein, 517 aa, Unknown
  Description of Unknown: Integrase B10323 sequence
  cd00338,PF13408,IPR011109,IPR038109, PF07508,Coil,PS51736,G3DSA:3.40.50.1390, IPR006119,IPR036162,PTHR30461,PTHR30461:SF3, IPR025827,PS51737,PF00239,SM00857,G3DSA:1.10.10.2600,SSF53041
VIYARYSSHNQREASIEQQIEMCTALAKRMGLMIVDTYADKAISGKTDKRPSFQRMMAAATEDQFDFVLSWKSNRMGRNMLEAMMNDAALLEYGIKCVYVEEDFDDTAAGRFALRNMMNVNQFYSESMAEDVRRGMLDNAKKCMVNGRCPYGLRKGKDGKYEIDPEQAEIVREIFSRVIEGWQHRDIMDDLNARGIKNRDGNIWQRTTFDKLLRNEQYIGVYKFSGIRTEGGIPAILDRETFEEVQTILTTKKHPRGRRRNVEDYLLTGKLFCGHCGNPMVGICGTSRNGERHYYYLCQGKHRHECNKKNERKEKLEGKVIQALKMLILDEATIDRIMVGFDQFMLDLRGQSTLAAKEAELAEVEKALGNIMKAIESGLPFTETTKGRLMELEDSKKVLAGEIEREQKFFTRVDPEQIRFSIEYYRDKNLNNREYIRELLATFVRAIYVFDDHLKIVLNNGLGEDIEIPLSDLQDDLSDADFSEADVRINDTKPHQIDNVRTTLIFRNYGIIVVVPY

SEQ ID NO: 10323 - protein, 517 aa, Unknown
  Description of Unknown: Integrase B10324 sequence
  cd00338,PF13408,IPR011109,IPR038109,PF07508, Coil,PS51736,G3DSA:3.40.50.1390,IPR006119,IPR036162, PTHR30461,PS51737,IPR025827,PF00239,SM00857, G3DSA:1.10.10.2600,SSF53041
MYCMYLRKSRADLEAEQRGEGETLKRHEKILLDLAKKMNISISKIYKEIVSGETIAARPVMQQLLSDIEKGMWKGVLVVEVERLARGDTIDQGIVAQAFKYTNTKIITPMKIYDPSNEFDEEYFEFGLFMSRREYKTINRRLQQGRIQSVKEGKYLGTVAPYGYKRKKLENQKGYTLEIIPEEAKIVELIYNWYTGPNRIGISIISNKLNKMKIPARKGGDWTTSTIRGILSNPVYIGKIKWNSRPEKKKIVDGEIVVERPRTNKEDWIIVNGLHEPIIDNETFNLAQKYLSKNPALPVPTRHKVMNPLAGLIVCGVCGRKMKRRPYNNGYPSTLMCDGPTCNNISSPLYIVEEKLLNTLKTWLENYKFELKQLEEQGNNIEIDLINQSISKIDADLITLNKQLNSLHDFLEQGVYSIDMFLERSKILNEKINTLKSHKLELQTKLDNITSLNNTKKDIIPKIEKVFEVYWKINSPKEKNDLLKEVIDKVIYIKKEGGRWSGKIDSFTLILYPNLPN

SEQ ID NO: 10324 - protein, 517 aa, Unknown
  Description of Unknown: Integrase B10325 sequence
  cd00338,PF13408,IPR011109,IPR038109,PF07508, Coil,PS51736,G3DSA:3.40.50.1390,IPR006119,IPR036162, PTHR30461,PS51737,IPR025827,PF00239,SM00857, G3DSA:1.10.10.2600,SSF53041
MERLPHGEYVIYLRKSRADLEAEARGEGETLAKHKKALFKLANHYKLNIAEVYEEIVSGERLTDRTEMLRLLDRLNDDPPAGVLVMDLDRLSRGSMQEQGFILETFRSNNVLIVTPTKVLDLNDESDEFQADISSLFARRELKMITRRLQRGKDLSAESGNFVSARPPYGYDIHFLEDGSRTLKPNDQADIVRLMFQWADEGISTRDIAERLTKMNIPTYFGRKEWNFNVVLQILHNPVYIGRIQFRKTSRRKINRPDKKYDIKKRPADKMIDVQGKHPAIIDESLFRRVQKRLSDNVLVRTKKSLAPVNALAGIVKCGKCGFTMVYKRHPLNKELGYLRCNNLHCNARLSRYDLIEEKILNFLNEWLKGMKIDIKSRKPRTPNTIIVKEKLINELKDQLKTYEEQRMKQFDLLEQGIYTQEVFLERSRTLAERIEETTKRLNQLTEEIEIERTRQKNQKEIVPKVEQAIKYYKTSKDVQKKNLVLKGIIHEVKYWKEKNQTGDDFTIEITPKFPGE

SEQ ID NO: 10325 - protein, 517 aa, Unknown
  Description of Unknown: Integrase B10326 sequence
  PF13408,IPR011109,IPR038109,PF07508,Coil, PS51736,IPR036162,PTHR30461,IPR006119,G3DSA:3.40.50.1390, PTHR30461:SF3,PS51737,IPR025827,PF00239,SM00857, cd03768,G3DSA:1.10.10.2600,SSF53041
MRKSKPAPSDAKRCAVYTRKSTAAGLEMEFNSLDAQRESCVSYVQRQPGWVLVDESYDDGGFTGANMERPAFQRLMQDVDSGRVDVVVVYKVDRLSRSLLDFAKVMERFNAAGASFVSVTQNFSTADAMGRLTLNMLMSFAEFEREMISERTRDKVAAARRKGKWTGGRAPLGYEVKDKRLVVNEYEAVVVREAFELYLQHQQASVVSRLLNETGRKTKRYEAQSGATRAARKWTTQDVLRLLRSPLYAGFVPYGDEAHPGEHSPIVDRATFHQVQDILEGRGPGIQYHGRNPDYVLRGLLRCGMCGEAMTPGSTRKGTREYRYYRCVTRDKQGKEGCRASPLPAAALEDFVVARLREVSVGGGFATQVHARLTSRLEEKHKALRAERIQLPKDLAKRAGESAKWVDSLAKLEGPARRLLEEKLTAAEEESAGMRRRLTEVEHALDAMEREKLEAAWVAQALADFDAVWDALTAANRGRLLQALVGRVVVDEETDRVDVHLAQAGEPAASEGEEVAA

SEQ ID NO: 10326 - protein, 517 aa, Unknown
  Description of Unknown: Integrase B10327 sequence
  cd00338,PF13408,IPR011109,IPR038109,PF07508, Coil,PS51736,G3DSA:3.40.50.1390,IPR036162,IPR006119, PTHR30461,PS51737,IPR025827,PF00239,SM00857, G3DSA:1.10.10.2600,SSF53041
MERLPHGEYVIYLRKSRADLEAEARGEGETLAKHKKALFKLANHYKLNIAEVYEEIVSGERLTDRTEMLRLLDRLNDDPPAGVLVMDLDRLSRGSMQEQGFILETFRSNNVLIVTPTKVLDLNDESDEFQADISSLFARRELKMITRRLQRGKDLSAESGNFVSTRPPYGYDIHFLEDGSRTLKPNDQADIVRLMFQWADEGISTRDIAERLTKMNIPTYFGRKEWNFNVVLQILHNPVYIGRIQFRKTSRRKINRPDKKYDIKKRPADKMIDVQGKHPAIIDESLFRRVQKRLSDNVLVRTKKSLAPVNALAGIVKCGKCGFTMVYKRHPLNKELGYLRCNNLHCNARLSRYDLIEEKILNFLNEWLKGMKIDIKSRKPRTPNTIIVKEKLINELKDQLKTYEEQRMKQFDLLEQGIYTQEVFLERSRTLAERIEETTKRLNQLTEEIEIERTRQKNQKEIVPKVEQAIKYYKTSKDVQKKNLVLKGIIHEVKYWKEKNQTGDDFTIEITPKFPGE

SEQ ID NO: 10327 - protein, 516 aa, Unknown
  Description of Unknown: Integrase B10328 sequence
  cd00338,PF13408,IPR011109,IPR038109,PF07508, Coil,PS51736,G3DSA:3.40.50.1390,IPR036162,IPR006119, PTHR30461,PTHR30461:SF3,PS51737,IPR025827,PF00239, SM00857,G3DSA:1.10.10.2600,SSF53041
MPVRALRLLRAAIYARVSKDEQAEHGYSLPTQLDNCRQYAVANDMHVVGEETDDYTGMRLDRPGLIRVRDLITRRQIDALVVHSSDRLTRSLAHVLLLREELKRAGVELHYVRRGKSDDTPEARMTENIEGVFNEYWREKIIEASMRGMGAKAKAGGWVGGHISYGYRIAGSKHEAKIEIHEPEAATVKRIFEWYIRDLLPLAEILKRLTAENVPSPRPADGTISRWYRGSLRRLLRNPLYVGDYKWNSHLSAHPELAIVSRETFDEAQSRLHRNRQLAKRNRKYDYLLSGMIRCSCGAAMVGAALHVSRKSDAKTLYYYCSSRMADRHLSQCTERHIRAATADALAWKWMEELLLDPDRLERGVTEYVKDIRSESDSRRMRISELSDKIEDAEHRMILLANDLASLGSQKGRGAILERIDALAGEISDMEQERDTLASELSRVNISGEMRTQIAAMSDDVRHAIENDLVSYEVKRRTFDRLGVTIALERRGEKGGLLLATDPAVLPVKPQWIALD

SEQ ID NO: 10328 - protein, 516 aa, Unknown
  Description of Unknown: Integrase B10329 sequence
  PF13408,IPR011109,IPR038109,PF07508,Coil, PS51736,G3DSA:3.40.50.1390,IPR006119,PTHR30461,IPR036162, PS51737,IPR025827,PF00239,SM00857,cd03768, G3DSA:1.10.10.2600,SSF53041
MPEKHSIRCAIYTRKSTEEGLEQEFNSLDAQRESAEAYIASMKHEGWLCMPDRYDDGGYTGGNMERPAVKRLMADIDAGKVDCVVVYKVDRLSRSLLDFAKMMETFDKRRVSFVSVTQHFNTTNSMGRLTLNILLSFAQFEREIISERTRDKIAAARRKGKWSGGRPILGYDVAPGGGKLLVNEAEAARVRSIFELYLDHQSLIETVKALDARGWTTKHWVTKEGHESGGRRFDKNNLIHLLTNVLYLGKITLKKEVFDGEHTAIVDAEVFRRVQAMLHRNGQSGGKHVRNRFGALLKGLLHCVPCNCAMIHTHTLKNGNKRYRYYVCLNAQKRGWHDCPSKSVPAAEIERFVIEQIRGIGKDSSLVAETIRQTRTQSDKRIKELETERAGLEKDLLRHNTDLRKLVGKVSRDGTAADRMADVQERIRVAERRATEVREELIALGRNLVDEKDAVRALALFEPVWDALSPREQVRVMQLLVERVDYDGEKGTVSITFHPTGIRSLADEMKRKEAIA

SEQ ID NO: 10329 - protein, 516 aa, Unknown
  Description of Unknown: Integrase B10330 sequence
  cd00338,IPR011109,PS00397,PF07508,IPR038109, PS51736,IPR036162,PTHR30461,IPR006119,G3DSA:3.40.50.1390, PS51737,PF00239,SM00857,G3DSA:1.10.10.2600,IPR006118, SSF53041
VKRAVVYVRVSSQDQVHNLSLDTQEKHCRDLCARQGWQVARVFREEGESAKTADRTELRVLLSHIAEARPRVDFVVMYDTKRFMRNWVEYAILKDSLKKLGAELRYVALEVDDSTPQGVLLEGFNALLAHVDNLERSKRTRDGMREALERGRWPWLAPLGYRNRVSEDGRKKWIEPDPATAPLIRWAFEQAATGLKSKDELRAELAGRGLEVKRETFYRILRNRIYLGRVAAPQWGIDLPGEHEPLVDWPTFRAAQRAITQRRAYVTGPTSEFPFRQVVRCCGCGRGLAGYFARGRRGNRYPFYRCQGCKVNASAARVETDFARLLDRMAVPPRALDLLERIVRDVVNQRQARQSEIAEAANRRLAMERTKRERLFEAFAYKDAIDEREYHARRAVLDERIATLEHEASASASPIVNFEPVLAASRQLLQLPLMEWDRVKPHSRPALLRGLFPRGLGWEPAGTFRTPDKSLLRLPLPAVSRPDVAGGTPDSADFESIGEWFQELEAVLPLLGEQRA

SEQ ID NO: 10330 - protein, 516 aa, Unknown
  Description of Unknown: Integrase B10331 sequence
  cd00338,PF13408,IPR011109,IPR038109,PF07508, Coil,IPR036162,IPR006119,G3DSA:3.40.50.1390,PTHR30461, mobidb-lite,PTHR30461:SF3,PS51737,IPR025827,PF00239, SM00857,G3DSA:1.10.10.2600,SSF53041
MKKNSVPSCAPRTAVAYARYSSAGQRDVSIEQQLADIRAFAKREGYTLVHEYADHAKSGFRHVSARTAFQSMMASADSGTFDSIICWKVDRFGRNREESALFKGRLRRFGVKVLYAMEPIPEGSAGVLLEGMLEATAEWYSRQLSENVLRGMADNARRCMYNGTHTFGYTSDSEGRYIIQPEEAAVVRDIFSLYRSGWSAAMIARDLNARGLHTWRGNPFCAQGILKIISNERYTGVYIWGNVRTPGGMPVIISPAEFEEAQRMKKKTARHVEQGAVDYLLTGKAFCGLCGGAMVGDSGTSKTGVRHHYYSCYHRKHDKACTKKSVSKNLLEDAVVSFVLDYVLSDAEIEKIVDAVMALQAEEMKSSPLAAMEAEYKDVQKKIDNINDAIAAGIWNSSTSAKLKELEDAAENLRVSVETLRYSQSQLLDRDRVLFFLHRFTSGNRNDPLLRRSIIETFINSVFVYDDHLKIVINNVEGNTRIPLSDLPPESSDNDKSGLPTVTRPNPRITIYRIAV

SEQ ID NO: 10331 - protein, 516 aa, Unknown
  Description of Unknown: Integrase B10332 sequence
  cd00338,PF13408,IPR011109,IPR038109,PF07508, Coil,IPR036162,PTHR30461,IPR006119,G3DSA:3.40.50.1390, PS51737,IPR025827,PF00239,SM00857,G3DSA:1.10.10.2600, SSF53041
MKKYSVASCAPRTAVAYARYSSAGQRDVSIEQQLADIRAFAKREGYTLVHEYADHAKSGFRHVNARTAFQSMMASADSGTFDTIICWKVDRFGRNREESALFKGRLRRFGVKVLYAMEPIPEGSAGVLLEGMLEATAEWYSRQLSENVLRGMADNARRCMFNGTHTFGYTSDSEGRYVIQPDEAAVVRDIFTMYRNGYSCSMIARDLNARGLRTWRGNPFCAQGILKIISNERYTGVYIWGDVRTPGGMPVIISQSEFEEAQLMKKKTARHVEQGAVVFLLTGKAFCGLCGSAMVGDSGTSKSGTRHYYYSCIHRKRDKACSKKSVSKDYLEDLVVSFVLDHVLCDPEIEKIADTVMKLQAEEMKSSPLASMEAEHKEIVKKIDNINQAIAAGIWNSSTAVMLKDLEDSAETLRVSIETLRYSQAQLMDRDRVLFFLHQFTKGDRNDPSLRRKIIGTFVNSIYVYDDHLRIVINNMEGNERIPLVDLPDECSDNGNSALPTVSRPNPRITIYRIAV

SEQ ID NO: 10332 - protein, 516 aa, Unknown
  Description of Unknown: Integrase B10333 sequence
  PF13408,IPR011109,PF07508,Coil,PS51736, G3DSA:3.40.50.1390,IPR036162,IPR006119,PTHR30461,mobidb-lite, PTHR30461:SF3,PS51737,IPR025827,PF00239,SM00857, cd03768,SSF53041
MRVATYNRKSVYSDHSDSVKNQERMCREHAQMRFGDKMESFTVYQDEGFSGANTARPGLKNLLADIDVGKIDALVVYQLDRISRSVKDFSDIWDRLEKKNVSFVSIKEQIDTETPMGRAMIFITMVFAQMERETIAERVTDNARGLAMKGLWPHGAPPLGYVAEPILLDGKKHYRLAPDPEKAAYVKGLYADMLSLGKSVQALAKRYAAAGKTSATGKYPERSVLYRYLTSPYYCAATPDVYDFWEAKGCRIVGSGRDEWDGSKGVMAYGMGTNSRTKRDYSEWVVTKGLHEPLVSAEDWLAVQAIFQANIFDKTAKYPPTLLKGILRCAKCGRLMLVGRSHGIPRYTCSTRQSRGVDYCDMPSLRVSDADPEVEEKLREAVIDEDILRSFHHSNIPSGAKERATALMKEKKDVEAKLENLAAALAEAGASSARKYILAEMDKVEAGLISIIEELEKTSAEARKEEASKKEFEEVKSALADVMGKFQSLSAEEKNRLMKKLLKTCTWDGAKVTLIV

SEQ ID NO: 10333 - protein, 516 aa, Unknown
  Description of Unknown: Integrase B10334 sequence
  cd00338,IPR011109,IPR038109,PF07508,Coil, IPR036162,IPR006119,G3DSA:3.40.50.1390,PTHR30461,PTHR30461:SF3, PS51737,PF00239,SM00857,G3DSA:1.10.10.2600,SSF53041
MDAVILARVSSKEQEDGLSLDAQSARLTEYATRRGFNIVKTFVLIESSCRGNRRGFHDCIKYLKHTSAPTCLIADAVDRVQRTFSEIGMLDELRKKKNIELHFCRENLVINNTASSQDIMRWEFAVLAAHSYVLSLSENVKRSIGHKYANGEISGHAPLGYKNVRVGNTSDIVPDETTAPYVVKMFETYARGGQSYKSIAHLANTIWGLRTARFGKRLDGNKVQYVLSNRFYYGEYERNGKIYPLRYQPIISRDLWEQCERIRLGRAAIRPKKQKIDSPYRGLIKCVNSGRLCQIETHKGRLYLVSYTTDGKRKYTQMDDINEQIAQILDTIKPTPECLAYAMETLKTTAHSERDWHKSEILRLRDEQDMTQKRINGLLDLLIDQKITQDAYNTKYEQLTARANEIKNMLNAHKTADDTFNQTVVNLLNLANSAGDLFRKSSNVRSRSDILKLVIRTLEFDGVNIGYYLNFPFSEMQNLTDLNRWGTLLCNIRTSKAAEIRRYQAANWDFNTLLAA

SEQ ID NO: 10334 - protein, 516 aa, Unknown
  Description of Unknown: Integrase B10335 sequence
  cd00338,IPR011109,IPR038109,PF07508, PS51736,G3DSA:3.40.50.1390,IPR006119,IPR036162, PTHR30461,PTHR30461:SF3,PS51737,PF00239, SM00857,G3DSA:1.10.10.2600,SSF53041
MRAILYARVSGDDRGSEDRNLNSQLEMGRKYAQEHDYTVVAELAEDDRGASGYAIDLPQLDRARKMARAGEFDVLVTREIDRLSRNLAKQLIVEQELKQAGVEIGYVLGEYPDTPEGRLNKHVKATIAEYEREKIAERTMRARRDKARDGYVITRSRPPYGYRAEDGEKSLVVYEPEARIVRLVFTWYVAGDGTDGPVGTRIIAKRLTDMRVPTWNDVHGLCSKPRSAEGEWAPSTVARLLSNETYIGRWKYGGVEVPIPAITDTPTWESACARRVYNRQMSSRNRKYEYLLAGRIRCGLCGLAVCGTSKVTPKQVYLYYRCSSWRADCALPTVRADYADTATWGWIGQFLTDPAALASGLQAEQEERKGASRPLQDRLAVVDSLLAERQNQLEKLLDLYLDGNFPRDVLTGRQKQLEDGIAALARERVVLVDQLEQESLTEDQVYSIIEYAGEVARGLEVAEQSYEARRRVVDMLDVHVTLTAEGGEKVAYASMLCGSKSFPILPTTTGRTGWRS

SEQ ID NO: 10335 - protein, 516 aa, Unknown
  Description of Unknown: Integrase B10336 sequence
  cd00338,PF13408,IPR011109,IPR038109,PF07508, Coil,PS51736,IPR036162,IPR006119,PTHR30461, G3DSA:3.40.50.1390,PTHR30461:SF3,IPR025827,PS51737,PF00239, SM00857,G3DSA:1.10.10.2600,SSF53041
MARKKKVSPGNRLVAYYRYSGGSQQTEQSIEGQRRDCEAYARQHGLTIVHEYIDRHISGRGVESRLAFQQMIADSSKHLFDLVICWKTDRFARNRYDSAVYKKKLRDNGVRILYAAESSVEGPEGIILEGLMESLAEYYSAELAQKMRRGMRESALKGRAINPSRPLGLTTDEHKRFIIDEKNAPTIRFIFEHYAAGESSAFIVEQLNAAGLRTSKGNAFNKCSIPRIIQNEAYHGVYICKAYDVRIDGAIPAIIDDDLWKRAQKMLTLNKQHRAPHSSHADYLLSGKLFCGCCHSLMRGISGHNCRNDVYYYYACGNKADDGTCKKKNIPKDVAENLVVNAICENVLRPDTLEDLADAIAAAQQADVNQPDPERAMLEQNLADVHRKINNIIESIENGTASSRLSARLADLEQQESTLNYQLESMKEIHPPVLDRERILFLLEQFLISPNERTEDYNRRIIDTFVNRIEITDTEMLIYFNLSEASASEKQKNSQPNSCSTGNHLVRVARIELTAS

SEQ ID NO: 10336 - protein, 516 aa, Unknown
  Description of Unknown: Integrase B10337 sequence
  PS00397,IPR038109,IPR006119,PS51737,PF00239, cd03768,G3DSA:3.40.50.1390,PTHR30461,IPR025827,SM00857, G3DSA:1.10.10.2600,SSF53041,IPR011109,PF07508,PS51736, IPR006118,PF13408,IPR036162,PTHR30461:SF3
MRAALYVRVSTDEQAKEGFSIDAQLNILSAWSLVKGYEIADRYVDDGYSAKNLNRPAIKRLLDDCEAGLIDAVVVWRLDRLSRSLRDILSIVDDVFRAKHIEFISATESIDTSSTAGRLTLNILASVAQNEREINEERVRMVSMELASQCVHMGGVPLYGYSVGEDRHYLINEAEAPAVRMAFEMRFNRCGYGEIITALTDAGYRTRKGQVFTKNALHDMLTNEKYAGAYVYNRAAPASRDGRRNSHASKPADQIIRIPGGMPAIVSQEIFDGVQLIMKADKHSGGGRAHAKRIYPASGLVYCAVCGSSMIVDAVGRNRNGTYQYSYGCRNKCVKRIRNEKLLTHIFDFLDELTADPQIIAQAAKIANETAMLEHADIQACAEAASAQLADIDAKIASIIEFIKVAGAAAPASLAAELRALEAKKDACKYDVSLASKKAKAADADSIYQRLAAVALLRNAAPSEQRAAIQRVIHAIHVHNDAIWIDVSPGTGELMVEATHHQSFPCPTLTFSINRS

SEQ ID NO: 10337 - protein, 516 aa, Unknown
  Description of Unknown: Integrase B10338 sequence
  cd00338,PF13408,IPR011109,IPR038109,PF07508, Coil,PS51736,IPR036162,PTHR30461,IPR006119, G3DSA:3.40.50.1390,PS51737,IPR025827,PF00239,SM00857, G3DSA:1.10.10.2600,SSF53041
MSPAPTSKYAIYLRKSRADLEAEARGEGETLARHRIALTQLAERRGLNVVQIYEEIVSGESIQSRPQMRMLLAAVEAGEYAGVIVNDADRLARGDSIDQGIVKQAFYSTNTLIITPIKTFDPQQDADEDFFDFSLFFARFEYRKIKQRMQTGRARSAAEGNYLGTRVTYGYNKVRRMDRKGFTLVPDPDKAEIVRMIFRWYADGDNDETMGSDSIARRLNDMGLRTDLGHVFTGDYIRRILRNPAYIGTSSWNKRVSRVRSAGGVRSITRETNPEPIIVEGAHEPIIDRALFDRVQRMFDAHAKLPKNTYAPVTNVLSGLIKCSICGKTLQRKPGANGRPSALRCPTQNCPTTSIYIPTLEETLLEALKSWVVEYSSPAMRQQSGKPENTAAATIQKQIDALNGQMSRLHDLLEQGIYTPTVFVQRRDELTARIESAKVELSRLHSMPTTSDIIIMQLPNIQHVLEAYPLTTDLQKRNQLLRSVISRVVYYKTHRCTRNENPAEYMSLDIYPAMPE

SEQ ID NO: 10338 - protein, 516 aa, Unknown
  Description of Unknown: Integrase B10339 sequence
  PF13408,IPR011109,IPR038109,PF07508,Coil, PS51736,G3DSA:3.40.50.1390,IPR006119,IPR036162,PTHR30461, PS51737,IPR025827,PF00239,SM00857,cd03768, G3DSA:1.10.10.2600,SSF53041
MANVKLKNILTLSPYMKIAIDNKVELDEHGNYLINIGYERVSTDRQAELGFGLEIQEKEIVNYCQRNELTNLVLFIDDGYTGTNMDRPALQAIIDLITSFNDGYIKVRINNMIVPRIDRLGRTLLGTLQFIQDYIVARNDSKSLINKNKEDINFISIAENYCRIERNNPQGKFLLMLFATLAEFDRDVIVDKLKKGRQARVASGKWMGGGNAPYGYRYDKEQGQLIVIPEQAEKIREIFRLYIEEKMSPQKIADRLGFKGEKIIVQILQRKSLTGCITYLEQEYEGQHEAIISLERWLEAQEEFKKRSVVRGDSNYLLTGLVYCGECGARMRYQKWGKTGECKFVCYSHQKSKKYMVKDENCDNLLFWQHDIEKVVVESLFQLSHKVNDETVKMEQQINPLESLKKQLEIEKRKLSKLYDFDDGSDDDILTEKILNCRKKITDLQQQIMTVQDNEITINQTNKINDITKNLQNTWSLMTDKEKQSICRELIDRVVINKTGIVDIYFKSDFIFDTRK

SEQ ID NO: 10339 - protein, 516 aa, Unknown
  Description of Unknown: Integrase B10340 sequence
  cd00338,IPR011109,PF07508,IPR036162,IPR006119, G3DSA:3.40.50.1390,PTHR30461,PTHR30461:SF3,PF00239,SM00857, SSF53041
MPRQPPAGDLIPAIGYVRVSTWNEEKISDEIQKSVIEDAARRAGRRIVGWIPDLDATGRNFKRRIMEAIEAVENRSMHGAREIWVWKFSRFGRSRHGVIINLARVEHVGGQLISATEQIDATTATGRFTRGMLFEIAAFESERAGELWCETHEWRRKNGLPATGGHRFGYLWTPRLDPFGKPQEESYDPVEEPGDALDEAYVRYVEGEGYYPLAVDLNGIGLFNPHKRCKGPWSAQSLQQYMDSGFGAGMLHVHQRDIACGNRQQCPEKKEHYHYIPGAHPPVVKDEETWLAYLERRAQRKKLPPRSRIPTYPLSNRMRCDLCSGSSIATMANGVLGGAWRCARHVSAAKSCPGCYVTTKRVMADLWIWLDGVEAQVDAIACGEWAERAPVKRPDKSAARARFSQQVQAAAMALDRASDSLARGVMPEESYLRLKDKLTSEQLQAEQKLLALNTGDVEEPGRPTEAHAAVVRQLRREWDVMSVQGKHDLLGKVIREVRISPAGVEPRCNFVPVWAN

SEQ ID NO: 10340 - protein, 516 aa, Unknown
  Description of Unknown: Integrase B10341 sequence
  cd00338,PF13408,IPR011109,IPR038109,PF07508,Coil,PS51736,G3DSA:3 .40.50.1390,IPR036162,IPR006119,PTHR30461,PTHR30461:SF3,PS51737, IPR025827,PF00239,SM00857,G3DSA:1.10.10.2600,SSF53041
MARKKKVSPGNRLVAYYRYSGGSQQTEQSIEGQRRDCEAYARQHGLTIVHEYIDRHISGRGVESRLAFQQMIADSSKHLFDLVICWKTDRFARNRYDSAVYKKKLRDNGVRILYAAESSVEGPEGIILEGLMESLAEYYSAELAQKMRRGMRESALKGRAINPSRPLGLTTDEHKRFIIDEKNAPTIRFIFEHYAAGESSASIVEQLNAAGLRTSKGNAFNKCSIPRIIQNEAYHGVYICKAYDVRIDGAIPAIIDDDLWKRAQKMLTLNKQHRAPHSSHADYLLSGKLFCGCCHSLMRGISGHNCRNDVYYYYACGNKADGGTCKKKNIQKDVAENLVVNAICENVLRPDTLEDLADAIAAAQQADVNQPDPERAMLEQGLADVRRKINNIIESIENGTASSRLSARLADLEQQESTLNYQLESLKEIHPPVLDRERILFLLEQFLISPNERTEDYNRRIIDTFVNRIEITDTEMLIYFNLSEASASEKQKNSQPNSCSTGNHLVRVARIELTAS

SEQ ID NO: 10341 - protein, 516 aa, Unknown
  Description of Unknown: Integrase B10342 sequence
  cd00338,PF13408,IPR011109,IPR038109,PF07508, Coil,PS51736,IPR036162,PTHR30461,IPR006119, G3DSA:3.40.50.1390,PTHR30461:SF3,IPR025827,PS51737,PF00239, SM00857,G3DSA:1.10.10.2600,SSF53041
MNAVIYARYSSSNQREESIEGQLRECHEFAQKNDIIIVGEYCDHAISGKTDKRPQFQKMIKDSEKGKFDTLLLYTIDRFARNRYDSAMYKAKLKRNGVKVIYVKQPISAEPEGIILESVLEGYAEYYSENLSRAVKRGLKENALHGIVVSSRPPLGYYTDETRHYAIDPVGAKIVKEIFELYADGRSIPEIVAHCNAHGYKTSRGKPFVKNSIPTILRNDKYIGMYRYMDVEIAGGMPQIIDKDLWDTVQSKLRHNFSARAKNKAKEDFLLTPKLFCGHCGSLMTGETGTSHTGKIHRYYKCNCRKYKHGCTKQNEKQQPIEDFVVRHTVETVLTDENIDRIADKAMEIIEKEYADSSYLSGLKANLSETEKRINNLMKAIEQGILTETTKSRLEELENDKRTLVSEIAGEELKKPLLTKDHIVYWLQSFRNGDIDNEDYRRRIVDTLVNSVYVYDTPDGGRKVTLTFNVSGQNTSTVEGSSIEGFTALNQSNLNPVEFFFTDHVFGFVLTVERIE

SEQ ID NO: 10342 - protein, 516 aa, Unknown
  Description of Unknown: Integrase B10343 sequence
  cd00338,PF13408,IPR011109,IPR038109,PF07508, Coil,PS51736,IPR036162,PTHR30461,IPR006119, G3DSA:3.40.50.1390,IPR025827,PS51737,PF00239,SM00857, G3DSA:1.10.10.2600,SSF53041
MNVVIYARFSSSAQRDESIDGQVRVCTDFARRNDMTVVEVYADRALSGRSDARPEFQRMIRDSARGRFDAVLCYAVDRFARNRYDAATYKARLKANGVRVYYATSPLNDSPESILLESVMEGLAEYYSENLSRSIKRGLMESALEGKSLGGVVPLGLRLNSEHRFEIEPAEAEVVLEIFKLYAGGSSALEICNLLNARAIRTRRGGQWNKNSLRSILTNTRYIGRYTYGDVVLEHAIPQIIPNDLFDQVQAQLKIVHAARAHKKGKANPFLLTAKCVCGCCGEMMIGESGTGRGGATYYYYKCGGRKRGSGCKKANEHKDALERLIVEEVRARILRDEVIDRIATEAAELMRREAEDNTQLTSMKAELSQVGSGIRNLLRAIEMGILDDDTRARMEELQQRKAELMAQIAREEIRKPVLTADQIAFWLSRFKTGDVDSPAYRAQVIDTLVNTVIINDSPDGGREYIITCNLSENNSFKISVSDIDADGVPLREYPNTVLLISRLCFGLILHYKTPA

SEQ ID NO: 10343 - protein, 516 aa, Unknown
  Description of Unknown: Integrase B10344 sequence
  cd00338,PF13408,IPR011109,IPR038109,PF07508, Coil,PS51736,IPR036162,IPR006119,PTHR30461, G3DSA:3.40.50.1390,PTHR30461:SF3,IPR025827,PS51737,PF00239, SM00857,G3DSA:1.10.10.2600,SSF53041
MNAVIYARFSSTAQQEQSIDGQVRHCTEFAEKNGYKIINTYIDKALSGRNDNRPAFQQMISDSSKGTFQYVLVWKFDRFSRDRFDSAIYKSKLRKNGVRVISITENVGDGIDGNLIEAIYEAMAENYSRQLSQNVVRGMRESALQCKSVGGSVPFGYKIEDKRYVIDEEAAKIVRYIFEAYASGKRKCEIAEELNSKGFRNSKGEPFKMQSLSKMFTNRKYIGVYKYGDIVIENGFPAIISKELFEKCADRAVKNKHTSGHANARVTYHLAGKAYCGHCGAPLTGDAGTGRSNMYYYYSCSGKKRHLEGSSKCPKKRESKDILEAYVAEQAIKYFTDREKIFEIAEKVVKAFDRSKDEKEKISEVEKEIRTIDTEINNLVNSLLNITAPALIRKVNERSEQLEKQRAELSEKLVMLKLNSKVSSITADEFAEWILTFCDGDLDDKSFVAKILDKLVHKVFIYDDKLLIYYNIKDSEEVTYSKMLLDISGSTIDASGRPKNAAPLFSETASFVIYKL

SEQ ID NO: 10344 - protein, 516 aa, Unknown
  Description of Unknown: Integrase B10345 sequence
  cd00338,PF13408,IPR011109,IPR038109,PF07508, Coil,PS51736,G3DSA:3.40.50.1390,IPR006119,PTHR30461, IPR036162,PTHR30461:SF3,PS51737,IPR025827,PF00239, SM00857,G3DSA:1.10.10.2600,SSF53041
MTGVIYARYSEGPHQTDQSIEGQVADCKAYAARNGIEILGVYADRHISGKSAATRPEFQRLIEDAQAGRFECVVVWKIDRFGRNREDIALYKLKLKRAGVKLFYAAESVPEGPEGIILESVLEGIAEYYSEDLRQKVIRGRRETLKKGILAGEVLPIGYKRDENRHVIIDEEKAPLVREVFRKYAAGDGLKSCVAYLNDHHVTGARGAKMSTGVVGRMLRNRRYLGIFDECGVELRFDPIIDPQTFEEAQKMHKTSRNRNINASGKAKEAYLLSCRCFCGYCRTMIVADCGTGKMGKVYRYYACPKHKRGGDPCELKPIPRDVLEDLVVSATVEDMLTDETIKALTDEVMDIQTEGAKESPAVPLRAALDGNKKKQANLVRAIELGNAPDILVSRLQELTDEAAELEQKIRQAEYERPTIPRDVIEGWLRSFKNGDKKDPEFRKRLIETFVARVDVYNDKAVIYYNITEKKPKNKAASGVRIRPVSWSSRNGIRTPGKPFVYGKYYILIVPFSHAA

SEQ ID NO: 10345 - protein, 516 aa, Unknown
  Description of Unknown: Integrase B10346 sequence
  cd00338,PF13408,IPR011109,IPR038109,PF07508, Coil,PS51736,G3DSA:3.40.50.1390,IPR006119,IPR036162, PTHR30461,PTHR30461:SF3,IPR025827,PS51737,PF00239, SM00857,G3DSA:1.10.10.2600,SSF53041
MNAVIYARYSSSNQREESIEGQLRECHEFAQKNDIIIVGEYCDHAISGKTDKRPQFQKMIKDSEKGKFDTLLLYTIDRFARNRYDSAMYKAKLKRNGVKVIYVKQPISAEPEGIILESVLEGYAEYYSENLSRAVKRGLKENALHGIVVSSRPPLGYYTDETRHYAIDPVGAKIVKEIFELYADGRSIPEIVAHCNAHGYKTSRGKPFVKNSIPTILRNDKYIGMYRYMDVEIAGGMPQIIDKDLWDTVQSKLRHNFSARAKNKAKEDFLLTPKLFCGHCGSLMTGETGTSHTGKIHRYYKCNCRKYKHGCTKQNEKQQPIEDFVVRHTVETVLTDENIDRIADKAMEIIEKEYADSSYLSGLKASLSETEKRINNLMKAIEQGILTETTKSRLEELENDKRTLMSEIAGEELKKPLLTKDHIVYWLQSFRNGDIDNEDYRRRIVDTLVNSVYVYDTPDGGRKVTLTFNVSGQNTSTVEGSSIEGFTALNQSNLNPVEFFFTDHVFGFVLTVERIE

SEQ ID NO: 10346 - protein, 515 aa, Unknown
  Description of Unknown: Integrase B10347 sequence
  cd00338,IPR011109,IPR038109,PF07508,IPR036162, IPR006119,PTHR30461,G3DSA:3.40.50.1390,PS51737,PF00239, SM00857,G3DSA:1.10.10.2600,SSF53041
MTTKCVILARISSEKQDKEYSLPAQVSRLSDYATRRQMTVLREFVLVESSTTGDRKKFLECLNYCVANHAALLIDTIDRAQRSFMEIPLLEKYRRAGELEIHFCRENIVINAESSGTEIIMWHQGVLMAESYSLHFKENVKRSISVKVARGEYPGRGPLGYKNIRTADNRSDIVPDNNADLVCQLFAKYASGDVSLSGLVDYAYNLGLRTETGGKLAKSHIHKIISNPFYYGVARWGKYTFPHRYAPLIEKSVWDKCNALLSGKNQHRATRWGSKDYLYRGLVRDFYSRRIVTTERKKNRYNYLMTWDESGRHVAVNEDVVTAQIYKILKMIQVPRDVIDDVREYLKSAKEIESEYAARAIAELQNDLNIAVKRQSALVNMYLDGKIADDMYSVKDAELKTQIADIQSKLNANVSADSGVNDTIVQIFSAASCAADLFIESSEVTPKRDILKSIFRTLELKDTTLCYDLNFPFNLFITKGQRTIWRALADDFRTLHYEKLRNLAANWNWALPMAA

SEQ ID NO: 10347 - protein, 515 aa, Unknown
  Description of Unknown: Integrase B10348 sequence
  cd00338,IPR011109,IPR038109,PF07508, Coil,PS51736,G3DSA:3.40.50.1390,PTHR30461, IPR036162,IPR006119,mobidb-lite,PTHR30461:SF3, PS51737,PF00239,SM00857,G3DSA:1.10.10.2600,SSF53041
MYRPKGLDVDIYLRKSRKDIEAEKSAADDSSDRDTLSKHRNQLFAIAKKEEHNIINIHEEVVSGETISERPEIQNLLRRVESGVVEAVLIMDLDRLGRGDMLDQGLLDRAFRYSGTKLITPTEYYDPEDDSWELVFGVKSLVARQELKAITRRMQGGRRNSVTEGKSVSKKPPYGYMRDKNLRLYPDPDTAWVVKKMFEMMKNGHGRNAIADELDKLGIKPSFKDTWSPSTITAIIKNEVYLGHMIWGKMKHTKKHGKYIRTKMPKESWIIKENAHEAIVSQELWDAANRAHSGRFRPSTIETKKLSNPLAGILKCEVCGYTMLFQPRKDRPNPVIRCTQSSCKGIQKGSLLPLVEERILESLKRYIEDFFIEGDGPEKSDAKSVIPLKEKAIEKMQKELDELSAQKNNMHDLLERGVYSIDTFMARQQNVTERMNVLQDNIQDLQRDISRERMQEKNIHEFIPKLKSVLEAYRQTDDIEKKNQLLKSILEKVTYLRKQDWKQKDQFKIQLFPKI

SEQ ID NO: 10348 - protein, 515 aa, Unknown; identical to SEQ ID NO: 10246
  Description of Unknown: Integrase B10349 sequence
  cd00338,PF13408,IPR011109,IPR038109,PF07508, Coil,PS51736,G3DSA:3.40.50.1390,PTHR30461,IPR036162, IPR006119,IPR025827,PS51737,PF00239,SM00857, G3DSA:1.10.10.2600,SSF53041

SEQ ID NO: 10349 - protein, 515 aa, Unknown
  Description of Unknown: Integrase B10350 sequence
  cd00338,PF13408,IPR011109,IPR038109,PF07508, Coil,PS51736,G3DSA:3.40.50.1390,IPR006119,IPR036162, PTHR30461,PTHR30461:SF3,IPR025827,PS51737,PF00239, SM00857,G3DSA:1.10.10.2600,SSF53041
MNSLKAVIYARYSSDKQRDESIEGQIRECRAFAEREGIIITNIYTDKALSARTDNRPEFLQMIEDSKKHLFDYVLVYQLDRFSRSREDSAVYKAILKKNGVKVVSAKENITNDPAGIILESVLEGMAEYYSAELSQKVRRGMTDNALQGKVNGTPTPLGYDKTEDKHLIINEREARIVRSIFDLYIKGHSIPSICSHLDSKGYLSKHGSKFSYAVVRRILSNEKYIGTMRWNDIVIENAIPSIISKEIFDKVQHEKGHRIKKKGARSEFYNLCGKLYCGKCGGHYTGNTATSHTGAKHHYYSCTNRRKHKTCTGKNIERDILEDIIINKTIHILNEPNTIAQLAKMTTEASSTMLGDAELELKRIDARIKELQSELENYMKAIAKGFISDTLQKQIENAEAELQDHMTRKTNHEIKAHPIKITAEHIEFFLYKMAKENPTTNTGRARILDTFIHSATIYDDRVEITFNYNNDLPQFKGQVIDGSFSVDVVVQMTQKANLFQFLNHRYPLRLIIPL

SEQ ID NO: 10350 - protein, 515 aa, Unknown
  Description of Unknown: Integrase B10351 sequence
  cd00338,PF13408,IPR011109,IPR038109,PF07508, Coil,PS51736,IPR036162,G3DSA:3.40.50.1390,PTHR30461, IPR006119,IPR025827,PS51737,PF00239,SM00857, G3DSA:1.10.10.2600,SSF53041
MKHNPSCALRTAVAYARYSSAGQRDVSIEQQLRDIRAYAEREGYAIVHEYADHARSGFRNVAARSEFQAMIAAAASGSFDTILCWKVDRFGRSREDSAIYKGQLSRLGVSVVYVMEPIPTGAAGVLTEGMLEAIAEWYSRNLSENVRRGMSDNAAKCLYNGVTVYGYDGIRNERYRINEEQAAVVRQIYSLYIDGYSIAEIVRLLNDAGQRTESGKLFCINKIHNILKQERYTGVYLFGDYRIPDGMPVIIDPDTWQRAQRMKSKTSRHHQKNPVDYLLTGKAFCGCCGKPLVGDSGTGRNGTHYYYTCQSRKRRAGCAKKSVRKDDLEDFVINFLLDHVLSGPEMERIADAIMEYQRKESDSSPLRAMERELQETERKISNTNRAIAEGIFTGSTVAMLQQLEKTAADLRLSIESRKYAEGQLLDRDRVFFFLTAFSTMDRTDPHDRRTLVHVFLNSVYVYDDHCRILVNTSDDDSIIPFADLPPEPSGSDIVCSVLPPATHPNHVLIQYVVRM

SEQ ID NO: 10351 - protein, 515 aa, Unknown
  Description of Unknown: Integrase B10352 sequence
  cd00338,PF13408,IPR011109,IPR038109,PF07508, Coil,PS51736,G3DSA:3.40.50.1390,IPR006119,IPR036162, PTHR30461,PTHR30461:SF3,PS51737,IPR025827,PF00239, SM00857,G3DSA:1.10.10.2600,SSF53041
VACYCRYSSDNQREESIHAQRRAIEDFCEKNNMTLVNVYIDEALSATNDDREQFLKMIEDSASRRFGAVIVHKLDRFARNRYDSAFYKKRLKDNGVKLISVLEPLDDSPESIILESVLEGMAEYYSKNLSREVRKGMGENAQNAVHNGGIPALGYDIDENKKHVLNEREAESIRFIFEKFLEGWSYRRIAEELNAMGYRSKLGRPFKAGSITDLLINEKYTGVYVFNKRAKKGTNRIYKDDSEIVRIDGAVPQIVDKETFQKVQEKLKANRRGPRIKQDRVYLLTGSIYCGLCGKTYNGNSYVYGRGNVKNYTYACSTHQKSRHDCTGKTVRKDLIEAFVLDQIKEHVLNDTAIEKIAAAIKENLIKKYKSLSANLKTYEDNKISIEARLNKLVDLYLDGSLDKSLYNSKSSELKTQLADIDLKIKDASRINLNMYSLDKISDFIRSYDLDNADNETKVKLIQTFVDRVTVYPDKITVDIKIDMDRGLGGGGEPLHRIPLSIPTEEFYNKKAAWA

SEQ ID NO: 10352 - protein, 515 aa, Unknown
  Description of Unknown: Integrase B10353 sequence
  cd00338,PF13408,IPR011109,IPR038109,PF07508, Coil,PS51736,G3DSA:3.40.50.1390,IPR006119,PTHR30461, IPR036162,PTHR30461:SF3,IPR025827,PS51737,PF00239, SM00857,G3DSA:1.10.10.2600,SSF53041
MNSLKAVIYARYSSDKQRDESIEGQIRECRAFAEREGIIITNIYTDKALSARTDNRPEFLQMIEDSKKHLFDYVLVYQLDRFSRSREDSAVYKAILKKNGVKVVSAKENITNDPAGIILESVLEGMAEYYSAELSQKVRRGMTDNALQGKVNGTPTPLGYDKTEDKHLIINEREARIVRTIFDLYIKGHSIPSICSHLDSKGYLSKHGSKFSYAVVRRILSNEKYIGTMRWNDIVIENAIPSIISKEIFDKVQREKGHRIKKKGARSEFYNLCGKLYCGKCGGHYTGNTATSHTGAKHHYYSCTNRRKHKTCTGKNIKRDILEDIIINKTIHILNEPNTIAQLAKMTTEASSTMLGDAELELKRIDARIKELQSELENYMKAIAKGFISDTLQAQIENAEAELQDHMTRKTNHEIKAHPIKLTAEHIEFFLYKMAKENPTTNTGRARILDTFIHSATIYDDRVEITFNYNNDLPQFKGQVIDGSFSVDVVVQMTQKANLFQYVNHRYPLRLIMPI

SEQ ID NO: 10353 - protein, 515 aa, Unknown
  Description of Unknown: Integrase B10354 sequence
  cd00338,PF13408,IPR011109,IPR038109,PF07508, Coil,PS51736,IPR036162,PTHR30461,IPR006119, G3DSA:3.40.50.1390,IPR025827,PS51737,PF00239,SM00857, G3DSA:1.10.10.2600,SSF53041
MPRAKKQASCPPRTAVAYARYSSAGQRDVSIEQQLRDIRLFAAREGYNIVHEYADHARSGYRHTSARTAFQAMLSAADRGTFDTLIVWKVDRFGRNREESATFKGRLRMRGVKVVYAMEPIPEGAAGVMLEGMLETTAEWYSVNLSENVKRGLYDNASKCMYNGAHIYGYCCGPDHKYAIVPEEAAVVRNIFKMYTDGMTITQISDHLNASGLKTNRGKPFCYSRVFNILHQERYLGVYIFADVRIPDGMPQIIDRKTWEDARAMAKKLMRHHDTRPTDFLLTGKAFCGHCGKPMVGDSGTSKTGTSHYYYSCQSKKRRAGCDKCSVRKDYLEDKVIDFLFDHCLTGEMMEEIANAVVKAQKEALLSSPVPAMEAELKEALKRQDNINNAIAEGIWNSSTKEKLDELAVTINDLKESIAVLKFSQGELQDHDSVIQYLKRLAAGDRQDPEHRRHIINTFLNSVYVFDDHLKIAINAVEGNSQIPIDLSQSSDNDSDGLPTRFHPNSQTMVFTVLL

SEQ ID NO: 10354 - protein, 515 aa, Unknown
  Description of Unknown: Integrase B10355 sequence
  cd00338,PF13408,IPR011109,IPR038109,PF07508, Coil,PS51736,G3DSA:3.40.50.1390,PTHR30461,IPR006119, IPR036162,PTHR30461:SF3,PS51737,IPR025827,PF00239, SM00857,G3DSA:1.10.10.2600,SSF53041
MDNTHLNVLSTDAYIIYLRKSRADNPSESVEEVLEKHEAMLQELAERDLGGRIPDDCIFREVVSGETIEERPEMSKVLSKIENPDVRAVLVVDPQRLSRGDLMDCGQIVNAFRYTKTEIITMNMTYDLTNKMQRKFFEQELVRGNDFLEYTKEILLRGRIASVKRGSYIGNTPPFGYDKIKDEIGPTLIPNEQAEAVKMAFDLYVNEGRTFYEIGRYLDSIGVKPMKTKRWDKTAIRWMLQNHHYAGFVRFGFKHTVREYVDGQIEKRRSRPGDPDEMIIIKGRHTALVSEELFNAAQEKMDNNPRAKRDAPLQNPLAGLFYCAKCGKAMIRHPYKRAQARYSCKDQTFCESRSIAVAEIVDAVRFALLNEKLPELEAKLKNNDGNAAAIQKKQIEKMNAELGELLQQENKQYDLLEKGIYSEDVFTKRNKKLHAEIEELKSRIFTAKQTMPVEIDYKDKIIKLQTAIEALTDESLSALEKNKLLKTIIKRIEYDYIRHEGKGKIVYELNIFLLL

SEQ ID NO: 10355 - protein, 515 aa, Unknown
  Description of Unknown: Integrase B10356 sequence
  cd00338,PF13408,IPR011109,IPR038109,PF07508, Coil,PS51736,IPR036162,IPR006119,G3DSA:3.40.50.1390, PTHR30461,PTHR30461:SF3,PS51737,IPR025827,PF00239, SM00857,G3DSA:1.10.10.2600,SSF53041
MRAFIYCRFSSHKQQELSIEGQRDICQEYADKHNITVVGQYADRARSGKTENRADFRRLMRDAATGVVDCVLVWRYDRFFRNRAESALYRKQLEAAGVHLISVTEYIPEGSAGIITQGMIETVAEYFSAKLSEDVSRGMNKAAQHCQIVGRAPLGYRAGPNKRWQIDPVGAELVRRIFEWYASGKAMGQLAAQLNEEGHRTTNGTLYTRSSFNSILRNEKYIGVYSYGGKVRIEGGCPRIIEDELFFTVQRRLSANRHRPGAYKAEVPYLLSGKLFCGLCGAPMTGTAGTSHTGARHYYYICNNRRAKTCKKKNVRLDLIEEAVLQSALDILTDENIAYISTEVERRCAENSDSAALLASLNAQLEEVQRRLKNIGNAIAQGIITETTKELLEEAEADRTALRQQIDRAKVQAALVVKAEAVACWLDGFRRGDRTDPDFRRQVFGALVHSVFVYDDYLKIIFNVDSAGAAVVPYEAAQAATSSEAPPGSYLDTLGAPKKAAMLIAAFSFICLSII

SEQ ID NO: 10356 - protein, 515 aa, Unknown
  Description of Unknown: Integrase B10357 sequence
  IPR038109,IPR006119,PS51737,PF00239,G3DSA:3.40.50.1390, PTHR30461,IPR025827,SM00857,G3DSA:1.10.10.2600,SSF53041, IPR011109,PF07508,PS51736,mobidb-lite,cd00338, PF13408,Coil,IPR036162,PTHR30461:SF3
MQQALNAVIYARYSSHSQQEQSIEGQLRDCYAFAEREGLHVVGEYIDRAITGRTDERPDFQRMIDDASKKQFQRVIVWKLDRFARNRYDSAHYKAKLKKYGVKVISATENISDEPEGIILEGLLESMAEYYSANLSKHVRRGQRESIINGTYLGGVPPIGYKVENKRLVIDERTAPTIRYMFEQYAKGVSKRQIIDELNARGIRNKKGKPLTLSSMQAALRNEKYIGIYRYNGQEVTGGCDALIDEATFRKVQERLDKVKHAPAAAKAKIDYLLQGKAFCGYCGTRMVGESGRGKMGSTYHYYACGKRKKEHTCKKKNEKKDFIEWYIVEQTVEYVLTPDRMDYIAAALVAQYEKDFGDNRITDYEKQLERINGEIRSLVDTLAVCPPSARQPIFDKMELLDVQKTDLEIDIAKLRVAARVRPSEEQIKAWLKQFCKGDLDDMEFRERIIDVFISSVYLYDDKVIIYYNIEGGKQVSYMEMIESTEEPPFADDPQGSSGVRISNDTPRHVAMRDA

SEQ ID NO: 10357 - protein, 515 aa, Unknown
  Description of Unknown: Integrase B10358 sequence
  cd00338,PF13408,IPR011109,IPR038109,PF07508, Coil,PS51736,IPR036162,PTHR30461,IPR006119, G3DSA:3.40.50.1390,PTHR30461:SF3,PS51737,IPR025827,PF00239, SM00857,G3DSA:1.10.10.2600,SSF53041
MEAKVIRAVAYARYSSDNQREESITAQLRAVKEYCQQKEYILTNVYTDEAKTATTDNRAGFQQMIADSGLDLFDVVIVHKLDRFARNRYDSASYKRKLRINKVRLESILERLDDSPESVILESMLEGIAEYYSKNLAREVRKGLSENARAGIHNGGRAPYGLKVNPITRKYEIDETQYKAVQMYFNGVVAGVPLAEIARRINAEGFRTYTGDKFKITSFDTWAYNRKYKGDYAWDVSTKKDAEGKRNGHTKKPIEEQTIIPGVIPAIIEPELWERVNSLMKKRQRIGGSMTAKEVYLLSGKVECGVCGSNYFGERYNSRGNHYAYYKCSGKCGNKGVDKYALEKLISEKLEEICFSEDGMNKIAEEVKRLYAERKKTVNSEIEPLKKEIKSLELKIDKWLDILGDGTPQKQVYMQKISEADDHKKLLELELAKMNVLANVQSVDEAILMKVLNAKKDQLFSANDEDRKQVFQEYVDKVIVNSIQDDVVNIELTVRCFNGGGELTLLKHLTFPYQK

SEQ ID NO: 10358 - protein, 515 aa, Unknown
  Description of Unknown: Integrase B10359 sequence
  cd00338,PF13408,IPR011109,IPR038109,PF07508, Coil,PS51736,IPR036162,IPR006119,PTHR30461, G3DSA:3.40.50.1390,IPR025827,PS51737,PF00239,SM00857, G3DSA:1.10.10.2600,SSF53041
MKAVIYARYSSHAQREESIEGQLRVCYDYALREGIQVLREYIDKAISGTTDDRPAFQRMIKDSASHSFDAVLLYSVDRFARDRYAAATYRHELKRNGVRIISVTQPLDDSPESILLEALLEGLAEYYSANLSRGIKRGMYENALKCQYTGGAYSLGYTVDPVTKHFVEDPVSANTVREIFSMYADGKTIMEIVRYCNQQGYRTSKGQPFSRNSLSKMLRNKRYVGYYIYKDIEIEGGMPAIVDPELFESVQRRLKMNHKARSRAKSDVDFILTGKLYCGHCGRPMVGTSGTSKSGEKYYYYSCRNHGQQCIKQNEKKDVIEDAIMDYITCQFLTDENIDKIADKIIEMLGSDSEKAIIAGIKNERKEVERKAHNIVDMIADGKGTDMLVENLRDLERRIDDLDMQLAKAEFEQNYITKDMIVFFFRQFQDGEADTIGLRRRLINALVQSIHIFDTNENQNDSKSSDRGLYGLGRKLVIAFNTTADVENPVTLECSDLTAMVERRGIESRRSACKP

SEQ ID NO: 10359 - protein, 515 aa, Unknown
  Description of Unknown: Integrase B10360 sequence
  cd00338,PF13408,IPR011109,IPR038109,PF07508, Coil,PS51736,G3DSA:3.40.50.1390,IPR006119,IPR036162, PTHR30461,PTHR30461:SF3,PS51737,IPR025827,PF00239, SM00857,G3DSA:1.10.10.2600,SSF53041
MNAVIYARYSSDSQREESIDDQIKECMSYADRTGLTVISTYTDKALTGKTDKRPGFLKMIDDSKKEIFKYVICYKTDRFCRSRKDAAKYKSILKNNGVNVVYAKMDIPKGPEGIILEGVMEALDEYYSANLSQNIKRGQLGNALKCKSNGVNVFGYKRDDNDMYVVDDREAEAVKKVFEFVCDSYPDTYIINWLNENGYRNTLGKKFTKTSINRIIRNRKYIGEYKFGDVIVKDGIPAIIDENTFTKANEMKNKRRSRRVINNEYLLTDILYCGECGSGMFGKSGTSRNKTKHYYYSCSNRIKHTCDMPYIQKDVIENAIINILNKLLFDDAVLSDLTDMIYEAINNKDHYLLDQLKSEYDEKSKQLENIVDAIADGAYTKSMIARMKELEKELESLETSISREKLNNKPIEKDFITFILHKFKTNELSSNEQKKRLINTFVSKAFIYKNGKLVLMFNYKKDGEIASYSEILEHISTKSPVLQISFGGEKNTQLEHSINISLINSCITVYTDIMH

SEQ ID NO: 10360 - protein, 515 aa, Unknown
  Description of Unknown: Integrase B10361 sequence
  cd00338,PF13408,IPR011109,IPR038109,PF07508, Coil,PS51736,G3DSA:3.40.50.1390,PTHR30461,IPR036162, IPR006119,PTHR30461:SF3,PS51737,IPR025827,PF00239, SM00857,G3DSA:1.10.10.2600,SSF53041
MTTAVIYARYSSSNQREESIAGQLRECRQYASKNGMKIIHEYTDSALTGTSDKRPAFQQMVKDSEKHAFTVVIVWKLDRFARNRYDSATYRNILKKNGVKVISAMENISDSPEGIILEGLMESLAEYYSANLSENIKRGLYDSALERKVLSNPVFGYQKGMDGRYELHPINAPAVKRIYTDFANGKPYAQIIDELNRDGFKTSQNRPFTRNSLRTILRSEKYIGVYRYRDIVDEHGIPPIVDRDLFDRVQKEIKRRSFTKVKKKNDTQENFMLTGKLYCGHCGEMMTGESARSKGGTYYHYYSCSGMKAPKKNGCRKKRVSKEKIEDEVIRIINTEILTDDFIDDMVPRVMKYQESDQAFATIRNLEEMKKQEQKKLDNIMKAIESGIWSDSVNSRLNELEHNMMRLEQRIQEEKLSMVQFTADDIKAFLYALKNAQKTDSDAQQYLINACINRIYLFDEDDGQKLVIHVNMSDQETEPITLQSVVRSMSDSLHLNVHTRTLTDGVVLLSIMFRP

SEQ ID NO: 10361 - protein, 515 aa, Unknown
  Description of Unknown: Integrase B10362 sequence
  cd00338,PF13408,IPR011109,IPR038109,PF07508, Coil,PS51736,G3DSA:3.40.50.1390,IPR006119,IPR036162, PTHR30461,PTHR30461:SF3,PS51737,IPR025827,PF00239, SM00857,G3DSA:1.10.10.2600,SSF53041
VIYARFSSHNQREASIEQQVEWCTDLAKRYSLTILDTYADKAVSGRTDNRPRFQKMMADAKTGKFDVVLAWKSNRMGRNMLEAMLNDSVLLEEGVRTIYVEEDFEDNAAGRFALRNMMNVNQFYSESMAEDVRRGMMDNAAKCMVNGRTPFGYKKGKDGKYEVVPDQAEIVREIFSRVIEGWPHVDIMADLNARGIKNRDGNIWQRTTFDKMLRNEQYIGVYKFSGVRTEGGIPPILDRETFEEVQLLLTTKKNPRGRRRNTQDYMLTGKLFCGQCGNPMVGICGTSRNGERHYYYLCQGKHNKTGCTKRNEKQEKIEQAVVNYIKKLIMDDATIDWLLAGLQEFKATLRAQSTITAMESELAETEKAIGNLMKAIEMGIITDTTKGRMMELEEQKRDLQQRIRIENKMLVELDPEDLRFVLVKYRDTNLNDRKYQRELINTLIKAVYVYDDHLTFVGNRGTNDTAEVEFDDISSIDVAGDSDVRTNDTKPHQVNTVRTTVRFREYGIVAVVPYN

SEQ ID NO: 10362 - protein, 515 aa, Unknown
  Description of Unknown: Integrase B10363 sequence
  cd00338,PF13408,IPR011109,IPR038109,PF07508, Coil,PS51736,IPR036162,IPR006119,PTHR30461, G3DSA:3.40.50.1390,PTHR30461:SF3,PS51737,IPR025827,PF00239, SM00857,G3DSA:1.10.10.2600,SSF53041
MKAVIYARYSSSNQREESIEGQLRECHEFAKNNDIVIVGEYCDHAISGKTDKRPQFQKMIKDSEKHKFDTLLLYTIDRFARNRYDSAMYKAKLKRNGVKIIYVKQPISQEPEGIILESVLEGYAEYYSENLSRAVKRGLKENALHGIVPASKPPLGYCVDETRHYAIDPVGAKIVREIFEMYNEGHSVPEIVAYCNSHGYKTSRGKNFVKNSIPNILRNDKYIGMYRYMDVEIPGGLPQIIDNDLWNSVQSKLRHNYTARAKNKAKDDYLLTTKLFCGHCGSLMTGETGTSHTGIVHHYYKCNCRKYKRGCNKANEKKKPLEDFVVKHTVETVLTDENIEKIAVKAMELIEKDFADTSYLSGLKIQYSDTEKKINNLMKAIEQGILTETTKSRLEELENDKRTLAGEIASEEMKKPTLTKEHIIYWLESFRQGDLNDEDYRRHIVDTLVNSIYLYDTPEKGRKIVFTFNVSGENTSVVEGSSIDGFSALNESNSNPVFFFIDHVFGFVLTVEKIG

SEQ ID NO: 10363 - protein, 515 aa, Unknown
  Description of Unknown: Integrase B10364 sequence
  cd00338,IPR011109,PF07508,Coil,PS51736, G3DSA:3.40.50.1390,IPR006119,IPR036162,PTHR30461,PF00239, SM00857,SSF53041
MDPKTLYLYSRKSRALGDPDDPALLDAHKEALLALARRRNTEVPAPNIRLEIGSGETISERPTFQQLLKEWEALPPDTGGAVLVTMIDRLSRGDHADQGRIQRALSRADIHVWTPGRIYDLRDVNEGFFFDVEALFARRELSLFKQRMLLAREKLTRDGRSPNLVAPFPYTVDRLAKQWVPHPDRFAIAQHWCREVERDSLQVIAQRWSVPYHVVWWTLRNPAIAGWPCKRSHMTADRKRWRESDPGNWEWPERQGSYPPVVSLEEWRRIQAIIDRRRIERSKRGGRENGWCREVLRFVGHEDRTPRLSVQNAGNARGPTRDRLATYEIVTPTGHRLYIARAQVHAAALDALQALFRRPEKIRRLADEYTAARVLEASQPPQEADRAETEKKLAMVRRKLVRIEDELLGSDDSERLLALSTLRDLLTAQAQALSRQLQAKPDLLPASHAMDQLLPMLEEFAPHLGDMLEVLVDEGDGEKLYILTTALLSRIWVDVVKLGEKARYRREVVAVEARW

SEQ ID NO: 10364 - protein, 515 aa, Unknown
  Description of Unknown: Integrase B10365 sequence
  cd00338,PF13408,IPR011109,IPR038109, PF07508,Coil,PS51736,G3DSA:3.40.50.1390, IPR006119,IPR036162,PTHR30461,PTHR30461:SF3, PS51737,IPR025827,PF00239,SM00857,G3DSA:1.10.10.2600,SSF53041
MNNLKAVIYARYSSDKQRDESIEGQIRECRAFAEREGIIITNIYTDKALSARTDNRPEFLQMIEDSKKHLFDYVLVYQLDRFSRSREDSAVYKAILKKNGVKVVSAKENITNDPAGIILESVLEGMAEYYSAELSQKVRRGMTDNALQGKVNGTPTPLGYDKTEDKHLIINEREARIVRTIFDLYIKGHSIPSICSHLDSKGYLSKHGSKFSYAVVRRILSNEKYIGTMRWNDIVIENAIPSIISKEIFDKVQHEKGHRIKKKGARSEFYNLCGKLYCGKCGGHYTGNTATSHTGAKHHYYSCTNRRKHKTCTGKNIKRDILEDIIINKTIHILNEPNTIAQLAKMTTEASSTMLGDAELELKRIDARIKELQSELENYMKAIAKGFISDTLQAQIEKAEAELQDHMTRKTNHEIKAQPIKLTAEHIEFFLYKMAKENPTTNTGRARILDTFIHSATIYDDRVEITFNYNNDLPQFKGQVIDGSFSVDVVVQMTQKANLFQFLNHRYPLRLIMPL

SEQ ID NO: 10365 - protein, 515 aa, Unknown
  Description of Unknown: Integrase B10366 sequence
  cd00338,PF13408,IPR011109,IPR038109,Coil, G3DSA:3.40.50.1390,PTHR30461,IPR006119,IPR036162,PTHR30461:SF3, IPR025827,PS51737,PF00239,SM00857,G3DSA:1.10.10.2600, SSF53041
MRPSSAFPPGASVVAYLRDSGHEDQELSVDQQEHAIRSWCADHGLILTRVFTDAAAPGSSTIGRAEFRAMISHFHAANCADRGVIIWKFNRFARDIDDAQFFKADLRRRGYIVHSLHDSVPDGLDGRFFEAAIDWMNARYLEDLSADIKRGLHHLVDQYGGMPGNPPKGLKRQIFELGRHRDGRVRQAARWVPDTDMLETIRLAWRMRAGGFGYGSIHQATKLYTTRQSYANFFRNRIYIGELEYGGRLITGYCEPIIDRDTWEVVQTVMDANHSSYLHLRQNHPRRARSNFLLSGLVQCAICKTQMYGNVVMPRGQRYGYYDCANRRNGACPDAKPIPQVVLEDAVIDNLVNHILQTDNLTQLLKTYRQDTDDLRRSTQQQIDALNRQLGKVRRQLGNLADLLAEDGLRSRALMNKVRTLEAKESELVLQIGELAVPVQPVELKPIDEIMPTVEEIKTRLLTPERNADTKNILAGLIDHIEVRREGKNQLVGVIYYYLPPAGKNIFMPKCQTPG

SEQ ID NO: 10366 - protein, 515 aa, Unknown
  Description of Unknown: Integrase B10367 sequence
  cd00338,PF13408,IPR011109,IPR038109,PF07508, Coil,IPR036162,IPR006119,G3DSA:3.40.50.1390,PTHR30461, PS51737,IPR025827,PF00239,SM00857,G3DSA:1.10.10.2600, SSF53041
MKKIKAPSCAPRTAVAYARYSSAGQRDVSIEQQLADIRSFAKREGYTLVHEYADHARSGFKNSAARTAFQSMMAAAESGSFDTVISWKVDRFGRNREESALFKGRLRRVGVKVLYAMEPIPEGSAGVLLEGMLEATAEWYSRQLSENVTRGMTDNAHRCLYNGTRIIGYTRGPDGRYALDPDGAAVVRFVFKRYIEGFSAARICRELNATGARTSRGCAWQPESLLRVISNERYTGVYIWGDIRVPDGMPAIIDRNTFEKAQNMKRKTARHVEQGAVDYLLTGKAFCGHCGAAMIGDSGTSKNGARHFYYTCQSRKARKGCSKKSLQKDYLEDRVISFVLDNVLSDERIEATADTVIRMQQEELKTSPLAAMEAERKEVLKQIENINNAIAAGVWSNSTVDKLRELEASAENLRISCDTLRFSQSQLMNRNQVLFFLHRFTQGDRSDPLFRRHIIDTFINAVYVFDDELKIVTNNCEGNQRVPLEALPDCSDYDNSGVPIVIHPNFRVTIYHLAI

SEQ ID NO: 10367 - protein, 514 aa, Unknown
  Description of Unknown: Integrase B10368 sequence
  cd00338,PF13408,IPR011109,IPR038109,PF07508, Coil,PS51736,IPR036162,PTHR30461,IPR006119, G3DSA:3.40.50.1390,PTHR30461:SF3,IPR025827,PS51737,PF00239, SM00857,G3DSA:1.10.10.2600,SSF53041
MKAVIYARYSSSNQREESIEGQLRECHDFANKNNIVIIGEYCDRAISGKTDKRPEFQKMIKDSEKHKFDTLLLYTIDRFARNRYDSAMYKAKLKKNGVQIIYVKQPISQEPEGIILESVLEGYAEYYSENLSRAVKRGLKENALHGKAAGSVPLGYAKGEDKRYIIDPVGAKIVKEIYELYAEGHSIPEIVSYCNAHGYKTARGKAFVKNSLRTILTSDKYIGVYRYMDVEIEDGIPAIIDKDLWNTVQSKIKHNYSARAKNKAQEDYLLTPKLFCGHCGSLMTGETGTSHTGKIHRYYKCNCRKYKHGCTKENEKKEPLEDLVVKTTVEKVLTDENIDLIATKAMELIEKDFADTSYLSGLQDELKETDKRINNLMEAIEQGIITETTKSRLEELENDRKKLTEEIGIEELKKPLLSKERIAFWLYSFKNGSIDDENYKRTIVDTLVNSIYVYDTQDGGRKVVFTFNISGNNTTTVEGSSIAGLTALKGSNLNPQFFFVGHIFGFVLVVSRIG

SEQ ID NO: 10368 - protein, 514 aa, Unknown
  Description of Unknown: Integrase B10369 sequence
  cd00338,IPR011109,IPR038109,PF07508,Coil, PS51736,G3DSA:3.40.50.1390,IPR006119,IPR036162,PTHR30461, PTHR30461:SF3,PS51737,PF00239,SM00857,G3DSA:1.10.10.2600, SSF53041
MDTTTNAVIYARFSSHSQQEQSIDGQLRYCRDYAAQHGYTIIEEYIDRAITGTSDQRPDFQRMIRDAAGRGFQYILVWKLDRFSRNRYDSAIYKRQLAKHGVRVLSVTENVGAGDETLLLEAILEAMAETYSRQLSQNVKRGMAESARKCQSNGGRGILGYKVDANKQFVIDPDAAAIVQRIYSMYAAGSSKAEIVETLNAAGLRNNLGKPFTFNGITKTLQNIRYTGVYKYGDIEVPGGMPQIIPQELWDACQARQQAKPPRIREKAEYLLLGKVYCGYCGKALIGTSGHGKSGNVWRYYAHRSGTKDCHKKPEKKAWLEWYVTDRACRYVLNPDNTEYIAQRVCAAWQAENGGNADAMQGRIKAIDRELDRIAISYTTAVPAIQAALNARASDLQTERNQLQAEYGRMQARRPLVLDDVKQYLQQLCVGDPSDPAVQKQVIDTFINCVYVWDDKIVVYFNVSDGGQIEYAKAKEHAAGVRAECTSAHHNAVGTNAYIVFVGGYIGIVCPREL

SEQ ID NO: 10369 - protein, 514 aa, Unknown
  Description of Unknown: Integrase B10370 sequence
  cd00338,PF13408,IPR011109,IPR038109,PF07508, Coil,G3DSA:3.40.50.1390,IPR006119,IPR036162,PTHR30461, IPR025827,PS51737,PF00239,SM00857,G3DSA:1.10.10.2600, SSF53041
VGVFGLLRGLFCVSQSVVQYVYADTLCGMTIHAVVGARVSHVQGEEKTSHISQRGKGQAYAESQGWEVVGSFEDLDVSAIKLSPWERPDLKDWLTDRSDEWDALIFAKTDRVFRSANDCVKLAEWCKENRKILVLVDDGIKLDYYNPEDAKDAFAGAMSKVFLILASVFAEIEGQRFVQRARDRVSFLRDTDRWGYGTPPYGFQIAPHPSGKGKTLVHDLEAQKVIQEAAKRFLAGSSLTRIAKQFNEEGIPTQRGSRWVTSTVRRLLSHPGMQGLKTYKGKVVLDSEGEPIRVGPPSFDDTTWHRLQQELAQRGLEPRKRRHTTNPLLGVAKCAFCGGNLAQRTHVSKGREYRYYACGRAPQGCPGVSVSAVDAEELVEQEFLRTHRHRKVRDRVWQDGSDHSVELEQAKRTIESLREDRAMGLFTTPEDELMFRQQMKALVAKRDSLEEMPVKKAGWVEVVTDKTYGEVWPTAMVEERRKMLQDAGVTVTVTSPRVLHIHVESLLGVSSQTG

SEQ ID NO: 10370 - protein, 514 aa, Unknown
  Description of Unknown: Integrase B10371 sequence
  cd00338,IPR011109,IPR038109,PF07508,Coil, PS51736,IPR036162,IPR006119,G3DSA:3.40.50.1390,PTHR30461, PTHR30461:SF3,PS51737,PF00239,SM00857,G3DSA:1.10.10.2600, SSF53041
MAPVNKKYAMYLRKSRADLELEAMGEGETLARHQHMLENLAAKHEIHPDQITVYREVVSGDSIDERPEMQRLLADVYANTYDGVLVVEVERLARGNTKDQGEVADAFQASSTNIITPAKVYDPNNEFDQEYFEFGLFMSRREYKTIKRRLEAGKKASVMEGNYLLPQRVFGYDIVRRSKKERTLVIREDESKIVQMIFDWHTEEKRATGWMARKLTLMGIPTIKGKPEWNRGTIRDMLANPTYIGKVWWGKRRTIKEFNAELGKLVKVTKEDGIPEVFEGKHKGIISEAQYKKAQYVTQTMKNPSAKTSTELVNPLAGMIECCDCGRKMIATRFKDGRKTRMSHARDTICQKKSLPLDEVLDAFVDALKVTISDFEMKMEADDNKAERAKHQAVLDAMESELAKMERKRKKLFLDYEDEVYSRDEFIERKQHYNQAIDEIKKQIQEAQSAVPEPVDYSEQIVNLHAMIECVKNPDLSAKKKNDFLRQFIDRITYDSIDYGQRKGGKAVLEVFLK

SEQ ID NO: 10371 - protein, 514 aa, Unknown
  Description of Unknown: Integrase B10372 sequence
  cd00338,IPR011109,IPR038109,PF07508,PS51736, IPR036162,IPR006119,PTHR30461,G3DSA:3.40.50.1390,PTHR30461:SF3, PS51737,PF00239,SM00857,G3DSA:1.10.10.2600,SSF53041
MSDVENSQLIRAAAYVRMSTEHQQYSTNNQMDVILEYAARRGMEIVRKYSDEGKSGLNIQGRDSLGLMISDVQGKTANFTCILVYDVSRWGRFQDADESAYYEYICRRAGISVHYCAEQFENDGSPVSTIVKGVKRAMAGEYSRELSSKVFQGACRLIQMGFKQGGTAGYGLRRMLIDQNGQHKGVLKIGEQKSLQTDRVILVRGPEEEVAAVQWMYDAFVQQGLQESEIAKSLNARGLITDFGREWNRATVHQVLTNEKYIGNNVYHRTSFKLKKKHVNNPPDRWIRTEGAFEGIVDPTIFFAAQGIIIERSRKFTNEEMLEKLRGVLQQRGRISGILIDECDDMPSSAAFRHRFGSLVAAYSLIGYTPQTDYGFIEVNRRLRRQHPAIVAEVIAQIEAMGGSVTTHEQTDLLIVNREFRASIVLCRHQTTMRGSSRWIIRLDESLRPDITVAVRMDTMNEGIQDYYLLPAIDMTWEKLRIAEDNGIYLDAYRFQTLDFFFHMTARTTIQQTV

SEQ ID NO: 10372 - protein, 514 aa, Unknown
  Description of Unknown: Integrase B10373 sequence
  cd00338,PF13408,IPR011109,IPR038109, PF07508,Coil,PS51736,IPR036162, PTHR30461,IPR006119,G3DSA:3.40.50.1390,PTHR30461:SF3, IPR025827,PS51737,PF00239,SM00857,G3DSA:1.10.10.2600,SSF53041
MPKKNPSGGKRLVAYYRYSGGSHQTEQSIEGQRRDCETYARIHGMVILHEYIDRHISGKTDDRPEFQQMIADAGKGMFDYVICWKTDRIARSRYDSIVYKKKLRDNGVELLYAAEANVEGSGGIIVEGLMEALAEYYSAELAEKVRRGMRESALKGKAIGSSRPLGLTVDKDKKYIIDPAGAAAVRYIFEQYAAGAASSAIVAHLNEQGLCTSRGNPFNKSSVVRIIQNEVYRGVYVSPKFDVRIEGAVPAIIDDDLWERAQKMFIRNRQSRSPRNDRADYILSGKLFCGECGTAMKGVSGHSSNGEVYFYYNCPCKDCHRRNIPKDELEGLVIRTVCNDVLQPDVMNRIADSVIEAQTAELNQPNPEKEALRHELADVQRKAKNLLSALENGTAGAMLTNRLAELEQQANTLSYQLSSLESDPKFPVFSKEEVLYLLEQFLIAPSEKTKAYRRRLIDTFVSKIEVSNTELTIYFNIAEEDCGKMKKASQSNQPEGCSTEKQMVRVARIELTAS

SEQ ID NO: 10373 - protein, 514 aa, Unknown
  Description of Unknown: Integrase B10374 sequence
  PF13408,IPR011109,IPR038109,PF07508,Coil, PS51736,IPR036162,PTHR30461,IPR006119,G3DSA:3.40.50.1390, PTHR30461:SF3,IPR025827,PS51737,PF00239,SM00857, cd03768,G3DSA:1.10.10.2600,SSF53041
MLKVAIYSRKSVETDTGESIKNQITICKQYFKRQNEECKFEIFEDEGFSGSNINRPSFQRMMELAKIKQFDIIAVYKIDRIARNIVDFVNVYDELDKLNIKLISITEGFDPSTPVGKMMMMILASFAEMERMNIAQRVKDNMKELAKMGHWSGGTPPKGYKPKRIKENGKNITHLELIEEDAKDIKEIFKEYALGLSMYKISQNFKAQGKKYPNKTISNILINPTYLKSTKRSVQYLKNEGYTVYGKPNNCGFLPYNRRPKTNGKKSWNNINKFVSISIHKPIVDLDLWIKVQEKLKEKTVAPHPHESSYSFLSGGLIKCKCGGHMLLKPGAPRKKVPQKYYFVCSNKWNGIGCPSKHLRVDYAEEDFLLFLEKFLDKNYLREYLSQSNNTKIVGQETKSINKKIKSNDTSISNLIDKLALMSNEASKLLMGKIEELTRINNNLKERLLELQREKLLNDLNKNNVDILYNNIKKILNTPNNDLRRTYIKSIVKEIIYDYDTGSLNIILLKTGVI

SEQ ID NO: 10374 - protein, 514 aa, Unknown
  Description of Unknown: Integrase B10375 sequence
  cd00338,PF13408,IPR011109,IPR038109,PF07508, Coil,PS51736,IPR036162,IPR006119,G3DSA:3.40.50.1390, PTHR30461,PTHR30461:SF3,IPR025827,PS51737,PF00239, SM00857,G3DSA:1.10.10.2600,SSF53041
MAKRKFNKGGEVRLVAYYRYSGGSGQTEQSIEGQRRDCETYARLHNMTIQKEYVDRHISGKTDDRAAFQQMIADSDKGAFDMVICWKTDRFARNRYDSAVYKKRLRDNGVEIVYAAESNIAGAEGIIIEGVMEALAEYYSAELAEKMRRGMRESALKGQAISRCRALGLKTDERKRFVIDEKTAPTVRFIFEHYAAGESAMSIVEQLNAKGLRTSQGNPFNKSSIPRIIQNEAYRGVYVSKSYDVRIEGAIPAIIDNELWERAQTMLKLNRQLKAKNEPKADYILSGKLYCSCGSLMRGMSGHSATGEVYRYYTCPNKDCHLRNIPKDDLEGKVIQSIVDHLLQPESMEALAEAMVEVQKADAEKPNAERVAIEQSLADVRRRSKNILDAIENGTANAQLCARLNDLTEQEQTLSFQLSSLEKEKPVAFTKEQYLFLLEQFLVEPSERTPEYGRRLVNAFVTSMVVSDRELVINFNVSDETVNKNKKASQTNLQKESSSGMRLVRVARIELTAS

SEQ ID NO: 10375 - protein, 514 aa, Unknown
  Description of Unknown: Integrase B10376 sequence
  cd00338,IPR011109,PF07508,Coil,IPR036162, IPR006119,G3DSA:3.40.50.1390,PTHR30461,mobidb-lite,PF00239, SM00857,SSF53041
MRNEYNPIIIKYVAEYLRKSRGETTEDLIKHKTILEELCKSRGWVYVVYEEVETGESLFARPVMQQLLRDVEDNIYDAVVCVDLDRLGRGDLVDWGQIKRVFQKTNTYMVTPSSLYNLNDDNEEFAVDLQTLFARREYKKITHRLSMGKKVGAKLGAWTNGTPPMPYEYQEWIDPATNKRYYNEKGLVVNLQKLSIYRFMVDSFIKDKKSTNEIAWELNRRNIPSPRGGRWCNMTVRRLLVDETHLGKIISNKTKGDGHKNKSPNKQPFQKIPKEQWTVVENRHEAIKTQDEHEKILIGIQKNLKSPYRRSDHYYPLKGLIKCGLCGYGLPLEYKRGKDLIVKKCWHKDYLGNKCPNSSGKAQYIIDAIDEQLKEYEEQIRKEIESCEDQSTDLIQLQIKTIMDKLNKKDIALKRARIAYDEGVDTLDEYRSAKERILKEVDELENQLSIENLKLQKAQSITNHEKLHYIEEFRRSRWEDELDDKELNDLYKTIISSIIWTKQGDNIDIKVNFL

SEQ ID NO: 10376 - protein, 514 aa, Unknown
  Description of Unknown: Integrase B10377 sequence
  cd00338,IPR011109,IPR038109,PF07508, Coil,PS51736,G3DSA:3.40.50.1390,PTHR30461, IPR036162,IPR006119,mobidb-lite,PTHR30461:SF3, PS51737,PF00239,SM00857,G3DSA:1.10.10.2600,SSF53041
VAVAAIYARYSSAGQREESIEDQVRVCTEAAERAGDNVVRVYQDRASTGTSVDHRHGFLQMVADGQRGAFEVLYVYKTDRFARNRYDSAVYKMRLRRAGVRVVSATERIEDGPDGILLESVLEGMAEYYSANLSENVRRGLDGNAEKCRHNGVRTFGYELGADGYFALDEVEAPVVLGCFEAYADGMGMPEICAEYSWVRTKMGKPLTVSMLSRMLRNEKYRGRYSYGGHVVEGGMPRIVSDELFYAVQRMLAAATRRRRGVMDYLLTGKLFDEEGHRYQSQSGHGKSGRKYTYYKCPATGHAVRQDALEAEVARGVAGILEADDDAVAAIVAMVLAEQDEAAAGDVAAMDAMRSRLEENAREQSRMVDLAAKTGAVDAVAAKMAELSEERGALERDLAEMERACPLLSGEEVEFWVRRVMGRRDPLEAVRLFVSRVVLDRSHGEVLVEFTFDGGRGGGGGGGGEKPNPRPGDCPGGGSDRLRMADRSQLIANTWLVCAMRGGFTLVVPFRLSR

SEQ ID NO: 10377 - protein, 514 aa, Unknown
  Description of Unknown: Integrase B10378 sequence
  cd00338,IPR011109,IPR038109,PF07508,Coil, PS51736,G3DSA:3.40.50.1390,PTHR30461,IPR006119,IPR036162, PS51737,PF00239,SM00857,G3DSA:1.10.10.2600,SSF53041
MDTTTNAVIYARFSSHSQQEQSIDGQLRYCREYAAQHGYAIVAEYCDRAMSGTNDNRPEFQRMIRDAAGRGFQYILVWKLDRFSRNRYDSAIYKRQLAKHGVRVLSVTENVGAGDETLLLEAILEAMAETYSRQLSQNVKRGMAESARKCQSNGGRGILGYKVDANKQFIIDPDGAAIVQRIYSMYAAGSSKAEIVETLNAAGLRNNLGKPFTFNGITKTLQNVRYTGVYKYGDIEVPGGMPQIITQELWDACQARQQAKPPRIREKAEYLLLGKVYCGYCGRALIGTSGHGKSGNVWRYYAHRSGTKDCHKKPEKKAWLEWYVTDRACRYVLNPDNTEYIAQRVCAAWQAENGGNADAMQGRIKAIDRELDRIAISYTTAVPAIQAALNARASDLQTERNQLQAEYGRMQARRPLALDDVKQYLQQLCVGDPSDPAVQKQVIDTFINCVYVWDDKIVVYFNVSDGGQIEYAKAKEHAAGVRAECTSAHQNAVGTNAYIVFVGGYIGIVCPREL

SEQ ID NO: 10378 - protein, 514 aa, Unknown
  Description of Unknown: Integrase B10379 sequence
  cd00338,IPR011109,IPR038109,PF07508, Coil,PS51736,G3DSA:3.40.50.1390,IPR006119, PTHR30461,IPR036162,PS51737,PF00239, SM00857,G3DSA:1.10.10.2600,SSF53041
MDLYAVYLRKSRIDLDAERAGQGETLKRHETALLALAKQRQYPIGEIYREVVSGDTISGRPEMQRLLADVESGRWKGVLCMEESRLARGDTMDQGRVQQAFYYSHTLIITPNKIFDPDSEADQEYFEFGLFMSRREYKMINRRLQRGRLASVKEGKWVGGHVPYGYRKVDIPQGKGKMLVPVPEEAQVVQAVYHWFVEDNADISAIAKRLNGMGLKTAQGHLFGCQSVRDMLDNPVYAGWIRYGSRQKEKIPVNGKLVDYHHRAPDVEGQNLFRGRHEPIISEELYQSAKARRSLRRGTPGPRLAPAKNPFAGLVYCSRCGRAMARNPGKPGGSRDRLMCMYPSCSGIVGSTIIEELEGLLLSSLQHHLAEITIPEAQQERRNHEEDLLRTAAEQVEKELAGIATQRARAFDLVELGTYTPEIFTQRMEALAARESELQNQLEELNHRREESAAEARGAKVLAPKIKRIIDLYPGLKSPHEKNNLLKTAINHITYARPKGGTIDDLRLKIYYIM

SEQ ID NO: 10379 - protein, 514 aa, Unknown
  Description of Unknown: Integrase B10380 sequence
  cd00338,PF13408,IPR011109,IPR038109,PF07508, Coil,PS51736,IPR036162,PTHR30461,IPR006119, G3DSA:3.40.50.1390,PTHR30461:SF3,PS51737,IPR025827,PF00239, SM00857,G3DSA:1.10.10.2600,SSF53041
MAQVKLISPLTKQGIQKLRVAAYCRVSTNYADQKNSYATQIKTYTKQINEKAEWELVEIFADEGISGMKADNRPEFQRMLKRCERREIDLIIVKSLSRFARNVKEALEYVRKLKLLGIGVIFEKEGINTLSLGDEMLLNTFSAIAQEESQAISQHMRLSITKRMENGDYVDSNAPYGYRLVNKHLEPYQPETDIVKLIFQLYLMGSSTSEIARELTQMQIPTKNGKEKWRSTKVAYILSNERYVGDSKYQKTYRSTTVPFKQAKNRGEEDMFYASDTHDGIIPREDFDRVQALLQKRQTQFSKATPGLNSYPLTSKVRCAECGSYFRRRVRSGDIKWLCSKHYEDSKACDSLYYSEERIYDGFITMINKLRFGEEQILKQVISKLELASALYKKNNKAARAISESIADLNSKIVMLEQLHSKGYLASEVYQSQAREIRNQITALKSDRQDAFESRIQDMLISVRKLQDLLDEIEEPLDEFNEKLFMETVTEMTINNKDELIIKLIGGLEFTELI

SEQ ID NO: 10380 - protein, 514 aa, Unknown
  Description of Unknown: Integrase B10381 sequence
  cd00338,G3DSA:3.40.50.1390,IPR006119,IPR036162,PTHR30461, PF00239,SM00857,SSF53041
MTAAAIYLRSSKDRHDLSMDAQRRTLHEHAALAALAVVAEYADAVESGKDEDRPGFQRLLAALKRKDREWSVLLALDTSRIARRRHLAMIFEHEAERAGVRIQYANVPDTDPITGMLLRSILQAMDEWHSLTSKAKGLAGMAESVRQGWRAGGRAPRGYRLEHTPTGTLRDGQPVMRSKLVPTDDATAVAVYLRTRAQGKPRGIASAASGIVRSLNELEWQALTYAGHTVWGVHAEHAAGGYKGGHKRKPRAEWQITRDTHPALISDDEAESILQQLEDGQTRRNRAGNRVYLLSGLLISPDGQPYSGETTKGAGFYRLGKGRRISTRLLDDAVMDCVFNDLSQPDTAKLIADQMRAASAPKGKPRDITAMKLRLQGLDQKISRLVDLIAEDAEAAPAYRRAIGKMETDRVMIEAEIEAAAVESKTAECVALWTPEDVLRLLGQLKADLLGSMESGDVASVRTALSDLVDVIEYDADQRLAEIRYRLDTGVKMASPRGGDVAPVEWSSKTAVRR

SEQ ID NO: 10381 - protein, 514 aa, Unknown
  Description of Unknown: Integrase B10382 sequence
  cd00338,IPR011109,IPR038109,PF07508,Coil,PS51736,G3DSA:3.40.50. 1390,IPR006119,IPR036162,PTHR30461,mobidb-lite,PTHR30461:SF3, PS51737,PF00239,SM00857,G3DSA:1.10.10.2600,SSF53041
MSKLPSGEFWLYLRKSRADLEAEARGEGETLAKHRKALFRLAREKGINVTQVYEEIVSGESLFHRPQMLKLLEDMETNAPKGVLVMDMDRLGRGNMQEQGLILDTFRRHNVLIVTPAKTYDLNDESDELMTEIQTLFARQELRMITRRMQRGRVASVEEGNYIGTRPPYGYLIHQEGRERFLVPHPEQAPIVKQIFQWYANEEIGARKIAARLNEMGIRTYTGRTWTSPSVLVILKNEVYIGLIQWKKREQKKSRTPGKRRDTRTRDKSEWISVRGKHEPLVNEELFRKAQDRLKSKYHVPYQLINGVTNPLAGLIKCGKCGYSMVLRPYTKQAPHIKCYNRFCDNKSSRVEYVETKLIQALEEELQHIKIKWSSHRKKKDSNVEIHEQVIQSLERELKELEQQKERLYDFLERGIYSEDVFLERSQNLQSRIEQTQQAIVKAHEELHHEQERVKAQKDIIPNITNVIRLYKRSKDPARKNALLKSIMYHAEYRKEKHQRLDDFELKIFLKIHR

SEQ ID NO: 10382 - protein, 514 aa, Unknown
  Description of Unknown: Integrase B10383 sequence
  cd00338,PF13408,IPR011109,IPR038109,PF07508, Coil,PS51736,IPR036162,PTHR30461,IPR006119, G3DSA:3.40.50.1390,PTHR30461:SF3,IPR025827,PS51737,PF00239, SM00857,G3DSA:1.10.10.2600,SSF53041
MNVVLYLRYSSDKQTEQSIEGQDRVCTEFCERNGYNIVWRYIDRATSAFKDTDKRTEFQRMIRESEKQGFQGVVVYKLDRFARNRYDSATYKAKLKRNGVHVISATENISDNPEGIILESVLEGMAEFYSKELSQKVNRGMYETALKANSCGGPIPLGYRVENKKYVVVDKDAAVVQEAFNLYADGKTITEIIDLFRKKGYRTAKGKEFNKCSFDKMLRNERYIGIYKYKDVRIEGGVPAIVDKKTFDIVQSRLKENASAPGKGKAKVDYLLAHKLYCGHCGAIMTGESGRSETGVKYYYYTCSCRKKTHKCDKKNMRKEWIERVVVEDVLALLTPERIEAFADMAIKANQEDIQNESLVPALKAELKDIETRTNNLIKLAERVTDSGSLADRLIALENERKDAEKRLAIAESDIVILEKEQVVYWLEKFSKGDIDDPDFCRSVLDLFVNSVTVWDEPGGYKITTIYNLQKHNRKTHKVKSSDFVPSGSPLFYYPNFSVFFIAEVFGMIKHREA

SEQ ID NO: 10383 - protein, 514 aa, Unknown
  Description of Unknown: Integrase B10384 sequence
  cd00338,PF13408,IPR011109,IPR038109,PF07508, Coil,PS51736,IPR036162,IPR006119,PTHR30461, G3DSA:3.40.50.1390,PTHR30461:SF3,PS51737,IPR025827,PF00239, SM00857,G3DSA:1.10.10.2600,SSF53041
YCRFSSRGQREESIEAQIREIEKYASDNNTQIMQIYVDRAESATTDNRTNFQKMINLLVDTKNSIGINYIIVHKLDRIFRDRYDSAVYKRKLKLLGIKIVSVLERIDDSPESIILESSIEAFAEYYSRNLAREVMKGLKENAYKAKFNGGILPLGYDTDSDNNYVINEHEAFIVRFIFSEYLKGTGYRTICKILKEKGYKTRSNKNFTHTSIYSILKNEKYTGKYVFNKTHNLKTEQGKKIFRKNNDDVIITIDNAIPIIIDKKTFSEVEIMLEKNKKIFRSFNTVENIYLLAGKLYCGKCGSLLTGSTRKGGANKNSIYSSYVCGDKKKGNCTLKEIKKDEIENAVIELLETKLFNKDAIDKLLKNIEKELEKFKSEYKSEITVFEKELKDTEKQIANIVEAVANGFYNPAMKDKMSELEDKKNNLVVMIAEEKIKLTAARDTDKIKEDLQAVKSLKTLEPKKQKEIIQKYVKKITINDDNYEVLTNINVATVSNVGFPLYYTVATTIIRNKK

SEQ ID NO: 10384 - protein, 513 aa, Unknown
  Description of Unknown: Integrase B10385 sequence
  cd00338,PF13408,IPR011109,IPR038109,PF07508, Coil,PS51736,IPR036162,IPR006119,PTHR30461, G3DSA:3.40.50.1390,PTHR30461:SF3,IPR025827,PS51737,PF00239, SM00857,G3DSA:1.10.10.2600,SSF53041
MAINYLTDEAYIMYLRKSRADSPHESVEEVLEKHETILQELAERDLGGRIPEHCIYREVVSGETIDERPEMLNVLAQIENPKLKGVLVVEPQRLSRGDLEDCGKVVNAFRYSKTEVITTTMVYDLTNKMQRKFFEQELMRGNDYLEYTKEILLRGRVAAVKRGCYIGNIPPFGYNKIINENGDSTLEPNEFAPAVLMAFDMYVNQGKTHLEIARHFDKIGIKPYRSQIWEKSSIRAMIKNRHYIGLVYFGTRKDEKYFENGRLQVRNVKVEKEEDMIVAKGLHPAIVPLELFNAAQEKFANNPRKQPDTALKNPLAGIIFCHKCGKAMAQHPYKHARTRIECRNRNGCGSKSYYLDEVVESVAFSLETVSLPELEAKLNNNEGLSAAIQKKLLEKLYKELEEMQAQEDRQHDLLESGTYTEEVFQRRNKQLHAKMEELKSKIFETKQNMPKEVDYAQKIVKLKQAVAALRDDSMSIEDKNRLLKAIVERIEYEYIAWEGKGKVRYKLHIQLLL

SEQ ID NO: 10385 - protein, 513 aa, Unknown
  Description of Unknown: Integrase B10386 sequence
  cd00338,PF13408,IPR011109,IPR038109,PF07508, Coil,PS51736,IPR036162,IPR006119,PTHR30461, G3DSA:3.40.50.1390,PTHR30461:SF3,IPR025827,PS51737,PF00239, SM00857,G3DSA:1.10.10.2600,SSF53041
MRAFIYCRFSSHKQQELSIEGQRDICQEYADKHNITVVGQYADRARSGKTENRADFRRLMRDAATGVIDCVLVWRYDRFFRNRAESALYRKQLEAAGVHLISVTEYIPEGSAGIITQGMIETVAEYFSAKLSEDVSRGMNKAAQHCQIVGRAPLGYRAGPNKRWQIDPVGAELVRRIFEWYASGKAMGQLAAQLNEEGHRTTNGTLYTRSSFNSILRNEKYIGVYSYGGEVRIEGGCPRIIEDELFFTVQRRLSVNRHRPGAYKAEVPYLLSGKLFCGLCGAPMTGTAGTSHTGARHYYYICNNRRAKTCKKKNVRLDLIEEAVLQSALDILTDENIAYISAEVERRCAENSDSAALLASLNAQLEEVQRRLKNIGNAIAQGIITETTKELLEEAEADRTALRQQIDRAKVQAALVVKAEAVACWLDGFRRGDRTDPDFRRQVFGALVHSVFVYDDYLKIIFNVDSAGAAVVPYEAAQAATPSEAPPGSYLDTLGAPKKALRKRKAFSIMIAA

SEQ ID NO: 10386 - protein, 513 aa, Unknown
  Description of Unknown: Integrase B10387 sequence
  cd00338,PF13408,IPR011109,IPR038109,PF07508, Coil,PS51736,IPR036162,IPR006119,G3DSA:3.40.50.1390, PTHR30461,PTHR30461:SF3,IPR025827,PS51737,PF00239, SM00857,G3DSA:1.10.10.2600,SSF53041
MAINYLTDDAYIMYLRKSRADSPHESVEEVLEKHETILQELAERDLGGRIPEHCIYREVVSGETIDERPEMLNVLAQIENPKLKGVLVVEPQRLSRGDLEDCGKVVNAFRYSKTEVITTTMVYDLTNKMQRKFFEQELMRGNDYLEYTKEILLRGRVAAVKRGCYIGNIPPFGYNKIINENGDSTLEPNEFAPAVLMAFDMYVNQGKTHLEIARHFDKIGIKPYRSQIWEKSSIRAMIKNRHYIGLVYFGTRKDEKYFENGRLQVRNVKVEKEEDMIVAKGLHPAIVPLELFNAAQEKFANNPRKQPDTALKNPLAGIIFCHKCGKAMAQHPYKHARTRIECRNRNGCGSKSYYLDEVVESVAFSLETVSLPELEAKLNNNEGLSAAIQKKLLEKLYKELEEMQAQEDRQHDLLESGTYTEEVFQRRNKQLHAKMEELKSKIFETKQNMPKEVDYAQKIVKLKQAVAALRDDSMSIEDKNRLLKAIVERIEYEYIAWEGKGKVRYKLHIQLLL

SEQ ID NO: 10387 - protein, 513 aa, Unknown; identical to SEQ ID NO: 9841
  Description of Unknown: Integrase B10388 sequence
  cd00338,PF13408,IPR011109,IPR038109,PF07508, PS51736,G3DSA:3.40.50.1390,PTHR30461,IPR006119,IPR036162, PTHR30461:SF3,IPR025827,PS51737,PF00239,SM00857, G3DSA:1.10.10.2600,SSF53041

SEQ ID NO: 10388 - protein, 513 aa, Unknown
  Description of Unknown: Integrase B10389 sequence
  cd00338,PF13408,IPR011109,IPR038109,PF07508, Coil,PS51736,G3DSA:3.40.50.1390,PTHR30461,IPR036162, IPR006119,PTHR30461:SF3,IPR025827,PS51737,PF00239, SM00857,G3DSA:1.10.10.2600,SSF53041
MKTAVIYARYSSSGQREESIVGQLRECREYAKKHKLTVLEEYTDSALTGTSDRRPAFQKMIKDSETGAFSVVIVWKLDRFARNRYDAATYRHMLQANGVKIVSAMENISDSPEGIILEGLMESLAEYYSANLAENVRRGLYDSALERKMLSQPTFGYRKSSDGKYEIDETQAAIVRRVFTEYANGKPYMQIIDDLNAEGITTGHGHKFTNNSLRYMLKNEKYIGIYRYKDILDEHGIPPIIDRELYDRVQKERKRRSFTRKRKKPTGGDEYLLTGKLFCGHCGRQIVGESVRNKGGNTYRYYTCTGTKTASRNGCTKKRVPKEWIENEVIRIINEEVLTDTFIDLMAAEVLRYQDSAEVNRTTQILSDQLAEIKRKINNIVAAIQNGIWSETTGEVLRSLEAEQKATEDRIRHEELTRRVFTAEEIKTFLYALKRAEKTDTEAQRYLINACINRIYLFDDDDGQKFIFDLNYSTTGSEPVSFERVRQMCSNPCLFVDRRTVTEDGHVLLFIKA

SEQ ID NO: 10389 - protein, 513 aa, Unknown
  Description of Unknown: Integrase B10390 sequence
  cd00338,IPR011109,PTHR30461:SF21,PF07508,Coil, IPR038109,PS51736,G3DSA:3.40.50.1390,PTHR30461,IPR036162, IPR006119,mobidb-lite,PS51737,PF00239,SM00857, G3DSA:1.10.10.2600,SSF53041
MTTLEWLVGAYERLSLDKRDKSARDDGASPSVARQTKDNLKVAATHGLTIHRHYTDRANSAYDETKPRPEFEELIRDLEAGVIDGIVCYNQDRLLRDPYDLEVLRRIVKAAKKRGRVIMIFTPLGPIDLLNENDLLTARLNAMVANKSSGDTSRRVTDQHRDAANSGRPVGHRSFGWAEDKLALNPRESEAIRDGADKLLAGLNLADVFRDWNEKGLLTTKGNKWTTAAARWLYRNPRLVGWRYMPGTKYTAKELVRDGHGIPVVGQWEPVLDVNTWQAVNAVLDEKAHKAGFQKGQKSLRKYLLSGLLRCGNPDCTMARLRANGTSARADGSVRRNYACSECKAVAIDGPRTEELIEQQYLRRLGLRVLLTANAPTEDDAPWDGDERLAEINRLSEELMAAFRKGPKQEGGLSGADVFPQINALNEERDELTRQRGQYEAAKKKRPIAEPERLLHGWIDLSIPEKRAALESELSGILIHPRPVQEGWARQFDASRIEPLWNEQDEAADRAEA

SEQ ID NO: 10390 - protein, 505 aa, Unknown
  Description of Unknown: Integrase B10391 sequence
  cd00338,IPR011109,IPR038109,PF07508,PS51736, IPR036162,IPR006119,G3DSA:3.40.50.1390,PTHR30461,PTHR30461:SF3, PS51737,PF00239,SM00857,G3DSA:1.10.10.2600,SSF53041
MVNRAVMYVRMSTESQDYSTDHQRASIREYAAARDISIIREYVDDGKSGLDIRRRAGLLSLMQDVQSQDPDFSRILVFDISRWGRFQDIDEAAYHEHTCRRAGIEVTYCGERFADDAGPYASLLKSMKRVMAAEYSRDLSEKVFAAQARFIEMGFKQGGHAGYGLRRLALKACGTPRAILEYGESKISATDRVVLVWGPEHEVATVQRVYALYLEQGASEAGLARMLNNETVPSEFGRPWTQAMINSLLTNVKYCGALAYNRRSGKLSTRRTRNATDRWIVKQEAVAPIISARVFAQVQAERARRMKRYSRDELVALLQSCHGRHGAVNAKIIAADEQLPDPQLLVRTFGSLMNAYEAAGIPASPKYAFVATKRLLAAARTGLLQEVEALARAAGGATDPGDKQNTILMNGHLRVRIEITVPRNPRRGQRNWRIHGTPDADFTIVGRMEPLTGAIADYFLFSRNDLAPRVIYLKDSNLDQFARMRYPTVRGMFGLDAPSSLESTC

SEQ ID NO: 10391 - protein, 513 aa, Unknown
  Description of Unknown: Integrase B10392 sequence
  cd00338,IPR011109,PF07508,Coil, PS51736,IPR036162,PTHR30461,IPR006119, G3DSA:3.40.50.1390,PTHR30461:SF3,PS51737,PF00239, SM00857,SSF53041
MNIKDVAIYLRKSRGDDEDVLSKHRLLLTEYATKQGWNYTEYEEDLLSGERLATRPKMLVLLDDIADGKWDAVLVAAYDRLSRGSSKDFGTIIETMQYTNCYIATPERVYNVNDTNDLTMLGIQGVFANTELRIIKERFIRGKKLGAKDGKWTNGKPPYPYIYRKRIFINERGKEEIDADVLTDPEQKEIYLLMKRLYLTGEYSTEKLMIKMNKLGYPGPTGGLWRHNTIRRLLRSEFHMGYSIYGKYEYKTDKNNVKKAVRKRDREEWYIGRGDWEILKTEDEHRKILAIMKKHSKTPSRARSGSFPTSGLMYCKLCGHAMHYAGNGRVEVKTGKKFNFTKCSFTYPTGEKCPQRGVKLSEEFYDNLYNMVITSHFDTEIIEKSQLNQNDIAEKESSIADLERQLKQYSEALVRIKDAYSMGVYNLTEFGEEKKKLDDKIKNLRKNIDRIENEIASVTTYTRAELNSRIEEFKIKWQKASTPQEQNILLKTIVKRIIYNRQDDNVVLEVEYL

SEQ ID NO: 10392 - protein, 512 aa, Unknown
  Description of Unknown: Integrase B10393 sequence
  cd00338,PS00397,PS51736,IPR036162,IPR006119, G3DSA:3.40.50.1390,PTHR30461,PF00239,SM00857,cd03768, IPR006118,SSF53041
MSTWVYARVSTLDQYVNGYSIDQQVRVCLEYAKNNDYLLGLETNCDLPGVFIDGGKSAFKKKLCQRPGGLMLLGNAKPGDVIIALATHRLFRQFNDMVAVMDQWVQNGVTVKFVDYPTLNTDTANGKAMLYMMAVMAQLRSELISARVKESRVIARTKAPERPKPKPVETICSSKDVGAILQQMQRDREADKYKFTGRVHAYVRVSTNDQTVEHQVNLLTKMLPDDLRGAEIVWYKDEGVSAFKTKFEKRKAGGEMLKALKPGDMVVAWRPDRLFRSMVDANRVVDSIHKTGASLMTVEGDLRTDKPQGKMLMQMLAMFAEIESQDISRLTRLGNFGAIGINPKMQAMRVPKLLREMKKHFNQKHYHFENIFTADERFYMHIELHLTAKNYRSRKEACRVISNKWLAKKGLPPVQGEYGEPCKNYARRIHNMQKVEFTERRHRLCERLKKHPDEVRYPLSTETACQLVRNQTEFLRVAKMFPGRLKDKQSLTMLASSCTSPEAAVDFMGRLG

SEQ ID NO: 10393 - protein, 512 aa, Unknown
  Description of Unknown: Integrase B10394 sequence
  IPR038109,IPR006119,PS51737,PF00239, cd03768,G3DSA:3.40.50.1390,PTHR30461,IPR025827, SM00857,G3DSA:1.10.10.2600,SSF53041,IPR011109, PF07508,PS51736,mobidb-lite,PF13408,Coil,IPR036162,PTHR30461:SF3
MRHRDAPDRPARVLGYVRVSGREQGERGTSLEGQQDELRRFCAGRGYPEPIIRLEVESASPEKIEKRDELHGLIADARPGDLIVVCRVDRWSRDLEYGVGSVRKIVKRGVGWYSVGESIDATTSQGDSVLGIMAWAADQERKRIKERTVGRRAELRDQGLYVEGPAPYGYRRGSREERRQLLLELVPDEAAVVREAFERCLSESVERVRDWLEGETARAWDKKAAHLLLMNRVYLGEVKSSSGAWIPSTHTPAITRDLYERAQAAMAARKLGGRSPSSESRTATWLLRGLASCPDCGSRMGAQYSRSTDGGYYACARRLRLGVSACAAPYVPVDKADAAAGVAALAQLATFRRELARPRGAVAPTRKARDFGADRARLRSARERAVRLATDGTITREDLARELARLDQELGRLEVAAGAAARSETAQDPEARRAALADVERLERAWRRAPVEVRREALRGLAASIVLRPTGAEIAWRSADELAQEHAAAGAAHLFAPPAARSRKSSGKRRRK

SEQ ID NO: 10394 - protein, 512 aa, Unknown
  Description of Unknown: Integrase B10395 sequence
  cd00338,PF13408,IPR011109,IPR038109,PF07508, PS00397,PS51736,IPR036162,PTHR30461,IPR006119, G3DSA:3.40.50.1390,IPR025827,PS51737,PF00239,SM00857, G3DSA:1.10.10.2600,IPR006118,SSF53041
MKQVVIYARVSSDRQEKEGFSIPAQISYLKQYAAQNNFNVVKVFSESETAKKAGRKAFNEMLTYIKEKKINIILVEKTDRLYRNFKDYVTIDDIKGLEVHLVKDNTILSEKSSSQTKFLHGIKVLMAKNYIDNLREEVNKGRAEKIKQGYYPHKAPAGYINTKDENGKKIIAIDEKKAPFIRKLFELYASGVSGEECRKQLNAMGLYHNSKPYAKSILLKMLHDPFYIGKMEIKGVIYQGNHEPIIDIALWNKVQSMFTQSKARTHNVVFDYVGVIKCGHCGCQLTAELKKGKYIYYHCTGKRGGDCKKSYIRQEQIEQAIIRVLERIQIPEENADKIIAALKEMQGVKERFDETSSESINKQIKILTHRIDALYADKLDGKITEEFWEEKHNQWHNEKVTLLNKLQSLSVASKNFYESSNLLLNWCKDAPAKFLGKSAETKRKILNLIGSNFIYKDGKLSIVLNPVFELILNSHFSKNGGTHRTMLEPYTFIAELKKVVNEELYVNLKLVA

SEQ ID NO: 10395 - protein, 512 aa, Unknown
  Description of Unknown: Integrase B10396 sequence
  cd00338,Coil,IPR036162,PTHR30461,IPR006119, G3DSA:3.40.50.1390,PF00239,SM00857,SSF53041
LNEKKPNAVLYLRSSKDRHDVSIESQRHELARLAADRGLTVVGEFRDVVESGKDDDRPGIQALLEAVRRRDRGWAAILVLDTSRLARRAAAAYIFEDRECKPRGVEVIYKNIPPMEEAERAMYKAMLHGVDEWHSLVSKRKGLQGMRQNVKSGFRAGGRAPVGYRLEHVDTGIVREGKPVLKSRLVASSDAPAIQRYLKERAQGAARRALVRRLGLQISASSLVGVEWNALTYAGHTVWNVHAEEGTGTRRRPRADWVIQRDTHEALITDAEAETLLKNLEAAHVKRPRRTSGDYLFTGLLKTSEGVPWYGEKSRYYRAGNAHAPAQDVERCLLEKIAADLRSSAFSAALVQRARTSYGREFTAELARLNEAERVLARRISGFMDMAEKLDTPGPVLRKVDELEQDRKRLEREMEQARRDAAIAAQARAVTEDQVNRMLDAMANDMERLDRDKLKDFLFTICDRVTLNADTLSARIHYKIPLVRRDRLASPRGFDAVPHVRTVGCVQVRRAA

SEQ ID NO: 10396 - protein, 512 aa, Unknown
  Description of Unknown: Integrase B10397 sequence
  IPR011109,IPR038109,PF07508,Coil,PS51736,G3DSA:3.40.50.1390 ,PTHR30461,IPR036162,IPR006119,PS51737,PF00239,SM00857, cd03768,G3DSA:1.10.10.2600,SSF53041
MAKCILLSRVSTEQQSLDEQTRNLKTAAKAAGYDKIIVIETKESAIKLTEEERQGLNELKSYIEKGDVSCVFIWELSRLSRRPKVLYSMREYLQEKRVQLRCLHPDFTMFKDDFSLDTNANIIFGLYVSLCENEMAIKKERFHRGKEKNAREGKFSGGRYVKLGYKLDDNNYFVVDPDGADLVRELFYLYGVKKMSLRDLYNEMKSRGFKKTLTSIRKMLHDASYYGEPTKGTRGENTFYRTYPAIVSKELYDLVQERIEAAKHDNRKTVKQILGKKIVKCPKCGHAMVLDSNGRFTCNWHTKRNFVFDPCDNTCTIDSKTVDNLLWSASKKIWKWKMKQHSVDEKKRMVDELLVAQSKIKVCDKELAQIETRMKRAKDLYILGDLNEREFEEYRTSINDKKIEQAAQKAHLEERITYLNECIVGLNDPEETDIELAETDYTMKDKIVHECIKELVVDYIDDKKRDKVIKLKTIFNESYWLKRFQVRGVERIIWDKDGWTRLPSTNKKEEDF

SEQ ID NO: 10397 - protein, 512 aa, Unknown
  Description of Unknown: Integrase B10398 sequence
  cd00338,PS00397,PS51736,IPR036162,IPR006119, G3DSA:3.40.50.1390,PTHR30461,PF00239,SM00857,cd03768, IPR006118,SSF53041
MSTWIYARVSTLDQYVNGYSIDQQVRVCLEYARNNDYLLGLETNCDLPGVFIDGGKSAFKKKLCQRPGGLLLLGNAKPGDVIIALATHRLFRQFNDMVAVMDQWVQNGVTVKFVDYPTLNTDTANGKAMLYMMAVMAQLRSELISARVKESRVIAKAVAPERPKPVVVEPLSSSKDIGAILQQIQRDREADKYKFTGRVHAYVRVSTNDQTVEHQVNLLTKLLPADLRGAEVIWYKDEGVSAFKTKFEKRKAGGEMLKALKPGDMVVAWRPDRLFRSMVDANRVVDSIHKTGASLMTVEGDLRTDKPQGKMLMQMLAMFAEIESQDISRLTRLGNFGAIGVNPKMQAMRVPKLLRDMKKHFNQKHYHFENIFSADERFYMHIELHLTAKNYRSRKEAFRVISNKWLKRKGLPPIQGEYGESCRTYARRVHLMQKIEFSERRHKLCEKLQKHKGEVRYPLSPETACQLMRNQTEFLRVAKMFPGRLKDKQSLTMLASSCASPEAAADFMGRLG

SEQ ID NO: 10398 - protein, 512 aa, Unknown
  Description of Unknown: Integrase B10399 sequence
  cd00338,IPR011109,IPR038109,PF07508, IPR036162,PTHR30461,IPR006119,G3DSA:3.40.50.1390, mobidb-lite,PTHR30461:SF3,PS51737,PF00239, SM00857,G3DSA:1.10.10.2600,SSF53041
MTERRRAIGYIRQSEQRPGEDEKTSLSLRGQEDVFKQWCDQHDALPVAVVADHDLRGDDPSRPGLRELLDVAERERADVVWVLSLSRFARDHILQELTWRDLQKRGVQHLVSQIESGVDDPFFRGIYGLMHAKTKAEMSGHLRSAFARRAKDGGFPLGTTPIGYRRPHRITVTRANGTRYERETGQPSIDPDGADFVRHLAARVLANEPLAVIADDLNRRGPGPRGGRWRPTTIRRILQSPIYAGDIVHHGVVVHHNPEWAILDRETWDRLQQRFARAPVIRRGQIDSWLEGLICHACDDGQTRRMYYGAHTGKSAGHGGSLVCQGQWEKTCRGERRIIGAHLAEEAVTRCLIADLGDMRTSAAAIAMAHAEIGGTAVAKRREDLDQREADAHARWRRSHERYATGVLPWEVMDEEDARLKESLAAIERDRAALPVPPDEPAIHAAAARLSTVRALIARATGDDLRGLLTDLGVAIVSADGIAIRYHGPIRHLLPGTLTPVPRWGKGLRSVG

SEQ ID NO: 10399 - protein, 512 aa, Unknown
  Description of Unknown: Integrase B10400 sequence
  cd00338,PF13408,IPR011109,IPR038109,PF07508, Coil,PS51736,G3DSA:3.40.50.1390,IPR036162,IPR006119, PTHR30461,IPR025827,PS51737,PF00239,SM00857, G3DSA:1.10.10.2600,SSF53041
MKANQAAAQKNAVIYARFSSHAQNEQSIEGQLRDCHAFAEREGLTVVGEYIDRAISGKSDDRPDFQRMIADAKKRAFQFVIVWKLDRFARNRYDSAIYKHKLKQCGVKVLSAMENIGDNPESIILEAVLEASAEYYSVDLSQKIKRGRHESAVKGKFIGSIAPIGYKKSGSTLILDEITAPLVKWAFEQYAAGMQKRDIIAALNERGLRNKKGEPFGYTALQTAFRSEKYVGVLEQDGVRIENAIPALIDRPTWEKVQRNLDANARHGAKFKAAVEYLLSGKLFCGHCGKPMQGVSGTGKGGATFCYYMCAGRRKKECNKAHEKKDFVEWYVCEQTVEYVLSPARIKRIAEAVVAQYEKEFGDNSVEECEKRIAALDRELNKLIDAALEMPKNARQPLYDRMEQIGAEKDDAEIDLAKLKVANSIRYTVEEVESWLRSFCKGDLFDMDFRRRIIDVFVNSVFLFDDKIIIYYNIKGGKQVSYIEMLESIGEDAPADPGSGVCISKPLLHRQR

SEQ ID NO: 10400 - protein, 512 aa, Unknown
  Description of Unknown: Integrase B10401 sequence
  cd00338,PF13408,IPR011109,IPR038109,PF07508, Coil,PS51736,G3DSA:3.40.50.1390,IPR006119,PTHR30461, IPR036162,PTHR30461:SF3,IPR025827,PS51737,PF00239, SM00857,G3DSA:1.10.10.2600,SSF53041
MTKYIEYLRKSQMDRDFEDVSVEETLNRHRAILAEFVKSKKLNVEVILEEVVSGEALSSRPQMLKLLDLVNTGEYDGVICMDIDRLSRGSSIDSGYIMQVLQVNNCKIITPQKTYDLLNETDEQFADMKFMFSRYELSTIRKRLITGRDTSVKEGRFMGSVAPYGYKIIKLKGEKGNTLEVIPEEAQVVRMIFDWYTQDGLGAGQIAEKLTTLHIKPRKVGEWSAEVVRKMLINEHYIGKLPWKKNRIGKKFVDGQLTKKKYVNKEYEIYDGRHEPIISKEQFELAQQVRQDNRTRPVKLNLDIVNPFGGLLHCGHCGTKMTMVKPSKSNPNAKPRFKCGKSKKCGCKSHYSEEVEKAIVIEMKEWLAGYVIQLEQNDVQKDDGLEVSLEMLKNRLEELFEQQDSICELHEKKEYSDRLFQRRNAAIEAEIDQVESDIDELEQKLSEQKEEADIKSSIIPTSQYLLDNYDDLTPKEKNDIWKLILHKVDYVKTETGKEFNITIYPKLSHKPL

SEQ ID NO: 10401 - protein, 512 aa, Unknown
  Description of Unknown: Integrase B10402 sequence
  cd00338,PF13408,IPR011109,IPR038109,PF07508, Coil,PS51736,G3DSA:3.40.50.1390,IPR006119,IPR036162, PTHR30461,PTHR30461:SF3,PS51737,IPR025827,PF00239, SM00857,G3DSA:1.10.10.2600,SSF53041
MKNAVIYARYSSLAQNEQSIEGQLDVCKGYAAQNGYNVIGEYIDRAISGRTDDRPEFQQMISDAAQHMFDYVIVYKLDRFARNRYDSVIYKKRLKDNGVKVLSAMEGITDSPESAILEALLEGMAEYYSIDLAQKVHRGQIESIKKGRYVLGSPPYGYSLTDGKLSVCEPEAEVIRKLFGNYADGISLADCVKDLNDQGYRRRNGQKFVPRSFQKTLHNRIYIGENTQKGITIKDESLRLVDNEVFDRVQERSKLNQGKGGRYVNRYNYLLTGKLYCGECRALMNGVSGTSKTGERYHYYVCANRRKNNACTKANEPAEALEKFVVDQTMSYILNPDRIEELIAEIIKAYQDSRHGSEIVRKQTRLAAIETEMAKLAERLAVVPDSAVQTVTDRMKALGDEKTTLQSELMHLKAERTLTEKDVRKWLKSLGEVDRDDPSFQTKIINIFVSAVYVWDDRAVVLYNVFSDGAAATGMTIDADVVDEEFGVHLEDTTVHHRIRIVNTLLGIGFSR

SEQ ID NO: 10402 - protein, 512 aa, Unknown
  Description of Unknown: Integrase B10403 sequence
  cd00338,PF13408,IPR011109,IPR038109,PF07508, Coil,PS51736,G3DSA:3.40.50.1390,IPR036162,IPR006119, PTHR30461,PTHR30461:SF3,PS51737,IPR025827,PF00239, SM00857,G3DSA:1.10.10.2600,SSF53041
MNAAIYARFSSSGQREESIEGQLRDCNAYAKRNGLTVVAEYADKAISGRTDKRPDFQRMLKDSEKGAFQLLICWKMDRFARNRYDSAIYKAKLKKAGVRVVYAMESIPEGPEGIILESVMEGYAEYYSENLAQNVRRGYYDSALELKTLGAKPLGLKKGPGDHFVIDPETAPVVKRIFEEYASGRKINDIIEGLNAEGYRTARGLPFTRNSLQTILANEKYIGVYGFKDIRVEDAIEPIIDKTTWEAVQKMRKRRVISPAASRDVNFKLTTKLYCGECGCPMTGDSGTSRSGQTYYYYTCSNKKRGRHCKSKSVRKDDIEKLVVDQLLSLICSDQFIEDVADLCMEYQDRERDASLIASLEQKKKEIDKKIENLTKALEDGRAADIILDRLDQLKAEREDIERGIAVQLIEDPRLDRDQIIFYLQRLRERREKPEELGEDLIETFLNSAHLYDDGRLVLGLNFTGDRSKLTIEDISKIKDPSCSDSTGQIGITHQKPNMAIIGTVLMFEMVA

SEQ ID NO: 10403 - protein, 512 aa, Unknown
  Description of Unknown: Integrase B10404 sequence
  cd00338,IPR011109,PS00397,IPR038109,Coil, PF07508,PS51736,IPR036162,IPR006119,PTHR30461, G3DSA:3.40.50.1390,PTHR30461:SF3,PS51737,PF00239,SM00857, G3DSA:1.10.10.2600,IPR006118,SSF53041
MPAIKKTTSNTIKKCVIYARVSSDRQEREGFSIPAQLKLLKEYAQRNNIKIVQEFVESETAKKAGRKQFNEMIKFLKKNTTIKSILVEKTDRLYRNLKDYVTLDEFTGLEIHFVKEGEILSASSKSQDKFMHGIRVLMAKNYIDNLSEEIQKGLKEKCEQGYCPTRAPIGYLNVIQTSGKRTIEVDNETAPFIKKIFEEYLTGNYTYKTLAQYINKAGFKPRNKQCTGKTIENILHQEFYTGNFIFKGKKYYNGQHTPLITPELFAQVQEKLRKKNSPRGRVHNFAYTQFIKCAKCGKYMTAEIQHGAHNSGDYIYYKCRYCKKTYLKQEEIEQVFKETILDNIEFTKDEIAQIIEVIKELVKMECNDAIFSVEQINKRVVLLEKRLEQLYTDKVDGAISESLYIKKRDEWQNELNELLIKYEKTAKAGKEFIGNVELLLNLCKDAPRLYLNQTPHEKRKLMNLIVSNPIFDGSKLTFTVYSAFEYALKLKNLETVGLEPTSKMDQHLLLRV

SEQ ID NO: 10404 - protein, 512 aa, Unknown
  Description of Unknown: Integrase B10405 sequence
  cd00338,PF13408,IPR011109,IPR038109,PF07508, Coil,PS51736,IPR036162,IPR006119,PTHR30461, G3DSA:3.40.50.1390,PTHR30461:SF3,IPR025827,PS51737,PF00239, SM00857,G3DSA:1.10.10.2600,SSF53041
MKNAVIYARYSSLAQNEQSIEGQLDVCKGYAAQNGYNIIGEYIDRALSGRTDDRPEFQQMISDAAQHMFDYVIVYKLDRFARNRYDSVIYKKRLKDNGVKVLSAMEGITDSPESAILEALLEGMAEYYSIDLAQKVHRGQIESIKKGRYVLGSPPYGYSLTDGKLSVCEPEAEVIRKLFGNYADGISLADCVKDLNDQGYRRRNGQKFVPRSFQKTLHNRIYIGENTQKGITIKDESLRLVDNEVFDRVQERSKLNQGKGGRYVNRYNYLLTGKLYCGECRALMNGVSGTSKTGERYHYYVCANRRKNNACTKANEPAEALEKFVVDQTMSYILNPDRIEELIAEIIKAYQDSRHGSEIVRKQTRLAAIETEMAKLAERLAVVPDSAVQTVTDRMKALGDEKTTLQSELMHLKAERTLTEKDVRKWLKSLGEVDRDDPSFQTKIINIFVSAVYVWDDRAVVLYNVFSDGAAATGMTIDADVVDEEFGVHLEDTTVHHRIRIVNTLLGIGFSR

SEQ ID NO: 10405 - protein, 512 aa, Unknown
  Description of Unknown: Integrase B10406 sequence
  cd00338,IPR011109,IPR038109,PF07508,PS51736, G3DSA:3.40.50.1390,IPR006119,IPR036162,PTHR30461,PS51737, PF00239,SM00857,G3DSA:1.10.10.2600,SSF53041
VTAARNLHEAPATAGAAARKPAVIYTRISKDRQGLELGNDRQEREARDLCAQRGFDVVAVYRDVDTSAYKRNVRRPGFDSTLAAIAAGEAVVVVVYHPDRFVRRNDQLEGVIARLEAALAEGKAGDFELASVTGGGYDLSTPAGRMMARVVGATAQYEMEQKGMRQKSKNVELAADGYWRGGPAPYGYRNGRMALEGGKADASAGTLVVQPDEAVEVAWMVDRILGEGWSLNRIVLDLNARGVKTVRGIAWTRQTLRRLMRTGAIAGRVTTKAGADLGKGNWTAIVPHDQWLRVQAILDDPRRAHRRPGPTREYLLTGLVHAATYDADGTIVGTDRVLMAHAREGGRRTYATVGNAFVKGAQSITVDAAGLEAFVVDVVLGVADERTILDTGGDAASNALIARRLEALDEDEAELTAGYKAGDIRMKQYRDLSADLAAKRHDLERSLTVRASVDRELERFLTTPGALSKAWPRLTFEQRRRILRRIPVRIDVGPVREVRRTFDPARVLITIP

SEQ ID NO: 10406 - protein, 512 aa, Unknown
  Description of Unknown: Integrase B10407 sequence
  cd00338,PF13408,IPR011109,IPR038109, PF07508,Coil,PS51736,G3DSA:3.40.50.1390, IPR006119,IPR036162,PTHR30461,PTHR30461:SF3, PS51737,IPR025827,PF00239,SM00857,G3DSA:1.10.10.2600,SSF53041
MECDLINAVIYARYSSHNQRDESIEGQLRECHEFANKNEMTVIGEYCDHAISGKTDKRPQFQKLIKDSDKGHFEAVIMYTLDRFARNRYDSAIYKAKLKKNGVKVYYAKQPMPDTPEGIILESVLEGYAEYYSENLSRNVKRGMKDNALKGLSVGQPTPLGYVIGHDKRYKIDPIGAKIIREIFQRYADGMSVSQIVNWCNDQGYKTSRGNKFTKNSLTCILQNEKYTGKYKFMDIEIDGGMPQIIDKDLFEKVQSMRKRNYKSRARSKAKEQYLLTTKVFCGYCGAPMIGESGTSKSGMTYHYYKCANRKNKKTDCNKRTEKKDVLEAVVVRYTVNTVLTDENIEKIAKKAIELIKKEASDNSYLNSLKDRLKTVENKIENILTAIEDGLYTPSTKDRLVAFESEKEDLEIQISKESMKKPTLTEDHIIFWLQSFKNGDIHDKKYQQKIIDTLVNSVFVYDDKIVFTFNLSEKNTATLKCSDIEDIAPPNRLNPNTPIIIKHCFVFCKMWF

SEQ ID NO: 10407 - protein, 512 aa, Unknown
  Description of Unknown: Integrase B10408 sequence
  cd00338,IPR011109,IPR038109,PF07508,Coil, IPR036162,IPR006119,PTHR30461,G3DSA:3.40.50.1390,PS51737, PF00239,SM00857,G3DSA:1.10.10.2600,SSF53041
MFSKEILVYLRKSRADDVYETVEEVLAKHETILRDWASVHLEDGKLEETNIYREVVSGETIADRPKMQDILAAIENPSIKGVLVVEPQRLSRGDLEDIGKIVRIFKYTNTRIITPQRAYNLYDEYDKDMIERELKRGNEYLEYTKKILLRGRLVSVQQGNFIGNTAPLGYDKVLIKEGKKTCHTLKPNKDAWIVQKIFELYASGVGYNNITKEMYALTGRPFHMSTIKDMLANKHYIGKVVWNRRAEVRTVENGELKITRPRHSDYLIYDGKHEAIISDELFEAVQERKKLLPAQPTNKVPRNELARLVYCPCGHAMSLKYDGGDARLRCRNTACKNSQHSLNYNALLSQVHASAIDKIEDIEVQFQQIQAQNNRYAKEIQKIESRLSEIDDKEVALWEARANMEMPEHVFVKLKDKYISQREDLLEKKKQYEEKSTTTIDIKQLKSYKKILNSTESSVTDKNQVYHAIIDHITVIPGKNIRATKGIEIPEGAKKMRGWINMPSTIEIEFKL

SEQ ID NO: 10408 - protein, 512 aa, Unknown
  Description of Unknown: Integrase B10409 sequence
  PS00398,cd00338,PF13408,IPR011109, IPR038109,PF07508,PS51736,G3DSA:3.40.50.1390, IPR036162,IPR006119,PTHR30461,PS51737, IPR025827,PF00239,SM00857,G3DSA:1.10.10.2600,IPR006118,SSF53041
MTVARIYARFSTERQDITSIADQLRVCRAHAVAQGWRIAAEYSDEAISGAALGNRPGAQAALRDLQHGEALLVNDLTRLARSQDLGPMIARLRFRGVRVIGAQDGFDSTSRTAGMQAGLSGIMSEEFRRQIADRTHSSAVTRARTGGKIGGKVYEDPAIVREIFERFDRGEGLRAIAGDLNARGVPSPGATWNREQRRSDGRWIVSALHAMLKNERYAGREVWNRSQWFRHPDTGVRHRRMRPPEEWIVRECPALIDRDLFERVQTRMRARGRAGGGPGGGPKYLLSGLLTCALCGSRMIVSGGSQHRYVCGLRHGGGAAACANGIGVPRRLAESLILQPVIEQLLSPEAETEGVKALAEHNAAPVGAQPEEVAVIERLVREGILSRETAAPSLAEARRKALQRAAESPRYVFTATGRAAWRAAVRDLTTILQGEDVAAARAALHDLLGTVICRPAPTGDHLIAELTACSVMLQTGSGRWIGSGGLIAIHLLKPPPDDGPRKVLRWKRRSTV

SEQ ID NO: 10409 - protein, 512 aa, Unknown
  Description of Unknown: Integrase B10410 sequence
  cd00338,IPR011109,IPR038109,PS00397,Coil, PF07508,PS51736,IPR036162,IPR006119,G3DSA:3.40.50.1390, PTHR30461,PS51737,PF00239,SM00857,G3DSA:1.10.10.2600, IPR006118,SSF53041
MESVAIYIRVSTKRQVDKYSPHEQKRVLTEYANSRQWGIFDYYSDLGESGADSDREELDRLLVDAGKKHFSKVLLFEQDRLSRLEQLDWAYLANSLAKMNIKLVTPTSEINLDNEEDRFLADLFNLLANREMKKIKKRTSMGRKAAHKAGTYFASESPFGTFYDRETNTWSVIPEEAKLVKMMFEWYIGGMGFPSIGNKLKSLGYKTRRGSGFAGNVVYRIMMNKVHTGYYEQTIVGETLSHKIIWKEGHGPYITEEQFKCMKRIANERSTGQVEYFHESRYLLSGLLVCGECNKKLRLGTKRYMAKDGEHVYLTYTHKPYDPACNARHKVSLVDNNVIGELMNMVGNANYIKELMENKNIQETVKPSEEDFSEIKVLRGKLLNRKSKILDLYMDEDWTKEELLKKKKEIDTELQALANREEEFNNRLKSSEEKDIDIDYLADSLQIIKVIGTGEIPPREENSILKDIISEIIISKDGIVKIKLMPNNANFSDSKYHAHQDVWVTLPQIAAR

SEQ ID NO: 10410 - protein, 512 aa, Unknown
  Description of Unknown: Integrase B10411 sequence
  cd00338,PF13408,IPR011109,PF07508,Coil, PS51736,IPR036162,IPR006119,PTHR30461,G3DSA:3.40.50.1390, PTHR30461:SF3,PS51737,IPR025827,PF00239,SM00857, SSF53041
MRAYSYVRFSSEKQSLGDSHRRQVALAEAYAAEHKLDLDDRRFEDLGVSAFKGKNAVEGNLGTFLKAIDEGKIRTPAYLLVESLDRLSRSDVDEALVLFLSIINRGVTIVTLADKQTYSKDSIKKDRGISIIISITIMMRANEESATKSARVKAAWARKAEQGDTLTSICPSWLVPKPDGSGFDYHSRERVELVQRMFHMFIHERKGSPTIARELNQEGIKPFGWAKAWSNGVVASILRNTATYGTLTRKKAGGTIKDYYPKVIEYATYEQAIAMAKSRKWTGSNKGPSITNLFAGLMYCAKCGEKLRSVGNSTHAYVRCLNSYAAAGCDTPRYPLTTIEKALMDRFLVGQGRFMSDYIPKESPDPSAPLRAELAENQKRLANLIKLAEAAPDVEGIAQRLSEISRTITKLEKDIAKATPDVPITTEELHDAKWAYDALTKGEVSTEELVELRRKLQLSIRRVVKRVDVLPDSETIRYTIYSRKAGGDVVREIKYEKLPWGFQKGNVRGKRA

SEQ ID NO: 10411 - protein, 511 aa, Unknown
  Description of Unknown: Integrase B10412 sequence
  cd00338,PF13408,IPR011109,IPR038109,PF07508, Coil,PS51736,G3DSA:3.40.50.1390,PTHR30461,IPR006119, IPR036162,PTHR30461:SF3,IPR025827,PS51737,PF00239, SM00857,G3DSA:1.10.10.2600,SSF53041
MNIAAYCRVSTDKTDQLNSLEAQKAFFAEYTQRTGDTLVRLYADEGISGTKIKNRKEFLRMMADAEHGLFEMVVVKDISRFARNTVDLLQSIRKLKSLGVETQFLTANMTSMGNSEFVLTIFGALAQEESANTSKRVKFGKKMNAEKGRVPNIVYGYDKTIGDYFNLTINPEEADVVRQIFQWYTKEGYGSAKISIFLNQRGLKTKRNCPWNQNGVRRILNNELYIGKIINGKEEVTDFLTGKRTERSEEDWLIVNRPELQIVDSETFEQAQQIMASRTELFKLSHERQSNKHLFSTLIRCKECGWSFRRTVRTYKNTYVRWVCSHHNGRGESECSNRITIDEEELVTVLQEYFANLLRFKKDVILYVIKEFQRVYRAKDENVEYEKELNAQIAKLQKSRQKYMNMYADDLITREEVNEKIGGMRKEIERLENELKMVAFHLTKAELLEAVLRQTFKEIEDIADVRQMTNAQLKRIIQKIEIDKDGNVDIYLRLFSDLGLEETVLVNDICT

SEQ ID NO: 10412 - protein, 511 aa, Unknown
  Description of Unknown: Integrase B10413 sequence
  cd00338,IPR011109,Coil,PS51736,IPR036162, IPR006119,G3DSA:3.40.50.1390,PTHR30461,PTHR30461:SF3,PS51737, PF00239,SM00857,SSF53041
MRVANYYRVSTKLQEKKFSLPAQKTELNKYVNQMGWSLIDEFRDVDSGGKLSKDGLNALLDLVENGGIDVVLVVEQDRLSRLDTIAWEYLKSTLRENGVKIAEPGNLIDLENEDDEFISDIKNLIAKRQKKGIVRAMMRGKRQRLREGKGWGQSPFEYRYNRQTAKYEAKEEWKWVIPFIDNLYLNEQLGMKLISDRLNEISKTPTGRKWNEHLVHTRLISKAFHGIQEMDFSTGETIAAPVYEPMRTEETYNKLQIERKKRGEQFSVSGRKNTENIHMLKRTNLTCGKCGRKILIATHGTKKSPLYYAKHGRKLRIKDGSICDININSVRFDKNILKALKNILVSEELAKEYINIDHNEEEISNLKNKIKSMEKDLTDLRSSAERLLDLYLSGGLNKDKYMEKEKELNSKLTIQEEELEKHKRKFEAIESSSFTYENLYQYIELTQNIETELTNLEKAQLMGTLFPTGILYEDKLILITEVFNGIPIEVKIPISDDPFPWHSTKRGNTKK

SEQ ID NO: 10413 - protein, 511 aa, Unknown
  Description of Unknown: Integrase B10414 sequence
  cd00338,IPR011109,IPR038109,PF07508, Coil,PS51736,IPR036162,IPR006119, PTHR30461,G3DSA:3.40.50.1390,PTHR30461:SF3,PS51737, PF00239,SM00857,G3DSA:1.10.10.2600,SSF53041
MPVNVLSDEAYIIYLRKSRADNPHESVEEVLAKHEIQLQEYAERELGGRIPEHCIFREVVSGETIAERPEMNKVLAMIENPKLKGVLVVEPQRLSRGDLEDCGKVVNAFRYSKTEVVTLNMTYDLTNKMQRKFFEQELMRGGDFLEYTKEILLRGRIAAVKRGCYIGNIPPFGFNKIVDADGDSTLEANDMAPAVLMAFEMYVNEGKTYLQIARHFDSLGIKPYRSKVWEKSSIRAMLKNRHYIGLVVFGAYRTEKTVENGQVVAHSVRQAEDEVIVAKGKHKGIVPLELFEAAQEKMDNNPRAKWDMPLQNPLAGLLWCQKCGRAMAQHPYKHAETRVECRNRSGCNANSAKLREVVEAVAYALEMEQLPELEVKLTNDEGKAASIQKKQLEKMNKEMDELHAKEERQHDLLESGTYSEETFLKRNKALHAQMEELRSKIYEAKQNLPKEIDYQDKIIKLQDAVEGLRDDSLSAEQKNRLMKAIVRRIDYEFIERKRRQTRFRLHIDLLL

SEQ ID NO: 10414 - protein, 511 aa, Unknown
  Description of Unknown: Integrase B10415 sequence
  cd00338,IPR011109,IPR038109,PF07508,Coil, PS51736,G3DSA:3.40.50.1390,IPR036162,IPR006119,PTHR30461, PS51737,PF00239,SM00857,G3DSA:1.10.10.2600,SSF53041
MIRRKIIMYLRKSRTDNQSESVEEVLSRHEKMLQDYCIRVFGKQIPEDCIYREVVSGETINERPMMLKLLKDIELGLVDDVIVVEPQRLSRGSFGDIDRIVNTFKYTNTKVITPTKVYDLNNKFDRKYFEQELLRGNDYLEYVKEILVRGRIRSVEDGLYIGSVAPYGYDKIKLPKKGYTLTPNKDTENVKYIFEKFLEGMGTTNLAKHLIELGIKSHTGKQWTPAMTRNILMSEIYIGYVSYGRREGKKTMQDGEILKSRPVNNDYLRVKGLHTPIISEDIFNKAQELLKSKASKNVRSDKTIKNPLAGLVKCKYCGSNMVRRPYDKRPVPTLICKTIGCKCVSSDLTLVEDRVIELLKKELNSYKQFLDNYEEEIKTSTNAIDKKINKIDKELELLNKDLQNALVNYNRNKITEDEYTFLRNYTREEENRLNALKSTLNSQLENAELNHKIKAIPVIENCLNEYHSLSMADRNKLLSYIIDKITYEKDKGGRWNEDARSNFIIELFMKI

SEQ ID NO: 10415 - protein, 511 aa, Unknown
  Description of Unknown: Integrase B10416 sequence
  PF13408,IPR011109,IPR038109,PF07508, Coil,PS51736,IPR036162,PTHR30461, IPR006119,G3DSA:3.40.50.1390,PTHR30461:SF3,PS51737, IPR025827,PF00239,SM00857,cd03768,G3DSA:1.10.10.2600,SSF53041
MKYMLYARVSPKGSDWHAEETSISMQIQEMKDYILRKDPAAKFLIQQDEFKSGKNLNRPGIQAVLSDLELPEPPWSTLVVWALDRLSRSLADAVPIFEKLRDAGCGFICVRQDYLSTQGAMARFTLNQTILIAQLEREMTSERVKAKMVWIAEKGKIPAGKIPLGYRRKKNAKNEIEPDPETAPIVQDIFKSYLAQTETVVELRRRYSEYIYGKMQLYRMLRNRLYIGEVEYDGKVYPGRHVPIIDRDLFDAVNAMLPGERRAPRPGRQIYKYLLQGLVFCECGKKMVPYSVKKSGNTRYFYYKCQDTDSCKYAINAERLDAEVMEAVKEIALDENYIRERYEDWQRDRAEQEQRNRAEIEKSATLVTEAQREVDKIDNLFLSGVVTSANASHWNAKLQAARDNLNLLQEKHRHLVDDLAGVKANADLPDLLQELRRWADLLDRAGDDFNIKRNLILGIVKNVRCIDREGHIEIAVMTKGKKWRPEWGLVITFRRVIDKHVRKFRNGSLKG

SEQ ID NO: 10416 - protein, 511 aa, Unknown
  Description of Unknown: Integrase B10417 sequence
  IPR011109,IPR038109,PF07508,Coil,PS51736, G3DSA:3.40.50.1390,PTHR30461,IPR036162,IPR006119,PTHR30461:SF3, PS51737,PF00239,SM00857,cd03768,G3DSA:1.10.10.2600, SSF53041
MYQKKKGRVLKMIAIYCRQSIDKKDSISIEQQEKYCKRRILDNVTFRVYKDKGYSGGNIKRPGFTNLLKDIKNGKISKVVVYKVDRISRSLKDFIEIYNDFEKYNVEFESCSEQFDTSTAMGKATLQIIMVFAELERNMIKKRVSDNFYERGKKGLFLAGVAPFGYKKVPTVLENINTHILEADKYQSSIVKFIYQKYAETKSLGDVVKKLNENGYKTNRNKNFQNVAVRRILRNPVYVRANADVYIYLESKGAKINQPIDEFVGLYGCTVYSKRQGKTRAKFSTYDGEFVQMNTHEGIIDASLWLEVQRELDKNKPISNSGRGTHTWLTGLTKCGYCDMSVTVVNGQRNGKRYVNCGGRKNKTCYERKNPITFDDIEISVKNDLIDHIKYFEFTKLERNIQYQKEKNELKIQLKKIQDEIENLINKIPMANEKVMNYINEKIDELDSQRISIQNKISSFKSSDFENISDDVIKSTITNWDNLTLEDKKLIARAFIEKVIVYDNKIDIIYK

SEQ ID NO: 10417 - protein, 511 aa, Unknown
  Description of Unknown: Integrase B10418 sequence
  IPR038109,PS00397,IPR006119,PS51737,PF00239, cd03768,G3DSA:3.40.50.1390,PTHR30461,IPR025827,SM00857, G3DSA:1.10.10.2600,SSF53041,IPR011109,PF07508,PS51736, IPR006118,PF13408,IPR036162,PTHR30461:SF3
MNDVLIGYARVSSEEQAQHGVSISAQRDILNGYAAMNETTIEIYEDPGFSGKDTNRPAMRRLLDRCRAGGVSAVVVWKLDRLSRSLRDTLAIIEDILQPNHISMVSVTEKIDTSTPSGRMMLNLLASFAQLEREQDSDRVVMAHKHLAHDCRYLGGHIPLGYRVDADKHYQLDPILAPVARRVFDLYLARAGYKVIMDYLNGPEIFPLTGRKRPFRKPDLSFMMQNPVYSGTYVRKLGADPRHRITAPEVISIPGGVPALLSPEEWERVLQIRTENGKAMAMYKAKSNYPLTGLVYCSVCGGRMFLNHGGKTRARESERYYTCKNKCVKPARVEAAEKATFDALIWFSEHLEELRQSCEIANGFSDQAEQDKAPRREEIEKQIADNRKKAAQITAFIAKNGASAPASLMDELTAIDEQSAALAAQLDSLARPVARYDAEKTISAVAAAVDAIKKGPPEQLKTTVQAAVYRVIVSPDSFDVRLAWHTFGGDEPPRNVCHILPRANYTRFVNR

SEQ ID NO: 10418 - protein, 511 aa, Unknown; identical to SEQ ID NO: 10306
  Description of Unknown: Integrase B10419 sequence
  PF13408,IPR011109,IPR038109,PF07508,Coil, PS51736,G3DSA:3.40.50.1390,IPR006119,PTHR30461,IPR036162, PTHR30461:SF3,IPR025827,PS51737,PF00239,SM00857, cd03768,G3DSA:1.10.10.2600,SSF53041

SEQ ID NO: 10419 - protein, 511 aa, Unknown
  Description of Unknown: Integrase B10420 sequence
  cd00338,PF13408,IPR011109,IPR038109,PF07508, PS51736,IPR036162,IPR006119,PTHR30461,G3DSA:3.40.50.1390, PTHR30461:SF3,PS51737,IPR025827,PF00239,SM00857, G3DSA:1.10.10.2600,SSF53041
MRVAAYARYSSDQQRDASLDDQLRNCRTYCVRMDWPAPVTYTDAAMSGARNDRPGYLRLLADASRFDVILVDDLTRLSRDSVEAQQAVRRLRFAGVRVIGVSDGLDTGRKGHKAEVGLRGLMGELYLDDLRDKTHRGLSGRALSGASAGGLPYGYRVTETGLRAIREDQATVVRRIFADYLAGQSARAIAAELNREGVPSPRGATWAVSAIYGDAKRGIGILANPIYAGRQVWNRSQWVKHPDTGRRLRRERPPAEWITTDHPELAIIEPRTWQAVQDAIKRRGHVGGNRGRAPRALLSGLLRCGECGGPVTMIDGHSYGCATAKDRGTCGNRMRVKRTEADAEMVAGVRDAMLTEDAMQLWRAAIARATKAQAGDAGAARRRLAQAAQERDNIMAAIRQGIITPTTRAALEAAERAVSGAEAALQQPAQILPDARARLRRIADTLADRARQVPAAREALRALIGEAVLRNENGNPVAEIAGSHLAMVAGAGFGHWMTEPLVIPLTARRES

SEQ ID NO: 10420 - protein, 511 aa, Unknown
  Description of Unknown: Integrase B10421 sequence
  cd00338,PF13408,IPR038109,Coil,G3DSA:3.40.50.1390, IPR006119,IPR036162,PTHR30461,PTHR30461:SF3,IPR025827, PF00239,SM00857,G3DSA:1.10.10.2600,SSF53041
MQVSNNHPFSLNSPVVAYLRDSGHEDQELSVAQQEAAIRAWCEQNGLILTRVFIDEAAPGSSTVGRETFQALIGHFHNPACREAGVILWKYNRFARDIDDAQFYKADLRRRGYIIHSLNDSVPAGLDGRFFESAIDWMNARYLEDLSTDTKRGLHHIMDQHGALGGVPPRGFMREPVEIGLRRDGRPHIVHRWVPYPDLIDQVRLAFELRAMGASYAEITRQTKLYKNKNSWPTFFCNKIYIGVMEFGDRLIEDYCDPIVPKAVWDAVQARQKVLSRRNTMSVKSHPRRVASRFLLSGLAQCGLCGSPLNGDTATAKGIYRYDYYTCSRANRRGDCPATKIPRQALENSVLDSLSDYILEPNHIQELTTELENNASHAVEQVEQRKQDLNKKLSSVRRKIDNLVDVIADQGRSAGALHTKLTELEAEEGQLLAERVQLTPRAKKLRPTEEIQDLVNEIRGLRAENNTTRLRDILRGLIDRVEIKRDEDRISGTIWYFTPVLALGECPRRES

SEQ ID NO: 10421 - protein, 511 aa, Unknown
  Description of Unknown: Integrase B10422 sequence
  cd00338,Coil,PS51736,G3DSA:3.40.50.1390,PTHR30461,IPR006119, IPR036162,PTHR30461:SF3,PF00239,SM00857,SSF53041
MQAALYLRSSKDRSDVSIDAQRRELIDLAKSKNLVIIEEFADAVESGKDDQRPGFQAMLSQLKSRDRKWTFLLALDTSRIARNQYLAHALHYECDKRNIKILYAKMPETGSVVDVVIRAVMQSFDQLHSLMSKEKGMAGMAENVKQGFRAGGRAPLGYKLQSHETGAMRDGTAVTKSKLVPGDYFNEVKEFLKLRTLLVSRSKAAQDAGLLSVAHTTLLGIEWNALTYAGHTVWNVQNERLPSGGYKGNTKRKPRTEWVIQHDTHPALITTDEAEGILKVLEQSTRGDARKTKSEYLLSGIMVNEMGLPYHGSEGIYYRAGKGRRLKREDLEPLILQRIMSDLQSDEFIADCVKSARQSAQPIPDDEVKALKSEVNKISGQIGKLMDIAAEADSPRPWLEKIEKLELQRSDVVARLDKADANYRSAQLLLTISERDMKQMIGGLSSNVDFADVQRAKEFLTSVIDNIVLTETPRLICTINYSISSGDSVASPRLRDTIPAIKLARLLKLAA

SEQ ID NO: 10422 - protein, 510 aa, Unknown
  Description of Unknown: Integrase B10423 sequence
  cd00338,IPR011109,IPR038109,PF07508,Coil, PS51736,IPR036162,IPR006119,PTHR30461,G3DSA:3.40.50.1390, PTHR30461:SF3,PS51737,PF00239,SM00857,G3DSA:1.10.10.2600, SSF53041
MAEKAVIYARFSSDKQREESIEDQVRVCSQFAASKGFEIVKTYTDEARSGTNAAGRPGFQKMILDAQAQRWTKVIVYKTDRFARSRYDSAVYKAKLRKCGVEIVTAAESVPDGPDGIILESVLEGMAEYYSANLAQNVKRGMEGNALKCKHNGVSIFGYDRGADGYYAINEHEAEGVRMAFDMCAAGETKAEIMRRLNGLGYKTVTGRHFSNEAVSRLLNCERYIGTYTWGDFRKENGMPSIIDRELWDSAHAHMASRGRKRRGKMNAEYLLSGKIYDADGNQFESDCGYGENGRQYHYYRCRKTKVSMRRDEVEDKVIGACARLLNENPDLDERIVDMVLARQDKDAEQEISAREALSRRITDVEREIDNAIDLACKLGSTDRMAVKINGLQDELTALKAELDEIKRGAPLIDRDMILFALYKMRQSDGPRGMVAAFVDRVTVNEDGSLLVQFILCRPSSENKKPEPSNGEFGKISCGSPGVNYPELFQVYHSVGILPLKGGFGVLLAA

SEQ ID NO: 10423 - protein, 510 aa, Unknown
  Description of Unknown: Integrase B10424 sequence
  cd00338,IPR011109,IPR038109,PF07508,Coil, PS51736,G3DSA:3.40.50.1390,IPR006119,IPR036162,PTHR30461, PS51737,PF00239,SM00857,G3DSA:1.10.10.2600,SSF53041
MDTDIFAIYLRKSRKDLENQDYDVLKRHRKILLDFAKSKRITIHEEDIYEEVVSGETIQDRPIIQNLLKKIEAGYYKAVLVMEIERLARGNTIDQGIIAQAFQLTNTLIITPNKTYDTNNEYDNEFLEFGLFMSRREYKAISRRIQTGRIQSCKEGNYVGSITPYGYDKEKLKGEKGYKLIPNNEAANVKLIFELFLDGLGTSSLSYKLNELKIKSKTGKQWTPAMVRNILINKVYIGILTWGKRANVKKLDNSVISKSRPINNNCIESKGKHEPIIDELTFYRTQELLKANSSKKVHKDKSLQNPLAGIIVCKKCGTNMIRRPIKNIPDTLLCKNHYCDNVSSYIYLVEKRLLDSLRNILNKYYHYLENYEEEHIKQKKDYNSQIKRLEQEIEKLKKQHIKTCELLETGVYSLELFKDRSSSIKEQIDGINKQKEELIKLNENNKIDKIIQAIPKIENCLKIYDTLTTEEKNKLLKTIINKAYYLKNKAGNRWDKDTQDKFTLELELFL

SEQ ID NO: 10424 - protein, 510 aa, Unknown
  Description of Unknown: Integrase B10425 sequence
  cd00338,PF13408,IPR011109,IPR038109, PF07508,Coil,PS51736,IPR036162, IPR006119,PTHR30461,G3DSA:3.40.50.1390,PTHR30461:SF3, IPR025827,PS51737,PF00239,SM00857,G3DSA:1.10.10.2600,SSF53041
MTADLIPAVIYARYSSSGQREESIEGQIRECTEYAERNGMRVIRSYSDKALTGRTDRRPDFQQMIADSEKHLFQIVICWKTDRFARNRYDAAVYKAKLRKNGVRIVYAREAVPEGPEGIILESVMEGFAEYYSANLAENVKRGNYDSALQHRTLGKKVLGYRTAKDGTFEIDPLTGPIVTEIFQSYKSGKTMKEITEDLNRRGIHTVTGGQFNKSSLHRILSNEKYIGIYEWQDIRDEDAIPKLTDPETFAICQKLMATAKKKRRSRDLDRPDFLLTGKCFCGHCGESMTGDSGKSKTGSVYWYYTCNGKRHHTCQKKREPKQDLEDFVVHQLVQILHSDDGYLEEMSQRVADQLAAGSEQSELAELKRRQTQIRQKISNLVGILEDAPSKAMASRLAALEQEDEDLSIQIEEAALAAPPSLSADQILFMLTRLSDGLESDPEYRRRLVDTFLNSVYVYDDGKIVIHLNFTEGNSTASFEYTRQFVQSLAESAYQASIRNGIMSFAVARF

SEQ ID NO: 10425 - protein, 510 aa, Unknown
  Description of Unknown: Integrase B10426 sequence
  cd00338,IPR011109,IPR038109,PF07508,Coil, PS51736,IPR036162,IPR006119,G3DSA:3.40.50.1390,PTHR30461, PS51737,PF00239,SM00857,G3DSA:1.10.10.2600,SSF53041
DTEDRQVRSLADQLSELRELAKKEQLNVVDVFIEKQTAKTPGRPVFAEMIERIEKGEANGILAWHPDRLARNSVDGGRIIYMVDTGTITDLKFPTFWFDATPQGKFMLSVSFSQSKYYVDNLSENIKRGHRQKLKNGIWPQKAPLGYLNDKVTKNITIDTEKAPLVVKTFEAYATGNFTFAQVRQKINDLGLKGTGDGVLAVSNFQYLLKNPFYHGLIRYGGEFYEGKHPPIISKKLFDDVQEVMTRKSKPHSKGLKPYVYRGLFHCGECGCFITTEQQKGHNYLRCTKRKGVCSQKYVREEIITAKMQEELRKYSLADEVADWLIAEVEKDSVTDSASSGIQIGKVNNEIAIIDVKLDKLMTAYLENALTLTEYQETKNKLVTEKHALKDKLSAFERSATIRFEPVVNFLNDCKQATIVAESNDPTKIRAQIEKVGSNPLVRDRTLVFSARSPWIFLSKIPKNANKDAGGAEGGFQGGIPPRPPHSAILSPFSADSEFCAKLRWRFPEV

SEQ ID NO: 10426 - protein, 510 aa, Unknown
  Description of Unknown: Integrase B10427 sequence
  cd00338,IPR011109,IPR038109,PF07508, Coil,PS51736,G3DSA:3.40.50.1390,IPR036162, PTHR30461,IPR006119,PTHR30461:SF3,PS51737, PF00239,SM00857,G3DSA:1.10.10.2600,SSF53041
MERTAIYLRKSRTDIEAEARGEGETLAKHKKALLKFAKEKGLNIVRIREEIVSGESLLHRPEMQELLKEVERGEYTAVLCMDIDRLGRGNMQEQGLILNAFRETDTKIITPTKTYDLKDESDELMTEIQTLFARQELKIITRRMQRGRTQSVEAGNYIGTRPPYGYEIRKEGKSRWLVPHPEQSKIVQMIYEWYTHDDPNERMGASKIANQLNEMGFKSYTGIPWSDSSVLAILKNKVYIGRLQWKKKEYKKTATGRVVKSRVKAEVLDVKGKHEPLISQETWEKAQEILKGKYHVPYQLENGITNPLAGLVRCAKCKYSMIYRPYTTQPAHLMCYNKDCDCRSSKFEYVEKAVISGLKEWLRTYKLELSKHKREDKSDREVELKQMAVAALEKEMSELEVQRGRLHDFLERGIYSEEIYLERSQNLAARMEDNRRAMERARTELQDAMNREKQQNNIIPMVQNVIRLYERSKDPAKKNALLKSILVKVEYRKEKHQRNDDFNIELFPKL

SEQ ID NO: 10427 - protein, 509 aa, Unknown
  Description of Unknown: Integrase B10428 sequence
  cd00338,PF13408,IPR011109,IPR038109,PF07508, Coil,PS51736,IPR036162,IPR006119,PTHR30461, G3DSA:3.40.50.1390,PTHR30461:SF3,IPR025827,PS51737,PF00239, SM00857,G3DSA:1.10.10.2600,SSF53041
MPKVTVIPPSINRTTRQSTTTPTRRKVAAYARVSTDFEEQLTSYEAQISYYTNYIQRNPDWEFVKIYTDEGISATSTKHREGFNSMIADALDGKIDLIITKSVSRFARNTVDSLTTIRKLKEHHVECFFEKENIWTFDSKGELLITIMSSLAQEESRSISENVTWGQRKRFADGKVSLPYAHFLGYRKGENGLPEIVPEEAETVRYIYQRFIDGLTPYKIANELTAQGVPTPCGKEKWSASTVKSILTNEKYKGDALLQKKFTVDFLTKKQQINEGQVPQYYVENSHPAIITPEEFDFVQSEFQKRCMKPYSSTSIYATKIICGDCGSYFGAKVWHSNSKYRRVIYQCNSKFKGSHFCTTPHLYEPEIQEKFLQAFAQYFSQKDVVIKNCQFALNCLKKQESKKKELQDELVAVNEKLKEYIQHGGEDFDALNAKYEELSAQLDAEEAAESDRKRRIAKMQKILQTLKKTDSVLETFDESVWNAVLENLTVFHDGSLVFLFRDGTEIKV

SEQ ID NO: 10428 - protein, 509 aa, Unknown
  Description of Unknown: Integrase B10429 sequence
  cd00338,IPR011109,PF07508,G3DSA:3.40.50.1390,PTHR30461, IPR006119,IPR036162,PS51737,PF00239,SM00857, SSF53041
VKRLPRSVDALRGLRAARWVRESTERQTERYGPDAQRAIGDEAIARYGLTDSGRVWQVAHSGRTIATTAQFAEMLAGAGTEWDVLVVSYASRFARDLRTAINARHDLHLAGAVILFCDEALVSSDEDRWEQYVELTKEAESYSRRLAKRVTEGYAAKFRTLGDQGGAAPIGFHRVGSDRRLAIDPDAIGLPVAVFQRYATGVVSYADVGAELGMEAGAVREILRNPVYNGWVRRYRRSIMEERKPAPWRDEPPVSDALWDRVQELRLRRTRSSGQHAADRPRPLLSGLLHCSCGFRIRSNGTQGSPPHPVVIHHGRCDAWGERLTWPTAPYEAAIAAQVTGMRIPDSDVAALVRMLAHPSPALPSVRHGVERRLRDLAIAHAESRIGDADYLARREAIRSEPVVETPAEGIDAAEVVRWIRELPDAWAEASHDWRRALLAAVYERIVIEGERFVDVIPTSHAVARGLPALLPSVIELVSREGNKTSRYISIPVRGGEAARLRLRAARTA

SEQ ID NO: 10429 - protein, 508 aa, Unknown
  Description of Unknown: Integrase B10430 sequence
  cd00338,IPR011109,PF07508,IPR036162,PTHR30461, IPR006119,PS51737,PF00239,SM00857,SSF53041
MQDMPTCVIYLRLSDSRTEEALDGREEKLRAEAKRLGWIVSRVQPENDAPRRVGGKMAPASAFKRRAVRTASGEIVRDPDTGKPVMRVIRPGWQSVIADLKTGRASAVLAEDLDRACRDPRDLEDLLDACAQTGASARSLTGSLMLTNGGNDSEIFMARVMVAQAHKSSSDTSRRVRDAKARYFGQTYQGGLRPFGYAHVADTEKYHRTLMVVPDEKDMILAAVADILDRDISLAAITRDWRARGALTVTGKPWTSQKLRQALIKPAVAGLAVFGASLKPAPWPHILERDTWEKLKAKLDDPVRRNTTGNEPKHLLSMIARCGICDDGTVLYSMGVGHRGGRGYACRNAGWHLRRNGRHLDECVEAVVVEWLELYGKTALKPPPRQAGINAPALRAEAGRLRTAKREQMRMHSAGTIDNDDLAEGLREIRDRLAVIDAQLAVSDQPDPLAEFRDAPALAVWRSLTLPRKRAIVRFLVEVTVYPTARRGPGFDRASVDVTARYPGGESC

SEQ ID NO: 10430 - protein, 508 aa, Unknown
  Description of Unknown: Integrase B10431 sequence
  cd00338,IPR011109,IPR038109,PF07508,Coil, PS51736,IPR036162,PTHR30461,IPR006119,G3DSA:3.40.50.1390, PTHR30461:SF3,PS51737,PF00239,SM00857,G3DSA:1.10.10.2600, SSF53041
MTEYNIMYLRKSREDEKDPTFTLDKHRRTLLEYAQKEGLGISKIYEEVVSGDTIAARPRMQELLKDIENGTVTGIICMDLDRLGRGDMKDQGTMFEIIKLNRVIIYTPDRTIDLNKPCDQDYAEFKAFFARMEYNTIKRRLRNGTNRSAKDGWHVGCIPFGYERIYMYHGKPSHNKNGKPTLKEDELTAPYVRMMFDMYVNQLKGTPTIAETLNAMGIKTSRGNDFRRNSVTKILKNPIYIGKIYFNREECIRKSKTGSKSLTRLKPESEWIIADGNHPAIIDEETFYKAQEMLKGRTHPPFNTGELKNPLAGLVICSKCGAPLQRRPYYQRGMEPHMLCVTKGCQMAVLQTRLEESIQNNMREYISTADEKFQAIIGTPKANTASSQISSLEKELSKLNSQKAKLYDLLEQEVYTIDLFTKRHQEISEKITLLTEQISQIKTTHISTEQQITILENRLSNMKTLLAEYDTLTAQQKNNSLKQIYSKIYYTRQKGPHSSPFTLECEYL

SEQ ID NO: 10431 - protein, 508 aa, Unknown
  Description of Unknown: Integrase B10432 sequence
  cd00338,PS00397,PS51736,G3DSA:3.40.50.1390,IPR006119, IPR036162,PTHR30461,PF00239,SM00857,cd03768, IPR006118,SSF53041
YWGGAVMAAYIYARVSTVEQVVGGCSIEGQVRSCRLYCEANGLVLGAATNCDKAGVILDGGRSAFSKPFATRPGAMLLAGALQQGDTVVVTSLTRLFRRVAEAATIMERWVQIGVSVTFVDYPSLSFDSANGRCLVYCMAAVAQLKSELIAARVREGRARKKGLPAEPNRPAKPAKVLLPAAQQPIAEVIRRMAEKRPSSRSGRVCVYARVSTDEQSVDTQLAILRQAYPGAVEYVDHGVSAWKTSLPDRPEGGRMLRELQPGDTIVVLRPDRVFRSLKDAATQIDAIQKVGAFLHIHEGGIKSDELFGRLLLGMLSAFAQLESEETSRATKHAMAIACGTNDAALQARLPKPLLRDVPPKTKHYVFDDVFDSGERQQMWLTVHLTKANYCSLGVCILDATNRSLYEKGLPPLTSQSMDMRDYRQALREVGTKKAKALIPKIENYARVASPVGSSQNFPKAEKRYEHFMRVFGELPREQRDLRLLTMMQSPKAVAAFADATKRAVETV

SEQ ID NO: 10432 - protein, 508 aa, Unknown
  Description of Unknown: Integrase B10433 sequence
  cd00338,PF13408,IPR011109,IPR038109, PF07508,PS51736,G3DSA:3.40.50.1390,IPR006119, IPR036162,PTHR30461,PTHR30461:SF3,PS51737, IPR025827,PF00239,SM00857,G3DSA:1.10.10.2600,SSF53041
VKGYPRKHLLLLAFRVIYRLPKRKEVWLVEIQIREGSREQKRKLKVCAYCRVSTDADEQENSLENQVRHYEMVIKANPDYEYAGVYSDFAISGFKEKRPGLQKMLADAEKGKIDLILTKSVSRFARNTSIVLEATRKLKELNVGVFFELQNINTLSGEGELMLTILAAFAQAESESGSAGAKMVYQRKYEAGIPVQYLERSFGYTKDERGVFVADEAEAVWVRKIYKMAAEGYTPASIKRYLNENGIKTVGGVQWVDSTVFRLLENEIYKGDYIMHKHFVNEERKLVRNRGEVDAWYIEDDHEAIVSPELWQKAQDALAAKRDYLAEGSVIEEFTEENYPYMNKIYCAKCGYPLYKRIYSKGNRLNWGCSGTKRYGKSFCDGINIPDGVLRSAWHFEENTYIDEKASDKGVKEFTYLKERSWKRRHKKKQPSAIPENTETEYPYREKIFCALCGSRLVRYVNPQNYKVTWVCNRRKRKGKEACDGTRVPDTVIKGWGEIKKDIYIQRK

SEQ ID NO: 10433 - protein, 475 aa, Unknown
  Description of Unknown: Integrase B10434 sequence
  IPR038109,PS00397,IPR006119,PS51737,PF00239,G3DSA:3.40.50.1390 ,PTHR30461,IPR025827,SM00857,G3DSA:1.10.10.2600, SSF53041,IPR011109,PF07508,PS51736,IPR006118, cd00338,PF13408,Coil,IPR036162,PTHR30461:SF3
MKIAAAYIRVSTDDQIEYSPESQIKAIRDFAKRNDYILPDEYIFMDEGISGKTIKKRTEFQRMIGIAKTTPKPFDAILLWKFSRFARNREDSIVYKSMLRKQLGIDVISISENLGDDKMSILFEAMIEAMDEYYSINLAEEVKRGMTEKANRGEPLSVPPFGYLMKDKQLFPHPDESAMIKMIFTDFANGMGKMAIARKVNDMGARTHRGNKFENRTVDYILNNPVYVGKIRWNPSGHTDRDFQNESLIIKKGSHEPIISQELWDKVQELNKQLKVKHKKYQRETSEPSHIFQGIIKCSRCGSTMIYSTGGIQCHLYSKGRCDTSHYISIKKIESIVLNKIQEDFATGTFNIVPRTPENINQNNFILKRIEREEQKLLRVKQAFEKGIDTIEEYAENKKRIQEEISSLRLQLTSDAYTADTHSLQKNFLQKYSDLILKLRDDNVSISDKNRILKMFVDEIVYNKKSATVDITYFL

SEQ ID NO: 10434 - protein, 401 aa, Unknown
  Description of Unknown: Integrase B10435 sequence
  cd00338,PF13408,IPR011109,IPR038109,PF07508, PS51736,G3DSA:3.40.50.1390,IPR036162,IPR006119,PTHR30461, PTHR30461:SF3,PS51737,IPR025827,PF00239,SM00857, G3DSA:1.10.10.2600,SSF53041
MIDIYADEGISGTNTKKREGFNRMIEDCKSGKIDLVITKSISRFARNTQDCLYYSRMLKNQGIGIIFEKEGISTMDASGELLFTILSSLAQEESRNISENCTWGIRHNFQRGIVHFNTTGFMGYDSDEEGNIIINQEQAMIVRRVFREFEEGWTPNEIAKHLNEEKINGVKGKPAWNGATIRGMLTNEKYKGDARLQKTFTADYLTKKRLKNEGQVEQYYVEDSHKGIIPKTEWEAVQMELDRRTNYCKEVGLSSFGMASVDSPFVSRLVCAHCGAAYGRKCWRSRHQFYWTCRNREAKNGHICHADNVNEEVLQKVFIIAWNGIVKSRDKMLPTWEAMKEAVNPLQMMRAQQMIELTEEGLLTCLVPELTRMVLERIIIHSKTHFTVKFLDSTSKEVCIL

SEQ ID NO: 10435 - protein, 508 aa, Unknown
  Description of Unknown: Integrase B10436 sequence
  cd00338,PF13408,IPR011109,IPR038109,PF07508, Coil,PS51736,IPR036162,IPR006119,PTHR30461, G3DSA:3.40.50.1390,PTHR30461:SF3,PS51737,IPR025827,PF00239, SM00857,G3DSA:1.10.10.2600,SSF53041
LNGVIYARYSEGPRQTDQSIEGQVADCTAYAERNGIDIVGLYADRGISGKSAENRAEFQKMIRDAAAGKFQVVIVWKVDRFGRNRQDIAFNKYKLKKAGVKLMYAEESVPDGPEGIILESVLEGMAEYYSADLRQKVIRGRRETLKKGLYCGAPLPLGYRVDEERHIQIDEEVAPAIREVFRMYASGTGVNDLVDYLNKLGITGRRGGRISPAVIYRMLRNERYLGIFDTDGVELRAEPLIDEATFRACEDYFRPLHQNAAGRANVDYKLSCKCFCAYCGAMLVGESGTGKKGKVYHYYKCGKKKRGSKCKLKPIRKDVLEEAVLKATMEDMLTDETIAVLVDEILRIQDQEAEADPASALRKQLDSNRKRQRNLLDAIEEGTGAKGLAARLADLEAEEHDLVIEIEKAELQQPRISREDITAWLCSFRGGDIDDPEFAARLIDTFVAKVEVKNGMAAIYYNIRKGGHKKTTDRSRVRIRSVEWGSRSLIRTRKPFVHDGYIVLLIAV

SEQ ID NO: 10436 - protein, 508 aa, Unknown
  Description of Unknown: Integrase B10437 sequence
  cd00338,PF13408,IPR011109,IPR038109,PF07508, Coil,PS51736,IPR036162,PTHR30461,G3DSA:3.40.50.1390, IPR006119,PTHR30461:SF3,PS51737,IPR025827,PF00239, SM00857,G3DSA:1.10.10.2600,SSF53041
MKRAVFYGRYSSDRQTEQSIEGQRRVCEEFAKAEQIQIVGEYIDRATSGTSTEHREQFQKMLKDSKNCGWDYVLVYKLDRFARSRYDSAISKQQLKKNGVKVLSATERITDSPEGILIEGLLESMDEYFSRELSRKCKRGIRESIIKGHNFGGRVLYGYDRKDKRFVINEEQAVNVRRIFKSYLSGCTIQSIADQLNADGYRTNYGNEFKRYTVSDILHNDKYTGIHYIDGIEEPETCPAIISQTTFERVKEKLNQSAHRSREHTTGHTYALSGLLQCGVCGRYVCGSSVERKYFYYACRSREHAENSVHIHADKLEQVVIDALQTFFTEEQVSTLAERLYQIYTTDMDGKPDRSKRLNEIEKQIQGTVNALIACPSSKALQEKLTQLEEQKAEIEKMPILQPQLKKEHFENYFRWLALRLEHIEDRQTFFHTVIHKVLVYPEKAVIILNMTDEMADPPKREQVEAFMSNVGEVSLYPCPNCTKVNPKSSKFCDICTAPQRSKAISLM

SEQ ID NO: 10437 - protein, 508 aa, Unknown
  Description of Unknown: Integrase B10438 sequence
  cd00338,PF13408,IPR011109,IPR038109,PF07508, Coil,PS51736,IPR036162,IPR006119,G3DSA:3.40.50.1390, PTHR30461,PTHR30461:SF3,IPR025827,PS51737,PF00239, SM00857,G3DSA:1.10.10.2600,SSF53041
MVKVDKKINRGVIYARYSEGPRQTDQSIEGQVADCKAYASQHDIDIIGIYADRHISGTSTEGRDEFLRMMHDADRHAFDAIVTWKIDRFGRSREDIAVNKIRLRKAGVALHYAKESVPDGPEGILLESLLEGLAEYYSADLRQKVTRGIRESAKKGKVSAGQIPIGYKRSPEDGRLVIDPEKAEAVREAFRMHISGASMKDLQSALYKRGIRSRDGKLPSQSVVYRMLRNDHYLGRFEIQGVEILVDPVIDLETFEEAAAHFKGNHQNAAGRATVNYLLSKKCYCALCGKLLHGTHGIGKMGKRYYYYRCSSQSKCELKPIPQQELEDLVIRHTCEDILTDEMIGKLTEKIMEIQEKEQQGDPATALRTELKGLKKKQKNIIQAIEDGAGSSLVARLNEIDTRMDELAVEIERARLQHPVIPEEIVRGWLLSFRSGDKDDPVFRKRLVETFVSDIMVGPEEIVITYNTTQKGPTRTKCSSKPLKVDLSRSYSNPEIIEGRIVLRVFRQ

SEQ ID NO: 10438 - protein, 508 aa, Unknown
  Description of Unknown: Integrase B10439 sequence
  cd00338,PF13408,IPR011109,IPR038109,PF07508, Coil,PS51736,G3DSA:3.40.50.1390,PTHR30461,IPR006119, IPR036162,PTHR30461:SF3,PS51737,IPR025827,PF00239, SM00857,G3DSA:1.10.10.2600,SSF53041
MENNRAAIYARYSAGSGQTDQSIEGQVRECTHFIEGRGLDLVATYADRHITGRTDRRPEFQRMIADAESGAFDVVVVYTTDRFSRDKYDSAIYKRKLKNCGVRILYAAENIPEGPEGILLEALMEGWAQYYSEELSRKILRGMHDSATKRGATGSTPPIGYRVGPDKKYEIDPDVAPHVVRAFEMYMEGSRFCDISRYFAEHDILTGRGNPHSGQAIRRLLTSRRYIGEYHWSDVTIPGGMPAIVSEELFNMVQRKIRIDHPPKSKSAEYLLSGKLYCGLCGSRYKGTSGTSRHGTKYYYYKCPNKECSAGTVPARQLEQYIADAISDTLRDPGMLDLIADKLYEYRRSTTRGADPEDPAKKLEKIERQLDALALNLEKRPGSETLLNRLDALEAERDDLRIQISASAARPASAAFDRDQLRALVQIFLAGFPHSGKEATTKMILDGFVAKAVRTNKKILIELNVSGLDPLELEDLIGFDQNPDWWTSLSSGRTLICGSAVVLMISVA

SEQ ID NO: 10439 - protein, 508 aa, Unknown
  Description of Unknown: Integrase B10440 sequence
  cd00338,PF13408,IPR011109,IPR038109,PF07508, Coil,PS51736,IPR036162,IPR006119,G3DSA:3.40.50.1390, PTHR30461,PTHR30461:SF3,PS51737,IPR025827,PF00239, SM00857,G3DSA:1.10.10.2600,SSF53041
MNAVIYARFSSSAQREASIEQQINVCTSYAKQNGYTIVQTYSDRALTGRTDRRPQFLQMIKDAREGRFCAVLVYALDRFSRDKYDSARYKHELRACGVRVVSATEPITDNPSGILVESVFEGLAQYYSAELSQKIRRGYEDNAKKCLACGSVPFGFRRGKDGRYEIHPEEAEVVREIFQRVSAGETYADICRDLNGRGIKTKHGASWNRSSFNTILSNQRYIGTYLSKYHVQEDAIPQIVEKELFYQVQTLPRHTKAGPRRTPNGYYSLTGKLFCGLCGDAMTGTSGTSKSGKLCYYYSCHGHRAHKCDQRSYPRDQLEETICRAIWDDVLSDDAIRWMAHQTILDQDKIREDSDLDIIRTELAQTRSQKSNIMNAIKAGIFTASTRDELLKLEQEEALLEDRVKQAETAISALPSEDDIISFLDLFREGYASQELTNAALLDAFVIRAEVRPSDILVYFSIKKEDRQKIVDLPSGPECSFSPVKWTSPNSKRTLYRVGEWFVLRIVA

SEQ ID NO: 10440 - protein, 508 aa, Unknown
  Description of Unknown: Integrase B10441 sequence
  cd00338,IPR011109,PF07508,Coil,IPR036162, IPR006119,G3DSA:3.40.50.1390,PTHR30461,mobidb-lite,PS51737, PF00239,SM00857,SSF53041
VQYSRGMTETGYDATTWQQIEQSLRQRDADPAYADAPVLDAYARISKSPEGDLEKTDRQLVDILNNIARRPARLGAVLRDDNLSAWRRTPKGRPGWNVLVRRLEARTSAGVVAWHTDRLMRQPRDLERLIDFGEKHGLTVGSCHGDYSLDDQDDLFTLRVLTAAASKASADTSRRQKRKAQSLRDAGRLHGGARPFGLPGKELGGKAPVQPAQIEREREAIASAIRSHLDGVSLATICREWNASGLRTTSGKPWRVVHMGRLLIAPRVVGLLVHKGVVVGKLADVEPIVSEDEWRAVVATFKSRSRGRPASDPYLLSGGHLRCGVCGERMKGKPQHRPGSVVRRYTCRDINCGGVSIDALLVEAEVRSFVLTELADPKHQRQIAQTSAKLAEAEKRLRVARDTVTELARRLGEGEMDLDAHDAAVAPLKRRITKLTAERDALLDAGAGSALRVANRAELATEWDDPDATADHRRRMIRRVAPRGFIVMPRELGTSRVNVKARLRVAEQ

SEQ ID NO: 10441 - protein, 508 aa, Unknown
  Description of Unknown: Integrase B10442 sequence
  cd00338,PF13408,IPR011109,IPR038109, PF07508,Coil,PS51736,IPR036162, IPR006119,PTHR30461,G3DSA:3.40.50.1390,PTHR30461:SF3, PS51737,IPR025827,PF00239,SM00857,G3DSA:1.10.10.2600,SSF53041
MNAVVYARFSSSAQREASIEQQINVCMAYAEREGYNVLQTYSDRAMTGRTDRRPQFLQMIKDARKGRFCAIIVYALDRFSRDKYDSARYKHELRQSGVRVVSATEPITDNPSGILIESVFEGLAQYYSAELAQKIRRGYEDNAKKCLASGSVPFGFRRSADGHYEIMPEEAEIVREIFRRVGSGETYADICRDLNARGIKTRHGAEWNRSSFNTLLSNQRYIGTYISKYHVQEDAIPQIVDKDLFYKVQTVSHTKTGPRRTPNGYYSLTGKLFCGLCGDAMTGTSGTSKSGKLCYYYTCHSRRQHKCEQRSFPRDLLEDTICRAIWEDVLSDDSIRWMAHQTILDQDKLRPDSDLDLARMSLAEVQTQKTNILNAIKAGIFTTTTKDELIRLEQEEASLTDKIRQTEKLLEEQPTEEDIISFLEIFREGYVDQEFTKSGLLDAFVTRAEVYADHMLIYFRIKKEDRLKSADLPSVPDECSFSTVKWTCRDSKRTLYHAGDYFILKIAA

SEQ ID NO: 10442 - protein, 508 aa, Unknown
  Description of Unknown: Integrase B10443 sequence
  cd00338,PF13408,IPR011109,IPR038109,PF07508, PS51736,IPR036162,IPR006119,PTHR30461,G3DSA:3.40.50.1390, PTHR30461:SF3,PS51737,IPR025827,PF00239,SM00857, G3DSA:1.10.10.2600,SSF53041
MNKSVLYIRYSDEKQNEQSVDGQIRVCKEYAKKNNLEVVGIYIDRALTGKNDNRPEFMRMIRDSYKKRFNYLIVYRLDRFARNKFDSAIHNHTLKKNGVRRLSAMENITDGPEGVLMESLLEGMAEYYSLELAIKVKRGIYDNLDKGNGIGGTTPLGYDLVDKKYVINDYEAHIVRLIFDLYLRDKNSIKVVQELKTRDLKDKEGRTLNVNRVLRALNNEKYSGVYTKDSVSYTNIYPQIVDSTTYESVKSILHKNKRSPGSNRTNVNYLLTGKLFCEKCGQLMIADSANKPNKTYHYYSCNKNRKHNCPVRPVSKDYIEKKVAELLVSKVLTRDVLVPIIDESIVIYNKENKDDTIIRHLIKEKKRVENELSNSILAIKNGFVSDTLQKEIISLEVFLKSIEIQIAKEQIKQPIALTRDDMLFMFDTFISDKDNENHIEKVIDTFVDKVIYTEKGVTITINSHQNNTYKLDFDDINSSIVSSLRAPSKNKSNFVFYKGYYIFYFNLE

SEQ ID NO: 10443 - protein, 508 aa, Unknown
  Description of Unknown: Integrase B10444 sequence
  cd00338,PF13408,IPR011109,IPR038109,PF07508, Coil,PS51736,IPR036162,IPR006119,G3DSA:3.40.50.1390, PTHR30461,PTHR30461:SF3,PS51737,IPR025827,PF00239, SM00857,G3DSA:1.10.10.2600,SSF53041
MKKAIAYMRFSSPGQMSGDSLNRQRRLITEWLKVNSDYYLDTVTYEDLGLSAFNGKHAQSGAFSEFLDAIEHGYILPGTTLLVESLDRLSREKVGEAIERLKLILNHGIDVITLCDNTVYNIDSLNEPYSLIKAILIAQRANEESEIKSSRVKLSWKKKRQDALEAGTIMTASCPRWLSLDDKRTAFVPDPDRVKTIELIFKLRMERRSLNAIAKYLNDHAVKNFSGKESAWGPSVIEKLLANKALIGICVPSYRARGKGISEIAGYYPRVISDDLFYAVQEIRLAPFGISNSSKNPMLINLLRTVMKCEACGNTMIVHAVSGSLHGYYVCPMRRLHRCDRPSIKRDLVDYNIINELLFNCSKIQPVENKKDANETLELKIIELQMKINNLIAALSVAPEVTAIAEKIRVLDKELRRASVSLKTLKSKAVSSLGDFHAIDLTSKNGRELCRTLAYKTFEKIIINTDNKTCDIYFMNGIVFKHYPLMKTISAQQAISTLKYMVDGEVYF

SEQ ID NO: 10444 - protein, 508 aa, Unknown
  Description of Unknown: Integrase B10445 sequence
  cd00338,IPR011109,IPR038109,PF07508,Coil, PS51736,G3DSA:3.40.50.1390,IPR006119,IPR036162,PTHR30461, PS51737,PF00239,SM00857,G3DSA:1.10.10.2600,SSF53041
MDTKGKIEQIKDVAILLRKSRGEEEDLDKHKQELVELCVQNGWRYVIYKELGTSQDIKYRPELQKLLSDIQEDLYDAVVVVDKDRLSREGTGQVTINKILMEHDVLIVTPYKVYDLSNDSDMLMSEVEDLMARFEYRMISKRFKRGKKRGAKMGNWVNGTPPFPYVYVPETKSLAVDPEKKKWYRFMVEQFLEGKPFYEIAWELNKMGVKTQRGNLWHENSIRRLLLSEVHLGKIINQKTEGSGHKNKKTKPLRIRPRSEWIIVENCHEAVKTQEEHDIIIATLAARRKVPKTSKQIKLPLTGLVRCGKCKKTMRVYRRKLVNGYSFKINTCQASDPFGNRCKNSGGDAMAILSTITQEAKTMVDELEQKAKNSKSMDKEIQHYKLKKNSALNEIDKKKESIERAYLAYEEGVISLEKYKQRTATLKKEISKLEEKIKSYDILIEKSSNQDKEEKINRYMEMIELIEKFDNIEDDETNQKLNKILKDNIFDIYWTREGDNVTIEVNFI

SEQ ID NO: 10445 - protein, 508 aa, Unknown
  Description of Unknown: Integrase B10446 sequence
  cd00338,PF13408,IPR011109,IPR038109, PF07508,Coil,PS51736,IPR036162, IPR006119,PTHR30461,G3DSA:3.40.50.1390,PTHR30461:SF3, PS51737,IPR025827,PF00239,SM00857,G3DSA:1.10.10.2600,SSF53041
MKKAIAYMRFSSPGQMSGDSLNRQRRLITEWLKVNSDYYLDTVTYEDLGLSAFNGKHAQSGAFSEFLDAIEHGYILPGTTLLVESLDRLSREKVGEAIERLKLILNHGIDVITLCDNTVYNIDSLNEPYSLIKAILIAQRANEESEIKSSRVKLSWKKKRQDALESGTIMTASCPRWLSLDDKRTAFVPDPDRVKTIELIFKLRMERRSLNAIAKYLNDHAVKNFSGKESAWGPSVIEKLLANKALIGICVPSYRARGKGISEIAGYYPRVISDDLFYAVQEIRLAPFGISNSSKNPMLINLLRTVMKCEACGNTMIVHAVSGSLHGYYVCPMRRLHRCDRPSIKRDLVDYNIINELLFNCSKIQPVENKKDANETLELKIIELQIKINNLIAALSVAPEVTAIAEKIRVLDKELRRASVSLKTLKSKAVSSLGDFHAIDLTSKNGRELCRTLAYKTFEKIIINTDNKTCDIYFMNGIVFKHYPLMKTISAQQAISTLKYMVDGEVYF

SEQ ID NO: 10446 - protein, 508 aa, Unknown
  Description of Unknown: Integrase B10447 sequence
  cd00338,PF13408,IPR011109,IPR038109,PF07508, Coil,PS51736,G3DSA:3.40.50.1390,IPR036162,IPR006119, PTHR30461,PTHR30461:SF3,PS51737,IPR025827,PF00239, SM00857,G3DSA:1.10.10.2600,SSF53041
MKKAIAYMRFSSPGQMSGDSLNRQRRLITEWLKVNSDYYLDTVTYEDLGLSAFNGKHAQSGAFSEFLDAIEHGYILPGTTLLVESLDRLSREKVGEAIERLKLILNHGIDVITLCDNTVYNIDSLNEPYSLIKAILIAQRANEESEIKSSRVKLSWKKKRQDGLESGTIMTASCPRWLSLDDKRTAFVPDPDRVKTIELIFKLRMERRSLNAIAKYLNDHAVKNFSGKESAWGPSVIEKLLANKALIGICVPSYRARGKGISEIAGYYPRVISDDLFYAVQEIRLAPFGISNSSKNPMLINLLRTVMKCEACGNTMIVHAVSGSLHGYYVCPMRRLHRCDRPSIKRDLVDYNIINELLFNCSKIQPVENKKDANETLELKIIELQMKINNLIAALSVAPEVTAIAEKIRVLDKELRRASVSLKTLKSKAVSSLGDFHAIDLTSKNGRELCRTLAYKTFEKIIINTDNKTCDIYFMNGIVFKHYPLMKTISAQQAISTLKYMVDGEVYF

SEQ ID NO: 10447 - protein, 508 aa, Unknown
  Description of Unknown: Integrase B10448 sequence
  cd00338,PF13408,IPR011109,IPR038109,PF07508, Coil,PS51736,G3DSA:3.40.50.1390,IPR006119,PTHR30461, IPR036162,PTHR30461:SF3,PS51737,IPR025827,PF00239, SM00857,G3DSA:1.10.10.2600,SSF53041
MKKAIAYMRFSSPGQMSGDSLNRQRRLIAEWLKVNSDYYLDTITYEDLGLSAFKGKHAQSGAFSEFLDAIEHGYILPGTTLLVESLDRLSREKVGEAIERLKLILNHGIDVITLCDNTVYNIDSLNEPYSLIKAILIAQRANEESEIKSSRVKLSWKKKRQDALESGTIMTASCPRWLSLDDKRTAFVPDPDRVKTIELIFKLRMERRSLNAIAKYLNDHAVKNFSGKESVWGPSVIEKLLANKALIGICVPSYRARGKGISEIAGYYPRVISDDLFYAVQEIRLAPFGISNSSKNPMLINLLRTVMKCEACGNTMIVHAVSGSLHGYYVCPMRRLHRCDRPSIKRDLVDYNIINELLFNCSKIQPVENKKDANETLELKIIELQMKINNLIVALSVAPEVTAIAEKIRLLDKELRRASVSLKTLKSKGVNSFSDFYAIDLTSKNGRELCRTLAYKTFEKIIINTDNKTCDIYFMNGIVFKHYPLMKVISAQQAISALKYMVDGEIYF

SEQ ID NO: 10448 - protein, 508 aa, Unknown
  Description of Unknown: Integrase B10449 sequence
  cd00338,PF13408,IPR011109,IPR038109,PF07508, Coil,PS51736,G3DSA:3.40.50.1390,IPR036162,IPR006119, PTHR30461,PTHR30461:SF3,IPR025827,PS51737,PF00239, SM00857,G3DSA:1.10.10.2600,SSF53041
MPDFSTLTRFALYRRVSSQESFEKDLSLPEQAAQQRDYVTRNGGIIVAEFEEGKGISASREDRPEFQRMISAAKSGEFDVLLIHRSNRVFRSRMHAVTYKHLLGQHGIRLASVTESFIGSDDPTDKLLEGIMECFNEWFLENLKAEIGKGLRQAAAQGRQSGAVPYGYQWDREGDGNWAIDPVTSPWVARIFEAFLTRSLAFSEIARELNSLGAPSPGNPGSAKQRQNWSNTGTDWWGAAVKRILSLRQYVGDVHYKGEWYKGVHSALITRDVFDETARRLSGKRVGRSYSAPALFGTGLLLCPHCGQALTVRRHVHKADGVRREYTNYACSTHSAYTQKTAQGGIAAMDCPGFMISEGKVLDTFRPVLEAASADVDPAVITVTALPPMKPPTDNYALMTAMRTELATIPTTRTNYLRIAGKGMMPDDVLAEELASLSAREVAITAEIERLTNQGTIRAEPDPVDAYRLLRALDRDDLTVPQKRDAIRAVFVSITPTADKVGLRCVLC

SEQ ID NO: 10449 - protein, 507 aa, Unknown
  Description of Unknown: Integrase B10450 sequence
  cd00338,IPR011109,IPR038109,PF07508,Coil, G3DSA:3.40.50.1390,PTHR30461,IPR036162,IPR006119,PTHR30461:SF3, PS51737,PF00239,SM00857,G3DSA:1.10.10.2600,SSF53041
MKAVILARVSSKEQEDGYSLDAQISRLSDYANKKGLEVIKTFTLTESSTQGDRKKFQEVLKFCSSQKETIALIADAVDRVQRSFKESTYLDELRKKEKIELHFYREGMVVGKNASSSDLLRWDFLVIGAKSYVLALAENVKRSINFKIEHGEWCGKAPIGYLNRRNAHGKSEICLDPVRAPIIKKLFQEYSLGKTSFKELANLADKWDLKSNSPKARKLTSKTLYDTLTNPFYCGKMRIKGQLYPHIYEPLISEDLWNKCQEVRLGYKKQPVKYASKEFLYRGLITCYNTGKIVTTDQKRGHINYLICYDKTGKRIYCHEETITKQVQQILDSIIIPEPILTGLNQILRDSKKNEALLHEQAVTSLRKDLDITKKRIENLVDMYLDKKIDDEIYSSKINQLKNEKTSLENKIAAHSVSDDKFNETIINLFDIVNHAGKKFANSSNIEVKRRILKLIIRTMKLDRGNLGYELAWPFSELPKSDDCYLWRTRRDSNPRPLASEANTLSN

SEQ ID NO: 10450 - protein, 507 aa, Unknown
  Description of Unknown: Integrase B10451 sequence
  cd00338,IPR011109,PF07508,IPR036162, IPR006119,PTHR30461,PS51737,PF00239, SM00857,SSF53041
MLDMPTTDLYLRLSDSRTEEALDGREAKLRAEAIRLGWIVSRVVVENDAPRRVGGKMAPASAFKRRAVRNASGEIVRDPDTGRPVMRVIRPGWQSVIADLKTRRASAVLAEDLDRALRDPRDLEDLLDACAQTAASARSLTGSLTLTNGGNDGEIFMARVMVAQAHKSSSDTSRRVRDAKARYFGQTYQGGLRPFGYAHVADTEKYHRTLMIVPDEKDLILAAVADILDRDITLAAITRDWRARGAVTVTGKPWTAQKLRQALIKPAVAGLAVYGGELTVAPWPHILERDTWEKLKAKLEDPVRRNTTGNEPKHLLSMIALCGICHDVLYSTGAKHRGGLGYGCRNNGWHLRRNGKHLDECVEAAVLAWLELHGKTALKPPPRRAGVNAPALRAEAGRLRTAKREQMRMHSAGTIDNDDLAEGLREIRDRLAVIDAQLAVSDQPDPLAEFRDAPALAVWASLTLPRKRAIVRLLVEVTVYPTARRGPGFDRASVDVRFKATPEGGAE

SEQ ID NO: 10451 - protein, 507 aa, Unknown
  Description of Unknown: Integrase B10452 sequence
  cd00338,PF13408,IPR011109,IPR038109,PF07508, Coil,PS51736,G3DSA:3.40.50.1390,IPR006119,IPR036162, PTHR30461,PTHR30461:SF3,IPR025827,PS51737,PF00239, SM00857,G3DSA:1.10.10.2600,SSF53041
MIGVIYARYSEGPKQTDQSIEGQVNDCMAFAQRNGIDVIEVYADRHISGKSVVGRYEFQRMLQDAQLHRFDCVIVWKIDRFGRDRQDIAVSKMQLKKAGVKLMYAEESVPEGPEGIILESVLEGIAEYYSADLRQKVIRGRRETLKKGLFCGGSLPIGYMVDSERHIVPDPATAPHVREVFRMYAAGSQIKDCVWYLQDKRVKGQRGTDMSKSTVGAMLRNKRYLGIFDVSGVELRAEPLIDEETFLLCADRFPGGPQKNAAGKADVDYLLSCKIYCGKCGRMLTGESGKGRSRVYYYYKCPAKKRNAECDLAPVKKEWMEELVLKATVDDMLTEDTISMLTDEILRVQDRDLADDPVKVIQSALDSCRKKQANILHAIEETGARGLATRLAKLEEEEAELSLELKKAQVCRPRLSREDISLWLHSFRNGDLSDDDFKKRLLETFVARVELLPDRAVIFYHISEKSKQKRTVSFGSDTARLLEESGLYPNHPTFFHGFIVLVVMRAA

SEQ ID NO: 10452 - protein, 507 aa, Unknown
  Description of Unknown: Integrase B10453 sequence
  cd00338,PF13408,IPR011109,IPR038109,PF07508, Coil,PS51736,IPR036162,IPR006119,G3DSA:3.40.50.1390, PTHR30461,PTHR30461:SF3,IPR025827,PS51737,PF00239, SM00857,G3DSA:1.10.10.2600,SSF53041
MYEDIKTACLYVRFSSHNQTEQSIEGQTRVCRDFCKRHNIRIVEIYADRATSASKDIEKRVQFLKMIKDSEKGLFDAVIVYKLDRFARSRYDSATYKYRLKRNGVQLISATENISNDPEGIILESVLEGMAEFYSAELSQKINRGMRESAYKHNSIGGAIPLGYKIEDKKLVIDPKTAPIVKEAFEKYADGETVAEICRQFNARGYKTSKGTAFGKSSFTKIFRNERYIGVYSFHDYRAEDAIPAIIDKDLWDRVQLRVGKIKNAPARNKAKVVYLLSGKIFCGHCGSKMNGNCNAGNYYYYQCYGKKNGNVDCKKKNIRKEFIERLVAHDALSLLTDEYIEQIATIACEKNQHEIELDSALPTIRDRIHQVDLSLNNLLKAIESGSAPDMLVKRMGELEKEKKDLQVQAKKESEDIVELDKAQVIYWLEQFRGGSIEDEEFCRMLIDLFVNSVTVWDEDDGSYKVTVAYNLTSLPTKTYRLNKGGTLSDFTSNAPAFRRSSPESDC

SEQ ID NO: 10453 - protein, 507 aa, Unknown
  Description of Unknown: Integrase B10454 sequence
  cd00338,PF13408,IPR011109,IPR038109,PF07508, Coil,IPR036162,IPR006119,G3DSA:3.40.50.1390,PTHR30461, PTHR30461:SF3,IPR025827,PS51737,PF00239,SM00857, G3DSA:1.10.10.2600,SSF53041
MRVALYARFSDSELQNERSADDQLEALRQVVKARGWTETRAYADHGISGAALANRPAVQSLLRDAAAGGFDCVLAEDLDRLSRDQEGTAHLFKHLTFAGVLLETLGQGRISVMHVGLAGTMNQLFLEQLAAKTRRGLVAKVKAGFSGGGHTFGYAIVAKGVYAVDPDQARVVRRIFTDYDLGASPRAIAARLNAEGVPGPSGRQWSASTINGDRRAGDGVLHQELYVGTRVFNRRRFRKHPETGRRSSVLNPTESWIRMPTPDLRIIDQDLWARVQARKSALGAAPAQRARRPTRLLSGLLVCALCHGPMTVQGKRYACSTRREKGTCTNASYAGCTAVETRVIVGLRDNLLHPDVVAEAIRTFQAEMQAATRSAITDRAKIEEELQGLQRRLDRASDAYQRGLFELDELEAQISPLKARRAALRDQLAMADAPPVYRIHPHAAEMYRSIVENLAGALEKDSSQDMRNALRGLISRVIFTPGEARGAFDLSVQGRISGLLSNSTAPD

SEQ ID NO: 10454 - protein, 507 aa, Unknown
  Description of Unknown: Integrase B10455 sequence
  cd00338,PF13408,IPR011109,IPR038109,PF07508, PS51736,IPR036162,PTHR30461,IPR006119,G3DSA:3.40.50.1390, PTHR30461:SF3,PS51737,IPR025827,PF00239,SM00857, G3DSA:1.10.10.2600,SSF53041
MQVNVIKPVEKTKKKLKVCAYARVSTEEDEQENSLENQKDYYEKLIRSNPSYEYVDVYYDFGISGYRETRPGFQKMLADARTGKIDLILTKSISRMSRNTVAMLKAVRELQSIGVGIFFELQNMNTLSGEGELMLSIYSAFAQAESDDCSKNAYMTYKRKFEAGIPAVRIHECYGYRLDSHGNLALDEREAYVVRKIYEFALAGLNPSEIARYLNKNGIKTAKGKKWICSSVFRVLRNEIYKGDVMMQKTYLDADRVRHKNRGQKDRYYLADNHIPIVDSDDWNAVQEILDDRSLALKEKVKPKAEGMGDSHSTYPLTGMLYCPKCGGMLHHKFGNGKKNVYWSCSTWIKKGRTQCSGISVPDTVADAWEIKEPTTVFVTEDDFGRKQYSLVPKEVYEKKKDCPYKPKERTAKYSHSTYPLSGKLYCSKCGSLMHHQGGWNHKEFWWCGKRVKQGPQACEGVRVPATVADTWKFEGCIYVTEGEDENGKKCYSYQSKSEDDGNGCEG

SEQ ID NO: 10455 - protein, 507 aa, Unknown
  Description of Unknown: Integrase B10456 sequence
  cd00338,PF13408,IPR011109,IPR038109,PF07508, Coil,PS51736,IPR036162,IPR006119,PTHR30461, G3DSA:3.40.50.1390,PTHR30461:SF3,IPR025827,PS51737,PF00239, SM00857,G3DSA:1.10.10.2600,SSF53041
MNAVIYARFSSSAQREASIEQQVNVCMEYAERTGYNVLQTYSDRALTGRTDRRPQFLQMIKDARKGQFCAVIVYALDRFSRDKYDSARYKHELRACGVRVVSATEPITDNPSGILIESVFEGLAQYYSAELSQKIRRGYEDNAKKCLVAGSVPFGFRRSADGHYEIQPEEAEIVREIFRRAGAGEHYADICRDLNARGLRTRHGAAWNRSSFNTILKNQRYTGMYVSKYHVQEDAIPQIVDKDLFYRVQAASHEKSGPRRTPNGYYSLTGKLYCGLCGDAMTGVSGTSKSGKLCFYYACHSRRAHKCTQRILPRDQLEAQICRAIWDDVLSDDSIRWMAHQTILDQDKLRADSDVDILRASLAQTRAQKTNLLNAIKAGIFTASTRDELLRLEQEEADQAERLQQAEKLVADLPSEDDIISFLEIFREGFEDQDFKRTALLDAFVSRAEVHEDHILVFFRIKKEDRSIKTDLPSPVECSFKTNEWTCGNSKRTLFHVCDYFVLRIAA

SEQ ID NO: 10456 - protein, 507 aa, Unknown
  Description of Unknown: Integrase B10457 sequence
  cd00338,IPR011109,PS00397,IPR038109,Coil, PF07508,PS51736,G3DSA:3.40.50.1390,IPR006119,PTHR30461, IPR036162,PTHR30461:SF3,PS51737,PF00239,SM00857, G3DSA:1.10.10.2600,IPR006118,SSF53041
MPAIKKTTSNTIKKCVIYARVSSDRQEREGFSIPAQLKLLKEYAQRNNIKIVQEFVESETAKKAGRKQFNEMIKFLKKNTTIKSILVEKTDRLYRNLKDYVTLDEFTGLEIHFVKEGEILSASSKSQDKFMHGIRVLMAKNYIDNLSEEIQKGLKEKCEQGYCPTRAPIGYLNVIQTSGKRTIEVDNETAPFIKKIFEEYLTGNYTYKTLAQYINKAGFKPRNKQCTGKTIENILHQEFYTGNFIFKGKKYYNGQHTPLITPELFAQVQEKLRKKNSPRGRVHNFAYTQFIKCAKCGKYMTAEIQHGAHNSGDYIYYKCRYCKKTYLKQEEIEQVFKETILDNIEFTKDEIAQIIEVIKELVKMECNDAIFSVEQINKRVVLLEKRLEQLYTDKVDGAISESLYIKKRDEWQNELNELLIKYEKTAKAGKEFIGNVELLLNLCKDAPRLYLNQTPHEKRKLMNLIVSNPIFDGSKLTFTVYSAFEYALKLKNLEMVGVEPTSIVDKN

SEQ ID NO: 10457 - protein, 507 aa, Unknown
  Description of Unknown: Integrase B10458 sequence
  IPR011109,IPR038109,PF07508,Coil,PS51736, G3DSA:3.40.50.1390,PTHR30461,IPR006119,IPR036162,PS51737, PF00239,SM00857,cd03768,G3DSA:1.10.10.2600,SSF53041
MKAIILARVSTENQSLDSQIEKLISEAKRFGYDEDNITIISAKESGVKLDIEERQTIQQMKDCIETGQYNMVLIWEVSRLARRPKVLYEVREYLIEHHVNLHCMTPQFTMLKDDFTIDPTASIVFALFGTMAEEEARLSKQRMMRGRIAKREQGKFIGGNLLFGYTYDTETDKIHINENERPTVIEIFERYTQKESIRSIAKDLMDRGQLRYDDYATACVMLRRMIRRSEYAGIKQNTYDYPAIISQDLYYKVRARAESKNKYKTRVSEIYYLQGIIHLKRNGMLMSPSKHAVQYRGWDERTNSGTMINMSYIDSLAIYFTKLYKQRASGPERIKMIDSILKQMMYNNQRQQNCIVEHQEVEATIERINERVVKGKMSEEQGDRLIEEQQDKLRELDNMMIKCSENTKQYESQIDALKSNSIEDIDKMNDEQKQRIIRECIKSVYVDIDGVTNHGKIIEINMIDDIKHTIHMTKKGNDFITNIVLKDKEKPLNDLQITARFIRKKKR

SEQ ID NO: 10458 - protein, 507 aa, Unknown
  Description of Unknown: Integrase B10459 sequence
  cd00338,PF13408,IPR011109,IPR038109, PF07508,Coil,PS51736,IPR036162, IPR006119,G3DSA:3.40.50.1390,PTHR30461,PTHR30461:SF3, IPR025827,PS51737,PF00239,SM00857,G3DSA:1.10.10.2600,SSF53041
MLRAAIYARYSSDNQRHESIETQFRICEDYCRQKGYGVVAHYQDEAKTGTTSIGRDGFHRMLSDARRDIFDVLVVYTLDRTARQELDYYLYKKELQAAGIKYEYATESFDPSSVDGQFFEGIQVAQAAWYSRKLSVKVRDGKDTNARQFLFPGGTPPLGYDATPDHHYVINETEAAAVRLIFKMFIAGSGYGPIIDELNRQGFRTKRGKMFGKNSLHEILANEKYCGTYVHRRSYGKQRRNQTAASGTPNAIPAIITQETFMEAARRRELNRGRSASYAAKAVYLLSGKVCCGECGHSYNGNSMSSRGYRYEFYQCCDQTNHGSRTCKNPRIKKSWLERHVVDAILKMFTLDRINAVVDKALAKYQATAAAAPDETAQLYRQKAGAEKRLANLYKMVENGAADEFDLERMRDIKNQIRAINEKIATVDSQPKISINREQIKRYWYKLVAELKIQNRPELIRPVLQKIVNKVMVYPDRVVVSIGNVAGISGHNGNGLALPDKNNSDIQ

SEQ ID NO: 10459 - protein, 507 aa, Unknown
  Description of Unknown: Integrase B10460 sequence
  cd00338,IPR011109,IPR038109,PF07508,Coil, PS51736,IPR036162,IPR006119,G3DSA:3.40.50.1390,PTHR30461, PS51737,PF00239,SM00857,G3DSA:1.10.10.2600,SSF53041
MENKLSEIIKDIAIYLRKSRAKNQEEETDETLYKHKEILVDFAKKHDFRYVIYQEVVSGDSIDNRPEMIRLLDDVENELYDGVLVIDLDRLGRGGEEDSGKIKRIFKKSDTLIITPNKIYNLENEDDETYMEFQTFLARQEYRLIKKRLIRGKKIGSKMGNFTNGTAPIPYKYNPQTKGLIVDEEKLPIYNLIKYLYLDKLLSVDNIANELNKLGIPTLYDRGTKWHANVIQRILISETHLGKIISNKTKGNSKKGEKIIQYSRDKWIVVENCHSCVKTQEEHDRILELFKQRKQIAPRAKQGVFDFSGLLKCSLCQHSMTFFVRKESDKVYMKPCWYVDNFGNKCPNRAGSVEEVSKFVKLKIIERKERLFKELKNGTSHDSSKIELIIKQKNKQLAKFNKALNNAKDAYDLGDYTRDEWIERKSKWENEIEKVNSDINELNEQMLKNSVIKNKEEDIYIITKVLENLDKKDISSKEKNRYYKSIIKEILWTRIGNNEEIIDIEWR

SEQ ID NO: 10460 - protein, 507 aa, Unknown
  Description of Unknown: Integrase B10461 sequence
  cd00338,IPR011109,IPR038109,PS00397, Coil,PF07508,PS51736,G3DSA:3.40.50.1390, IPR006119,IPR036162,PTHR30461,PTHR30461:SF3, PS51737,PF00239,SM00857,G3DSA:1.10.10.2600,IPR006118,SSF53041
MESVAIYIRVSTRKQMDNYSPGEQKRVLTEYAESRGWKIYDIYSDLGESGSDSDRDDLDRLMVDAGRKLFSMVLLFEQDRLSRLEQLDWAYLANSLAKQNIRLVTPTSEINLDNEEDRFLADLFNLLANRELKKIKKRTSMGRGAASQDGVYFGSVPFGVTLNRVTKLWSVVPKQVEVTQLAFEWYAIDFGFNAIAKRLNDNGYRSQKGAKFNSSTVSRILTNPICLGEFEQTVVGKTSRHTVKWEHGNGPYISKQSYNRVQSIIAERGEYQYFLKAKYLLVGIIVCEECGRKLQSKPTQSILAKGNKVIYHYYAHRQATKKECSAHHKMSIIHGKILSTLQEIAGNPKRIELLIKENSRPVNTDDIKEKLERCRDERAKLIDKKGKLLDFYLDGVWEKDELDQKKRDIEIQIAAISSRESELDQRLTSSLRTDVDIKKVSEALLMLKGFNENKELTDDQKITLIRDLISEVRVSKLGAIELFLKVNVGSNACPIISSDLHLCLTLD

SEQ ID NO: 10461 - protein, 507 aa, Unknown
  Description of Unknown: Integrase B10462 sequence
  cd00338,IPR011109,IPR038109,PF07508,Coil, PS51736,G3DSA:3.40.50.1390,IPR006119,IPR036162,PTHR30461, PTHR30461:SF3,PS51737,PF00239,SM00857,G3DSA:1.10.10.2600, SSF53041
MQTAVAYARFSSDNQREESIDAQVRAIQEYCTQNDIELLKIYSDEAMSGTTDDRPQFQKMIEEVENINYVIVHKLDRFARNRYDSAVNKRKLRDKGIRVISVLERFDDSPESVMLESIIEGMNEYYSLNLSREVKKGHRENALKAKHNGGSPPLGYDVDKDLYYIINEDEAIIVRLIYKLYCDGHGYGKIIDILSSNGYRTKVGNEFGKNSLYEILRNEKYRGVYLYNRRKRMDKSYNNHKNSPNMIRIEDAMPKIIDDVTWENVRDKRDVNKRKGGSFSSKFTYLLSGKLQHDCGAVMNGTVKTNKKSDNQVYYYRCEDKDCNIKPKSIQVNNIEPFVINALTTYLFNSDSTFAKEMYKRVNSKDDVAEFELLKKRLDKIVREEDKITEAVVKGLLNDSLIAKNNDLQEQKTAITIKINNLKSDHKSYTMSEINEYMKKYADLKDFDREAQKKVIDIFVHKVILTEDRVRILLYPNPFGGRAQDNGASHPDHQYSRHLIIEMPRVA

SEQ ID NO: 10462 - protein, 506 aa, Unknown
  Description of Unknown: Integrase B10463 sequence
  IPR038109,PS00397,IPR006119,PS51737,PF00239,G3DSA:3.40.50.1390 ,PTHR30461,IPR025827,SM00857,G3DSA:1.10.10.2600, SSF53041,IPR011109,PF07508,PS51736,IPR006118, cd00338,PF13408,Coil,IPR036162,PTHR30461:SF3
LSKQSNAVLYGRVATKEQISESPKFRFAAAYIRVSTDDQDELSPESQLDEIRKYAKREGIILLEDCIYIEEPISGRKAKNRPKFQEMIARAKESDCPFSVILLWKFARFARNQEESIFYKSILRSKCKVDVVSITEPLIAGPFGKLIERIIEWMDEFYSIRLSQEVKRSMRVNAERGKRQCTASFGYRLDESDKMVPDPAEADYVRRIFDEFIAGKGLFPIAKEMNALGVKTHRGNPFENRTVEYIIRNPVYIGKLRWNPEGRTRRDFFNENIIIADGDHEPIIDLDTWEAAQRRMDEVKSQWGYKARPSTELKHWMSGIVRCSACGATLVFAKPHYFKCGNYTKGRCTHTQHIRVDLLEDAIISRLGQDATSSTGIIYDITYTNASEGRDLVHLEAALRILESKKERLQEAYLAGVIELDDFSKAKKALEENMAQTAKELEERKSNSDEEITRAAIKGAISTALETLRSSTATTVEKNNAARSVIENCVFDKDSYTLAITYRIIL

SEQ ID NO: 10463 - protein, 506 aa, Unknown
  Description of Unknown: Integrase B10464 sequence
  cd00338,PF13408,IPR011109,IPR038109,PF07508, PS51736,IPR036162,PTHR30461,IPR006119,G3DSA:3.40.50.1390, PTHR30461:SF3,IPR025827,PS51737,PF00239,SM00857, G3DSA:1.10.10.2600,SSF53041
MRVAIYTRVSTELQAEKGYSLDTQLEACRNYAIEMGATYMEEFRDDGYSGEYLDRPELTRLRESLKDFDVVVVYDPDRLARNLSHQLIITDDIEKAGLLLKFVSVNFEQSPEGNLFYSIRGAVSAYEKEKIKERFARGKRGKLKKGRIISDSKPFGHIYDKETSTYIINDDEAAIIRNIYDWCVNEKLGTAKIAVRLNEMGIVTHRAKSMWTPNAVYYVIVNPRNKGMHIGLKTKTTRVSLTKKKVTPRPEKDHIIVHVPPIVDEVIWQAAQKQLKLNRIQSKRNSKQVHALSGLVYCGKCGRKMRIEYSGRKPYPGYYACIGVTNPNFRYGASGPRCDARRIPSKILEEHIFSILPTMITASEVEKYADRPAKNDNSKNIQQSLDRLATREKELIQQRETVFKWFRTKVISETDATTQLNDINKQLGEIAGLKNNLINSITESTPKKTTKEIVKQIKSSFNGKDLSEEDKRDIIVGLLEKIIVERVDNTTARSSVPDISISLRFL

SEQ ID NO: 10464 - protein, 506 aa, Unknown
  Description of Unknown: Integrase B10465 sequence
  cd00338,IPR011109,IPR038109,PF07508,Coil, PS51736,G3DSA:3.40.50.1390,PTHR30461,IPR006119,IPR036162, PS51737,PF00239,SM00857,G3DSA:1.10.10.2600,SSF53041
MDQYALYLRKSRADVEAEARGEGETLSKHRAALTEYARRRGLLIVKEYAEIVSGDTIAARPQMQHLIEDVKAGLYAGVIVNDIDRLGRGDGIDQEIIKYTFAAVHCIIITPNGDIDPASNRDEDMLDFRMFFARMELRKTSQRMAQGRARSALSGNWIAGSAPFGYKKVKSGRKITLEPDESTAPILRLIFDWYATGEAGYTGIANRINRMGVKVSPQPNAATNASTIRRILSNPIYIGKLAWGKTESVSRIENGQRVKRRVKSTPTVIDDAFPPLIDVETWNVVQDRIASAHHIAPVNSNSVMQNPLAGLVICSECGRHMVRIQGHNRPILQCPRTTCKTSGAYIDVIEDTLLEILRTWCVEYSGFIEPVKPQSAIIQIEALRRQLEQIDTQITRAQELVEIGVYSPSEYVQRKTALEGRRSGLRAEIDKLTRPSPRAAVAAAVPEIRRVLDAYPLAPDAAAKNRLLRSVIDHIIYYKTKSARGNKSTPGALLSLDVFPVINRLG

SEQ ID NO: 10465 - protein, 506 aa, Unknown
  Description of Unknown: Integrase B10466 sequence
  cd00338,PF13408,IPR011109,Coil, PS51736,G3DSA:3.40.50.1390,IPR006119,IPR036162, PTHR30461,PTHR30461:SF3,PS51737,IPR025827, PF00239,SM00857,SSF53041
VTSDFPCETLKQNISRKTAHDDIMSFYILSYQAFFRYQKEGFYMSFFTPNPQLFGLRVVKYIRCSHDDQVLHGDTLEAQDLILEDFIKVNRMILVDTFIDEALTARKKFNKRKEFVRLLDGVKAHTFDLIIFTKLDRWFRNIGDYHKIQEILEANGVQWKAVTENYDTTTTNGRLHINIRLSVAQDECDRDSDRIKDVFAYKLKNKTYVSGSLPRGLKLDAEKHVIIDPEWNCFALDMFDRFEATCSKRDTQLFLQEKYNIRVCYDTVARYLKNPLFKGQYRDDPDFCPATISPERFERIQKLAIRNVRIRHTQQFYIFSGLLICSSCNHYMCGTVTYRRMADGSEKMYKNYRCNFKAQSKLCDRGKTYREADLEEYMLAHIRPALSDYIAKYEVTAASTVQKNPVTEIAKIERKMKKLYDLFMDDLIDKEAYRSEYDKFKAQIEELQKCSTAAPMRSLDSVKKLLSEDWEAVYHTFSDQEKNTFWKSFVESVLVYEDGSMDIRFL

SEQ ID NO: 10466 - protein, 506 aa, Unknown
  Description of Unknown: Integrase B10467 sequence
  cd00338,PF13408,IPR011109,IPR038109,PF07508, Coil,PS51736,G3DSA:3.40.50.1390,IPR006119,IPR036162, PTHR30461,PTHR30461:SF3,IPR025827,PS51737,PF00239, SM00857,G3DSA:1.10.10.2600,SSF53041
MKTAVAYARYSSAGQRDVSIEQQLRDIHAYAEREGYTIVHEYADHARSGFRNVAARSQFQAMIAAASSGAFQTVLCWKSDRFARSREDSAIYKGQLSRLGVSVVYVMEPIPQGAAGVLTEGMLEAIAEWYSRNLSENVKRGMADNASKCLYNGTTIYGYNGIRNQQYQINEEQAAVVRQIYALYIDGYSLAEIARLLNSSGQRTESGKEFTINKLYNILKQERYLGIYIFGDFRIPGGMPAIIDPETWEAAQLMKSKTSRHYENNPDVYLLTGKAFCGHCGKPMVGDSGTSKTGSMHYYYTCQSKKRRSGCDKKSVRKDLLENMVINFLLDNVLTGPQVEEIADAVLAAQQQRVAASPLQSMESELRETERKISNTNRAIAEGVFTSSTLVMLNELEETASQLRLSIEARRYAESQLMDRDRILCFLSRFAKLDRNNRDDRRFLIRTFLNSVYVYDDHLRILVNATEHCETIPFSDLPPEEGSDSVSPVLLVQIQTNSVILLYGVR

SEQ ID NO: 10467 - protein, 506 aa, Unknown
  Description of Unknown: Integrase B10468 sequence
  cd00338,PF13408,IPR011109,IPR038109,PF07508, Coil,PS51736,G3DSA:3.40.50.1390,PTHR30461,IPR006119, IPR036162,PTHR30461:SF3,IPR025827,PS51737,PF00239, SM00857,G3DSA:1.10.10.2600,SSF53041
MDVCLYMRYSSDRQTEQSIEGQRRVCMEFCKREGYNVVEQYIDRATSAFKDTDKRTQFQKMIRDSEKQLWEAVVVYKLDRFARNRYDSATYKARLKKNGVRVISATENISDNPEGVILEAVLEGMAEFYSKELSQKITRGMFESANKCHSIGGHIPLGYRIENKKLVINEAAAEIVREAFHLYANGATVAEICETFNNKGYKTAKGADFNKNSFNSMFKNERYIGIYKYKDMRIEGGVPAIVDKETFDIVQKRLKINAQAPARGKAKVDYLLSQKLFCGHCGATMTGESGTGRLGGKYHYYTCSTRKRYHSCEKIPVKKDFIERAVVEDALSILTPEVIEELAEAAVRQNKIDIENESLVPALTQELYEIERSIANLIKMVEKGADSDALTARLIELEKQKRATEKRLVVAQDEIVVLEKEHIIWWLTEFCNGDIEDEDFRRHIIDLLVNSVTVWDEPDGWFKITSVYNLTSSKTSTFRIPSGQGSDLSNLAPPAAMCRSKLGTTR

SEQ ID NO: 10468 - protein, 500 aa, Unknown
  Description of Unknown: Integrase B10469 sequence
  cd00338,IPR011109,PS00397,IPR038109,PF07508, PS51736,G3DSA:3.40.50.1390,PTHR30461,IPR006119,IPR036162, PTHR30461:SF3,PS51737,PF00239,SM00857,G3DSA:1.10.10.2600, IPR006118,SSF53041
MLKAYSDRAALYVRASTEHQNYSTDHQEAALQEYAASHGFTIAQVYRDKGRSGLTLDGRAGLLQLLTDIQSSRAEFSAVLVYDVSRWGRFQDVDESAYYEYACRRAGIAVAYCAEPFTNDGSPLAAVLKGLKRAMAAEYSRELSAKVFRAQCRLTEAGFKQGGLAGYGLRRIAISASGQAKGVLGAGERKSMPTDRVTYTIGPDAEVAVVRRIYDMYLGAAMSDTGIARRLNSEGVENEFGRPWSPYHVRQVLTNDKYAGTLVFNRSTQHLKSTRRPNAPDSWVRVEDAFVAIVPRQQLEAARAERNRRRRQWSDDEMLESLREIFVEHGKVTPDLIDSSGGPSVKSYAFRFNGITSALGLAGVSWPSLTRSAITRYRMRCITRDMTIELERCAAKAKAQVERLSPRTYRLNGVSARLLCTRCRFERSHPCWKVALVHEPAVDFVIWVRADPANEKVEAMYLIPVADFPDHIYIWPSSRTLAKYEQYAHASLADMFGLTT

SEQ ID NO: 10469 - protein, 506 aa, Unknown
  Description of Unknown: Integrase B10470 sequence
  cd00338,IPR011109,IPR038109,PF07508,Coil, PS51736,G3DSA:3.40.50.1390,IPR036162,IPR006119,PTHR30461, PS51737,PF00239,SM00857,G3DSA:1.10.10.2600,SSF53041
MSSVSVIPVDIGSVVRKVRVAIYARVSTNNEEQETSYELQVNELIKSIEANPNYELTCVFADKESGMDTKNRPSFNNMMELARKGGIDLIYTKSVSRFGRNAIEVPEIIRELRSLGVSVFFEKENISTRDFADEFLLNILSGVAEEESRQISSNLRWTFKKKMSKGLNTTVRIYGYKIIDGNFIIVPEEARIVKQIYDWYIEKVSYARMIHLLHELGIKSPQGNEFWSHSVLESILLNEKYCGDALLGRGRELARTNKCLFYDEPTKYLVRNNHEGIITRDMFDFVQAERKKRTKYRRTNVSQTLKPESKFFYSMEVDKHFVYKVERPKGKYNIPVLLCVKNDFRKMIQYKYVVEGISSVCNHLLKNFKSITNYYGDIKANTLESMQNELTVLNQELDRTIDADVKLNIYNRISAIKNNQLTFESIEDTLRKLKLSLLALSDGYDIEIVKTIFSQVYVKDNHFYLIFNPTNSLIDLSNDINILLSVKVSSIVNYKTTELEFSIVLV

SEQ ID NO: 10470 - protein, 506 aa, Unknown
  Description of Unknown: Integrase B10471 sequence
  cd00338,IPR011109,IPR038109,PF07508, Coil,PS51736,G3DSA:3.40.50.1390,IPR006119, IPR036162,PTHR30461,PS51737,PF00239, SM00857,G3DSA:1.10.10.2600,SSF53041
MSGRAWLYARVSKDLREGSSCDQQLTIGRRECDREGVPVAGEYRDDDISASQYAKRARADWDRLMEDLKRDGQPGDRLWGWEISRLARERGTWSQTVRLLQDLGMFLWVGGKIYDPQNPQDMFFLDIMLAKAVAEVGDTRQRILRDVAARAEAGGASGRPGYGFEHVYDPKTGSFLERRPKPDEAEIVAEMADRLLAGDGLETIARDLNTRKMPNSIEYIAGQRMPDGKTSRGWTAATVRSMLMRSSIMGKRSWKGRLIAEGGWEGIVSEEDWYELQRRLKSRSGQVRDGRASHELSGIGTCGARVDRAEGGEGGEEPTLVRCGCRVYAESSKRGRVYRCRGRYAGDESGHVSRKADLIEEQATGLLMEHFSRPDIKAALLSPPDESGDAARARSEVKRLERELEGLYEDVRARRVSRQLAAADEEGIRAELRRLEGQVRPQTIDPMLIALAQNPRAAWSGWSVEQRRRAWRSAVARLDVLPVGRVGRRPVPVEESIEIDFVGLVV

SEQ ID NO: 10471 - protein, 465 aa, Unknown
  Description of Unknown: Integrase B10472 sequence
  cd00338,PF13408,IPR011109,IPR038109,PF07508, PS51736,G3DSA:3.40.50.1390,PTHR30461,IPR006119,IPR036162, PTHR30461:SF3,IPR025827,PS51737,PF00239,SM00857, G3DSA:1.10.10.2600,SSF53041
MAREVTVIPATKTPQANGKKQLSEKKIRVAAYCRVSTEQEEQENSFRNQVEYYTRYIEEHPEYELVDIYADEGISGTSTKKRENFKRMIADCEAHKIDMVITKSISRFARNTQDCLENYRKLKNLGIIVVFEKENISSADTTGELLLTILSSLAQDESRNISENTKWGIRSKFQKGIPHINAKRFMGFDQDAEGRLIVNEEEAKLVRRIFREFLEGYTATVIATRLNAEGVPGVNGEPRWLKTTIEGMLKNEKYMGDSLLQKSFTSDYLTRKMVKNEGQVTQYYVKNSHEGIIPRDEWNAVQQEFERIKQYMNRHNMSRYGYGGEVRPFTQKIICGECGCIYGRKAHSGREAETYWQCNTRCYNGPKSCRGVNIRESVINRVFVEAWNTVVANQESLSKRWEEMERTGTELEAVRARQMQSLVKNGPIRRIIPEMVLTVLESITIKDNATFEIRFLDGTAFSIQF

SEQ ID NO: 10472 - protein, 505 aa, Unknown
  Description of Unknown: Integrase B10473 sequence
  cd00338,PF13408,IPR011109,IPR038109,PF07508, Coil,PS51736,IPR036162,IPR006119,PTHR30461, G3DSA:3.40.50.1390,PTHR30461:SF3,PS51737,IPR025827,PF00239, SM00857,G3DSA:1.10.10.2600,SSF53041
MNNTDLQTGVIYARYSSDKQRDESIEGQIRECTEYAQREGILITKIYTDRALSARTDNRPEFLQMIRDSSNQTFNYVIVYQLDRFSRSREDSAKYKGILRRNGVRVLSAKEHITNEPAGIILESMLEGMAEYYSVELSQKVKRGMTENALKGKMNGSAVPLGYDLTESHHLAVNAHEAKAVRLIYSLYLKQYSLAKIADILHSKGYTTKRGGKISYSVIRNILSNEKYIGVYQWGDIRIENSIPPIIARDVFDEVQRILPTRIKNKGRRSEMYNLCGRLVCGQCGGHYMGSTATSRNGEKHHYYVCTNRRKYHTCSAPNIRRDELEDLVINRTLEILKQPQIIARIVDLVMSGYNHTTQEAKTAIQGIHGKIKAIDTELNNCMTAIKQGFINERLKAEIETLEKERQDLLEQKANHESVISPIKFTAEHIEYFLERMANENPTTKAGRSRILDTFIKNVTIHSDRVEIVFNYKSELPEFSEQSASGSHFSILVGPPGIEPGTDRL

SEQ ID NO: 10473 - protein, 505 aa, Unknown
  Description of Unknown: Integrase B10474 sequence
  cd00338,PF13408,IPR011109,IPR038109,PF07508, Coil,PS51736,IPR036162,PTHR30461,G3DSA:3.40.50.1390, IPR006119,PTHR30461:SF3,IPR025827,PS51737,PF00239, SM00857,G3DSA:1.10.10.2600,SSF53041
MSRSDLNLKTAVIYARYSSDKQTEQSIEGQLYDCYNYAKQHGITVVREYIDRAMTGKNDDRPAFQQMLHDSAQHKWDSVLVWKLDRFARNTIDSAVNRQILAKNGVKLLSVMESFGDDASGQMMTHIIEAINEYYSADLREKTIRGMRQSAMKAQTTGHIPLGYKVVDKKLVIDDETRIIPETVFRMYAEGERLTDIAEHLNAQGYRNRRGRPFTPNSFYNMLANEKYIGIYKYDDIVIEGGIPQMIPNEVFEAVREKLITNRKRAAKNTAKADYYLSGKLYCGHCGEPMSGLSGTGRNGVKHYYYRCNGVQKKSGCHKKLEKKYLIEDEVCRAARSAFEQMDKAETAETIYQMYLQTVRNEYAPAELEKELTECTKQAENVVNAIAQTGGNQLLYDKVRELEERKEQLGSALRLSQAMTDNVPSVEQITVFIDDILATDINTTEGKKAIADIMISKVYVYDDKLTVIFKDKDGKSVDIPLSAVSDSSSADCAPSALGTLEYQRT

SEQ ID NO: 10474 - protein, 505 aa, Unknown
  Description of Unknown: Integrase B10475 sequence
  PF13408,IPR011109,PF07508,Coil,PS51736, G3DSA:3.40.50.1390,IPR006119,PTHR30461,IPR036162,PTHR30461:SF3, IPR025827,PS51737,PF00239,SM00857,cd03768, SSF53041
MIAIYARKSVFREDSISIESQIEHCQYEAKGEESIVYSDNGFSGKNTDRPEYQRMIEDIKSKKINKVIVYKLDRISRSILDFSRMMDLFQKMNVAFVSATEHFDTSSPMGRAMLNICIVFAQLERETIQQRVADAYASRSKKGFYMGGKIPYGYIKVPIIINGVKTSMYEQQPEEAEVIRFIYELYSKPSVTLGDVLRELTKRGLNTKRDGYTWQTSRISEVMRNPIYTYANRDTYNFFKTQGCNIINPIDDFTGETSLYLFQGENHNRKTWDLSNHNIVVAPHQPIIDSTTWLICRKKLLANHQIKTCKAKNSFLAGKVKCGHCGYAFVVRISQRRRSEDVRYFVDSGYSFMHCCPVKLPSLKANEFEADIVEHIKNKLDSLTIKRCEKTTLVDSRIDSLNLQREKISTEIENIVNTLAATSNQVAISYIEKKIADLDSQKRKIESEIQTIQSEQETKQLNQSRISNAVSKWSELSFDDKKAVIDLLIDKILVFQDHIEIVWRV

SEQ ID NO: 10475 - protein, 505 aa, Unknown
  Description of Unknown: Integrase B10476 sequence
  cd00338,IPR011109,IPR038109,PF07508,Coil, PS51736,G3DSA:3.40.50.1390,IPR006119,PTHR30461,IPR036162, PS51737,PF00239,SM00857,G3DSA:1.10.10.2600,SSF53041
MNKVILFSRVSTLGQDLTQQNDELYAEAKRNGYEDIVLIEQKESAIKLDEDERIGIQKLKDTIENDDIDCVIIYEISRLARRPTVLYSVRDYLIEHGVNLICMKPYMRLLDPDGKMSQTASILFSLFGALSESEMMIKKERMMRGRIAKREKGKYIGGNVLFGYSWDEETDKLYINENERPTVIEIFERYTQNESIRSIAKDLMDRGQLRYDDYATACVMLRRMIRRSEYAGIKQETYDYPAIISQELYYKVRARAESKNKYKTRVSEIYYLQGIIHLKRNGMLMSPAKHAVQYRAWDEKTNSGTMINMSYIDSLAIYFTKLYKQRASGPERIKMIDSILKQMMFNNQRQQNCIIEHQEVEATIERINERVVKGKMSEEQGDRLIEEQQDKLRELDDMMIKCSENTKQYESQLDALKANTIEDIDEMNDEQKQRIIRECIKSIYVDIDGVTNHGKIIEINMIDGIKHTIHMTKKGNDFITNIVLKDKEKPLDDLQITIRFIRKKK

SEQ ID NO: 10476 - protein, 505 aa, Unknown
  Description of Unknown: Integrase B10477 sequence
  cd00338,PF13408,IPR011109,IPR038109, PF07508,Coil,PS51736,IPR036162, PTHR30461,IPR006119,G3DSA:3.40.50.1390,PS51737, IPR025827,PF00239,SM00857,G3DSA:1.10.10.2600,SSF53041
MKRAVFYGRYSSDRQTEQSIEGQRRVCEEFAKAEGIRIVAEYIDRATSGTSTDHRDQFQQMISDSKNGCWEYVLVYKLDRFARNRYDSAVYKQKLKRCGVKVLSATERITDSPEGILIEGLLESMDEYFSRELSRKCKRGIRETIIKGNTFTRAPYGYHKTEKRLVVDEVEANNVRQIFTQYVSGATLQSIADKLNAAGHRTRQGNLFRRYSVSDILHNPKYTGTYYVTDIAEPETCPQIVPQSLYDAAQERLKHSAHNARTNRTGHVFALTGLLQCGICGRKVVGTSVQRKYFYYTCIAKSCETLPHDHNLTISSEKVESTVIAALADYFTPEHVTDFAECLYRMYLAEDSPKPDRSKQIQALEKQIQGAVSALIACPQSEALQARLTDLEQQKQQLEQAPPEPPKLTQQDFIKFFCWITKALDRADDRKKFFNAVIHSVTLYRDHVVIAINLTNDDVDPPERVILEKSFSDTVVKSSLYPTISKIKLAPPLLLLYVPLPAGIF

SEQ ID NO: 10477 - protein, 505 aa, Unknown
  Description of Unknown: Integrase B10478 sequence
  cd00338,PF13408,IPR011109,IPR038109,PF07508, Coil,PS51736,IPR036162,IPR006119,G3DSA:3.40.50.1390, PTHR30461,PTHR30461:SF3,PS51737,IPR025827,PF00239, SM00857,G3DSA:1.10.10.2600,SSF53041
MSRNAVIYARFSSDKQREESIDGQIRECRAFAEANEITIINTYIDRAMSARTDQRPSFLQMVKDSAKHLFDYVIVYQLDRFSRSRYDSAIYKHRLKKNGVKVLSAKENIKDDPSGILLESVIEGMAEYYSAELSQKVKRGMTENLLEGKWIGGIVPFGYELTPENKLAVNPATGHLVPEIYKKYQSGVRTTDILSKLNSLGIETQRGCKFTRNSLNRILKNQIYTGTFNWAGTTYPDYAPALITQEQYAAMQNLFESRKRKNNTARRVSPQYALTGKIYCGTCGLPMTGYCGKSHTGTTYYYYQCSSKNNKSEKAQRSRIKCDAKNINRDKLEKLVLDTTISILKDKTALKCIAEQCMAIQEAEIAHKPAEQLRLESQIKDIEKRLKNSVKAVENGLISQTITNNIETYEKQLTELKAELDGIKLETHIIPITEEAVIYYLNQLIERANKKDGYSLDTFDDFIRRVVVTGKRVDIYYNYTAVPHVLENPAVKMLRGSSEDCLVTR

SEQ ID NO: 10478 - protein, 505 aa, Unknown
  Description of Unknown: Integrase B10479 sequence
  cd00338,PF13408,IPR011109,IPR038109,PF07508, Coil,PS51736,IPR036162,IPR006119,PTHR30461, G3DSA:3.40.50.1390,PTHR30461:SF3,PS51737,IPR025827,PF00239, SM00857,G3DSA:1.10.10.2600,SSF53041
SHSQREESIEGQLRECHEFALKNGFTVINEYCDRAISGKTDNRPSFQRLIKDSEKGHFQAVIMYTLDRFARNRYDSAIYKAKLKKNGVRVFYAKQPMPDTPEGIILESVLEGYAEYYSENLSRNIKRGLKENALQCIATGGAGVALGYTVGEDRKYVIDPVGAKIVQEVFQMYADGMSATQIINYCNEKGYKTSRGNSFNKNSLRTMLKNEKYIGTYKFMDVVVPNGVPAIVDKDLFEKVQAMLSHNAKARAKNKAKEDYLLTTKLFCGHCESVMVGESGTSKSGKVHHYYKCIDRKRKHQCTKKVEKKDWIEELVVRFTVKYVLTDENIDLIATRAMEMFEKESSDKTYLIGLQEELKDIKKKIKNLMTAIEQGIITSTTKERLEELESEKNHIEGQIAKEEMKKPLLTKERIMFWLLSFKSGDINDIDYRRRVIDTLVNSVYVYDDGDKGRRIVFTFNISGQNTATISCSDIACSAPPKGSNPNTLFFVKHCFGFVLIIEEVS

SEQ ID NO: 10479 - protein, 505 aa, Unknown; identical to SEQ ID NO: 10390
  Description of Unknown: Integrase B10480 sequence
  cd00338,IPR011109,IPR038109,PF07508,PS51736, IPR036162,IPR006119,G3DSA:3.40.50.1390,PTHR30461,PTHR30461:SF3, PS51737,PF00239,SM00857,G3DSA:1.10.10.2600,SSF53041

SEQ ID NO: 10480 - protein, 505 aa, Unknown
  Description of Unknown: Integrase B10481 sequence
  cd00338,IPR011109,IPR038109,PF07508,PS51736,IPR036162,IPR006119, G3DSA:3.40.50.1390,PTHR30461,PTHR30461:SF3,PS51737,PF00239, SM00857,G3DSA:1.10.10.2600,SSF53041
MRQPTRTRAAIYVRMSTENQNYSTGHQRAKIHEYAAIHGIEIVREYMDEGKSGLDIRRRPGLIELIKDVQSPGVDFQLIIVYDVSRWGRFQDVDEAAYHEHTCRRAGIKVVYSGEQFSDDGTPLGALMKSIKRTMAAEYSRELSAKTFSAQCRFTQIGYKQGGHAGYGLRRLAVTKDGTPRRLLEYGEAKGAVTDRVVLVLGPDHEVALVRDVYRLYLEDRLSEPAIARRLNGAGVPSEFGRPWTHSMVNSLLTNPKYCGTLVFNRRSCKLSSRRTRNPAENWVLNEGAISPVVPLALFEQAQRERARRLRRYEPDELLSLLRTCYEMHGKVNARIIAADPAMPDPQLLVRTFGSLIAAYDAAGLAPSDAHTFVETKRLIAIKQRQLISNVNSLAREAGATVGEGAMSNTLVLNGAVVVQINVAIQRRPAKGFSNWRVRPQPGIDFFITARLSGDTHEIIDFFLIPANWLSNGPLYLKESNMDHFAPLRYQSLAPMFGNPLAERI

SEQ ID NO: 10481 - protein, 499 aa, Unknown
  Description of Unknown: Integrase B10482 sequence
  cd00338,IPR011109,PS00397,PF07508,IPR038109, PS51736,G3DSA:3.40.50.1390,PTHR30461,IPR006119,IPR036162, PTHR30461:SF3,PF00239,SM00857,G3DSA:1.10.10.2600,IPR006118, SSF53041
MKAPMLDTAALYVRASTEHQNYSTNHQEAALREYAAQHDLDVVAVYRDEGRSGLTLDGRNGLLQLLNDVHSGGASYSAVLVYDVSRWGRFQDVDESAYYEYACRRAGISVAYCAEPFENDGSPLATLLKGLKRAMAAEYSRELSGKVFRAQCRLTAAGFKQGGSAGYGLRRASIAVDGRVTRILEMGERKNLPTDRVAFVHGPDQEVAVVRDIFEMCTVKNMPDTRIAETLNARSLSNQHGRPWSAHNVKAVLTNEKYAGTLIFNRSTQRMRSSRRPNDATKWVRVEDAFPSIVTRELFEQTKRERARRGKRWTDDEMLDGLRDILVEHGRVSADLIDTSALPSAKSYAFRFRSLVAAFEAAGVSGPSLSRSTITRYRIRCVTKDSSAELERCALRANAKVEKITTRTYRIAGVTVRLLCTRCRYERSHPCWKVTLRHSPGVDFVIWVRMNEANEEVAQIYLLPVQQFPDHQYLWPSTRTLWNYQQFAYSSISQLFGVS

SEQ ID NO: 10482 - protein, 504 aa, Unknown
  Description of Unknown: Integrase B10483 sequence
  IPR038109,PS00397,IPR006119,PS51737,PF00239,G3DSA:3.40.50.1390 ,PTHR30461,IPR025827,SM00857,G3DSA:1.10.10.2600, SSF53041,IPR011109,PF07508,PS51736,mobidb-lite, IPR006118,cd00338,PF13408,Coil,IPR036162,PTHR30461:SF3
MGRSLRAALYLRVSTTRQAEEGVSLDLQEERCQLWAKARAAQVVDVYRDEGLSGKNTQRPAYQRMLADLRAGKFDVLVALKIDRLSRSVADFCQLVQEAEAHGVDVVAVTQEIDTTTPAGRLLRNLLASFGQFEREMIAERVSETMQSAARKGRYCGGRIPFGYRQKQGGGLEPNPDTRAIVSDLFRLYASGKSATDLVRHLRESGRPLSHTTVIRILRNPIYLGKQQWAGEVLAGSHMPIVDQRLYDRVQPILERNAALAGGQRRTHKEHYEYLLDGLIFCGICGKHLTTWTARGKMGKRYFYYGCTGNRRGGTCKSKPFNAQELDRFMAEKVAERLADPSSLHAAMAAQKKTAAADLKRLAADKRSAEASASNAQQRMNNLMALAADGEWGPGDAADLRAEMAKKRATREDAERRLAVISQEMRAAEARAGVERNAEELGAEIQKVLGSSDHPRRRRLLRSALRKVTVNADSVEVLLYFGTHENSSGKPGPSEFARTSIGGG

SEQ ID NO: 10483 - protein, 504 aa, Unknown
  Description of Unknown: Integrase B10484 sequence
  cd00338,PF13408,IPR011109,IPR038109,PF07508, Coil,IPR036162,IPR006119,G3DSA:3.40.50.1390,PTHR30461, PTHR30461:SF3,PS51737,IPR025827,PF00239,SM00857, G3DSA:1.10.10.2600,SSF53041
MNYYIMYLRKSRADRPDESVEEVVAKHESILQDYAKRRFGHTIPEENIYREVVSGETIADRPYMQKVLQIIEQKECLGVLVADPQRITRGDLLDCGTIVNAFRYSDTHVVTPMHDYDLSLDMDRRYFQDELLRGNDYLEYNKRILRAGREESAKHGHYLASIVPFGYERCWVGKHPTLRINEYEAYYVRKIFEMRREGKGQRAITRWLNEQKVKPRMAKCFCISSVKNMLANDVYIGYVRWNTRNLVKVYEEGKIKKKRVDKGNMIRVKGMHEPIIDEDLFNAVQEVNGKTPKVPAKYGLVNPFAGLLKCGMCGTSMIYWHDSRKGTKSYYLCPKKTSGYCKNTRIDTAVVEREVIKALKSDLKDFEIRVRNGETNRPDHTVVLDQLQAERQDIEKRQINLYDLLESGVYSKEVFKERNERLDQERKQNIKAIEKVKKDSENENHIVDMTRSLKQAIAALEDDTVSIEAKNRFLKGIVDSIYVSKPHRKEYGKPEELEIRVNLK

SEQ ID NO: 10484 - protein, 504 aa, Unknown
  Description of Unknown: Integrase B10485 sequence
  cd00338,PF13408,IPR011109,IPR038109,PF07508, Coil,PS51736,G3DSA:3.40.50.1390,IPR006119,IPR036162, PTHR30461,PTHR30461:SF3,PS51737,IPR025827,PF00239, SM00857,G3DSA:1.10.10.2600,SSF53041
MTKDLQTGVIYARYSSDKQRDESIEGQIRECTEYAQREGILITKIYTDRALSARTDNRPEFLQMIRDSAHQSFNYVIVYQLDRFSRSREDSAKYKGILRCNGVRVLSAKEHITAEPAGIILESMLEGMAEYYSVELSQKVKRGMTENALKGKMNGSAVPLGYDLTESHHLAVNAHEAKAVRLIYDLYIKQHSIAKISDILHSKGYLTKRGRKISPSVIKTILSNEKYIGVYSWGDIRIEDSIPPIISRKVFDEVQTIMPTRIKNKGRRSEMYNLCGKLICGECGGHYAGSTATSRNKEKHHYYVCTNRRKYHTCTAPNIRRDELEDLVINRTLEILNQPSNIARIVDLVMSGYNNTTQEAKVAIQGINNKIKAIDTELNNCMNAIKQGFITERLKDEIENLESERNNLLEQKANHESALIPIKFTADHIEYFLERMAKENPTTKAGRSRILDTFIKSVTIYSDRVEIVFNYKNELPAFNTQCATGSHFKVLVGPPGFEPGTDRL

SEQ ID NO: 10485 - protein, 504 aa, Unknown
  Description of Unknown: Integrase B10486 sequence
  cd00338,Coil,IPR036162,PTHR30461,G3DSA:3.40.50.1390, IPR006119,PF00239,SM00857,SSF53041
MFNNAAALYLRSSKDRSDVSIDAQRRELQNLAATKGLTISAEFADIVVSGKDDNRPAFQRLLAGLKASGRAWSAILMFDTSRLSRNQHVAHVFRHECKKRGVAVHFSMTPDLGGIAGIILPAVLHAMDEVHSFLSREKGLAGMAENVRRGFRAGGRAPTGYVLKHLDTGTLREGKPVTKSKLEPGPAAPEITAYLRARALGTRRSIAARQAGLDTPSGTLIGIERNALTYAGHTVWNVSHNDTGKRRPRAEWVIQRDTHPALITEAEAEGVLERAGEPRGRYRTKAAYLLTGLLITPQGAAWHGDGGKFYRAGKGRRIGAADVDQAVVAKVLADLRAGEFVDALVRDAKRRAVHHEPAEVLEARRAELRKLDERIRRASQAALDAPTPRAFYERLGELEAERAAIGRVLEQLEKQNAERTALSTITARDIEKVLDTLAESLEALDREQLKDFLHELAERVTLDPEDLTCKIHYRIPAQAGKFMASPREFGQIPRLHAWRQLKIA

SEQ ID NO: 10486 - protein, 504 aa, Unknown
  Description of Unknown: Integrase B10487 sequence
  cd00338,IPR011109,IPR038109,PF07508,Coil,PS51736,IPR036162, IPR006119,G3DSA:3.40.50.1390,PTHR30461,PTHR30461:SF3, PS51737,PF00239,SM00857,G3DSA:1.10.10.2600,SSF53041
MRKYILYLRKSQMDKDFEEESVEETLKRHRKRLTEFAKANNLYIAVILEEVVSGESLTSRPKMLECLELVNTGEYAGVICMDIDRLSRGNSMDSGYITQVFQVNNCKIVTPSKTYDLANDSDEQFTDMKFMFSRYEFKTINKRLKSGRESSCAEGKFVGSVAPYGYERYKLDGIKGYSLKINPEQAHVVKMIFDLYTEKGLGYGKIVRELDRLGIQPSPPISFWDRHVIERILKNPVYIGMIRYKFKTVKKTFEDGKMIKKRIRNRENYDLHEGLHEPIITIEQWEKSQEARKNNLPVTSNYELCNPFSRIVKCEKCGRTIVRRTTSSTPVKYRLSCPSRDCDCRSIFLEPFEEAVVKEMTEWLKGYRITIQSNTITVDDNLLFSLQQMEKQMAEAEAQQEKICDLLEKGIYTIEMFSKRSEKLQSEINNLKLSIQKIKKEIAKQEERANNSTDFVPKVQHILDSYGILNPQQKNDLWKEVLHKIEFYAEPKGKDFRIKLYPKI

SEQ ID NO: 10487 - protein, 504 aa, Unknown
  Description of Unknown: Integrase B10488 sequence
  cd00338,PF13408,IPR011109,IPR038109,PF07508, Coil,PS51736,IPR036162,IPR006119,PTHR30461, G3DSA:3.40.50.1390,PTHR30461:SF3,IPR025827,PS51737,PF00239, SM00857,G3DSA:1.10.10.2600,SSF53041
MNSPVSSSNSRAIGYFRVSTVGQSGEHHVSLETQSQRFSSYCQSHDLTPVKTYTDVASGRRDNRKEYQSMLHFLQEKGADFVVVQYLDRFGRDAREILRRIWSLQDIGIEVIATDEDIKEELILLVRAGIATAESRKTSARIKANIGRAVAKGVHVGRVPFGFDGIRKIDPDGRARISEFIINPAEVAVIKRMYELAAEQNHGFKYIADQLNSEGHRSKAGNIFTSHTVRKILSDQAITGNLVYGKRPRPGSHAEDLIIIEGFFPQILTDKQWKRLQASLAIRRGSRAHGRTFTSGYLLSGIARCGYCGGPMVGKLTSHGIYYHRRYFCHRALTSRLMCDHRNSHRADELEKMVLDKLGEFADKKRTLELLAGMETVPGNKDLEPDRLKKDLKACEREFELHLRLLKEGQISEVQFSVANEPVRKRHEGLLQKSRELENSVKQEKGLKSWHRTLADLLTTFPQDFKSLPLAQQKAKLIEVIREIRVYKDRSTEVYLRENPLAMP

SEQ ID NO: 10488 - protein, 504 aa, Unknown
  Description of Unknown: Integrase B10489 sequence
  cd00338,IPR011109,IPR038109,PF07508,Coil, PS51736,IPR036162,IPR006119,G3DSA:3.40.50.1390,PTHR30461, PTHR30461:SF3,PS51737,PF00239,SM00857,G3DSA:1.10.10.2600, SSF53041
MSDKYLMYLRKSRADGEHETVEEVLAKHYKILQDYAAAKLGGAIPEDMIYREVVSGETIQDRPEIKKLLDRIQTEEIKGVLVVDPQRLSRGDLSDCGAIIRAFRYTDTLIVTPPKAYDLGDKFDRKFFEMELMRGNDYLEYVKEIMMRGRIASVNEGNFIGSVAPYGYDKVKVGKAYTLVPNAEADTVRLMYELWTKDGLGTTTIANRLNELHIKPRKSEIWNNASIRDMLRNPVYIGKIRWNCRKTVKHYEGGELISSRPKSQKEDWILVDGKHEPIISEETFNASLARFGSLPKVKAKSGLKNPFAGIMHCSCGRPMIYQPHKKCEARLHCAYQMRCGNRSATYREVEEEVIRALRQLAAELSEQLAEGTQNTHDAHKAIAEALRKELNALETQQERLYEFLEQGIYTSEVFVKRNAALAQRRQELQEAIETAKSYQVSETDYQQKIIALHDAIAMLEDPTASAEEKNNLLRTVIRDITYHRETEVRDKWHPVPFFLDISLI

SEQ ID NO: 10489 - protein, 504 aa, Unknown
  Description of Unknown: Integrase B10490 sequence
  cd00338,IPR011109,IPR038109,PF07508,Coil, PS51736,G3DSA:3.40.50.1390,IPR006119,IPR036162,PTHR30461, PTHR30461:SF3,PS51737,PF00239,SM00857,G3DSA:1.10.10.2600, SSF53041
MSEKYLMYLRKSRADGEHETVEEVLGRHYRILQDYAAAKLSGAIPEELIYREVVSGETIQDRPEMKKLLERIQSDEITGVLVVDPQRLSRGDLSDCGTIIRAFRYTETIVITPQKTYDLADKFDRKFFEMELMRGNDYLEYVKEIMLRGRIASVNEGNFIGSVSPYGYDKVKDGKSYTLIPNDEADTVRLIYELWTVNGLGTTTIANRLNALHIKPRKSELWSSASIRDMLRNPVYIGKIRWNWRKTIKKYEDGELVSSRPKSKKEDWILVDGKHEGIISEEVYNASLARFGSLPKVKAASGLCNPFAGIMHCSCGRPMIYQPQRRSAPRLHCAYQMRCGNRSATYAEVEEEVVRALKSYIVDLQDELKGKSDTSTNAQKAVTAALQKELNSLETQQERLYEFLEQGVYNSEVFVKRNAVIAQRRQELQEAITEAKSTEVSEIDYKQRLIALREAVAILENEAATAEEKNRLLRTVIKDIIYYRETDIRDKWHQVPFSLDISLI

SEQ ID NO: 10490 - protein, 467 aa, Unknown
  Description of Unknown: Integrase B10491 sequence
  cd00338,PF13408,IPR011109,IPR038109,PF07508, PS51736,G3DSA:3.40.50.1390,IPR006119,IPR036162,PTHR30461, PTHR30461:SF3,IPR025827,PS51737,PF00239,SM00857, G3DSA:1.10.10.2600,SSF53041
MERQVTVIPAIGGRRTRGRNKADHNKKTRVAAYCRVSTEQEEQLNSFENQVQYYTKYIEERPDYQMVDIYTDEGISGTNTKKREGFNRMIADCEAGKIDLVITKSISRFARNTQDCLHYSRKLKALGIGIIFEKENISTLDASGELLFTILSSLAQEESRNISENSTWGIRHNFQRGILRINPTTFMGFDMDENKKLVIDPEQAKIVRRIFREFEEGWTQNEIAKHLNDEKVKGVRGKVAWNGATILGMLTNEKYMGDARLQKTFTTDFLTKKRAKNEGQVEQYYVENSHKAIIPKAEWEAVQMELERRKDYCQEIGIKRYGFASLDNPFISKLVCGHCGAVVNKKSWSNRRQHVWACKNKEQRYGGTCHSENVKEETVRRAMVIAWNAVVNDRDKLIGAWEKMQEEGNPLQVLRAKQMIELTAHGPIKWEIPELTRMVMERIVIHDKRHFTVRFLDGKVKEIVVAE

SEQ ID NO: 10491 - protein, 467 aa, Unknown
  Description of Unknown: Integrase B10492 sequence
  cd00338,PF13408,IPR011109,IPR038109,PF07508, PS51736,IPR036162,IPR006119,PTHR30461,G3DSA:3.40.50.1390, PTHR30461:SF3,PS51737,IPR025827,PF00239,SM00857, G3DSA:1.10.10.2600,SSF53041
MERQVTVIPATGIKKARGKNKAAQNEKTRVAAYCRVSTEQEEQLNSFENQVHYYTKYIEERPDYQMVDIYADEGISGTNTKKREGFNRMIADCEAGKIDLVITKSISRFARNTQDCLHYSRKLKALGIGIIFEKENISTLDASGELLFTILSSLAQEESRNISENSTWGIRHNFQRGILRINPTTFMGYDMDENKKLVIDPEQAKIVKRIFREFEEGWTYNEIAKHLNDEKIKGVRGKVAWNGATILGMLTNEKYMGDAILQKTFTTDFLTKKRAKNEGQVEQYYVKNSHKAIIPKAEWEAVQMELERRKDYCQKIGIKRYGFATLENPFISKLVCGHCGAVVNKKSWSNRRQHVWACKNKEQKYGGTCHSENVKEETVRRVMVIAWNAVVKERDKLIGTWEKMQEEGNPLQVLRAKQMIELTAHGPIKWEIPELTRMVMERIVIHDKRHFTVRFLDGTVKEIVVAE

SEQ ID NO: 10492 - protein, 504 aa, Unknown; identical to SEQ ID NO: 10165
  Description of Unknown: Integrase B10493 sequence
  cd00338,PF13408,IPR011109,IPR038109,PF07508, PS51736,G3DSA:3.40.50.1390,IPR006119,IPR036162,PTHR30461, PTHR30461:SF3,PS51737,IPR025827,PF00239,SM00857, G3DSA:1.10.10.2600,SSF53041

SEQ ID NO: 10493 - protein, 504 aa, Unknown
  Description of Unknown: Integrase B10494 sequence
  PS00397,IPR038109,IPR006119,PS51737,PF00239,G3DSA:3.40.50.1390 ,PTHR30461,IPR025827,SM00857,G3DSA:1.10.10.2600, SSF53041,IPR011109,PF07508,PS51736,IPR006118, cd00338,PF13408,Coil,IPR036162,PTHR30461:SF3
MRIAIYCRVSTEDQEREGTSLDSQLKACQDKAQEFGYEISKKYTLKETYSGLVLERPKLDQLRQWARNKEIDAVAAYTLDRLSRDPVHFIILQEELERYGIRLILVTEDVDSSDIGKLVAHIKGFAAKLEAEKIKERTMRGKRERIRNGKLPTGRGILYGYDYDREHGINLANKDLDTVKMIGQWVIHEGISLNEACRRLMERHIPAPKGGRRWSRGTVGRIMRNPTYAGKSYAGKTRTEGKKRIRCSEAEYIPIADAVNRSVFSWEEWELIQRQLNRNRELSPRNQKLKYLLSGRLFCTSCGRKYYGVPMHGKPYYRCSGRVKLLSDKVCTSRSINASKLDEAVWAEVAKVLANPSTILAGLQQSESVNEEAFWGEELDRMAKRLKALNKGQEQLLQWALKGFPEDMVVKENEKINRERNELESAIQETKKKLGRAKENHANFEHVEDFCQIASQNLADFGYAEKKLALETLRIRVLVDGNDPPRLHGILPVPSEVYAVSQPL

SEQ ID NO: 10494 - protein, 504 aa, Unknown
  Description of Unknown: Integrase B10495 sequence
  cd00338,PF13408,IPR011109,IPR038109,PF07508, Coil,PS51736,G3DSA:3.40.50.1390,IPR036162,PTHR30461, IPR006119,IPR025827,PS51737,PF00239,SM00857, G3DSA:1.10.10.2600,SSF53041
MNTYALYLRKSRADLDAEARGEGETLAKHRAALTDYARRRGLFIAREYAEIISGDSIAARPQMQALLADVKAGMYTGVLVNDIDRLGRGDSIDQEIIKLTFAASHTLIITPSRDIDPANPTDDDMLDFSMFMARFEYKKISQRLREGRTRSVAAGHWVAGNPPYGYRLEKSQTGTTLAIDEKTAPIVRLIFEWYAKTEAGYQAIASRLNAMGIQFTPGHAPRLASVRNILKNPVYVGRLVWGRRSMVSVIEDGRRVKRQIKSPSQLIVEAAFPALINAETWQAVQNRINDQRHKAPINTNAVMQNPLSGLIVCGECGHIMVRTNSRGRRPLLTCTTPDCPTSATYLEIVENALLEILEGWCADYIQPEAIEKRDDHADEIAALRRQIATARAQITRAQELVETGIYSPSDYMSRRMALDAQISAAEAEADKLSSPSPEAARAAILPRLRTVLDAYRHAPTAADKNALLRTLLDHVTYHKIAAARRSADKNPRRLLSLDVFPRLY

SEQ ID NO: 10495 - protein, 504 aa, Unknown
  Description of Unknown: Integrase B10496 sequence
  cd00338,IPR011109,IPR038109,PF07508,Coil, PS51736,G3DSA:3.40.50.1390,IPR006119,PTHR30461,IPR036162, PTHR30461:SF3,PS51737,PF00239,SM00857,G3DSA:1.10.10.2600, SSF53041
MCEKYLVYLRKSRADGEHETVEEVLAKHYKILQDYAAAKLGGAIPEGMIYREVVSGETIQDRPEIKKLLDRIQTEEIKGVLVVDPQRLSRGDLSDCGAIIRAFRYTDTLIVTPPKTYDLGDKFDRKFFEMELMRGNDYLEYVKEIMMRGRIASVNEGNFIGSVAPYGYDKVKVGKAYTLVPNSEADTVRLMYELWTKDGLGTTTIANRLNELHIKPRKSEIWNNASIRDMLRNPVYIGKIRWNCRKTVKHYEGGELISSRPKADKEDWILVDGKHEPIISEETFNASLARFGSLPKVKAKSGLKNPFAGIMHCSCGRPMIYQPHKKCEARLHCAYQMRCGNRSATYKEVEEEVIRALRQLAAELSEQLAGGAQNAPDAHKAIAEALRKELNALETQQERLYEFLEQGIYTSEVFVKRNAALAQRRQELQEAIETAKSYQVSETDYQQKIIALHDAIAMLEDPTASAEEKNNLLRTVIRDITYHRETEVRDKWHPVPFFLDISLI

SEQ ID NO: 10496 - protein, 504 aa, Unknown
  Description of Unknown: Integrase B10497 sequence
  cd00338,IPR011109,IPR038109,PF07508,Coil, PS51736,G3DSA:3.40.50.1390,IPR036162,IPR006119,PTHR30461, PS51737,PF00239,SM00857,G3DSA:1.10.10.2600,SSF53041
MTYAIYLRKSRKDDETGYADTLSRHEKMLMDLANRIGIEIHEQDIYREIVSGESIEARPQMQRLLKAVEMRMYTAVLCVELERLSRGNGEDQARILKAFQFSNTKIITLNKTYDLASDDEFDEEFFEFGLFMSRREYKMIKRRLLRGRLQSQQEGYFTGSTLPFGYGKMKNPEGKGYILVPNEQTPILQMIFRRYAEGELLAEIVHDLNATGVKTASSVNARWSTNRVRDILRNRVYIGEININKYAKNRRMEDGRIIETKRRNPDMQTVPGKHEPIIDMETWNKVQARFARFEPRTNIDRSLKNPLASIMRCAECGKMMARRTYTHKGVSIPIIVCQSNRCITRQSNLEMVENMVIETLKKELERQQTILASYGNEKQDNSDDKTLEFLQAEIAKKDKMMERVDELYELGDYTRTKYLERSQKLQAQKAELMKQLEEVEKRISERDNNRKNAVPILTKVLDEYHTLDVKGKNDLLKMIIETITYRKHESGSDIEPELNFKLLI

SEQ ID NO: 10497 - protein, 504 aa, Unknown
  Description of Unknown: Integrase B10498 sequence
  cd00338,PF13408,IPR011109,IPR038109, PF07508,PS51736,G3DSA:3.40.50.1390,IPR006119, IPR036162,PTHR30461,PS51737,IPR025827, PF00239,SM00857,G3DSA:1.10.10.2600,SSF53041
MSLYAIYLRKSRADFEAEARGEGETLERHRTALRALAARRGFTVIKEYAEIVTGDSIAARPQMQALLEDVRRGMYAGVIVNDVDRLGRGDSIDQEIIKLTFVTGHCLIITPTRDIDPAQPTDEDMLDFSMFFARFEYRKISQRLSVGRMRSVQAGNYIAARTPYGYNKVTAGKHITLVPDPETSEIVRMIFNDYASGEIGYSGIASKLNGMGLHTTLGNTWTRASVKAILTNPIYTGRLLWGRTATVSTIEDGKRKKKQVESQPTVVENAYPAIISDEVFNRVQNMFEQSRHASSTKASLALANPLAGLVVCSQCGHVMQRRGGHRSATQDHVLTCMTHGCKTRGTYTSIVMEAVLDTLNDWCARYNPATVTLPEKPNMDNIIAKQSAQIESRLAKARELVETGIYTPSEYLAQKNMLEEQLAALHSKSSPMTMTKEEAIAQAVPNIIRVLDALPHAETMEQKNALLRTVIDHIEYTKLKPAYRGTSPQSLLTLDIFPRIGYNV

SEQ ID NO: 10498 - protein, 503 aa, Unknown
  Description of Unknown: Integrase B10499 sequence
  PF13408,IPR011109,IPR038109,PF07508,Coil, PS51736,G3DSA:3.40.50.1390,IPR036162,IPR006119,PTHR30461, PTHR30461:SF3,PS51737,IPR025827,PF00239,SM00857, cd03768,G3DSA:1.10.10.2600,SSF53041
MDFIYTRQSVDREDSISIESQIELCMREVTSSEHKVFRDKGYSGKNTDRPDFQEMMAQIREGGVRRVIVYRLDRISRSVLDFASLINEFQKYGVEFVSVTERFDTSTPIGKAMLMIVMIFAQLERETIQQRVMDAYRSRSRKGFYMGGRIPYGFSLKDTIIEGIKTSMYVAKPEEIKVVKLIYEMYSDPQVSFMDVIKYLKEQGIKTPDGKNFSRMRLRDLIINPIYVKADSAIFEFFQSQGAEIVNDISQFIGTNGAYLYTGDNAEKRKAISINGHVLVLAPHEGFIESEQWLLCRRKCLNVRQIAKPVKAKNTWLAGKIKCIDCGYALALKSYPRKRKEAARYYMCNSKYVSASCDGVGSIPAIEIEDIVFDEMTRKLAEFDQLAHKEKKGDSLQIAKYKVRMDQIEKEINILIDKLIASSSTTAEYVNERIEALDAEKRDLKEKIAQLSAELYGKQDIDVIKNYMDKWADIDIQDKITVVDALIETIHVGHGNVQIKWKI

SEQ ID NO: 10499 - protein, 503 aa, Unknown
  Description of Unknown: Integrase B10500 sequence
  cd00338,PF13408,IPR011109,IPR038109,PF07508, Coil,PS51736,G3DSA:3.40.50.1390,IPR006119,IPR036162, PTHR30461,PTHR30461:SF3,PS51737,IPR025827,PF00239, SM00857,G3DSA:1.10.10.2600,SSF53041
MQKNTTIENTTKAVIYARYSSDRQREESIEGQLRVCEDYAKRNGMTILHVYADRALSGRSDQRPEFQMMIQAAATQAFDTVLVYKLNRFARNRYDSAKYKHKLKKYGVKVVSAMENIADDPSGILLESVIEGMAEYYSAELAENVMRGMTENALECKWPGGTVPLGYKLDVAHHLIIDDPAAKTVRWIYQMALEGRQPASIIRELNAAGCRTAFGRPFGRTSLNTILKNERYIGTFLWNGIKKPNAIPAIVNPEEWQKVQEITKAKKKCIAKSRGENYLLTGRLFCGQCGGSMVGTAGTSKMQRVYHYYDCGNHLKRKGCTTKAIRADKLEDLICDTTTQLLSNQDAIKAIAKQAISAQKEQGPSLVLQSLQNQKADISRKLQNCIKAIEEGLISQTVTNHIQDYEKQLQTLNDDIRREELMSRIPQLTEKHIEFFFWSISQQIKKADKYKSILLSSLVRSVIIYEDFIEIQYNYKKKLPILQNPVKIKSSYLNNVVIHPGFE

SEQ ID NO: 10500 - protein, 503 aa, Unknown
  Description of Unknown: Integrase B10501 sequence
  cd00338,IPR011109,PF07508,G3DSA:3.40.50.1390,IPR006119, IPR036162,PTHR30461,PS51737,PF00239,SM00857, SSF53041
MTAVPETAPATTPLGLIPAAKYRRISNDPEGRELGISRQDEDLDALAAKHNLIYVASYCDNDISASTRTRKIRKQYQQMLKDAKAGNFKVIAACTTGRLTRKPREVEGQIELAEQHGISYMYDRSPVFDLNTAYGRLVARQFAAWDAGEAEIISERVTRARLQQAKEGRFGGGRRRFGWGMPLLDPKTGEVVIDHDQMVDFEIDEIKKMGAYLLAGKSMRYVIRDLTDRGVETAGGGKWTAIAVRDIMLRPALAGMVKYRGEILEGAKVSWEPIIPVEQWKALRAMLKDPRRKTTTGNTPKWLLSHVAVCGSPVCEGKGNRLRVTGMPSGGNTGRTYPSYRCIEVAHCNMRADKLDAEVEHIIIERLSRPDAINLVEQVDEIDIKFLASEGNALRAHLEEAKGAYKRRLLTLADLIEVTEDVNLKLADIERRLAEATSLDPLAGLIGRPDVAERWNELDLGQKKAIINSLMTITILPSFQRGGRLPGGGYIDQRRLVIDWKRG

SEQ ID NO: 10501 - protein, 503 aa, Unknown; identical to SEQ ID NO: 9666
  Description of Unknown: Integrase B10502 sequence
  PF13408,IPR011109,IPR038109,PF07508,Coil,PS51736,G3DSA:3.40.50. 1390,IPR006119,IPR036162,PTHR30461,IPR025827,PS51737,PF00239, SM00857,cd03768,G3DSA:1.10.10.2600,SSF53041

SEQ ID NO: 10502 - protein, 503 aa, Unknown
  Description of Unknown: Integrase B10503 sequence
  cd00338,IPR011109,IPR038109,PF07508,PS51736, G3DSA:3.40.50.1390,IPR036162,IPR006119,PTHR30461,PTHR30461:SF3, PS51737,PF00239,SM00857,G3DSA:1.10.10.2600,SSF53041
MKYAIYARVSTSLEAQDSSFEAQTQDLHKRVEILYPELELYKVYSDHGISGTKLERPDFQQMIADAIDGQFEVIVTKSISRFARNTKILLNTLDELNKAGVKVIFLEENIDTSQASQKFLLTVLGALAEMESVNTKEHRREAKKIRWASDKIACPNHLPFGYKFEDNKIIINEEEAKTVRFIFNQYLQCKSSLQIVRMLEAKGVPTKHGRPWQMQTVRTMLKNKKYIGVFEEKDPDTGEVHTFECPAIISQEDFDKVQKSFKQGKQGRRLYPLSNKVYNEAGLKVTRTTKVGKPYFLDEPSSGIPMWGYLLNGHGDYKTKWLLSETSLYLVIIHALVDHTKNLGKLHRGTFWEEFINQLQDPEEIEYNKELAAYEAKKSSLIKQKTKLIELFKKDIIDLEEVTRDTKRIDKQLRELAMPIPPETKTINTIHITNFIEAVSQDDVESSVNALTELFKDPEQRKSICDTFIKRIDLLERKHVKITLNDDTELHYFVKRFTPKRPK

SEQ ID NO: 10503 - protein, 503 aa, Unknown
  Description of Unknown: Integrase B10504 sequence
  cd00338,PF13408,IPR011109,IPR038109,PF07508,Coil,PS51736,G3DSA:3 .40.50.1390,IPR036162,IPR006119,PTHR30461,PTHR30461:SF3,PS51737 ,IPR025827,PF00239,SM00857,G3DSA:1.10.10.2600,SSF53041
MKKAVIYARFSCGRQTEQSIEGQLRKCHSYAKEHDLVVVKEYIDRARTARNDNRPYFQKMLSDSEDSEWEYVIVYSIDRFSRDDGDYGADKRILRNNGVTLLSATETIGMNADGTENLGGILTEGLLVALAKYYSRELSQKIRRGQYESLQKGQTLGSSAVYGYFVKDKRYHINEDQAVVVREMFELYSKGKSAIDIAEIFAKRGLRNAQGRPFKPNGIMKMLKNPKYIGTYTFGDKVYEDYHPAIVEKNLFYLVQERIEKNKMNPARLKARDEFILTGKLYCGYCKHTMVGESGTSHTGQSYYYYKCSHRKNRKGCEKKNIKKDVLEDIVIEETLKHILNGSIIDDITTEILALQEEQRDLSELVLLKKQLSEISGYINNLLTAIKRGIITESTQAELQKLEEDKKLIEERIVQEEFKDSQKLTKEKIEFWFEQFLHFDKTDKGAREYLVNYFINRIFLYDDRIVIIYNHDGDNRTDLSNEEIEEALSSDLTHDRPPETKST

SEQ ID NO: 10504 - protein, 503 aa, Unknown
  Description of Unknown: Integrase B10505 sequence
  cd00338,PF13408,IPR011109,IPR038109,PF07508, Coil,PS51736,IPR036162,IPR006119,G3DSA:3.40.50.1390, PTHR30461,PTHR30461:SF3,IPR025827,PS51737,PF00239, SM00857,G3DSA:1.10.10.2600,SSF53041
MRKKKCYIYTRVSTMAQTEGYSLEAQVERLREYAEYRNLQIVGEYCDAGKSGKSIKGRPAFQEMMDDIVNGKDDVSYVLVFKLSRFGRNAADVLKSMQLLNDYDVDLVCVDDAIDSSTQGGRLTLAILSAVAEIERENITVQFNAGRMQKVLEGGWPGGPVPYGYRNIKKQMQIEPTEAELVKKMFEAFLIDGMTTTSVAAYMNEQGYRRVIKGEERPFTYDFVANALENPFYCGKILYGKRSKKKDVMAIQGIHEPIVDEDLWEQVQAKRKALSVKWQKVDEPERISILSGLVKCPLCGKGMIATKNKHVNKNKGGHYKTIHYYSCRNHRKSSGRECSFNRQLNQSKIDSSVFEIFSGITALPEYHEMIANVLGNQPSVELLENELKALRKQLRSCETQKRKLGEELDGLDILDDNYDENYDRIQAEMDEIYDRMDVAESSISKIKKKLSAAKNGIRSIEKVKELVEHMQLLFPKMTCDEQKEMYRLFIERIDVYPEEQDSG

SEQ ID NO: 10505 - protein, 503 aa, Unknown
  Description of Unknown: Integrase B10506 sequence
  cd00338,PF13408,IPR011109,IPR038109,PF07508, Coil,PS51736,IPR036162,IPR006119,G3DSA:3.40.50.1390, PTHR30461,PTHR30461:SF3,IPR025827,PS51737,PF00239, SM00857,G3DSA:1.10.10.2600,SSF53041
LTGVIYARYSEGPRQTDQSIEGQVADCTAYAERNGIRLLDVYADRHISGKSVEGRDEFQRMICDAEAGLFDAVIVWKIDRFGRNRQDIAINKMRLKKAGVRLLYAEESVPDGPEGIILESVLEGLAEYYSADLRQKVLRGIRETAKKGQYCSSTMPIGYKRDEDRHVIVDPIEAEAVREAFRLHIAGATTAEIKQLFNDRGILTSRGKPVSSGTIYRMLRNERYTGHWELAGIPLDVEPIIDEATFLEASKHFKTSRNNAAGRAKVNYLLSCKCFCGYCGAMLNAEAGTGKAGKVYHYYKCGDKKRGKKCELKPIQMERLDDAVIDATVEKMLTGEVIDQLVVRILEIQEHDEAADPAAAYRKRLEANKKKQKNIIAAIEEGAGKGLAKRLAELEAEEEEIDLEIQRLELKAPKLTEGVIRSWLNSFREGDVSDPDFRQKLVDTFIARVDVWNDHAIIYYNMQEKTAASKCSSTARLVDLSSWYSNTSIPLILPPFIIIYIDL

SEQ ID NO: 10506 - protein, 503 aa, Unknown
  Description of Unknown: Integrase B10507 sequence
  PS00397,IPR038109,IPR006119,PS51737,PF00239, cd03768,G3DSA:3.40.50.1390,PTHR30461,IPR025827,SM00857, G3DSA:1.10.10.2600,SSF53041,IPR011109,PF07508,PS51736, IPR006118,PF13408,IPR036162,PTHR30461:SF3
MKAAVYIRVSTPGQAINGESLDMQKERLIEYVKTHKWDLYKTYEDGGFSGKDTNRPAFQEMLKDAEDKKFDILVVYKIDRLSRSILDFHTTMKFLEKQGISFVSVTQQFDTTNSMGRLMLAILVDFANFEREINVDRAIDSYMKRLQDGVNSGTVPYGYRREGKKVVIVPEEAKNIKEIFHLASQNLSMNNIARKTGFTNYHIRSILTNPFYCGYIVRKRDRYERRIKEHEWKWYKGKHKPIISEETWKETAELRKKKIKVIIKKTTGIFSRLIYCPYCEHNLCFHSKYTKDSVILYYQCDRIKMDGKSCSQYIREEPLETVLLNYINNIFELKVPISRREIEVEDKVANVDRKIDKIIKLIEEDYMSFEKGKKQLDKLKEEKAVLLASRIIETDYSEIVKKLKQIKQIYPLATREERSQLWHVLIEKIEAHKDKIVVYWRFRKKQTIQRRKISKLLKNYSPTQGRIPPAATTQANVLMFISDLKRLLTPKKFLNDSWPSKRK

SEQ ID NO: 10507 - protein, 503 aa, Unknown
  Description of Unknown: Integrase B10508 sequence
  cd00338,PF13408,IPR011109,IPR038109,Coil, G3DSA:3.40.50.1390,IPR006119,IPR036162,PTHR30461,PTHR30461:SF3, IPR025827,PS51737,PF00239,SM00857,G3DSA:1.10.10.2600, SSF53041
MANKSPFQPGSLVAAYFRDSGGEAQDLSIPQQEAHFRNWCVQNGLTPGAVFRDAARPGSTVAGRQAFGDMMHHFRNGAQEAGLVIWSYSRFARDFDDAQFYRADIRRRGYLFHSLNDDIPDGPMGRLFEAVIDWKNEQFLEDLSRDVRRGLHDLVLTHGAVPGTPPRGFKREPVQIGSRRDGRPHIANRWVPDPEKIELVRQAFSLRAAGVPLSQINAQTHLYGSINSYTTFFSNRLYIGILEFGDLVIENYCEPIIDQVTWEAVQLRLQQHAAHHNLTDPGSVVHPRRIGSRYLLSGLAFCARCGSPLYGSSTPQRNKSVVNRYACTRAARQRDCDLKPIPRKVLETAVLDTLAVYVLQPEVQAANLQLIQAQQAQAHADLRAQRTDLSNRIGGVRRRLANLTAAIAEAGHTSALLESLNRFEAEVADLRSQIAAIDRQLAAPVPELPAEDLPAQLEALRAVLSDPNPEAAQRLLRGLVNRIVVDRDGSLVRGELIYYSPPP

SEQ ID NO: 10508 - protein, 503 aa, Unknown
  Description of Unknown: Integrase B10509 sequence
  PF13408,IPR011109,PF07508,PS51736,G3DSA:3.40.50.1390, PTHR30461,IPR006119,IPR036162,PTHR30461:SF3,IPR025827, PS51737,PF00239,SM00857,cd03768,SSF53041
MAVAIYSRQSVDKKDSISIETQIDFCKREIFEEEIKIYIDKGFSGKNINRPKFKEMEKDIKAGIIKKVIVYKLDRISRNLLDFANIIDYYKKYDVGFLSCNEKFDTSTPMGNAMLSICMVFAQLERETIQKRVKDNYYARGALGLYMGGRAPYSFIKIETKIAGKKTYTFKNDNEKVISLLEMYELYSTSDMSLGKVSDYLNSKGILAAEGGLWDSGKISRILRNPVYVMADADVYSYYKNKRCIISNDISEFIGVNGCYLYGKRESNERKYTDVTDHTLSIALHEGLVTSSTWLACQYKLDSNKQIKNTGKGKHSWLSGLMKCGKCGYSISVVVARDKRYLSCRGKTNMKTCIGFTKTMFADKIEKVVEKEIFMRIDTIRKNNYPKQKVEDSQSNKFKIQIIEIDRKIDNLILQLEESSKVSAKYMNAKIEKLDSEKNIILANISKNAIVKLNLYPKEELFKKVDNWEGLSLDEKKNICKFLIKKISIMETDIKIDWHKEVL

SEQ ID NO: 10509 - protein, 502 aa, Unknown
  Description of Unknown: Integrase B10510 sequence
  cd00338,PF13408,IPR011109,IPR038109, PF07508,Coil,PS51736,G3DSA:3.40.50.1390, PTHR30461,IPR006119,IPR036162,PTHR30461:SF3, PS51737,IPR025827,PF00239,SM00857,G3DSA:1.10.10.2600,SSF53041
MSETTQIGVIYARYSSDKQRDESIDGQIRECMAYAEREGITITNTYIDRALSAKTDDRPEFRQMILDSNKQAFNYVLVYQLDRFSRNRYDSAIYKAKLRKNGIRVISVKENIKDDPSGIILESVLEGMAEYYSAELSQKVMRGMTDNVLQGKWVGTVVPYGYKLSNNRQLEINEHEANVVRKLFDMYLQRHTLSEMASYMNANGHLTHKGKPFNTNSIKAIISNEKYIGVYSWGSERIENAIPPIIDKNIFKKAQHKRNLRAKKKGNRSELYQLCGKLECGRCGGNYVGSTGTSKTGTLHHYYVCSNRRRKNACQAQNIRRDALDDIVISQTLAILNKPNVVNKIAKYAASSGKNLQSETVAQIDIIDAHIRDLKKSLDNYMIAIANGFISDVLKHRIEATEQELKDQIEIKTNLENTIIPVELTEDHIRFFLLKMAKENPSTLRGRARIIEAFVHHVTIYEDHIEIVFNYKNELSEFHDKTLESSLLNDLVTQKGFEPLAF

SEQ ID NO: 10510 - protein, 502 aa, Unknown
  Description of Unknown: Integrase B10511 sequence
  cd00338,PF13408,IPR011109,IPR038109,PF07508, Coil,PS51736,IPR036162,PTHR30461,G3DSA:3.40.50.1390, IPR006119,PS51737,IPR025827,PF00239,SM00857, G3DSA:1.10.10.2600,SSF53041
MRGVIYARYSPGPRQTEQSIEGQVADCKYYAEENGIDIIEVYADRKVSGKSVVGRDEFQRMLRDAEKGRFDCVIVWKIDRFGRDRQDIALGKLTLKRSGVKLLYAKESVPEGPEGIILESVLEGLAEYYSADLRQKVIRGMKETAKKGQYCGQSLPIGYKVDAERHIIVDEREAAAVREAFRMHIAGGQLRDIVQMFADRGIMGRRGKPVSNAVVYRMLRNNKYLGEFYIQDVKLNVEPIIDQATFLEAAQHFKTSRNNAAGRAKVNYLLSCKMFCGYCGSMINAETGTGKLGKVYRYYKCGDKKRGKACELKPFPKDQLEDAIILATVNDMLTDDMIEKLTVRILEVQEQENADDPVVGLRRRLDSNKKRQRNLLDAIEEGGARGLVSRLAALEEEEEQLVLEIQRAEIKRPRLTHEVVEAWLRSFRVGDVTDDDFRARLVDTFIARVELRNDEALIFYNIREKGPHSRVRVRPEWWSPRDGTRTPKIIVLRDYVVLRIAV

SEQ ID NO: 10511 - protein, 502 aa, Unknown
  Description of Unknown: Integrase B10512 sequence
  cd00338,Coil,PS51736,G3DSA:3.40.50.1390,PTHR30461, IPR006119,IPR036162,PF00239,SM00857,SSF53041
MKAAMYLRSSKDRSDVSLAAQRRELEKLAASRSLTVAKTYEDAVESGSTENRPGFIELVRALKHSSRGWEYLLVYDTSRIARRRYIAQAIKHEAKKRGVTILYARMPSDLDPVAELVLESVFEAMDEAHSIMSRQKGLAGMAENVRRGFRAGGRAPIGYQLQALTTGTIREGSPVMKSKLMPGAGAAMIGEYLTARANGIPRTIAARKTGMPATSLIGVEWNALTYAGHTVWNRHAPNGGGTKMRPRAAWQMTRDTHTALISDAAAETILTRLETSHVGRSVSQAMAAKSDYLLTGLLYTGDGQMWVAHGKYYRLKRRDATPGKTVRADMIESAVLEQVEAGMKSDLFLRNLLIAAQRSRRAADPAAAIDQQIAKLEKEKGRAAELALTSDADTFTAIVEERGRHIESLRREADAVRQDDTVSKQLAAMTVDQLRGLLADQSREKALQTLVDRIVLERDLTCQIELKAVPGRQRRWPGVASPQVRDSWPPELIQRVTLKRIA

SEQ ID NO: 10512 - protein, 502 aa, Unknown
  Description of Unknown: Integrase B10513 sequence
  cd00338,PF13408,IPR011109,IPR038109, PF07508,Coil,PS51736,IPR036162, IPR006119,G3DSA:3.40.50.1390,PTHR30461,IPR025827, PS51737,PF00239,SM00857,G3DSA:1.10.10.2600,SSF53041
MRGVIYARYSPGPHQTEQSIEGQVADCQQYAEEHGIDIIEIYADRHVSGKSVVGRDEFQRMLRDAEKGHFDCALVWKIDRFGRDRQDIAMGKMALKRAGVKLMYARESVPEGPEGIILESVLEGLAEYYSADLRQKVIRGMKETAKKGQYCGQSLPIGYKVDAERHIVVDEREAAVVREAFKLHIAGGQMRDIVQLFADRGIMGRRGKPVSNAVVYRMLRNEKYLGEFYIQDVKLNVEPIIDQATFLEAAQHFKTSRNNAAGRAKVNYLLSCKMFCGYCGSMISAEAGTGKLGKVYRYYKCGDKKRGKKCELKPFPKDHLEDAIILATVNDMLTDEMIEKLTVRILEVQEQENADDPVVGLRRRLDSNKKRQRNLLDAIEEGGARGLVSRLAALEEEEERLVLEIQRAEIKRPRLTHEVVEAWLRSFRVGDVTDDDFRARLVDTFIARVELRNDEALIFYNIREKGPHSRVRVRPEWWSPRNGTRTPKIIVLRDYVVLRIAV

SEQ ID NO: 10513 - protein, 502 aa, Unknown
  Description of Unknown: Integrase B10514 sequence
  cd00338,IPR011109,IPR038109,PF07508,Coil, PS51736,G3DSA:3.40.50.1390,IPR006119,IPR036162,PTHR30461, PS51737,PF00239,SM00857,G3DSA:1.10.10.2600,SSF53041
MKTCIYLRKSRADEELEKKEDVDTLARHRSTLLEVAKKQDLNIVEIKEEVVSGDSIAKRPKMIQLLEEVENNTYDAVLCMDIDRLGRGDMQDQGKIINTFKESNTLIVTPDKIYNLNNDLDEEMTEFKTFFARRELKVITKRMQRGRVKSIEEGNFIGSVAPLGYKFEYDKFGKRHMVIDEETAPAIKLIFDMYLNGEGSFRIMKRLNTLGYKTTAGKDFTECAVRRIVRNQTYCGYVTWFEYRRKGTKTRKNKEGDVLVCKGKHKPIISEEDWNKAQEIRKGNQIPSKKNDRKLINPLAGIIKCSNCNHTMVASYNTVKEGPVLYLRCKNCYEVGSSRLDLVEEEILNTLKVKLKEIKDELNNTEIEDKENKQLEMLQNTLISLDREKTELDKQKNKLHDLLERGIYDVDTFLERQQTLASKKEEIETAIKGTKKLLEAETSKDIDYKELAKNIECAIEDYENTDSIELKNKALKSVIKEILYNKEKKRFAQFTLEVKFKI

SEQ ID NO: 10514 - protein, 502 aa, Unknown
  Description of Unknown: Integrase B10515 sequence
  cd00338,PF13408,IPR011109,IPR038109, PF07508,Coil,PS51736,IPR036162, G3DSA:3.40.50.1390,IPR006119,PTHR30461,IPR025827, PS51737,PF00239,SM00857,G3DSA:1.10.10.2600,SSF53041
MRGVIYARYSPGPHQTEQSIEGQVADCQQYAEEHGIDIIEIYADRHVSGKSVVGRDEFQRMLRDAEKGRFDCVLVWKIDRFGRDRQDIAMGKMALKRAGVKLMYARESVPEGPEGIILESVLEGLAEYYSADLRQKVIRGMKETAKKGQYCGQPLPIGYKVDSQRHVVIDEREAAAVREAFKMHIAGAQLRDIVQLFADRGIMGRRGKPVSNAVVYRMLRNEKYLGEFYIQDVKLNVEPIIDQATFLEAARHFKTSRNNAAGRAKVNYLLSCKMFCGYCGSMISAEAGTGKLGKVYRYYKCGDKKRGKKCELKPFPKDHLEDAIILATVNDMLTDEMIEKLTVRILEVQEQENADDPVAGLRRRLDSNKKRQRNLLDAIEEGGARGLVSRLAALEEEEEQLVLEIQRAEIKRPRLTHEVVEAWLRSFRVGDVTDDDFRARLVDTFIARVELRNDEALIFYNIREKGPHSRVRVRPEWWSPRDGTRTPKIIVLRDYVVLRIAV

SEQ ID NO: 10515 - protein, 502 aa, Unknown
  Description of Unknown: Integrase B10516 sequence
  IPR038109,PS00397,IPR006119,PS51737,PF00239, cd03768,G3DSA:3.40.50.1390,PTHR30461,IPR025827,SM00857, G3DSA:1.10.10.2600,SSF53041,IPR011109,PF07508,PS51736, IPR006118,PF13408,IPR036162,PTHR30461:SF3
LNIAMIFGYCRVSSDEQAAHGISIQAQRDILNGYAAMSQSEIKIFEDAGFSGKNTQRPALLRLLAELPASSVSAVVVWKLDRLSRSLRDTLTMIEDIFQPAGASLVSVTESIDTSTPSGRMMLNLLASFAQLEREQDSDRVVMSHKHLARDCQYLGGHIPLGYRVDENKHFQLDPVRAAIVRRVFDLYLARCGYGAILGYLNSPEIFPLTGKTTIYTKQSLYFLLRNEIYAGVYLRHMGADPRHRITSPETIRIPGGVPAILSADEWQRVCRICDENASGYKTTYRSRTVYPLSGLVRCAVCGRIMSVRHGGKARNGETERYYTCKNKCVRPARLENVQDAVFTALEYFASDESVIRQACEISNSFIDTDEKENQQAVAPLEDRLQEIARQNARIVSFVKNNDNPPASMMQELTDLDKEEKLLRSRIVSLRRPLGRHDAEETVRLLRLAGDIRKLPPDEQKARIQAAVNKVLVTDFTYQVILACHTYSGDEPTHYIEHTIDR

SEQ ID NO: 10516 - protein, 502 aa, Unknown
  Description of Unknown: Integrase B10517 sequence
  cd00338,PF13408,IPR011109,IPR038109,PF07508, Coil,PS51736,G3DSA:3.40.50.1390,IPR006119,IPR036162, PTHR30461,PTHR30461:SF3,PS51737,IPR025827,PF00239, SM00857,G3DSA:1.10.10.2600,SSF53041
MEGYLVYLRKSRSDGEHESVEEVLARHEKLLQEHAVKILGEPVPESCIYREVVSGETIQDRPEVRKLLDRIQQEPVRGVLTIEPQRLSRGDLSDCGTIIRAFRYTDTLIITPTKTYDLADKFDRKFFEMELTRGNDYLEYIKEIMMRGRLASVSEGNFIGSVPPYGYDKVRSGKSYTLAPNDEADTVRLIFRLWTEEKLGTTRLANRLNELGIRPKKGDYWTCASIREMLHNPVYIGKIRWNWRKTVKTIENGEIKKTRPKSSEDTWIMVEGKHPAIIDEKTFDAAQALFGNAPRNKVGKELTNPLAGMLRCECGKAMILQPQQRSAPRLHCRHQTHCGNKSATYEAVEEAVIAQLSELIEHIEVMIRNGEDPASINEDIIRKLSKELNDIETQQDKLYDLLEQGVYTNAVFLRRNQALAERRDKCRSALDQAKAAGSPVPLEKRRLMLMEAIGTLRDNTVSPKEKNELLRLVIREIKYSRQAGSRTKWDTTPFNLEISFNF

SEQ ID NO: 10517 - protein, 502 aa, Unknown
  Description of Unknown: Integrase B10518 sequence
  cd00338,PF13408,IPR011109,IPR038109,PF07508, Coil,PS51736,IPR036162,G3DSA:3.40.50.1390,IPR006119, PTHR30461,PTHR30461:SF3,PS51737,IPR025827,PF00239, SM00857,G3DSA:1.10.10.2600,SSF53041
MTGVIYARYSEGPRQTDQSIEGQVDDCRAYARNKGIDIVEIYADRHVSGKSVDGRNEFKRMMHDADQHKFDCIIVWKVDRFGRSREDIAVNKIRLKKAGVLIMYAKEAVPDGPEGILLESLLEGLAEYYSADLRQKVIRGHSESAKKGKWTAGRLPIGYKKDNDQRIILDPKAADCVRGIFRMCISGHSLKDMQQYLLECGIASRGGTVPSKSVVERILRNEKYTGKFSFRDIEIPAPIIIDRATFDEAQRHFHTGRNNAAGRAVVSYLLSGKCYCAYCGSLLVGECGTGKSGRMYHYYKCANAKRGKKCALKAIPQKKLENLVVEHTIADVLTDDLIDMLVDKIMEIQKKRQDEDPTIILKKRLEDNRKRQEALATAIENGGARVLVQRLATLEAEENELLVQISRNEIKHPVIPAELVRGWLLSFKAGDKDDPEFRKKLLHTFVSNVIVKNDSVTIFYNIEKEPNSRCSNTALLVDYAERYSNIQGPCVATNFIILRVAV

SEQ ID NO: 10518 - protein, 502 aa, Unknown
  Description of Unknown: Integrase B10519 sequence
  cd00338,PF13408,IPR011109,PTHR30461:SF21,PF07508, Coil,IPR038109,G3DSA:3.40.50.1390,IPR036162,IPR006119, PTHR30461,mobidb-lite,IPR025827,PS51737,PF00239, SM00857,G3DSA:1.10.10.2600,SSF53041
MTARVTLCGYERISHDPTGAQAGVERQHRDIEHLAAIFDADVCWHRDNDQSAFLDDVVRDHFEEMLVHVGHPGHPSRGVLAYDLDRLCRRGDDLQRLLKLYKRDETLIFRTSAQEINLSAPDGRLMAEVMVAFAQKESADKQRRQRRLHYYRALTGKPTGPHGFGHLPNRIDLDPIEAPVIRAAGEDVLTGTRSTAQVARDWNQAGYAPRPRRRKLEDGSFTEPKSGKWSSRTVTQLLRAPRIGGYAVYQKEIARDAEGGLVRSTGLPIMDPEKWLKLQAFLLSEERGAGVDTRSASHGYLASGTLRCGGCRNRLNGHGSNRTGVHRYECQAREGRGCGQCSIDGPSLDRMLDAYVEGALSMVDPAQVGIAVEPWGREEEMAEVAARHAEAFAAYTSGSSPLSRQTQVAALEALEERLETLRREQRKHRGREVEAAAMADAGDLAQWRKAFAEGNWTYCRFVVSTLIATVTVSPAPPGKRGKAGAPRWFDPNRVEIVPRKPS

SEQ ID NO: 10519 - protein, 502 aa, Unknown
  Description of Unknown: Integrase B10520 sequence
  cd00338,PF13408,IPR011109,IPR038109,PF07508, Coil,PS51736,IPR036162,PTHR30461,G3DSA:3.40.50.1390, IPR006119,PTHR30461:SF3,PS51737,IPR025827,PF00239, SM00857,G3DSA:1.10.10.2600,SSF53041
LTGVIYARYSEGPRQTDQSIEGQVSDCRAYAERNGIRILDVYADRHISGKSVEGRDEFQRMIHDAEDGRFDAVIVWKIDRFGRNRQDIAINKMRLKKAGVRLLYAEESVPEGPEGIILESVLEGLAEYYSADLRQKVLRGIRETAKKGQYCSSTMPIGYKRDEDRHVVVDPIEAEAVREAFRLHIAGATTAEIKQLFNDRGILTSRGKPVSSGTVYRMLRNDRYTGHWELAGIPLDVEPIIDEATFLEASKHFKTSRNNAAGRAKMNYLLSCKCFCGYCGAMLNAEAGTGKSGQVYHYYKCGDKKRGKKCELRPIPQEHLEDVVIDATVEKMLTNDVIDHLVVRILEIQDNDEAADPAAAYRKRLEANKKKQKNILSAIEEGAGKGLAKRLAELEAEEEEIDLEIQRLELKAPKLTEGVIRSWLNSFREGDVSDPDFRQKLVDTFIARIDVWNDHVIIYFNMQEKAASKCSSTARLVDLSEWYSNTDEPLIIPPFIIIYAAL

SEQ ID NO: 10520 - protein, 502 aa, Unknown
  Description of Unknown: Integrase B10521 sequence
  cd00338,IPR011109,IPR038109,PF07508,Coil, PS51736,G3DSA:3.40.50.1390,IPR006119,IPR036162,PTHR30461, PTHR30461:SF3,PS51737,PF00239,SM00857,G3DSA:1.10.10.2600, SSF53041
MSRAVIYARYSSDNQKETSIEDQLRLCREYAERNSMGVVHEYCDKAKSGTSVKRRTQFNKMLKDAESGRFDVVLVYATNRFARNTYDSFVYRHQLRENGVDIVSITEPMPDGDVGDLVEYLFSWEAAQYSKNLSKVVKRRLDQRAAECKCNGTRIYGYKKGPDGCYAVDEAEAEVVKRIFQEWADGRQAQAIVDGLNDDLIPNVKGGDWVAHSIQNMIRNERYTGVYKWGDVRIEGGMPAIVDQDLWERSKMHKRKKGKHTSYLLTGKVYCTCGRKMRSASGTSKSGRRYTYYRCPDCRSQIASHDLEDAVLGTTAMLLSEPGIVEQVADAVVEESKKEYDADAIEQEIAEVDKKIDRGVAFLLRGHESPTMEAEIAKLEARKSKLQKKLAKAMERVVTADGVAAWLMQYDCSDERFNEAIVEHLAERVTVDGDEIVIAYRTGDACVVEDSGAVTWPDDEPSRDCVLQGCSTESLLAGLQGFQSNTPELRINHGFLLVKFHL

SEQ ID NO: 10521 - protein, 502 aa, Unknown
  Description of Unknown: Integrase B10522 sequence
  cd00338,IPR011109,IPR038109,PF07508,Coil, PS51736,IPR036162,PTHR30461,G3DSA:3.40.50.1390,IPR006119, PS51737,PF00239,SM00857,G3DSA:1.10.10.2600,SSF53041
VNEFQTYKTTRNILESIKNVGMYIRKSRGDAQEDLQKHRMIMEEICKQNNWNFVEYSEIGTGDSIEDRVEIKELLKDVAEGLFDAVIVFDYDRLGRGNGTDQDTIKNTFRNSDTLIIVSNPFQIFDTNDERDEEAMDFKGFMARREYKMITKRMVTGKKIGLKMGRWSNGVAPFGYEYSKELKSLTVHPLESEIYKKLIVSEYINGKSITDIAWDLNKKNIASPRNGKWTPNTISNMLKSEVYLGHIVYNKSEGSRKSNSQTKKPFKQKPKEEWITIKNCHTSLKTQTEHLKIISLLKSKTRHNNHSINALTGLVKCYECGGTLKTQKVNNKVVLRNCTACKDSHGGDTSLIEKTIFDTISHLRDILINTKNSNANETEKEYILNQVKSLERELDVNEAAIEKIENAYEEGEYDINKFRKKVKARQENILELEENLKVKKLELSSFSNVDNEERIQRIDVFFEQIKKCKNNKEMNESYKSIISSIVWKRTIWDEVRVTVNFL

SEQ ID NO: 10522 - protein, 502 aa, Unknown
  Description of Unknown: Integrase B10523 sequence
  cd00338,PTHR30461:SF21,IPR011109,PS51736, IPR036162,PTHR30461,G3DSA:3.40.50.1390,IPR006119, PS51737,PF00239,SM00857,SSF53041
MKTSRTPTGQRTRAVIYVRISQDRTGAHLGVDRQREDCEALAERNDWDVVEVYVDNDVSAYSGKKRPRYQQMLTDLDDGLATVVIAWHTDRLHRNLSELEAYMALSRAKGVVTHTVKTGLLDLASASGQLTAGMLGTIARYESAHKAERVAAARRQKAKAGQWAGGIRPFGWGVETGKFRTKTEKVTDPESGEQSVIETEVPVLDMTKLVPEEGAALEVGSDMILSGGSIRGWVRWLADKGLLSTTGKAIEPPSARDLLLRPRNAGIAVYQGEEIGRGLWEVAVPEPKFRAVVAILTNPDRVTTTGSQPRWLGSLIYRCGRAGCTATARCTKVGGSKMPSYRCQADHGGGRNADRLDRYIVDLLVERLSQPDAVDLLEPAPDGINAAALQLESEQIRRRLTDLAGLFGSGQISMAQFTEGSDTARAQLEGVTAQLARAAVTDPLVGLVGVPDVRVAWDACDLGRQRTVLRSLLEVILHPPRPGRMPDGGYFDYEAIETRWKR

SEQ ID NO: 10523 - protein, 502 aa, Unknown
  Description of Unknown: Integrase B10524 sequence
  IPR011109,PS00397,PF07508,Coil,PS51736, G3DSA:3.40.50.1390,PTHR30461,IPR006119,IPR036162,PS51737, PF00239,SM00857,cd03768,IPR006118,SSF53041
MGIARGYVRVSTRKQEAGVSLDTQRDAMREYAAEHAQTLTLYEDVESGRNVNRPAYLRLLSDLRPGDVVLVWKLDRAGRNAEEALRFRRLIQERGARLISITEPGMQEPLLYGVNAVFHEEFSRALAAKVVPNMERVVTIERRWVTKAPHWYRLDVKPRVGKQRRVFSEGEGRLVPNEDYPGQAQECWEMLLATNSISGTAAAFDLTYTKLARMINSPAYVGDTLWRGILVTGTHPAIVRRETWEAVRTQRLENPFPSPRRTEGPRLLTGYVFRADSQHRMYHRVRNEHTPYARPYYKTADVVPRPPHAAIPADELHEAVITTLKTLDLSPAEVRTLERDARRAVRTDPHAKRRAQLQRQLIELEAERDAATRALLRGAITDAERARARERHDREEVEYRAGLAALPPLPDVEDVQIRSRGRIGIAHLIDELWRQFNGTDAEIARRAMYDIRELLRLYVRRIEVWGAENEGRFGGDQAVWRRDHPPRIHIVWRDSPSNNEES

SEQ ID NO: 10524 - protein, 502 aa, Unknown
  Description of Unknown: Integrase B10525 sequence
  cd00338,PF13408,IPR011109,IPR038109, PF07508,Coil,IPR036162,IPR006119, G3DSA:3.40.50.1390,PTHR30461,PTHR30461:SF3,IPR025827, PS51737,PF00239,SM00857,G3DSA:1.10.10.2600,SSF53041
VSSRPLRVAIWAAVSSRRQAEEDRVSLDDQEKAGLAWAEGLGAEIVNVYRVPGHTRDIWNWNEAEREMPAYRQLREDAQAGKLDLLWAYDMDRLGRDPALGQQVISLVEKSDGPNLPRAEVYVASSPHVVGSKTIGHRYIGAIQSVRAGEDQEMRVRRFKMGMKGRVLRHGLMGTTIPAGYTRVKDGDGKTTGYALDDNAPAVDTVTRLYLDGLPYAEVARRMNESGYRYPGGRPWRYYDIGRIIRNDAYAGRPRLGPLQWEGEPQYPAIWDDATWTAVQRERQRRRVAPQVSHGGNPYSGVLFCARCGGGMNQVISRTGGRVYLYYRCQTHARQTEHGRSCHCNFIARWKVTSALVAYFYSLQTPERVDALLAEYGDSADAERLRGEIAAAEKAAKETEVARYQAGLTHSRGKMHTDIYRQVDDELLAELAAHQGRAAELARHLAALPDLDAWRKQLADVAGTFAEVIEDGLVAPETIAAALQRAGVRCWVEDGEVVKIEP

SEQ ID NO: 10525 - protein, 502 aa, Unknown
  Description of Unknown: Integrase B10526 sequence
  PS00397,IPR038109,IPR006119,PS51737,PF00239, cd03768,G3DSA:3.40.50.1390,PTHR30461,IPR025827,SM00857, G3DSA:1.10.10.2600,SSF53041,IPR011109,PF07508,PS51736, IPR006118,PF13408,Coil,IPR036162,PTHR30461:SF3
MKVAVYVRVSTTEQAQEGYSLDAQIERCRAYALSQGWEISETYIEDGESAKDLNRTKLKQLLSDAQKGLYDVLLVYRLDRLTRSVSDLYKLLETLEKYNVKFKSATELYDTTNAMGKLFITLVAALAEWELNNLRERVRFGMEELVRGGNWHGGPVPYGYLWEESQMSIIQEEAFTLRELRKIYMSGEGFGRTAKILNSRGLKRRNDEPWSENSVWYTLDNPFYAGKIRYGSKKKNGKYASRKKDELVDVIWADTEFPTIFTWEEYEEHTARMKRRQQYGTSRKRDYWFSGVIKCARCGAAMIGRPYRNRLKDGTMGISYINYICSGRSLQKGCDLPLLKQTVAQSLIMTYLEKIKITQEEIAAAAETVEKEQRASINEMDDLRKELKAIGERRRKWQYMLAEDLMSEQDFRARKREEDEKERFINDRIEEIKAEEVGINSEFAQLVYELPSIFDQLSDVAKKEVMQTLFTSIYFECDVKNGREASGKGKTLPFRITEVNFN

SEQ ID NO: 10526 - protein, 501 aa, Unknown
  Description of Unknown: Integrase B10527 sequence
  cd00338,PF13408,IPR011109,IPR038109,PF07508, Coil,PS51736,IPR036162,IPR006119,PTHR30461, G3DSA:3.40.50.1390,PTHR30461:SF3,PS51737,IPR025827,PF00239, SM00857,G3DSA:1.10.10.2600,SSF53041
MNAVIYARYSSANQTEQSIEGQLRDNYAWAKQHGINVIGEYIDRALTGTRDQRPDFQRMIEDASRKQFEMIIVWKLDRFARNRYDSAVYKARLKKHGVKVVSAMENITDSPEGIILEGLLESMAEYYSANLSQNTKRGKRETAAKGLWNGGHAPLGYKLVDRKLVADEKTAPIIRYIFEQYAAGVSKAEIIRALEAKGVRSYYGNPLTYASFNSVLHNQTYIGKCMYNGEVVEGLAEPLIDEKLFQKVQEQIQKRRRAPAAGKAKANYLLSGKAFCGTCGLPMSGTCGRSKGGKQYYYYTCSHRKHPWRCPKNNERKDFAEQFIVEETLRHVLTQSQIEHISKAVVTEYKKEFSDNGIHELKTAIARLDRELEKLVDALIEAPKPAHKRIYDRMESLELQKADLQESLSRLIAASKIPLSEQEVAAWLKQFCKGDITDPAFCSRIIDVFINSVYFFEDRIVIFYNIRDNRSPDFEDVKNAPDTKSEAIRQCSDLNTQASAR

SEQ ID NO: 10527 - protein, 501 aa, Unknown
  Description of Unknown: Integrase B10528 sequence
  cd00338,IPR011109,IPR038109,PF07508,PS51736, G3DSA:3.40.50.1390,IPR006119,PTHR30461,IPR036162,PS51737, PF00239,SM00857,G3DSA:1.10.10.2600,SSF53041
MEGSMAPRQKAKQGNRLPAIGYLRVSDDKSGEEKSTTLQKKLVIAEAEKVGWEIDIWHMETLSAFKRRKVKGPDGKPMWRVIRPEFFAMLEELRDGDVKNVMAYDLDRACRDPRDLEDLIDLAERGGVTAKSVTGSLKLDTDADITMARVLVAFNNKSSRDTARRVRINHEERLAAGKFNGGTRRFGYTPGNKALVPEEAEFLTWAYRALDSGIGTQAIWRELDRRGLTGTSGGKVPAATIARWLRTPHHAGLAGLRGKVVGKSEAPPVIDEDTWRRCQTILSDPARQTGAGRPSSSLLAGIVYCGACGSKAYSRSGHMRDGVRIRNYSCHAKGCCNRPQDAVDVPIIAAIAGLLALDAMRLRPVAKPRPDSSASVIEAEQLRQRLADLADLMTAGDLDPRAYASASREMLVRLDALDARAGKESAHPATDALLRAADPAAAWTSMTTEQRRPVVKELIARIDIPPLGGGQYSRKQNDLKPVWRDWVLDTPRVPPKGDSPK

SEQ ID NO: 10528 - protein, 501 aa, Unknown
  Description of Unknown: Integrase B10529 sequence
  IPR011109,IPR038109,PF07508,Coil, PS51736,IPR036162,IPR006119,PTHR30461, G3DSA:3.40.50.1390,PTHR30461:SF3,PS51737,PF00239, SM00857,cd03768,G3DSA:1.10.10.2600,SSF53041
MMTRIRMGEFSHLLVWKIDRISRNLRDFSDMYDELKKYNVTFISKNEQFDTSTAMGEAMLKIILVFAELERKLTAERVFAVMMSRAEKGLWNGATVPLGFIWDEEIKFPKIYEPEAKIVQYIFDLYEKKRSTTKVAEQLNQENVKTKRDGTWTPRTVGAILTNPFYIGTYRYNTKTQKTRRWKDKSEWIVIEDHHPAIISKEQFERVAKILKDNYRGDYNRQRASKNVHILSSIIKCFKCGSNMNAGNDRARKNGFTPSRYTCYQIHKTYTCNNYASDLTVLPFIINYIGNYMTLQDRITKNHSYRDMESILLRGKYFTDIEHINKDDIKCTYKLLVNNLPVINYKLQENQEDKKTTFKDRYDIYKNEKEKQENALKRLDDLFLYAEDSMPKKDFILKRQEITNKIEEINSKIQELRAEENNFVDNKEFSLNAKASFYLITQLIGNSKNIDVRYLLENVDKSIIKDFLSTILNEVSVDHQKVQYITFKNGLTHHFEYKENQ

SEQ ID NO: 10529 - protein, 501 aa, Unknown
  Description of Unknown: Integrase B10530 sequence
  IPR011109,PF07508,Coil,PS51736,G3DSA:3.40.50.1390, IPR006119,PTHR30461,IPR036162,PTHR30461:SF3,PS51737, PF00239,SM00857,cd03768,SSF53041
MIAIYARQSIDKKDSISIEGQIEKCKYEAEGQDCIIFEDRGYSGKNIDRPNFTKMMEDVNNQNISKIIVYKIDRISRAIVDFGKIMEELDRNNVEFVSYTEKFDTSTPIGRAMLNIIMVFAQLERETIQQRVKDNYYQRGEQGYYLGGRAPFGYNKIETRLNGKKTYTFEENIEQAKIIRELFNEYSSTDASLGKLVAELNNKNIMTYFNNPWNSVSLGRTLRNPIYVKADADVYMYLQSRGAMLNNDPSDFIGENGCTIYAERQSVTTSKFTDLSKSFATLGLHKGIISSSTWLQCQLKLDKNKQVGNSGKGTHSWLSGLMKCGYCGLAIVVANNGKYNYINCGGRKQKFCYDRKKVIHLKDIEDSVQYQLFDYWKSLIDKDFMEVKEQDNISVNLLKIQLVDIENRINKLIGNLELANELTMEYININIKKLDDEKKGIQKQILNSSHKEVQKYSKEELLDIIKNWESYSIEKKKIIATSHIEKVIITDEKIQIKFKQI

SEQ ID NO: 10530 - protein, 501 aa, Unknown; identical to SEQ ID NO: 10214
  Description of Unknown: Integrase B10531 sequence
  IPR038109,IPR006119,PS51737,PF00239,IPR037285 ,G3DSA:3.40.50.1390,PTHR30461,IPR025827,SSF140560 ,SM00857,G3DSA:1.10.10.2600,SSF53041,IPR011109,PF07508 ,PS51736,cd00338,PF13408,Coil,IPR036162,PTHR30461:SF3

SEQ ID NO: 10531 - protein, 501 aa, Unknown
  Description of Unknown: Integrase B10532 sequence
  IPR011109,IPR038109,PF07508,Coil,PS51736, G3DSA:3.40.50.1390,PTHR30461,IPR006119,IPR036162,PTHR30461:SF3, PS51737,PF00239,SM00857,cd03768,G3DSA:1.10.10.2600, SSF53041
MDAIYGRQSIDKKDSISIESQIEFCKYETRGREYRVYTDKGYSGKNTDRPQFQELLQDIKNGEIHRVIVYKLDRISRSILDFASMMQIFEQYGVEFVSSTEKFDTSTPMGRAMLNICVVFAQLERETIQKRVLDSYNARKKKGFYMGGKIPYGFSKEKIVINGIRTSKYIINPEEMEQVITIYEMYSNPTTSMRDIIGYFNENGIKQLRGGKWRATNLLSLVKNPIYVQADLDIYEFFKSQGVEIINPPSEFIGTNGCYLYKGENAEADKSVRLEGHTLVLAPHGGTIPSETWLKVRRKCLNDNKILKPNKAKNTWLSGKLKCKKCGYAILSRGSTKGEKFRYLFCQFSKNDNGCEGIHCMKTSDMEDAILNEIKEKLSNFKTLSREQSAAINPKINELRIKEKDIDNEIESLMEKLVDANDTLLKYINKRIVELDNAKKQILSDLNTLTLSQNNITNSKTIVDHVDKWDKLSFDDKRSVVDALIDKIMVSDESVEINWKI

SEQ ID NO: 10532 - protein, 501 aa, Unknown
  Description of Unknown: Integrase B10533 sequence
  IPR011109,PF07508,Coil,PS51736,IPR036162, IPR006119,G3DSA:3.40.50.1390,PTHR30461,PTHR30461:SF3,PS51737, PF00239,SM00857,cd03768,SSF53041
MKAVYTRQSLDKKDSISIETQVDECTSRAGNATYKIYSDKGYSGKDTKRPAFKEMMEDIKSGVIDQVIVYKLDRISRNVVDFVQMHETFTKYGASFISCKEGFDSSTQLGRLLMMMLISFAQFERESIQQRVKDSYYSRGSKGFYMGGTIPYGFTKEKVIIDGINTSQLIPNEEEATILIELYERYALTDISLGKLSKDLNQRGIKSSNGVSWDSGKISRILRNPLYVRANADVYIYYQHKKCNMNNPIEDYIGTNGCYIYGKREANERKYTNVEDHHVTLAPHEGLVDSDIWLTVQYKLDSNTQIRNSGTGKHTFLTGLLKCSKCGYAVCVTSGYKGSRYLTCRGKTNLKVCDGLGRPIKVLEVEQVIQSELITKVQELRGIATEDAPIKSKEEVNNLKIKLAQVKEQIDNLIEGLANGNAKLLPYLNAKIDELDEQKSEIESNILQKSLEHRKTTNTDAILDRIERWDELDFEEQRDTAKAMIEKILVASDEIDIQWKF

SEQ ID NO: 10533 - protein, 463 aa, Unknown
  Description of Unknown: Integrase B10534 sequence
  cd00338,PF13408,IPR011109,IPR038109, PF07508,PS51736,G3DSA:3.40.50.1390,PTHR30461, IPR006119,IPR036162,PTHR30461:SF3,PS51737, IPR025827,PF00239,SM00857,G3DSA:1.10.10.2600,SSF53041
MARSITVIPARNRQASGHRAASQKKIRVAAYCRVSTDQEDQLHSFEAQVDYYTKYINDHENYEMAGIYADEGISGTNTKKREQFKRMIADCEKGKIDLVITKSISRFARNTQDCLMYSRKLKNLRIGIIFEKENINTLDSTGELLFTILSSLAQDESRNISENCKWGIRTKFKNGEMHLNTFKFLGYDKDENGKLIINREQAKTVRRIYRDFLWGLNPAQIAKELEEEQVSGCLGQTKWYASTVVGILKQEKHMGDALLQKTYTADFLTKRQVRNNGEVAQVYVKDSHKGIIDKETWNAVQEEFDRREKFMQRHGTDRYSYGSECYPFCEKIFCGECGSLFTRHSWKSRGIVQWQCKNHRKDGKVACTNAYVDNADLEKGFVKAFNRLAGEREKHMERWNAMKADGTPIEKIRAVQMMEATENGQLQKYVPEAAQLVLEEITIFGAKKYEFAFLEGSRVKVSV

SEQ ID NO: 10534 - protein, 501 aa, Unknown
  Description of Unknown: Integrase B10535 sequence
  PS00397,IPR038109,IPR006119,PS51737,PF00239, cd03768,G3DSA:3.40.50.1390,PTHR30461,IPR025827,SM00857, G3DSA:1.10.10.2600,SSF53041,IPR011109,PF07508,PS51736, IPR006118,PF13408,Coil,IPR036162,PTHR30461:SF3
MGNLQKLANAYHQDPETRIIKKRVFAYIRVSTLEQAEEGYSLGEQEERLKKYCEAYEYQLVKVYVDPGYSGGNMDRPALKEMISEIERGMADIVLVDKLDRLSRSQFDTLYLIQKVFNENDVAFVSRAEAFDTSTPFGRAMVGILAVFAELERERIKERMKEGKAGRAKEGKYRGGAYYPTGYDYDEETGYLVVNEYDAMQVQEVFKLFNQRTPIYTIMTMMNDRGFKTSIGKGKGKGAWNETRIRKMLENQTYIGKLKHLGEWVEGGHDPIIDMKTFAKAQEILAEREIANEHMKQGRRYKAPLGGLLWCSCCGSRYHYRSGGKNKDGSVRAYYICYSREKSNPDMIKDPNCKNKTYRDHALEKMVFGEVFKLKTDPEYIDKIHTSVDESEKKKLVENNIEYIKKQISNLMDLYSIGSIPMEEIKAKIEPLNAERSKLESTLERIKQNTFKKEKQEVFNMVDEFKTALAENNSFMVNVMLNELIEKIIIDDGDVLIHWNF

SEQ ID NO: 10535 - protein, 501 aa, Unknown
  Description of Unknown: Integrase B10536 sequence
  cd00338,PF13408,IPR011109,IPR038109,PF07508, Coil,PS51736,G3DSA:3.40.50.1390,IPR006119,PTHR30461, IPR036162,PTHR30461:SF3,PS51737,IPR025827,PF00239, SM00857,G3DSA:1.10.10.2600,SSF53041
MRRVDAIYTRQSIEKKDSISIDTQIDLCQRQCDANAVVYRDAGFSGKNTNRPEFTRLMQDVRAGKIKRVFCYRLDRISRSIVDFGLIWQTLEEHHTEFCSVTEQFDTSTPMGRAMVNIIIVFAQLERETIAERVKTSYYARTAAGSWCGGRPPFGFKTIRAEVNGKTAAVLAVEPDEAKIVKELFDLYETGSYSLCQLARLFEDNGKKVSRYGGINSNVVIRNILTNPVCAVADVELYSYYFTQGANIASDIAAFDGSHAALLIGKHKAENRNILRAISDRTLAIAHHKGFVPSAQFIAVQEILSRNKRVKNDVPSQVSWANGLLRCANCGYSVQIYMRKQRNNHRYAKCNGRYQRHTCDMLFRIRPDEIEAKIEQAIQQFLDSMTELAGKPQEDSEEVIQFKILRAEKEKQMNNLIDAIAEGGGVVMRQLSSRLETLETEIKDLTEKISKSQSRRLPAAMTYIPNLDNADMETKRQIARMVVKKAYISVNDVKVETIDLV

SEQ ID NO: 10536 - protein, 501 aa, Unknown
  Description of Unknown: Integrase B10537 sequence
  cd00338,IPR011109,IPR038109,PF07508,Coil, PS51736,IPR036162,IPR006119,PTHR30461,G3DSA:3.40.50.1390, PTHR30461:SF3,PS51737,PF00239,SM00857,G3DSA:1.10.10.2600, SSF53041
MYLIYLRKSRADGEYETVEDVLAKHYRILQDYAVSKLGGTIPEECIYREVVSGETIQDRPEMKKVLDLIQNEDIKGVLVVEPQRLSRGDLSDCGTIIRAFRYTETLIVTPTKTYDLADKFDRKFFEMELMRGNDYLEYIKEIMMRGRIASVNEGNFIGSVPPYGYDKIKDGKSYTLIHNSEADTVRLIFDLWVKEKIGTTTIANRLNELHIKPRKSDIWSAASIRDMLRNPVYIGKIRWNWRKTIKKYEEGQLVSSRPKSKKEDWILVDGKHEAIISEETFNASLARFGNMPKVKSDRSLNNPFAGIMHCSCGRPMIYQPQRASAPRLHCAYQMRCGNRSATFSEVEEEVAKALKKLATDIKDMLEGKSADYIDTQKAVSGILQKELNALETQQERLYEFLEQGIYTSEVFVKRNAALAKRRIELQAAIASAKEEEVSEVDYKQRYIALQEAIAVLEDPASSADEKNRLLRTVIKDITYHRETSIRDKWHPVPFSIEISLI

SEQ ID NO: 10537 - protein, 501 aa, Unknown
  Description of Unknown: Integrase B10538 sequence
  cd00338,PF13408,IPR011109,IPR038109,PF07508, PS51736,G3DSA:3.40.50.1390,IPR006119,IPR036162,PTHR30461, PTHR30461:SF3,PS51737,IPR025827,PF00239,SM00857, G3DSA:1.10.10.2600,SSF53041
LEIQIREGNREQKRKLRVCAYCRVSTDADEQENSLENQIRHYETVIKANPSYEYAGVYSDFAISGFKEKRPGLQKMLADAQKGKIDLILTKSVSRFARNTAIVLEATRKLKELNVGVFFELQNINTLSGEGELMLTILAAFAQAESESGSAGAKMVYQRKYEAGIPVQYLERSFGYMKDERGVYIADESEAVWVRKIYEMAADGYTPAAIKRSLNENGVKTVGGTKWIDSTVFRLIENEIYKGDYIMHKHFVNEERKLVRNRGEVDAWYIEDDHEAIVSPELWQKAQDAIEAKRDYLAEGSVIEDFTEENYPYMNRIFCAKCGHPLYRRIYSNGNRLNWGCSGTKRHGKSFCEGINIPDGVLRKAWHFDGNMYIDEKPSVKGTKEFTYLKESSWKRRHKKKVPESIPENTEEAYPYRKKIFCGLCGSRLVRHVNPKSHKVIWICNGAKRKGVAFCRGTRIPDSVIRGWGEIKKDIYIQRKDDKNGKKRYSYTSKKPSGIGA

SEQ ID NO: 10538 - protein, 501 aa, Unknown
  Description of Unknown: Integrase B10539 sequence
  cd00338,IPR011109,IPR038109,PF07508,Coil, PS51736,IPR036162,PTHR30461,IPR006119,G3DSA:3.40.50.1390, PTHR30461:SF3,PS51737,PF00239,SM00857,G3DSA:1.10.10.2600, SSF53041
MIAAAYARYSSMNQNDESIDAQLKQIYAYAIKNDINIVNEYIDRGRSGSNDEREEFQKMIREAKEKKYDAIIVHKIDRFARNLKDAGHYKSLLEENGIKLISVSEDITGASGDLVFGIMASVADWYLKNMKAEISVKSREIAQKGFFMGGNPPYGYDIERVKVENLAGKKTRGVYKINENEAKIVRIIYDLAAEGNSPAKIAKHLNDKNIRNRKGNKWNYSTLYDLVHNPKYKGTFVWSRGNHRTLHIKRDDAVVVPNAIPAIVTEELWEKAQKSMSKRRINKRRKREYLLRDLLVCDECGSVMSPAGGIKNAQYVCNKIKRQKQNGLNPDHYRGIYANKVEKFVLSYLSNELFKNIDIKKVKDNINKYYSVKKDNKEAELKKLFEKKEEIQERRQRLIKAIEDGTITMEDIKEQMAIKNKELNELNNIIKLKSQTQRFEFSEENVEKMIETTRKILDDGSLEEKQKLLKEIINKIIIKEDNYIKIQLNASISTIQNFNEL

SEQ ID NO: 10539 - protein, 501 aa, Unknown
  Description of Unknown: Integrase B10540 sequence
  cd00338,IPR011109,IPR038109,PF07508,Coil, PS51736,IPR036162,IPR006119,PTHR30461,G3DSA:3.40.50.1390, PS51737,PF00239,SM00857,G3DSA:1.10.10.2600,SSF53041
LDNIEKNASIAVYLRKSREDVDSTDTLAKHRGQLSEYVATNGLTNTTWFEEIGSADSIAKRPVFMELLSQVEENEYEGVLVVHFDRLTRGSQIDNGIIAQTFKRSSTLIMTPARTYDLSDESAELMSEVEGLLSRAEYRSIKRRMQQGKVNATKQGKHVSGILPIPYFRDKNTGIVHIDPDKRKIFDFIVESYLSGMSANRIAIELNLRGISTVRGKTWRNRQVLALLKSDFHRGILTYGKLYRGPDGTMCKQTDPSKIISVPGIHEAIIDEATARRIDRALQDSQKIPTKSRSGIFALSGLMRCKACGATVSFTTDNKPEIPVVFLRKCKAMQQDGIHRCSANKGMKEALLLDILRGNMRDFKTTLFATTEGKNSRIDVGQSPIEMNEEIIVNATDKMERLKSIFVDGIIDRKEFDKRKHSIDVEVLQAKKELTQLKQNSEIVSKEIREQRNDNWTNIDIEGLFENQSDNDERNRIFHKLIERIEFLRVGDETDINVVYK

SEQ ID NO: 10540 - protein, 501 aa, Unknown
  Description of Unknown: Integrase B10541 sequence
  cd00338,PF13408,IPR011109,IPR038109, PF07508,Coil,PS51736,G3DSA:3.40.50.1390, IPR006119,IPR036162,PTHR30461,PS51737, IPR025827,PF00239,SM00857,G3DSA:1.10.10.2600,SSF53041
MKAVIYARFSSSSQREESIEGQVRECRKYAQKLGYEVIRTYEDRAMTGRTDKRPAFQKMIADSAKHAFDAVICWKTDRFARNRYDSALYKRKLKLNGVKVLYAMESIPDGAQGIIMESVMEGFAEYYSANLSENVKRGNLDSALQHKTLGVRLLGLKTASDGTYEIDEETAPVVRRIFAEYDSGKPMADICRDLNNDGFRTSMGNLFNKSSLGRILHNEKYVGVYHFADIREENIIPAIISKDQFERVQSRMKHKAHAPKAKAVRFLLTGKLFCGHCGSAMTGESARSKNKETYYYYTCVQRKAHACNKKRVRKDSIEKLIIEELYRRVHDDDYINEIADLCMEQQADHSELDDLERRKKETDRKLSNMRRAIEEGIITKTTKEAVLELEDQAWQIDQAIAEMRLKQPNLSREEVLELLYALRDGEIEDDRYTEALIDTFLNSVYLYDDGTCVTHMQFTQQEAVTLEYTESVRQASTAVCQCVRERTQFGIVTEIRKGAVA

SEQ ID NO: 10541 - protein, 501 aa, Unknown
  Description of Unknown: Integrase B10542 sequence
  cd00338,PF13408,IPR011109,IPR038109,PF07508, Coil,PS51736,IPR036162,IPR006119,G3DSA:3.40.50.1390, PTHR30461,PTHR30461:SF3,IPR025827,PS51737,PF00239, SM00857,G3DSA:1.10.10.2600,SSF53041
MNAKRAAAYCRYSSDNQREESITAQMRAIEEYCKKKDYVIVKFYADEAKSATTDKRPNFQLMIEESSINIFDVVIVHKYDRFARNRYDSAHYKRKLKVNGARVESVLEQLDNSPESVILESVLEGMAEYYSKNLAREVMKGMHENADKGIHTGGRPPYGLKINPETLMYEIDENCYRAVQIYFEGIRDNISLSEIAKCLNKQGYRTQDGKEFSKNSFFGWARNRKYIGNYVWNVSSSKDAEGRRNGSKKKPIEDQIIKEGIIPQIIDHDLFKEVNSMMELRKHKPGVLKANINYLLTGKVFCGQCESPYNGNSYRNSKSKENTLLSYYKCAGKCKNARIRKNDLEKVVIEQLEEQCFSGKGMKEIVERVNKLYKERKKDYESNEEPIKKEIKEIEKTIDNWIDALGKGIKGLETKIVEAQNKVEALQRELFKIKAIQNHNVLNNDDIYAVLKMKKDSLFSNNEEEKKKVLQEYVNRIIVNPTDNINELDLEITYRVFNGGG

SEQ ID NO: 10542 - protein, 463 aa, Unknown; identical to SEQ ID NO: 9603
  Description of Unknown: Integrase B10543 sequence
  cd00338,PF13408,IPR011109,IPR038109,PF07508, PS51736,G3DSA:3.40.50.1390,IPR006119,IPR036162,PTHR30461, PTHR30461:SF3,IPR025827,PS51737,PF00239,SM00857, G3DSA:1.10.10.2600,SSF53041

SEQ ID NO: 10543 - protein, 500 aa, Unknown
  Description of Unknown: Integrase B10544 sequence
  cd00338,PF13408,IPR011109,IPR038109,PF07508, Coil,PS51736,G3DSA:3.40.50.1390,IPR006119,IPR036162, PTHR30461,IPR025827,PS51737,PF00239,SM00857, G3DSA:1.10.10.2600,SSF53041
MSEKSAVIYARYSSHNQREESIEGQIRECKRYAQINDVTIIAEYADRAISGKSDNRAEFQRMIRDAEKGRFGLVIVYKLDRFARNRYDSAMYKARLKKCGVKVVSATEQLSDSPEGIILEAMLEGMAEYYSANLSQNIKRGMMENALKGLATGGGRCLGYYTGPDKKYYIDEAGASTVRMIYEMYDQGHTYAHIVETLNNQGRKTYKGAPFNKNSLGKILHNRRYIGDYVWGDIVQEGGMPQIIDRDLWERVQRKLNRKQNASARARGEYDYILSGKLYCGRCGKPMIGDSGTSRNGAKHYYYTCSTKKHGGTCPKKSVRAAAIEDEVIRTTIQTILTDEMLEHIADKVMEYQARDTDSAILIEQYKNQLKETETAIAGILRAVEAGMFSPSMKDRMDELEGQKAELNADIEREQINQQRVSRDEVLFFLSQFKGGDPDDPDYKQRLVDTFVNSVWLYDDKLVLTYNYSGDDNKITLDLVDKALSGAASGCSDNACQAPP

SEQ ID NO: 10544 - protein, 500 aa, Unknown
  Description of Unknown: Integrase B10545 sequence
  cd00338,IPR011109,IPR038109,PF07508,Coil, PS51736,G3DSA:3.40.50.1390,PTHR30461,IPR036162,IPR006119, PS51737,PF00239,SM00857,G3DSA:1.10.10.2600,SSF53041
MAYAMYLRKSRADEELGYENTLERHEEMLRNLAAQTGIHVDESHIYREIVSGESIEARPQMQKLLKAVEMGLYTGVLCIELERLSRGDGADQQRILKAFQFSDTKIITLTKTYGLAGDDSFDEEFFEFGLFMSRREYKMIKKRLYRGRIQAQKEGYFIGSRPPYGYGKKRIGKGYVLVPNENAEVVRYIFRRYAQRETAANILHDLNNMAIPTVTGTKWTAYAIREVIKNQTYIGKINTKTVRCEKSIKDGKVVQRWLNNYEPVTVEGRHEPIVDEELFWKCREVRDSKKTRVKADQTLKNPLASIMFCEVCGKTIRRTHYDYKGERTFYYGCVTSRCETKNTFTHIVYDMVIDELKKELERQQVMLADYDTSPEHDARKDELEMLKAELGKKQMMLERACEAYETGIYDRQTYLERVQKVNAAKVELQARIETLEKDIEESEERHEKAVPILTKAVEEMHTLTPKEQNDLLKMIIDKITYKKTESGAAIEPELEISLKI

SEQ ID NO: 10545 - protein, 500 aa, Unknown
  Description of Unknown: Integrase B10546 sequence
  cd00338,PF13408,IPR011109,IPR038109, PF07508,Coil,PS51736,G3DSA:3.40.50.1390, IPR006119,IPR036162,PTHR30461,PS51737, IPR025827,PF00239,SM00857,G3DSA:1.10.10.2600,SSF53041
MDVVLYMRYSSDRQNEQSIEGQHRVCKQFCDANGYNIVDVYIDRALSAFHDTTKRVEFQRMITDSEKHQWQGIVVYKLDRFARNRYDSAIYKAKLKKNGVRVISATENISDNPEGVLLESVLEGMAEFYSKELSQKITRGMYESAHKCHSIGGHIPLGYKIVDKKLAIDPLTAPIVREAFEMYAEGATVSEICDVFNNKGYKTAKGSEFNKNSFRAMFKNERYIGVYTYKDLRIEGGVPAIVDNDIFETVQKRLKTNAKAPARGKAVVDYVLSAKLFCGHCGKPMNGESGTSHTGKRHHYYACSSRKPFHNCDKKSIQKDYIEYVVAQKVQELLTPETIDYYAECAVKACQDEIANSTLLPSIRNQIKEIDKSINRLIRMVEQGAESHTLTARLNELEKEKKAAEKRLLKEQSTIIELDKEIVVYWLSKFLQGDIEDADFRRHLIDTLVNSVFVYDNPDGTTNLDIACNLTSGKHLKVTLSDVKSNGFGFGVLESTKKKR

SEQ ID NO: 10546 - protein, 500 aa, Unknown
  Description of Unknown: Integrase B10547 sequence
  cd00338,PF13408,IPR011109,IPR038109,PF07508, Coil,PS51736,G3DSA:3.40.50.1390,IPR036162,IPR006119, PTHR30461,PTHR30461:SF3,PS51737,IPR025827,PF00239, SM00857,G3DSA:1.10.10.2600,SSF53041
MRMCGYARVSTDEERQLDSLEHQMEFFSDFAKQNGHHLVNVYTDEGITGRQLKKRDAFNKMLSDSKLGLFDLLVVKDVSRFARNTVDLLTSIRQLKSRGIDVIFVNNSQKVLGESEFIITLLGAVAQEESSNLSKRVKFGKNITSKKGRVPPRIFGYDRIDNFTMEINEREAEVVREIYHLYIDEGLGCRLIAITLAEKQMKTKFGNDWNQRNIRRILENPIYSGHYINHRYTVVDFLEGTTKALPKEQYYHHDRPEWAIITPERFQQAQEILEQRRKQYATEYTHFTGRYSNRHLFSTLIRCKECGRAFSRRVTHYPNSDYIYWRCPTNNQYTAKRCSNNTIVREDDLIETLSTYLREVVSNKESIAQEIARKFKEANAVEGSKPDAQTLEAKKVKLKAKLEKYMEMYANDVITMEALKSKTAEINESINVIDDQLILLEGQRTQERTIESITNEAMTEIERFLSLQSATNMDLRRIIDSIIVDDKKQVKINLKITGNL

SEQ ID NO: 10547 - protein, 500 aa, Unknown
  Description of Unknown: Integrase B10548 sequence
  cd00338,PF13408,IPR011109,IPR038109,PF07508, Coil,PS51736,G3DSA:3.40.50.1390,PTHR30461,IPR006119, IPR036162,PTHR30461:SF3,IPR025827,PS51737,PF00239, SM00857,G3DSA:1.10.10.2600,SSF53041
MNTVIYARYSAGPRQTDQSIEGQLRVCTDFCKQRGLTVIDTYCDRHISGRTDERPEFQRLIADAKRKKFEAVVVYKTDRFARNKYDSAVYKRELKRNGIQIFYAAEAIPDGPEGIILESLMEGLAEYYSAELAQKIKRGMHESALKCQSTGSGRPLGYRVDEQKHFQIDTESAQTVQTIFEQYIKGESNAAICELLNSRGLRTAQGKPFNKNSINRIIKNRKYIGEYRYHDIVVEGGMPAIISKDTFNLAQAEMERRRTRKAPKSPKAEYLLAGRLFCGHCKGPMQGVSGTGKSGNKWYYYYCGNTRGKNKTCDKKQVSLDRLERAVVDFTVRYILQEEVLEELARKVHAAQERQNDTASEIAFYEKKLADNKKSIANVLRAIESGAATQTLPARLQELENEQAVILGELSFLKGKCLAFTEDQILFALTKHLEPYPGESEQDYRRRIISDFVSEVYLYDDRLLIYFNISSEDGKLKSADLSNIEGGEFDEGLVSSMQKP

SEQ ID NO: 10548 - protein, 500 aa, Unknown
  Description of Unknown: Integrase B10549 sequence
  cd00338,PF13408,IPR011109,IPR038109,PF07508, Coil,PS51736,IPR036162,IPR006119,PTHR30461, G3DSA:3.40.50.1390,PTHR30461:SF3,PS51737,IPR025827,PF00239, SM00857,G3DSA:1.10.10.2600,SSF53041
MKKAIIYARYSSERQTEQSIEGQLRVCQEFAEREGITITGEYIDRAISGTTDHRPQFQRMMSDCQHLDIDYVIVYKLDRFARNRYDSAIYKAKLKQHGIRLLSAMEKITDSPEGIIMEGLLEAMNEYYSAELSQKIRRGMRENVIKGKTTGGNIALGYRIGADKCFEIVEEQAAIVRKIFQMYAEGSTFAEIITELNSTGLKTSRGNPYNKSSISRILSNERYIGRYTIKGIDEVAECPRIVSDELFSIVQKKLGESQTKHRHRKNHTYLLSGVLYCGECGKRMTGTGGTSRYGKRYYYYHCQNKHFGRIDADTLEETVLGTIDEYLQSDKTASIAKTAFDEYKKQILDTSELNAVQKELKQIEKKLNNAVNAILSGLNSETIQNTITELEAQKNDLLARENMLRQRAPEFTPEMFMAAVKNLAETPSATLVNTVISRIEYFHDYIVVYFRLFDVDGSDPDKIKIPFNSKDKCNIASPPPTTPLYAKGHIIVILPLSITV

SEQ ID NO: 10549 - protein, 500 aa, Unknown; identical to SEQ ID NO: 10468
  Description of Unknown: Integrase B10550 sequence
  cd00338,IPR011109,PS00397,IPR038109,PF07508, PS51736,G3DSA:3.40.50.1390,PTHR30461,IPR006119,IPR036162, PTHR30461:SF3,PS51737,PF00239,SM00857,G3DSA:1.10.10.2600, IPR006118,SSF53041

SEQ ID NO: 10550 - protein, 500 aa, Unknown
  Description of Unknown: Integrase B10551 sequence
  cd00338,PF13408,IPR011109,IPR038109,PF07508, Coil,PS51736,IPR036162,G3DSA:3.40.50.1390,PTHR30461, IPR006119,PTHR30461:SF3,IPR025827,PS51737,PF00239, SM00857,G3DSA:1.10.10.2600,SSF53041
MVKAVIYARYSSHNQREESIEGQLRKCHDYAEMNGFTIIEEYCDRAISGKTDNRAEFQRMIKDSEKGHFQAIIMYTLDRFARNRYDSAMYKAKLRKNGVRLYYTEQSITDEPEGIILESVLEGMAEYYSENLSRGVKRGMKENALKCMITGGYMPLGYRKTADKKFEIDPATAPIVQEIFDLYINGKSQRQIVDILNEKGYRTVKGMPFRLGSISGILVNTKYIGLYSFGDVVIENGIPAIIDKDVFDKAQEMLKKNKRESGRMKAPMNYLLTGKLFCGHCGGSMVGESGTSGSGTIYNYYKCLSRKRHKDCTKQTEKKDWIEKLVVEETVKRILQPEVIDEIACKVAELAENEFNNKSRLTTLQNDLKSVQTAIRNLLRLVEQGIDTDDVGERLLDLNSQKADLQKQIAKEENKKPMLTKDRIAFWLTSFLNNGDIESVDYQQRIIDTLVNKVFVFDTDGGGRKIVITYNTSNSMKSTITLSDINKCSDIEGFARRKRR

SEQ ID NO: 10551 - protein, 500 aa, Unknown
  Description of Unknown: Integrase B10552 sequence
  cd00338,PF13408,IPR011109,IPR038109,PF07508, Coil,PS51736,G3DSA:3.40.50.1390,IPR006119,IPR036162, PTHR30461,IPR025827,PS51737,PF00239,SM00857, G3DSA:1.10.10.2600,SSF53041
MKAVIYARFSSSSQREESIEGQVRECRKYAQKLGYEVLRTYEDRAMTGRTDKRPAFQKMIADSAKKQFDAVICWKTDRFARNRYDSALYKRKLKLNGVRVLYAMEAIPDGAQGIIMESVMEGFAEYYSANLSENVKRGNLDSALQHKTLGVRLLGLKTASDGTYEIDEETAPVVRRIFAEYDSGKPMADICRDLNADGYRTSMGNLFNKSSLGRILHNEKYVGVYHFADIREEGIIPAIISRDQFERVQSRMKHKAHAPKAKAVRFLLTGKLFCGHCGSAMTGESARSKNKETYYYYTCVQRKAHACAKKRVRKDAIETLIIEELYKRVHDDEYINEIADLCMEQQADHSELDDLERRKKETDRKLSNMRRAIEEGIITKTTKQAVLELEELAWQIDQAIAEMRLKQPNLSREEVLELLYALRDGEIEDERYTEALIDTFLNSVYLYDDGTCVIHMQFTQQDAVTLEYTESVRQATASVCQCVRERTQFGIVTEIRKGAC

SEQ ID NO: 10552 - protein, 500 aa, Unknown
  Description of Unknown: Integrase B10553 sequence
  cd00338,IPR038109,Coil,IPR036162,IPR006119, G3DSA:3.40.50.1390,PTHR30461,mobidb-lite,PF00239,SM00857, G3DSA:1.10.10.2600,SSF53041
MAEERPPIAYEILPGKRPRKNESSVTTYGALRGLVAIGLYLRLSLAKTTAKAQSEALERQDATEAAKTEGANVTRTYCDPDHSGEKRTLTRPAFDLMVSDLKAGLIKGIAIGDIDRLTRRHGVLELLIEIYEANQELADKGKAERLYWYCYHDEEDERAPVDLRTAEGRREARKRVDAAYEEIQVMKQRQTKRHRQAKKAGRMVGARGFGYETTGEIRASEANTVRLLADAVDKGQTLRPILNGLGPISKAGTPLTHRTVQGILTGGRVAGYRVDKANKTGEWYGIALDENGLPIKGIQEPILEQDQWLRLRKIYREREVATERRQYLGTGTLRCKACRKNYTGNANRTWGSYNYHCPCGSYLNGPDTDRYLKLLVELQLSQNPPGVAAPVPWPKQAELEALEADREATELEMSEDPIGWIRLEKAYVKAAGKLTLERREWLKAHPVPTALPAEALVKRWRTGDPEIMRGVLRDIFSVIWVTKAPGKFNPDWLSPIPPND

SEQ ID NO: 10553 - protein, 500 aa, Unknown
  Description of Unknown: Integrase B10554 sequence
  cd00338,PF13408,PTHR30461:SF21,IPR011109, PF07508,Coil,G3DSA:3.40.50.1390,IPR006119, IPR036162,PTHR30461,IPR025827,PS51737, PF00239,SM00857,SSF53041
VGDTRPLAGYLRMSDADLAEIKNLVKIGALTPEEAKERERKGVLKQKQDVTELRDRLYPGRPIVWYEDNNLSAFKRNVKRKDFERMLKDFDASALGGILAYDLDRVYRQPRDLEKVIDFYDTPNSTLVFHTLSGQNFDLTSADGRFTARIMVNVANKSSEDMSRRLKREMERMAFAGEMAGGPRPFGWEEDRLTLRPKEKKALDDMAEKILQGDSLTTIMDWLKEEGFVGRTGKPFVRSSVRRILLNPRNAGIRQFRGEPLKAEDGEYVKGSWEAPWTVDKWRAVKEVIEGSEQSNRTKVGPGHNTVRSILSGILRCGVCGTRMVAANSSRKYPKYRCAKDAGGCGNITISRTASEDAIRGLVSDVLMAATAQKETEEVGPKWEKAAELTSLEKEFQELHQLWKDDKIKTTSYILGREKLEGEIDQLRGERAVALARPAKPPSLEVIKGGWDKLSIERQREVILSVLTAVMVATRKDVPAGGRVDRGIDHSRLTPIFKEQ

SEQ ID NO: 10554 - protein, 500 aa, Unknown
  Description of Unknown: Integrase B10555 sequence
  cd00338,PF13408,IPR011109,IPR038109,PF07508, Coil,PS51736,G3DSA:3.40.50.1390,IPR006119,PTHR30461, IPR036162,PTHR30461:SF3,IPR025827,PS51737,PF00239, SM00857,G3DSA:1.10.10.2600,SSF53041
MKIISADYRRVSTDDQRKGYGLQDQAKANAAYALEHGLHVPDDYHIEDDETGYSMDRSGLVRLRQLAADRKIKAIVIHRSNRLSRNARESLILRDELLALNIQIHIVAWGRAFDPHNNTDHLLWNVEAAVSDYDRRAILAQLSAGRRRKAESQKWVGNGRPPYGYIKVGERKQTYLKPDASKLKIVRGIFDALIIKRKTQTAIAKDLNRRGVLTTLGADWNAETVNRIATNPIYAGYKYYGDIRIELPGLAIIDQTTFDLAQVILRANKEAAARNRKRSYPLSGHLRCTCGRAMGGHYTQQNGIFYQCNQSSIRKEKRDCPVHFVTATQVEKPVWAYVVSAIEHADEDIAQAQKAAGDAQSDAGQIKTLEAEIARLNKRVDTLLARFGDSADAVVLGAVERQVADTSAQIKKLSDRRNELADGERRQALKSAARSSVLSNIRTYRELAQRADFDDKRALFTAIDLQVVLSVEPGGRFLVISSSIAKTKRLKLKWSKRQAE

SEQ ID NO: 10555 - protein, 400 aa, Unknown; identical to SEQ ID NO: 9981
  Description of Unknown: Integrase B10556 sequence
  cd00338,PF13408,IPR011109,IPR038109,PF07508, PS51736,IPR036162,IPR006119,G3DSA:3.40.50.1390,PTHR30461, IPR025827,PS51737,PF00239,SM00857,G3DSA:1.10.10.2600, SSF53041

SEQ ID NO: 10556 - protein, 500 aa, Unknown
  Description of Unknown: Integrase B10557 sequence
  PS00397,IPR038109,IPR006119,PS51737,PF00239,G3DSA:3.40.50.1390 ,PTHR30461,IPR025827,SM00857,G3DSA:1.10.10.2600, SSF53041,IPR011109,PF07508,PS51736,IPR006118, cd00338,PF13408,Coil,IPR036162,PTHR30461:SF3
MSGPCGSGGGSDALYARVSSTEQAERQTINTQIDEARRYATLRGLTFAETFLDDGISGTIPLERRPGGAALLAAARAGRITTVYLYRLDRLGRDIRVTHNAIHALAEAGCAVVSVTESFDSTSPSGRAMIGFLAVVSAWERDSIAERVRAGMHRAHAEPARWMGGARPPYGYAVEVRETGSYIVPCEEEARIVRGLFELAAQGWSCIKLADYLNALAVPTAWAGRAVTHYRTGRPYSGRWQPNTVRQILRNTTYKGVRLRRGVEQACPALVDDRTWAAVQAVLVRNRSPRTRPNERIYLLRGLLVCGACGRRYHGWPQTSGYHYYMCHGWRYRPKCAGKLVAAERIEEAVWQEVEAWLRTEEAVDASLAGQAESRRVQEAERAREREVLRARIDAKSGERERVLSLYRRGVITEAELDRQLAEVQAEQALLTERWAALEGEEPEERGLERAELARAVREALGAGPDPLARQEACAALIERIRLTTYPERGRYDLEIVWRV

SEQ ID NO: 10557 - protein, 500 aa, Unknown
  Description of Unknown: Integrase B10558 sequence
  cd00338,IPR011109,IPR038109,PF07508,PS51736, IPR036162,PTHR30461,IPR006119,G3DSA:3.40.50.1390,mobidb-lite, PS51737,PF00239,SM00857,G3DSA:1.10.10.2600,SSF53041
VVKDAYSTHMVGSHKHPVKAVIYCRMSLARHGDTVKVKRQEKLCRQLAERLGWEVVFVFCDNNQSAWQRNRKRPGWDEMLRWLQDGRANAVIFYHGDRLIRQPWDLEVLLSLSDGRGIKLASPSSIRNLDDPEDRYRLRQDVAKACAESDTIGRRVTVIHEERARKGKIHRGGPRMFGYKRSGKIVEAEAQEYRAAVGRLLAGESRTSVLRDWNQRGVLTTQGNQWGYTAFSRMLGRARYAGLRSYHGEVVATGKWTGLIGVEEWEALQTVLAVGSALYTHGAGARPASSKYLLPGIAVHAACGATVKAHLDTRPDQTAYVCRNPTCTQAMRRKMSHVDAYVVGRVLHLLADPALWERLESRRGDDGLGAQLIALVERRQATVDQFATSTTMMPATLDAVLRQMDEQAGQIRAQIAQRQAVHALDGCRDMTRAEWDELPTNRRRAIIRGLVKVEMLPARRGRGFDSESVRVTRLNADAAAGKGDSGGLELVASVGGPAPE

SEQ ID NO: 10558 - protein, 500 aa, Unknown
  Description of Unknown: Integrase B10559 sequence
  cd00338,PF13408,IPR011109,IPR038109, PF07508,Coil,PS51736,G3DSA:3.40.50.1390, IPR006119,PTHR30461,IPR036162,PTHR30461:SF3, IPR025827,PS51737,PF00239,SM00857,G3DSA:1.10.10.2600,SSF53041
MTTPKPGTPLAAIAYYRYSEEGQSEYSIPAQRDAVQKAAPGLGYTIVAEFADEGVSGLRSDRPGFQAAISAARAEAAVAAILVHKFDRFSRDSEHQAVFRAALKRDGVRLVSIAEPTDDSPAGFLTERIMDAMAAYYSLNLSHEAKKGLSQRRKQGRHCGSAPLGYHWKACDARYPTLKSLVIEPQEARVVRAIYRLAEQGFGTVTIARRMNERGYLGKWGSAWTNTVRVMRTLRNPTYAALIASEPKSHRVAVGGKRIDHHRREWEKALVETEEWLPIIERERWRRIQAILDRRARTMHPASPYLLTGLLKCPVCGENMWGSGGGTGGSRYYRCSRARLTHPSFSLPAPKVEAAVIEALAEAAGNLELVAVAPAQRSAERLEDLRDELRGLRETMTRLEDAYLAGQFDLATFRDRKRLLVGRIEETEQALSAPVPAPKPPSKRYLRETIRKLRSAETPVVERRRRLSEVFVSVTPRQDGGLDIILRDRSDLPEDASPAR

SEQ ID NO: 10559 - protein, 499 aa, Unknown
  Description of Unknown: Integrase B10560 sequence
  cd00338,IPR011109,PS00397,PF07508,Coil, IPR038109,PS51736,G3DSA:3.40.50.1390,IPR006119,IPR036162, PTHR30461,PTHR30461:SF3,PS51737,PF00239,SM00857, G3DSA:1.10.10.2600,IPR006118,SSF53041
MSEKLKEVCAYIRVSTDKQEELSPESQIRLIKDYAEQHNMLLTRIYQEDHGISGKKADKRPAFQEMIATCKDKSHPYDAILLWKFSRFARNIDESTYYKSVLRKKCNVDVISVSEPIVEGMYGRLIEMVIEWSDEFYLYNLSGEVMRGMTQKALKGGYNSNVPIGYIKERGKDKIPQIEPKGAEIVRKIFDMYTEQNIPMSDIAAKLNKSGYRTARGSFFETRVVGYILENPFYIGKIRWNFFDKQSNKRKNPDDVIISDGKHEAIISDKQFSKAANRRAHDRLRTGYNKKRRPTPLLANWLSGMIKCSKCGASLGFAHGTAKVVPNFCCWKYSKGLCSTRNGITLKNAEKEVLTILEELSGSGYFYNYNLNVINTENTERAYILKELRSLDTKMKRIKDAYINEIDTLEEYKANKELINKRREELNKKLEAASVTVHPAAVHKAVDFQALIDIIKDENSIDTEKHNALLEVVDHFVWDKETQEMTVVLNSDISLVNCK

SEQ ID NO: 10560 - protein, 499 aa, Unknown
  Description of Unknown: Integrase B10561 sequence
  cd00338,PF13408,IPR011109,IPR038109,PF07508, Coil,PS51736,IPR036162,IPR006119,PTHR30461, G3DSA:3.40.50.1390,PTHR30461:SF3,PS51737,IPR025827,PF00239, SM00857,G3DSA:1.10.10.2600,SSF53041
MNTTDLQTGVIYARYSSDKQRDESIEGQIRECTEYAQREGILITKIYTDKALSARTDNRPEFLQMIRDSSNQTFNYVIVYQLDRFSRSREDSAKYKGILRRNGVRVLSAKEHITNEPAGIILESMLEGMAEYYSVELSQKVKRGMTENALKGKMNGSAVPLGYDLTESHHLAVNAHEAKAVRLIYDLYLKQYSLAKIADILHSKGYTTKRGGKISYSVIRNILSNEKYIGVYQWGDIRIEDSIPPIIARDVFDEVQRILPTRIKNKGRRSEMYNLCGRLICGQCGGHYMGSTATSRNGEKHHYYVCTNRRKYHTCSAPNIRRDELEDLVINRTLEILKQPQIIARIVDLVMNGYNHTAQEAKTAIQGIHGKIKAIDTELNNCMTAIKQGFINERLKAEIETLEKERQDLLEQKANHESVIPPIKFTAEHIEYFLERMANENPTTKAGRSRILDTFIKNVTIHSDRVEIVFNYKSELPEFSEQSASGSHFSILVGNSYNK

SEQ ID NO: 10561 - protein, 499 aa, Unknown
  Description of Unknown: Integrase B10562 sequence
  cd00338,PF13408,IPR011109,IPR038109,PF07508, Coil,PS51736,G3DSA:3.40.50.1390,IPR036162,PTHR30461, IPR006119,PTHR30461:SF3,IPR025827,PS51737,PF00239, SM00857,G3DSA:1.10.10.2600,SSF53041
MKKAVIYARYSSDRQTEQSIEGQLRVCHEFAEKNELTVIEEYIDRAMTGTNDKRPAFQKMIADSIHHKFDYVVVYKLDRFARNRFDSAVYKAKLKQNGIRVLSAMEGITDTPEGIIMEGVIEAMNEYYSVELSQKIKRGMRENVIKGKATGGNVALGYKIGADKRLELDETAAITVRKIFEDYAAGSTYAEIIRDLNSQDIKTSRGNDFNKSSLTHILTNERYIGVYTIDGVAEQSECPRIVSDELFHKVQEKIQNSQQKRRKRSKYSYLLSGLLYCEKCGCKMTTTSGTSKTGKKYHYYYCPNKCTGRISAEYLEQSVLDMLREYLTSENLEMIARAAYTEYQKTIMDDSELKVVKRELKNVEKQIQNGIDAVLNGFASESLKATLAELETKKKSLLLQIDDLSRAAPKLTLEHFKGIIQKLIDDCQKNLVDTIVAKVTYSSERIIVYINITNPDNDPPLDKIEFNVASPQPHATLSAIICEGFICLCKKNQKFNYRM

SEQ ID NO: 10562 - protein, 499 aa, Unknown
  Description of Unknown: Integrase B10563 sequence
  cd00338,PF13408,IPR011109,IPR038109,PF07508, Coil,PS51736,IPR036162,PTHR30461,G3DSA:3.40.50.1390, IPR006119,mobidb-lite,PS51737,IPR025827,PF00239, SM00857,G3DSA:1.10.10.2600,SSF53041
MLDLQRKPRACAYVRVSTNSRDQEHSFAFQSEYWEDFIKQQNQYEYVGLYADEGISGKSIKARKQFLQMIEDAKQGKIDKIFTKSFTRFARNKVEALETIRELRQNNVSIYFDTEHLDTSTTDSDFVLSILATVAEEELIQISENLKWAIDKRYQKGAVYINNNTLGLKMVDNKIVVDEEKRDLIKRIYKLYLDGCGIEKIAKILTKEKVATSTGKYVWHGSVIRSILTNEKYMGDSLQHKVYKTHDMRIKKNTGEVTQYYITNNHEAIIDKEDFKKVGEILATKSNNRNGMVAPTYPFSSKVVCGHDGKTFKRKFEGYKNKKKGIYKCKVYLKYTKDACNNSAILESELEKHFISAYNEFVEHLQTASSTASQRNELKEKLDKERELRALYINGYLTKEQYTSLNDALVTEIQKLDNSIKQQESSIKKQFQLKTIEEFDPQLVDESLEKVIINDYTATYEFKNGYQTTRRYDNGKSGNKKGFRENNNRDSCQAEIPSE

SEQ ID NO: 10563 - protein, 499 aa, Unknown
  Description of Unknown: Integrase B10564 sequence
  cd00338,IPR011109,IPR038109,PF07508,Coil, PS51736,G3DSA:3.40.50.1390,IPR006119,PTHR30461,IPR036162, PTHR30461:SF3,PS51737,PF00239,SM00857,G3DSA:1.10.10.2600, SSF53041
MMEKRAAVYKRVSTAAQDEEDKASLGEQERLCREYCQEKGYAVVAMYQDIGSGMNKKRPSFLQMLKEARQGVFDVIIAWKTDRLARGIYPCAALMEVLEETGVTIETVAEPFDRTTFEIRAVLGRIEVESIVQRTTMGREAKMKAGYHHVKAAYGYDYDSETHRWVIDDAEAKWVRQIFNWYIDGMSPSEIASHLNAEGVPTKLNSRLGWAEKTVSNLVSQEFYAGRGHRNTGAHGRKPRPPQKWIPVSMPAIITDEVWEAAKRRRAHNKTLSPRNTRRTYITQHVLECEECGTRFHVSAGWGGAPRLMCFRMIRYPHSTPCRLPKSVEYDRIADQLWQGMVKVMGSEDGLEAAVLANASRVKGQKDSIEQRLKEVTTKRANLAHEQDRVISWARKGSITEEQLERQLKDISTESEQYAVEQNRLLADLRLIGDGDAVYQQARAFIPTMKARINDHLSEEERQEIVDSLVRRALLDGAGDLTIEFKIPRPEMSFGYFSS

SEQ ID NO: 10564 - protein, 499 aa, Unknown
  Description of Unknown: Integrase B10565 sequence
  cd00338,PF13408,IPR011109,IPR038109,PF07508, Coil,PS51736,G3DSA:3.40.50.1390,IPR006119,IPR036162, PTHR30461,PTHR30461:SF3,PS51737,IPR025827,PF00239, SM00857,G3DSA:1.10.10.2600,SSF53041
MINVVGYARYSSDNQREESIVAQERAIKEFCQKNNYNLIKLYKDEAISGTSIKDRTEFLELIEDSKNKEFQCVVVHKFDRFARNRYDHAIYEKKLNDNGVKLLSVLEQLNDSPESVILKSVLTGMNEYYSLNLSREVKKGLNENALKCVHNGGIPPLGYDLDENKRYIINEVEADTVRIIYKLYSEGVGYTSISEQLNKMGRLNKLGKPFRKTSIRDILINEKYTGVFVYGKKDGRGRLTGKEVKIEGGVPQIISKEDFEKIRNKMKNRKTGSRATAHETYYLTGVCTCGECGGRYSGGYRSRQRDGSITYGYTCINRKTKVNDCKNKPIRKEILEEFIFKTIKKEIFTEKRIKSIAKKVEKSVNQKILNKVQEIKKIEIEIQKVKNKIDTLLEIFLDNKVSKEAFENKNRKLENELFILTQEKNKLSASKKISRENIESFIRNFKSNFNKSNIKKSVIETFVKEIKVYETYVEITLRLFPMYIDRNGGDDESRTRVRN

SEQ ID NO: 10565 - protein, 499 aa, Unknown; identical to SEQ ID NO: 10481
  Description of Unknown: Integrase B10566 sequence
  cd00338,IPR011109,PS00397,PF07508,IPR038109, PS51736,G3DSA:3.40.50.1390,PTHR30461,IPR006119,IPR036162, PTHR30461:SF3,PF00239,SM00857,G3DSA:1.10.10.2600,IPR006118, SSF53041

SEQ ID NO: 10566 - protein, 499 aa, Unknown
  Description of Unknown: Integrase B10567 sequence
  cd00338,IPR011109,IPR038109,PF07508,PS51736, IPR036162,IPR006119,PTHR30461,G3DSA:3.40.50.1390,PS51737, PF00239,SM00857,G3DSA:1.10.10.2600,SSF53041
MYSIYLRKSRADAELERLGEGETLARHRKTLTELAEKHGYTIGEIYEEIVSGETIAARPQMQRLLSDVEQGRWDGVLVMELERLARGNSIDQGIVAQAFQLTETLIITPNKVFDPANEFDQEYFEFGLFMSRREYKTINRRLQAGRLASVKEGNFIGSIPPYGYDKVRLERGQGFTLAPNADADNVRLIFEMFVNEGATANKIADHLTMLGIRPQKGGDYFSAHSVRDILRNRVYAGYVVWNSRPTKKIVKNGCVSVARPRNAAEKVMIFKGKHTAVVSSELFEAAQERIGKTPRLKTDRELVNPFAHLCRCRECGHAIVYRPNNKSADMLICPNKYCGVSGVAFEIADKIVLDELTAQLGSVKAMRNGSRKEAGAARTRTEHIKRELETLSKQQNRLFDLLEQGIYDQQTFVERQTTLKERRFELDEQLAAIDKEFPDEKEIDRMIATLDDLVARYDRLTPSQKNGMLLSCVQKMTYFREKSNRYDQKPVLIDIRLKF

SEQ ID NO: 10567 - protein, 499 aa, Unknown
  Description of Unknown: Integrase B10568 sequence
  PS00397,IPR038109,IPR006119,PS51737, PF00239,G3DSA:3.40.50.1390,PTHR30461,IPR025827, SM00857,G3DSA:1.10.10.2600,SSF53041,IPR011109, PF07508,PS51736,IPR006118,cd00338,PF13408,Coil,IPR036162
MASGVMSGPVPAVIYARVSTEMQATDGGGLDDQLRVCLATCEAQGYTVLGIFRDEGFSGAIEDRPAFQQALAAVPPGGVLVVSQYDRLSRDAAFRLGLPGELSGRNVAIESHSQGRVDVDSPSGFLAYAVDAVFSETLRRVISDATRRAFQRHRREGRQHGGKAPYGYEWGEEKQLLPRTDEAEVVQRIFEWAAEGSGVAKVASRLSGEGVPRPDGSSEAWLDISVKHIIRNPVYVGRVAHCYEKRSRVGRSPVWQKLPPDRWTIHEGKHPAIISRELWDRVQSLVRARSWHAPTNYGHQFLLTGLLRCPYCGGRMNGCHLFTPTGRYAVYRCSRQVHTHTCRGVCRSARKWETAFLDDLERILAGDAILGQTWCYGMPQRKSLPAEAEIAALEAQQQRVAGELATGDWPREVLLREMGRFEARLERLRASVADAEQENQGEEEPPAVLSGLREVLTSPEVPMARKRAVLAEVVQQIDWQNGALHTTFRPEVYATTDET

SEQ ID NO: 10568 - protein, 498 aa, Unknown
  Description of Unknown: Integrase B10569 sequence
  cd00338,IPR011109,IPR038109,PF07508,Coil, PS51736,G3DSA:3.40.50.1390,IPR036162,PTHR30461,IPR006119, PTHR30461:SF3,PS51737,PF00239,SM00857,G3DSA:1.10.10.2600, SSF53041
MDEKVTILYVRKSRIDEKGGQEGTLINQRSRLLAIAKSKGYENIKVIEEIESSIDENRPGLLQMKNMIHNNEVDRVLVTHQDRLARDFGIANKIFEWMIRFKVKLETPAGEMNLEETGSKIVFQISSILAEDEYDRIRTRMQIGKRDGVEFKHNWVHTVVPYGYVYNKNTKKLEVNEQEKKVFRKIVELALSGHSLYSISDKINDMGYTSKNGKMWNHAKIKSTLRSRARLGEITYKNDRIGADVRVKGAHEPLISYEEYNEIHRILSERVPYEKSPQTKGVKTPLDQLIFCAKCGRRLTTIKSVYRSGNWTWKISSCRRVDPDNGDKCDNSGTVLYVLWDMVWNEIMKHRDEMIEEVKKMNVKSVDDKKKEIKNRIIEEEKNLSIQEEKEEKLLDMYLNDHVSEELFIKRNRDIIKRKNFIKDELVTLSGMYHEMDDSKKRNKVEELIDKLDNFDDFNIEDQNIIMKSIIKRINYLREGDAFFNRDAPISIDIEFHD

SEQ ID NO: 10569 - protein, 498 aa, Unknown
  Description of Unknown: Integrase B10570 sequence
  PS00397,IPR038109,IPR006119,PS51737,PF00239, cd03768,G3DSA:3.40.50.1390,PTHR30461,IPR025827,SM00857, G3DSA:1.10.10.2600,SSF53041,IPR011109,PF07508,PS51736, IPR006118,PF13408,IPR036162,PTHR30461:SF3
MIYGYCRVSSDEQAAHGISIDAQRDILNGYAAMSQSQIKIFEDAGYSGKNTDRPALRQLLTAVRSGSASQVVVWKLDRLSRSLRDTLSMIEDVFAPAGVTLVSVTESIDTSTPSGRMMLNLLASFAQLEREQDSDRVVMAHKHLAHDCKYLGGHIPLGYVVDAEKHYQLHPVLHHVVRRVFDMYMARSGYSSILSYLNSSEVFPLTGKKKPYTKQDLYFMLQNEIYAGVYVRRIGADPRHKVTSPETIRIPGGVPAILSPDEWQRVCSIREQNATFSASYRAVNVYPLSGLVRCTICGRTMSIRHGGKTRSGEVERYYKCPAGCVRPARLESVQSAAFTAIEYLAADDETISRACAVANTFGDDTASENRAAIAPLEDQLQQIYKQNARLVRYIKDHSSAPAAIMDELVALENEQKSIQQRIETLRRPRGRYDAEKMKHLLRSASGIKNMPPAEQKARCQAAIHGVLVSDSTYRILFVCPTSGGDEPLRYVEHIIQRQ

SEQ ID NO: 10570 - protein, 498 aa, Unknown
  Description of Unknown: Integrase B10571 sequence
  cd00338,PF13408,IPR011109,IPR038109,PF07508, Coil,PS51736,IPR036162,PTHR30461,IPR006119, G3DSA:3.40.50.1390,PTHR30461:SF3,IPR025827,PS51737,PF00239, SM00857,G3DSA:1.10.10.2600,SSF53041
MPEALNAVIYARYSSDRQTEQSIEGQLRECYAFAKANDIAVIDTYIDRAISGKTDNRPAFQKMIEDSAKRQFQAVIVYRLDRFTRNRYDSAIYKARLKKNGVKVLSAMENLNGSPESIIMESLLEGMAEYYSVELSQKITRGMRENALKGKALGGQRVLGYKVNSDCYFEIDETTAPVVVDIFKLYSSGKTVKEICDILNARGVKTARGGAFNKNSLHTILTNKKYIGIYKTKYGEIVGGIPAIIDKELFEMVALRMEQNKKAPARAKAEINYLLSTKLFCGKCRSAMVGESGTSKTGKKYYYYACVKKKREKACDKSNVKKDWIEDLVIQRTVTDILKDDVIEKIADRLVELQKAEAAESGTMLYLENSLAEIQVSIKNIMTAIEKGIITESTKTRLTELEDEKRNVEIEIAKESIARRIISREQIIYWISSFKDGDITSEKYCQQLIDTFVHAVFVYDDKIVITYNYSGENNTATISDLDLSSPPNLIWSPASCHA

SEQ ID NO: 10571 - protein, 498 aa, Unknown
  Description of Unknown: Integrase B10572 sequence
  cd00338,IPR011109,IPR038109,PF07508,Coil, PS51736,G3DSA:3.40.50.1390,PTHR30461,IPR006119,IPR036162, PTHR30461:SF3,PS51737,PF00239,SM00857,G3DSA:1.10.10.2600, SSF53041
MRTYAAYLRKSRADADKTIEEVLSSHRHDLLKLAKSMNVGIVDWYEEVVSGESVSGRPQVQALLDAVSDGKYHAVFCMDIDRLGRGDMMDQGLILNTFRRSETRIITPRKTYDLTDEADETTTEFEAFFARYEYKQIRKRMRRGTIACLENGGYVANAPYGYEQCRIEKKPSLRIIPEEARFVQLAFDRYCAGVGATAIADELNALGAIPRRNEVFNKNSVRYMLRNPVYCGLTVFNRMRHTKKGTHGADRNICRANPEEKWLVAPGLHEAIISKDQFALAQNIRQGKDRPQFHMQGGVIMNQFAGIFHCSKCGRVMVTASASKGGPRLYCRTPGCSAAAKVEYIEEALLLSLEQELDRLRISDSVDLTSDLFAAEQQIQTIEAELKKAETKKTRLYDFLEDGIYDRSTFMDRMAKAEKEISSLTHRLTAARSNLDAIASSDTAELQSQLETALTLWPESTPAARNNLLKSLLSEATYTKEKKTKPQDFQITLTLRRF

SEQ ID NO: 10572 - protein, 498 aa, Unknown
  Description of Unknown: Integrase B10573 sequence
  PS00397,IPR038109,IPR006119,PS51737,PF00239,G3DSA:3.40.50.1390 ,PTHR30461,IPR025827,SM00857,G3DSA:1.10.10.2600, SSF53041,IPR011109,PF07508,PS51736,IPR006118, cd00338,PF13408,Coil,IPR036162
MTPPKGFTSSVPAPLPDLRIAAAYIRVSTDDQVELSPASQLVEIRKWAARNGYIVPDEFVFMDEGISGRGVKKRDEFRRMIGVAKTKPKPFDAILLWKFSRFARNRDDAVMYKSILRKQLGIDVISISEPVAEGGMGLITEALIEAMDEYYSINLAQEVKRGMEEKHRRGEVQSNPPYGYGIKDHVFVPKPPEDGFVKELFRRYLAGEGCFPLARWMNECGQRTHRGGRFENRTIEYILRNPVYIGKLRWNPAGRTRRDFANENVVLVDGKHEPLIDEETFNAVQRRIDEQKLLYPRYARASGTQKHWISGLVRCAACGGGLIVNTPDYMACNNYVRGSCRVRQTVRRDALEAALISRLREDAAHGSSLTFDVVRSSDGSASSLSAVEAARDSAVRMLDRLRDAYLTGADTVEEYKASKAAVQKRIADLDAQIAAAHKENAAAANPNLLRSALRAVVKTLESPDTTVAEKNAAVRSVTDNITWNKAANTLTIHYRLVL

SEQ ID NO: 10573 - protein, 498 aa, Unknown
  Description of Unknown: Integrase B10574 sequence
  cd00338,PF13408,IPR011109,IPR038109,PF07508, PS51736,IPR036162,IPR006119,PTHR30461,G3DSA:3.40.50.1390, PTHR30461:SF3,PS51737,IPR025827,PF00239,SM00857, G3DSA:1.10.10.2600,SSF53041
MQIEVRKAEMGKEKKRLKVCAYARVSTEASEQENSLENQVSHYTEMIQANPAYEFAGVYADFGISGFKESRPQFLKMMQDAKNGKIDLIITKSVSRFARNTAIVLKASRELKERNVGIFFELQNINTLTEAGELLLTILAAFAQAESESASESSKMAYLHRIENGEVVAYLERSYGYEKDENGEYRAKEPEASVIREIYDLVIQGVNCTNIAKVLNARNIQTVQGAEWTASTVFRIVENEIYKGDVLMQKTFIDGKRHQVQNRGEKAMYYAKDNHPPIVSEKIWEKAQRKLEDMRAERAEHSVIQEFTEENYPYMNHIFCAKCGWPLKPRVYSHGHRLSWDCSGQKRGTKKFCTGIHILDNDLRKMKIEGNRYFSETVDKYGEVHLKHVGERTWKNKHKKKKFNHKDLYPELNEENYPYYKRLYCARCGSRLGRYISHGTVRWICSSYKTKGQAKCPGVRIPDEIIKGWNLPDGKIYIMGKEDKNGEKHYSYTSESAL

SEQ ID NO: 10574 - protein, 498 aa, Unknown
  Description of Unknown: Integrase B10575 sequence
  cd00338,PF13408,IPR011109,IPR038109,PF07508, Coil,PS51736,G3DSA:3.40.50.1390,IPR036162,IPR006119, PTHR30461,IPR025827,PS51737,PF00239,SM00857, G3DSA:1.10.10.2600,SSF53041
MKGVIWVRVSSIDQSAGYSPDAQLRALREAAARKSIEVVKEFNVSESAKTSEARKQFRELIQFIDEYRPDYLIAYAIDRITRNPEDLNTIHNLIQKNGLNVFVVDQNKIVSKSSDPMEKFTFLMFGNIAYLDNMRRAANAKMGMLEKARGGTFPSKAPVGYRNTVDATGLKRTVVVDPVKAPLVRLAFELYAQGGYSLSTLRDELNRRGLRQKTTPMSIYGLEVILHNPFYYGSIRWDKQLFKGTHEPLISVDLFERVQARLKENQSYARPKSKKVFIFKRYLRCGYCRSGITAEEKAGAHKSGLYRYYKCTRSKDRNCPQPVYREEQIDKMFSENIGKLYINPDIAEQIREELRRSHLDQQASDKKELQRLRMEETRKTNHLNLLYTDRLDGTITKEQYLEKQAVIQQELRGIQADIEKLGRYNAKYREEGSAIIDLLKDFKQTYDEADEEGKAIILSAVIDRATLRNGDLFIAWKRPFDALFVLGEGVPRKQEWRA

SEQ ID NO: 10575 - protein, 498 aa, Unknown
  Description of Unknown: Integrase B10576 sequence
  cd00338,PF13408,IPR011109,IPR038109,PF07508, Coil,PS51736,IPR036162,G3DSA:3.40.50.1390,PTHR30461, IPR006119,PTHR30461:SF3,IPR025827,PS51737,PF00239, SM00857,G3DSA:1.10.10.2600,SSF53041
MVKAVIYARYSSHNQREESIEGQLRKCHDYAEMNGFTIIEEYCDRAISGKTDNRAEFQRMIKDSEKGHFQAIIMYTLDRFARNRYDSAMYKAKLRKNGVRLYYTEQSITDEPEGIILESVLEGMAEYYSENLSRGVKRGMKENALKCMITGGYMPLGYRKTADKKFEIDPATAPIVQEIFDLYINGKSQRQIVDILNEKGYRTVKGMPFRLGSISGILVNTKYIGLYSFGDVVIENGIPAIIDKDVFDKAQEMLKKNKRESGRMKAPMNYLLTGKLFCGHCGGSMVGESGTSGSGTIYNYYKCLSRKRHKDCTKQTEKKDWIEKLVVEETVKRILQPEVIDEIACKVAELAENEFNNKSRLTTLQNDLKSVQTAIRNLLRLVEQGIDTDDVGERLLDLNSQKADLQKQIAKEENKKPMLTKDRIAFWLTSFLNNGDIESVDYQQRIIDTLVNKVFVFDTDGGGRKIVITYNTSNSMKSTITLSDINKCSDIEGFARTR

SEQ ID NO: 10576 - protein, 467 aa, Unknown
  Description of Unknown: Integrase B10577 sequence
  cd00338,PF13408,IPR011109,IPR038109,PF07508, PS51736,G3DSA:3.40.50.1390,IPR006119,IPR036162,PTHR30461, PTHR30461:SF3,IPR025827,PS51737,PF00239,SM00857, G3DSA:1.10.10.2600,SSF53041
MIRMARSVTVIPARNRQRETGCRAVQEKKIRVAAYCRVSTDQEDQLHSFEAQVDYYTKYINDHENYEMAGIYADEGISGTNTKKREQFKRMIADCEAGKIDLVITKSISRFARNTQDCLAYSRKLKNLGIGIIFEKENINTLDSTGELLFTILSSLAQDESRNISENCKWGIRTKFKNGEMHLNTFKFLGYDKDENGKLVINKEQAKTVRRIYRDFLIGINPAQIAKELTEEKVPGCNGQTKWYPSTIVGILKQEKHMGDALLQKTYTADFLTKRQVKNNGEIAQVYVKDSHKGIIDKETWNAVQEEFERRERFMKDHGTDRYSYGADCIPFCEKVFCGECKSLFTRHSWKSRGIVQWQCKNHRTDGRVTCSNAYVDNSDLEKGFVKAFNKLVADREKFMERWNQMKTDGSSLEKIRAEQMMEATGNDPLGRFVPEIAQLVLAEVTVLGAKKYEFFFLEGSRIKVSV

SEQ ID NO: 10577 - protein, 498 aa, Unknown; identical to SEQ ID NO: 10002
  Description of Unknown: Integrase B10578 sequence
  cd00338,PF13408,IPR011109,IPR038109,PF07508, PS51736,IPR036162,IPR006119,PTHR30461,G3DSA:3.40.50.1390, mobidb-lite,PTHR30461:SF3,IPR025827,PS51737,PF00239, SM00857,G3DSA:1.10.10.2600,SSF53041

SEQ ID NO: 10578 - protein, 498 aa, Unknown
  Description of Unknown: Integrase B10579 sequence
  cd00338,PF13408,IPR011109,IPR038109,PF07508, Coil,PS51736,IPR036162,G3DSA:3.40.50.1390,IPR006119, PTHR30461,PTHR30461:SF3,IPR025827,PS51737,PF00239, SM00857,G3DSA:1.10.10.2600,SSF53041
MTNVVLYLRYSSANQTEQSIEGQERVCRQYCEMNNLNIINTYIDRGKSAYTNIHKRVSFLQMIDDSKKHTYKAVIVYSLSRFSRNKYDIAFYKKELEKNGVKVLSATEGIKDDPEGELLEGIIETMDVYFSRELSRKVKRGMQQSAEKGLFVGGNIPLGYDVVDKHFVINEDEAPIIKLIYRLYSEGYSFRDILEELDKHNYKNKKGKKFTKRSFESILTNEKYIGVYESQGYRHENLIPPIVDVSTFDKVQNRLDLESKNISYSRYNYMLSGKVYCANCHSLMTGESAYKKEKVYLYYTCKNKDLRVNKEELEKLILRAIKSFLNDDFINDLAEHVVKENERKMKENIELIKLQQELDDAIKLEEALKGLLKNAPDTIGWRYNDACIERDRLEKAVFMEKTKQMFIDKKQVVEFFNYFLNGDYEDEEYQKELFTLLVNRVEVSKEKVDVYFNINSMYNCKLPQNDTITINFDSSQVVRNLLFGEQYTNLNIYYIYNK

SEQ ID NO: 10579 - protein, 498 aa, Unknown
  Description of Unknown: Integrase B10580 sequence
  cd00338,IPR011109,PF07508,Coil,PS51736, G3DSA:3.40.50.1390,IPR036162,IPR006119,PTHR30461,PS51737, PF00239,SM00857,SSF53041
MRTDLYARKSSSDLGRSVARQERTWRADCEAEGLEPGRVFVDPDFSASQYARKDRPDYTALLEHIRAGETEMVSLWEVTRGSRQMGEWVTFLDLCREKRVMVRVFGDGEDAFTYRTWVQRDRDSLMKEGIAAESEVERIRTRTRAGTADAAHEGRPPGPLLDGYVREYGALTGDSLSPSGAKRREIRQVIDEPRAAIYRAAAEGVINGVPLNFIVRVLTAWGIPTASGGSVWQGTVMRRMLLNPGMQGHRVLAGKIVRRDAWPAIFDPVTAARVREILTESGRRHRSDGRLKYMLTGALKCGACRHPMGSRTWSQQQYQCAQPGCSKVAVSMRLVEDEVSRLIVARLIQHDAMSAPAFAATTDDSAVRAAKAELAVLASRRDELYREAAKPDGPSLALVAAAERELLPRIDAMQDEIRRLTLPPVLHDFDPQDLARRWDSGYYAVGDRRAVVMGLADLVLSPVGKAGRWSRWRLAESRWRGDALTWGERWGAEARIDS

SEQ ID NO: 10580 - protein, 497 aa, Unknown
  Description of Unknown: Integrase B10581 sequence
  cd00338,PF13408,IPR011109,IPR038109, PF07508,Coil,PS51736,IPR036162, PTHR30461,G3DSA:3.40.50.1390,IPR006119,PTHR30461:SF3, IPR025827,PS51737,PF00239,SM00857,G3DSA:1.10.10.2600,SSF53041
MSEITQIGVIYARYSSDKQRDESIDGQIRECMAYAEREGITITNTYIDRALSAKTDDRPEFRQMILDSNKQAFNYVLVYQLDRFSRNRYDSAIYKAKLRKNGIRVISVKENIKDDPSGIILESVLEGMAEYYSAELSQKVMRGMTDNVLQGKWVGTVVPYGYKLSNNRQLEINEHEANVVRKLFDMYLQRHTLSEMASYMNANGHLTHKGKPFNTNSIKAIISNEKYIGVYSWGSERIENAIPPIIDKSIFEKAQHKRNLRAKKKGNRSELYQLCGKLECGRCGGNYVGSTGTSKTGALHHYYVCSNRRRKNACKAQNIRRDALDDIVIGQTLAILNKPNVVNKIAKYAASSGKNLQSETVTQIDIIDAHIRDLKKSLDNYMTAIANGFISDVLKHRIETTEQELKDQIEIKTNLENTIIPVELTEDHIRFFLLKMAKENPSTLRGRARIIEAFVHHVTIYEDHIEIVFNYKNELSEFHDKTLESSLLNDLVTQKGF

SEQ ID NO: 10581 - protein, 497 aa, Unknown
  Description of Unknown: Integrase B10582 sequence
  cd00338,PF13408,IPR011109,IPR038109,PF07508, Coil,PS51736,G3DSA:3.40.50.1390,IPR036162,IPR006119, PTHR30461,PTHR30461:SF3,IPR025827,PS51737,PF00239, SM00857,G3DSA:1.10.10.2600,SSF53041
MARKKNIAAGQNAVIYARYSSHNQREVSIEQQVRECMKHAAELGLHVVGTYEDRAISGKTDKRPNFQQMMRDAEKGKFQAVVSWKSNRIGRNMLQAMVNEAKLDDYGVKVFYAEEDFDDTAAGRFALRNMMNVNQFYSENMAEDITRGLYDNASKCMANGRQPLGYKRGEDGRVVLDEANAAVVREIFTRVAAGDLFVDIARDLNAQGIKTSKGANWNKGSFQSICQNERYRGIYIYGDVRVADGIPRIVSDDLWYRVQEAMRMKKNPVGTRHRVGAEDYLLTGKLRCGHCGSYMTGVSGTSRNGELHYYYTCQKRRTEHACDKKNIRRDVIEPAVAQAIKMYCLTDDVIAWIADRTVEYWEKHDNDLQIEALEQQLEENKKATSNMLKAIEMGIITEATRTRMVELETEQSRLSVQLNVAKEDVVKIDREQIISYLELLQQGDIYDRDFQMELFKNFLVAVYVYDDNRMKLVFSCMGDQNSVEIPLETGEDPPDGG

SEQ ID NO: 10582 - protein, 497 aa, Unknown
  Description of Unknown: Integrase B10583 sequence
  cd00338,PF13408,IPR011109,IPR038109,PF07508, IPR036162,PTHR30461,IPR006119,G3DSA:3.40.50.1390,PTHR30461:SF3, IPR025827,PS51737,PF00239,SM00857,G3DSA:1.10.10.2600, SSF53041
MAMAKRENLEVIEVYPDYAVTGRTDKRKEFQRMMNDAKTGDFSYVIAWKSNRMARNMLDSMQYDELLKTYGIKTIYVEEDFDDTAAGRFALRNMMNVNQFYSEALAEDVRRGMMDNAKKCMVNGRLPYGLRKGPDGKAEINPEQAVIVREIFQRVKDGWHHIDIMEDLNDRGIRNRDGRKWQRTVFDKLLRNESYIGVYKFADVRIEGGIPAILDKELFDEVQDILRTKKNPRGRHRSSEEYLLTGRLFCGECGSHMVGFCGTGRGGHKHYYYICQGKHTARNCAKSNVRKDRIENAVIDFLRNFILQDEVIDWLCDELENQQEAIYGRSKLPGMYLDLQESEKAILNILDALEKGIYTDRTKDRLLELEAFQKDIKAKIAEEEKKFFKPDKDMLRFAIEQYRSKNYDDPQYSKDLIRTFIRKVFVYDDYIGIELNDNKQTKAEISLENLSEMKIKLSESESVCIISNKPHHYALYKPHNAITAFQYYDFIYVWLRL

SEQ ID NO: 10583 - protein, 497 aa, Unknown
  Description of Unknown: Integrase B10584 sequence
  cd00338,PF13408,IPR011109,IPR038109,PF07508, Coil,PS51736,G3DSA:3.40.50.1390,IPR006119,IPR036162, PTHR30461,PTHR30461:SF3,PS51737,IPR025827,PF00239, SM00857,G3DSA:1.10.10.2600,SSF53041
MRKAVFYGRYSSVNQTEQSIEGQLHVCERYAEQHDIKIVAQYIDRATSGTSDKRQEFQRMIADSRKQGFEAVLVYKLDRFARNRYDSALYKKKLRENGVRVVSATENITDTPEGIIMEGLLESMDEYYSAELSRKCKRGLKESFDKGRFIGCIAPYGYQVTDHYLQINPATAPVAQQIFQRYADGERQADIIADLNQRNIPNASGRQWNTCNISKMLQNTVYIGQYQVSTIEGISKCPALVTQEVFDKVQEHRARCVHESRKNRTNFNYILTGKAVCGECGHPVCGHSTDKGARHYYRCSVCYKPCGNAFNLHETVRNTLQEYLTEEKLTQLANAAYAEYQKEENAPTNEYDILKQELTAVEKKLQNAVDALLSGLNSERVRRTIEELEQKQTELTERLNAVSAPAPIFTQEHFRIALKRLIANAQAEDFKELVDTIVDRIIVKDKQAIICINITNETNEPPLEQILCMVKDSSVALIQHNHKKHIKFTQGWLLIVA

SEQ ID NO: 10584 - protein, 497 aa, Unknown
  Description of Unknown: Integrase B10585 sequence
  IPR038109,PS00397,IPR006119,PS51737,PF00239,G3DSA:3.40.50.1390 ,PTHR30461,IPR025827,SM00857,G3DSA:1.10.10.2600, SSF53041,IPR011109,PF07508,PS51736,IPR006118, cd00338,PF13408,Coil,IPR036162
MSELHIAAVYIRVSTDDQVELSPDSQLETLRAWAEKNGYVIPEQYIYVDEGISGRSAEKRPRFMEMIAAAKSADHPFDAILVWKFSRFARSQEESIVYKAMLAKAGVDVISISEPLIEGPFGSLIERIIEWMDEYYSIRLSGEVKRSMTLNAERGVAQIAPPFGYQKNPAGSPFMIPDEIEATVIREVFADYLAGVPVWKIVDELNARGIRTHRGGAIENRTIMYWLQNPVYLGMVRWTPTGRTRRDFHNPDTITVPGDHEALVSREDFDAVQVLVAAASEAHRPKSRPSFELKDWASGVVRCASCGSTLVFQRPRYMICNGYVRARCKDRNSITVDALHTAILERLRADVKAAYPLRYKITRSDDTERELRALRQQAEQYDRKLARIRDAYVNGLDSLDDYRRFKESLDAQQAELTAKITDLESRVDPAAAEAVLTESIRTTLETLESPDATLHQKNAAAKSLFESVIWDKASNSLTITYRVFVSSSPQTIDTATF

SEQ ID NO: 10585 - protein, 497 aa, Unknown
  Description of Unknown: Integrase B10586 sequence
  cd00338,IPR011109,IPR038109,PF07508,Coil, PS51736,IPR036162,IPR006119,PTHR30461,G3DSA:3.40.50.1390, PTHR30461:SF3,PS51737,PF00239,SM00857,G3DSA:1.10.10.2600, SSF53041
MYLRKSRADGEHETVEEVLAKHYKILQDYAAAKLGGAIPEDRIYREVVSGETIQDRPQMLRLLERIQNESIDGVLVVDPQRLSRGDLSDCGTIIRAFRYTDTLIVTPPKTYDLGDKYDRKFMEMELMRGNDYLEYVKEIMMRGRIASVQAGNYIGSGSPYGYDKVKDGRTFSLAPNSESDTVRLIFELWTKDGLGTTTIAQRLDALHIKPRKSERWSSASIRDMLKNPIYIGKIRWNFRKHVKRYEDGVLVSSRPHAAAEDWILVDGKHEPIISEDIFKEAQQRFGQLPKTKPKMKLNNAFAGIMHCSCGRAMIYRPERKCEDRILCTNMKYCNNRSAIYAEVVEEVLRALRELAEDVRDLIGSPQKSSEAQKAVTAALVKELNALETQQERLYEFLEKGIYSSEVFVKRNAALSQRRSELQEAIAEAKELESVDVDYKQRYIALMDAIQALEDDSVSVADKNRLLRVVIKDITYRRETTVRGKWQNVPFELDIELL

SEQ ID NO: 10586 - protein, 497 aa, Unknown
  Description of Unknown: Integrase B10587 sequence
  cd00338,PF13408,IPR011109,IPR038109,PF07508, Coil,PS51736,IPR036162,IPR006119,PTHR30461, G3DSA:3.40.50.1390,PTHR30461:SF3,PS51737,IPR025827,PF00239, SM00857,G3DSA:1.10.10.2600,SSF53041
MLDLSAFGVLKAAEYMRYSTDNQTENSIAYQQAGIRKYARENNIQIVASFQDEAASGTNTDRKGFQALVAAAGRKAFDAVIIYDISRGSRDVGDWFTFRKSMMYLGIKVISASGQKLGDLTNSADFLTELITVGMGQVEVLGTRQKSIDGVAVKAKQGAFLGGLPPLGYDVVNGQYVINPAEARIVRDIFAWYAAGKSYDYIVDHLKGALGKRGRPIGKNSLNGILQNERYIGVYTWNKKKYKIMRKWAGGQANPNVERIEGAIPRIIDDDTWEKVQARMKDNKRNAKNKARHQYLLTGLIECEECGARYVGHASTNKKGFVTRYYCCGNKYRTHTCGAKNINADEIETFVVQHLKEYLRTMDFTATAQYIADQINGAQPDLKAEKAELAQIEKKIANGVQAVLSGLVVPELQAELDRLRVRKSELEDIIARRSATRRELDPAALVAFFRSSIDQWNDENLPEIIRAHVTKIYAHADGTFTVNVGVHTNGCGGRTRT

SEQ ID NO: 10587 - protein, 497 aa, Unknown
  Description of Unknown: Integrase B10588 sequence
  cd00338,PF13408,IPR011109,IPR038109,PF07508, Coil,PS51736,G3DSA:3.40.50.1390,PTHR30461,IPR006119, IPR036162,IPR025827,PS51737,PF00239,SM00857, G3DSA:1.10.10.2600,SSF53041
VKQTEFIKDVGIYLRKSRASEETDETLAKHKDILVSLAKKYGFNYTIYEEIISGDKIDNRPEMQRLLNDVQMGLYDAVLVVSIDRLGRGDEEDSGKIKKIFKKADTLIITPEKVYNLENEDDETYLEFQTFLARQEFKLIKKRFIRGKRIGAKQGKWTNGIPPYPYEYDRIEGKLVINPDKLVVYNMIKDMTLTEFLPLHKIATILNKRGIPSPQGKSWSSKVIRDLLLDETHLGKIVYGKTKGANRNGNKVIKIPRDEWIISNGHHEAVKTEEEHQRIVNVLKSRTLHVSRFRNEVPRRTLQGLVICGFCGSVMQVKKSVRGYFVVTCVKKDRYGNNCVCRGIKEDVLIQNILDYIDNLTLNATFNEVQLEIDKLNKQYAYALKRQKETEEKIKKINEAFEEGTYTKAEFIERKKVRISELEEVKQLKESVEKQLDFLMNKDNRLCREDLKHIRENLFSLISSEEKNSLLRQFIERVVYYCKKTEPKRIRLEIYFR

SEQ ID NO: 10588 - protein, 497 aa, Unknown
  Description of Unknown: Integrase B10589 sequence
  cd00338,PF13408,IPR011109,IPR038109,PF07508, Coil,PS51736,IPR036162,IPR006119,PTHR30461, G3DSA:3.40.50.1390,PTHR30461:SF3,IPR025827,PS51737,PF00239, SM00857,G3DSA:1.10.10.2600,SSF53041
MRRSVIYARYSAGPSQTDVSIEGQEKVCQDYIARKDYEYVRMYADRHISGRTDKRPAFQRMIDDARSGSFDVVVVYSLDRFSRDKYDSAIYKKTLRDCGVVVESASENIPDGPEGIMFEGILESLAVYYSAELSKKIRRGMDVKARKCLSTGGPTPFGYALQDGSYHPDPNAAPHVAEVFRMYLSGSSFADCSRYLNGLGFTTSKGKPFSSGTVRKILTNKKYCGYYVYNGMEVEGGMPQLIDENTFYKVQKMIAKNKPHRPRGDFALTGKLICGICGEHMTGTSGTSKTGAVHYYYKCPSKDRKNIPRDLIEHTVAQYVRDVLSDPERIDTIVDRLFALHLEEDRTQAKSAALVDNLKRIEKKIDGIVDHIMENGSSPALADKLSTLEEDRAILRADLDQLQCEPALTRDMIRAGLQLALLGEQTTDADVIRIFVHQVLLHEDHLIVEFNIKGHEGLQKTDLLEFDLCPDWWSIGTSNRTLAIYRGSILLVGSIFQ

SEQ ID NO: 10589 - protein, 497 aa, Unknown
  Description of Unknown: Integrase B10590 sequence
  cd00338,PF13408,IPR011109,IPR038109,PF07508, Coil,G3DSA:3.40.50.1390,IPR006119,IPR036162,PTHR30461, PTHR30461:SF3,PS51737,IPR025827,PF00239,SM00857, G3DSA:1.10.10.2600,SSF53041
AFAERFGIVIVAEYCDRALTGTSDKRPEFQRMIRDSAKGLFSVVITWKNDRFARSRYDSAIYKYKLKQNGVRILYAKESIPDGPEGIILESVMEGFAEYYSANLSQNVKRGNYDSALKRQTLGQRVLGLRKGPDDRFEIDPTTAPVVRRIFEEYASGRAAIDIYTDLNAEGFRTIRGNLFSKSAIRHILKNEKYVGVYEYADIRDEAGIPPIVDRELFDKVQKIVEQHHRSPAAKKADGGGFLLTAKLFCGECGAPMTGDGGTSRNGQVYSYYICNGRRRHKCDKERAPKQWIEDLVVAELAKIANDDVMINAFADRFMEWQEKQKKSSVLAGLEQRLKKTEAAIKNTMSVIDSGLITDSIKSHLLELEAERTSLEAGIARERMESLEIDRDTVVWFLERFRTTDQSDVGWRIFIVETFLQAAYLYDDGRLILHLNYGGQNSAISLQLAERSVSEGEAIGSSIAQTGAPDSANLNTPGVFFFDGIMVAIASAEKKKG

SEQ ID NO: 10590 - protein, 497 aa, Unknown
  Description of Unknown: Integrase B10591 sequence
  cd00338,PF13408,IPR011109,IPR038109,PF07508, Coil,PS51736,IPR036162,IPR006119,PTHR30461, G3DSA:3.40.50.1390,PTHR30461:SF3,IPR025827,PS51737,PF00239, SM00857,G3DSA:1.10.10.2600,SSF53041
MKKVAFYGRYSSVNQTEQSIEGQLHVCEQYATQHDMKIVAQYIDRATSGTSDKRQEFQRMIADSRKQGFEAVLVYKLDRFARNRYDSALYKKKLRENGVRVVSATENITDTPEGIIMEGLLESMDEYYSAELSRKCKRGLKESFDKGRFIGCIAPYGYQVTDHYLQINPATAPVAQQIFQRYADGERQADIIADLNQRNIPNASGRQWNTCNISKMLQNTVYIGQYQVSTIEGISKCPALITQEVFDKVQEHRAKCVHESRKNRTNFNYILTGKAVCGDCGNPVCGHSTDKGARHYYRCSKCCHSAGKAVQLHETVRNALQEYLTEEKLNQLANAAYAEYQKEENTPTNEYDILKQELTAVEKKLQNAVDALLNGLNSERVRQTIEELEQKQAELTERLNAVSAPAPVFTQEHFHIALKRLIANAQAEDLKELVDTIVDRIIVKDKQAIICINITNETNEPPLEQILCMVKDSSVALIQHNHKKHIKFTQGWLLIAA

SEQ ID NO: 10591 - protein, 497 aa, Unknown
  Description of Unknown: Integrase B10592 sequence
  cd00338,IPR011109,IPR038109,PF07508,Coil, PS51736,G3DSA:3.40.50.1390,IPR036162,IPR006119,PTHR30461, PTHR30461:SF3,PS51737,PF00239,SM00857,G3DSA:1.10.10.2600, SSF53041
MYLRKSRADGEHETVEEVLAKHYKILQDYAAAKLGGAIPEYRIYREVVSGETIQDRPQMLRLLERIQNESIEGVLVVDPQRLSRGDLSDCGTIIRAFRYTDTLIVTPPKTYDLGDKYDRKFMEMELMRGNDYLEYVKEIMMRGRIASVQAGNYIGSGSPYGYDKVKDGRTFSLAPNSESDTVRLIFELWTKDGLGTTTIAQRLDALHIKPRKSERWSSASIRDMLKNPIYIGKIRWNFRKHVKRYEDGVLVSSRPHAAAEDWILVDGKHEAIISEEVFNAAQDRFGQVPKTKPKMKLNNAFAGIMHCSCGRAMTYRPQPRCEDRLLCTNMKYCSNRSAIYQEVVDEVVNALIHTVEDLRELSDEPQRSSEAQRAITAALRKELNSLETQQERLYEFLESGVYSSEVFVKRNAALAQRRSELQEAIAEAEAQEVSEIDYKQRIIALKDAIAGLQSDAVSVEDKNRLLRAVIKDITYHRETTVRGKWQNVPFELDIELL

SEQ ID NO: 10592 - protein, 496 aa, Unknown
  Description of Unknown: Integrase B10593 sequence
  cd00338,IPR011109,IPR038109,PTHR30461:SF21,Coil, PF07508,PS51736,IPR036162,IPR006119,PTHR30461, G3DSA:3.40.50.1390,mobidb-lite,PS51737,PF00239,SM00857, G3DSA:1.10.10.2600,SSF53041
MSRDENGRRAAVIYLRQSLDRLGTEDAVTRQREDAVAIAASRGFRVIAIHADNDTSARGRSKRPGFDATLADVEAGNASVIIAWNMDRLTRNSRDRLRLIETGRKAKALVVLARGSDIDLSTPSGRMTADILASVAQAEIETKSDRQKRANLQAVQRGRRVGGRRPFGFEQDGKTLRLDEADAIRDGYHAYLAGSTLAAIARDWNARGFTAQKAPWAGYSVAMILKNPRYMGWRGYAPADENRKGRPVIEAVTQAEWPAIVTENIWHGVNGMLASKATSAVSRGGRYLLTGVAWCALCDVEGQPSTVHGGGAVRHYPMYRCSRTYGHVSRKAEPIDRWVSAYAVARLSRKDARELLTSASSEPGIGELRAEYKSLLERKRKLAEDLALTDMDPGDYREMREAFRRRLGELETAMAGSGRASILRPLIDADNVEAMWDAMPRAHQRQVIDSIFTVTLYPAGQGTRTFRPETVRVEPKREKQALKTQPVLNEKRRIRQ

SEQ ID NO: 10593 - protein, 496 aa, Unknown
  Description of Unknown: Integrase B10594 sequence
  cd00338,PF13408,IPR011109,IPR038109,PF07508, Coil,PS51736,G3DSA:3.40.50.1390,IPR006119,IPR036162, PTHR30461,PTHR30461:SF3,IPR025827,PS51737,PF00239, SM00857,G3DSA:1.10.10.2600,SSF53041
MELSKGVIYARYSSDKQRDESIEGQIRECKAYAEREGIIITHIYTDKALSARTDHRPEFRQMIDDAKKHNFEYVIVYQLDRFSRSREDSAVYKSILKRNGVKVISAKENISSDPAGIILESVLEGMAEYYSAELAQKVRRGMTDNALKGKMNGTPTPLGYDKTNDNSLIINKHEAKIVERIFEMYLKGHSIPSICSFLNSKGYLSKKGGKFSYAVVRRILSNEKYIGIMKWNDIIVEDAIPSIISKEIFDKVQTANSRRIKLKASRSEFYNLCGKLYCGKCNAHYVGSTATSRSGEKHYYYVCNNRRKHHTCDAPNIKREIVEDIVINKTLEILNQPNTIEELAKMAIKANKEMMSTSELELQSINDRIKQLQSELDNYMKAIAKGFISDTLQNQIEKTEAELQDHMTRRTNHEIASNQIQLTAEHIEFFLHKMAKENPTTKQGRASIIDTFIKQATIFDDRVEIVFNYSNDLPQFKEQAIECSHSCDMVDHQGFE

SEQ ID NO: 10594 - protein, 496 aa, Unknown
  Description of Unknown: Integrase B10595 sequence
  IPR038109,IPR006119,PS51737,PF00239,G3DSA:3.40.50.1390, PTHR30461,IPR025827,SM00857,G3DSA:1.10.10.2600,SSF53041, IPR011109,PF07508,PS51736,mobidb-lite,cd00338, PF13408,Coil,IPR036162,PTHR30461:SF3
MTAVIYARYSSAGQQETSIEFQIEDCTQFAHRLGYDVIETFQDRAKSATTDARPGFLKMIAYCAENRVDAVICWKHDRFARNRYDAAVYKSKLAKAGTRLLYCRETNSEGADSIIIDSVMEGLAEFYSANLSANVKAGNRKAAEKRWTLGVKTFGYGTAPDKTYMINEDEAVIVRTIFREYAAGTPIKDIIRDVVPGWGYYRIEKMLSNEKYIGHYHMYGVDDWCIPPIIDRETFDRCQARSAHKKHAPREDHETYLLSGKVFCGLCGDRYNGNSTLKKTTGKIYRWYSCKNHKKGCKNDSVDRDRLEAMVMEKLTAIVHSDEMIEQLADEFIRAQEENATFLRACENQLADLNSQRSALVTAISRNPLNSLVDRLAELEQEIEAREAAIRRERSAMFTREQIRAFFLDFRQHPDEPRWRRMLVQTFLVAVWIYPDKIIIQTTLDGSIAPDRDTADRIASDRDPPVGPITTPACQTRNGPTLSIWLVIPRTEKSTR

SEQ ID NO: 10595 - protein, 496 aa, Unknown
  Description of Unknown: Integrase B10596 sequence
  cd00338,PF13408,IPR011109,IPR038109,PF07508, Coil,PS51736,G3DSA:3.40.50.1390,IPR006119,IPR036162, PTHR30461,PTHR30461:SF3,IPR025827,PS51737,PF00239, SM00857,G3DSA:1.10.10.2600,SSF53041
MPEALNAVIYARYSSDRQTEQSIEGQLRECYAFAKANDIAVIDTYIDRAISGKTDNRPAFQKMIEDSAKRQFQAVIVYRLDRFTRNRYDSAIYKARLKKNGVKVLSAMENLNGSPESIIMESLLEGMAEYYSVELSQKITRGMRENALKGKALGGQRVLGYKVNSDCYFEIDETTAPVVVDIFKLYSSGKTVKEICDILNARGVKTARGGAFNKNSLHTILTNKKYIGIYKTKYGEIVGGIPAIIDKELFEMVALRMEQNKKAPARAKAEINYLPSTKLFCGKCRSAMVGESGTSKTGKKYYYYACVKKKREKACDKSNVKKDWIEDLVIQRTVTDILKDDVIDKIADRLVELQKAEAAESGTMLYLENSLAEIQVSIKNIMTAIEKGIITESTKTRLTELEDEKRNVEIEIAKESIARRIISREQIIYWISSFKDGDITSEKYRQQLIDTFVHAVFVYDDKIVITYNYSGENNTATISDLDLSSPPLQSNPNIFC

SEQ ID NO: 10596 - protein, 496 aa, Unknown
  Description of Unknown: Integrase B10597 sequence
  cd00338,PF13408,IPR011109,IPR038109,PF07508, Coil,PS51736,IPR036162,IPR006119,PTHR30461, G3DSA:3.40.50.1390,PTHR30461:SF3,IPR025827,PS51737,PF00239, SM00857,G3DSA:1.10.10.2600,SSF53041
MYEDIKTACLYVRFSSHNQTEQSIEGQTRVCRDFCKRHNIRIVEIYADRATSASKDIEKRVQFLKMIKDSEKGLFDAVIVYKLDRFARSRYDSATYKYRLKRNGVQLISATENISNDPEGIILESVLEGMAEFYSAELSQKINRGMRESAYKHNSIGGAIPLGYKIEDKKLVIDPKTAPIVKEAFEKYADGETVAEICRQFNARGYKTSKGTAFGKSSFTKIFRNERYIGVYTFHDYRAEDAIPAIIDKDLWDRVQLRVGKIKNAPARNKAKVVYLLSGKIFCGHCGSKMNGNCNAGNYYYYQCYGKKNGNVDCKKKNIRKEFIERLVAQDALSLLTDEYIEQIATIACEKNQHEIELDSALPTIRDRIHQVDLSLNNLLKAIESGSAPDMLVKRMGELEKEKKDLQAQAKKESEDIVELDKAQVIYWLEQFRGGSIEDEEFCRMLIDLFVNSVTVWDEDDNTCKVTVAYNLTSLPTKTYRLNKGGTLSDFTSNAP

SEQ ID NO: 10597 - protein, 496 aa, Unknown
  Description of Unknown: Integrase B10598 sequence
  cd00338,PF13408,IPR011109,IPR038109,PF07508, Coil,PS51736,G3DSA:3.40.50.1390,IPR006119,IPR036162, PTHR30461,PTHR30461:SF3,PS51737,IPR025827,PF00239, SM00857,G3DSA:1.10.10.2600,SSF53041
MPEALNAVIYARYSSDRQTEQSIEGQLRECYAFAKANDIAVIDTYIDRAISGKTDNRPAFQKMIEDSAKRQFQAVIVYRLDRFTRNRYDSAIYKARLKKNGVKVLSAMENLNGSPESIIMESLLEGMAEYYSVELSQKITRGMRENALKGKALGGQRVLGYKVNSDCYFEIDETTAPVVVDIFKLYSSGKTVKEICDILNARGVKTARGGAFNKNSLHTILTNKKYIGIYKTKYGEIVGGIPAIIDKELFEMVALRMEQNKKAPARAKAEINYLLSTKLFCGKCRSAMVGESGTSKTGKKYYYYACVKKKREKACDKSNVKKDWIEDLVIQRTVTDILKDDVIEKIADRLVELQKAEAAESGTMLYLENSLAEIQVSIKNIMTAIEKGIITESTKTRLTELEDEKRNVEIEIAKESIARRIISREQIIYWISSFKDGDITSEKYRQQLIDTFVHAVFVYDDKIVITYNYSGENNTATISDLDLSSPPKIRPSAFGR

SEQ ID NO: 10598 - protein, 496 aa, Unknown
  Description of Unknown: Integrase B10599 sequence
  cd00338,PF13408,Coil,PS51736,G3DSA:3.40.50.1390, IPR006119,IPR036162,PTHR30461,mobidb-lite,PTHR30461:SF3, IPR025827,PF00239,SM00857,SSF53041
MIASITCAIYIRKSREDKDKPSHRLTVQREQLPAHAASQGWAYSVYDDGHASAARGKVDSLKERSRLEADIRAGKIGIILTIELSRLSRDDSLQDYVAWLHLCAEHRVKLATMSRTLDPSQHSDWMLLLMEGGFSSVEMRVLQSRMAEGRAQALQTGKFLGGQLPPPYIYGRAKNAPVVDPEALERMRQLWHLAETKSTRQVAEELKVPLITIRRAISDQRLLFCQAKRPGPTGTLIDCEWEPCLTEEQAERIRANRSGRLSSGSRRIYGGLLSNLGLFQCGYCGRSIRAWTNSRRRKDGSRLDYYGCKANELKRTCPDSRMISQEAINERVITNVLGTLSDTAMLRESWLASQKQDGQEEQLTDLERQGRKLQEKKQRLVAAVVEGVLNFTDAKAQREELDAAIAATEQARQSILRCQREEPDWEALALMRDQFGDLEEAERRQMITLVVKNIRMFASYLIIEYLLPRGPAGEMTSRVHLPPPAKTGPKVYKDKT

SEQ ID NO: 10599 - protein, 495 aa, Unknown
  Description of Unknown: Integrase B10600 sequence
  cd00338,PF13408,IPR011109,IPR038109, PF07508,Coil,PS51736,IPR036162, IPR006119,PTHR30461,G3DSA:3.40.50.1390,PTHR30461:SF3, PS51737,IPR025827,PF00239,SM00857,G3DSA:1.10.10.2600,SSF53041
MRQKFKIDLSMLTPEEQQQFRDDPTTLTKGEVDVALYLRFSSERQKEQSIEGQLRDCIAYCKRKSFRIVAIYVDRATTARKDVEKRVHFQEMISDSAHHLWNFVVVWKLDRFARNREDSAVFKMRLRKNGVRVKSATETISDNPEGIILESVLEGIAEYYSADLSQKITRGLRESAMKGHSVGGHVPLGYKIEDHRLVINPATAHIVQEAFQLYANGESMAEICRIFNGKGYRTAKNSEFNRSSFKSMFKNVRYIGTYIYKDIKKENAIPAIIDKDLFETVQRRLSLAADAPARGKAKVDYLLSGKLFCGHCGATMNGESGTSKTGAIHNYYTCYSRKRRKGCDKKPLKKDFIERIVAQDAMALLTNDVIEELADMAMSQADRDLKENTRIPELSTRLTEIEQGINNITKAVEKGIASDALLDRLTELEKEKKDLTSQLREEEKYIYRIDRDQVVFWLTKFQGGDIEDEDCRRRIIDLLVNSVTVWDEPDGYKIT

SEQ ID NO: 10600 - protein, 495 aa, Unknown
  Description of Unknown: Integrase B10601 sequence
  cd00338,PF13408,IPR011109,IPR038109,PF07508, Coil,PS51736,G3DSA:3.40.50.1390,IPR006119,IPR036162, PTHR30461,PTHR30461:SF3,PS51737,IPR025827,PF00239, SM00857,G3DSA:1.10.10.2600,SSF53041
MYEEVKNACIYARYSSSNQTEQSIEGQLRVCREFCNRHNIRVVEVYTDRATSASKDIEKRVSFLKMIKDSERGNFDAVIVYKLDRFARSRYDSATYKYRLRKNGVQLISATENISNDPEGIILESVLEGMAEFYSAELSQKIHRGLRESAYKHNSIGGQIPLGYKTEGKKLVIDEETAPIVREAFEMYAEGHGVADICRTFNAKGYKTSKGTRFGKSSFSKIFRNEKYIGVYQFHDYRAEDAIPALIDRKTFNLVQARLKTVGKAPGQFKAKHIYLLSGKLYCGHCGSKMNGNCNTNEYSYYECYGKKNLHKDCHKRNLRKDFIEDIVVRDALSLLTPERIEEIATVAIQTNTYEVETTTDIPAIRGRLHETKLSLENITKAIEGGLAPETLVKRMVELEKEKKVLEGELKKEEKGVAYLDREQVIYWLNQFKDGDIEDEDFRRQLIDLFVNSVTVWDEPDDFFKITIAYNLTSLQEKTYRLPKGGTLSDLALNP

SEQ ID NO: 10601 - protein, 495 aa, Unknown
  Description of Unknown: Integrase B10602 sequence
  cd00338,IPR011109,IPR038109,PF07508,Coil, PS51736,IPR036162,IPR006119,G3DSA:3.40.50.1390,PTHR30461, PTHR30461:SF3,PS51737,PF00239,SM00857,G3DSA:1.10.10.2600, SSF53041
MNAAIYARYSSHSQREESIDQQVAVCRRWCAAHGHDVAAVYADEARSGRSTEGREQFLRMVDDAKNGMFQLVVVYKLDRFARDRYDAAIYRKRLRDAGVEVKSAMEAIPDGPEGRLLEAVVEGVAEWYSADLSQKTLRGMTHNAERCRANGVQVFGYGIGEDGRYVIDEPQAEVVREVFRRWADGEPSAVVARELAARGVRTARGRTPKKDWPSTIVHDERYLGTYRWGDVRVEGGMPRIVSDAEWVAAHNRARRPSLAPKRTHDYALSGRLWDRATGLPMHGYSARGEGGEYTYYGVIEDGHRRLVRRELIEGAVVRAVRAALADAALVDDVVARVMERQRRLSDSPEVLGARATLRAADAEEERLLDAIQAGVPLAGIRERAEVLNERRRAARATLETAEGGAVSADAVRAAMARLASHGSDAAILRHCVAGVVVDRAGRAVVVTLPIADKKRAPTREGVSARGVWQPVGGRDSNVAWCVVDGGLLLRAPLAA

SEQ ID NO: 10602 - protein, 495 aa, Unknown
  Description of Unknown: Integrase B10603 sequence
  cd00338,IPR011109,IPR038109,PF07508,Coil, PS51736,G3DSA:3.40.50.1390,PTHR30461,IPR006119,IPR036162, PS51737,PF00239,SM00857,G3DSA:1.10.10.2600,SSF53041
MEGMYCAYLRKSRADEVREKVEEGYDALSHHRQALEALASRMEVDLSRWYSDGIKSGERIEGRDGMRELLADVQARRWDGVLCMEVERLTRGDMIDQGTVLRAFHDTGTLIVTPTKVYDPASEADMEYFEFGLFMSRREFKTINKRLIAGRAASVREGQFIAKDPPFGYDKARISGLKTLAPNADAPHVVRIFEAFAAGDSYKTIVRSLDAAGVRPVRGTAWSTSSIQNIVRNPVYVGKVRWNDTRQEVYYENGRRRSHTKANPDAILVDGLHQPIVSQELWDAVSDRIASAPVRGSYEHRNPFGRILVCAECGKALVWAKPSHCNGSECFTHRHRGVGCRTKGCRVSVLEKAVVDALEQIAGDLDLAVGHEAPVAAVTAADCLAEAEQARKAISDNFDRMERGVISEADFVERRAVLEARIAESEAEAARIESMSAEAAAARAATVRDCIRAIGDHSIPVELRRKAIWAAIERIEYQNRAPVFKDEIELRIIIR

SEQ ID NO: 10603 - protein, 495 aa, Unknown
  Description of Unknown: Integrase B10604 sequence
  cd00338,IPR011109,IPR038109,PF07508, Coil,PS51736,IPR036162,IPR006119, PTHR30461,G3DSA:3.40.50.1390,PTHR30461:SF3,PS51737, PF00239,SM00857,G3DSA:1.10.10.2600,SSF53041
MPTARTAVIYARFSCNKQREASIDDQLRICRQWCQREKYAIVAEYCDYAISGRTDDRPEFQRMVANAGESDIVLVYMMDRFSRGEYDAPIYKRELAQHGVKLVSALEQIPDSPEGIIYEKLLEGLAACESKKTAIRTRRGMEGNALKCKTNGVRVFGYASNEADEYVINEDEAAFVREAFKRRIAKETTNSIARDFAARGVKTSQGNPCGYSMVERMVKNRKYTGRYEWGGVVKEGGMPAIIDEVTFMEAQGIRAAKERSAESWGDFALSGKAICAGCGRNLQGVSGRGRKNVKYEYYRCHDGCVRPVRREELEGEIVKALRALLQDREEALRIARMVAESSDGAEVAARRKQAAQSLSAAERGLKNILNAIERGIIAPGAKERIAELEHQRDRAKLDLEAIRDEQIDPERLADFLQCGSALDDATLLKAFVYQVSVSDEECIVTLNYDVESNEPARLDVQRVRTKCKWCTVCASPRTEVCAIGTIIFVRIPRAA

SEQ ID NO: 10604 - protein, 495 aa, Unknown
  Description of Unknown: Integrase B10605 sequence
  cd00338,IPR011109,IPR038109,PF07508,Coil, PS51736,G3DSA:3.40.50.1390,IPR006119,PTHR30461,IPR036162, PS51737,PF00239,SM00857,G3DSA:1.10.10.2600,SSF53041
MKKDRLSAAVYARYSSHAQRAESIDQQVAVCTDWCEGHGLEVAAVYADEARSGRSTEGRSEFLRMVADAPEAPWSTVVVYKLDRMARDRYDMAIYRKRLRDAGVEVRSAMEAIPDGPEGRLLEAVVEGVAEWYSADLSQKTLRGMRAGADACRALGVPVFGYSVGADGRYEVDEAQAAIVRRVFAEWIRGDEATLIAERLAAEGVRTASGARPDKNWARRIVRDERYLGVYRWGDVRVEGGMPAIIDAAAFLEAGKRRRAAHAPARVHEYPLAGRLWDAETGSKAFGYSVRAHGRDYVYYAVTTPEGRATVPRDAVDAACARAVRAALSDAALVDDVVARVLELDGGPVEGLDEARAALRAVEAERLRLGDAVRAGVAPDDLAEAFRDVRERKMAAEAAVAALTAPPLAAEDVRAAIRDLAAGGLSDREILETSVWRAELVRNEGAVVVELPFRRKNAPREQGVREKCSWLPLGAPGAKWAVVPGALLLRVELAA

SEQ ID NO: 10605 - protein, 495 aa, Unknown
  Description of Unknown: Integrase B10606 sequence
  cd00338,IPR011109,IPR038109,PF07508, Coil,PS51736,IPR036162,PTHR30461, IPR006119,G3DSA:3.40.50.1390,PS51737,PF00239, SM00857,G3DSA:1.10.10.2600,SSF53041
MDAAQYLRKSRVEEGLETDEVLAKHRKALADYAARNGIRIIATYEEVVSGESLYARPEMLRLLRDVEAGSYDAVLCMDLDRLSRGRMHDQGIILDAFRDSGTLIVTPEKTYDLRDELDDEMAEFKTFMSRREYKIINKRLRRGLNQAIQEGCYVANAPYGYRSVYVDKRPTLEIYEPEAKFVRMMYQMYADGYGCVSIARQLNLLGARPHRSDAFNRSSVMHILKNPTFAGKVVWNQKSHIKKGSKGNETHITIYNPRDQWTVTDGLHPAIIDKELYDRVQEIIAGRYRPSRQDGTVRSPLAGLMYCGSCGGRMQKMMGRTKLPYLLCPVPGCCAGTKYELVEQRLLLHLREILERLTSVQGAAQLPQGTDWKTVLTEVRRERAAAEGQKNRLYELLELGEYDLPTFRERMPVVKDKIAALEAREEELLAAMDAEARRDPAAQAEKIAAVLAAYDDSDAAHRNALLHSVVERVTYWKEKKTKPTDFRLDVQIKPN

SEQ ID NO: 10606 - protein, 495 aa, Unknown
  Description of Unknown: Integrase B10607 sequence
  IPR038109,PS00397,IPR006119,PS51737,PF00239,G3DSA:3.40.50.1390 ,PTHR30461,IPR025827,SM00857,G3DSA:1.10.10.2600, SSF53041,IPR011109,PF07508,PS51736,IPR006118, cd00338,PF13408,Coil,IPR036162,PTHR30461:SF3
MIAIYARVSTEEQALKGSSIESQIEACINKAGTTDVLRYIDDGYSGELLERPGLNKLREDVEKGLIDKVICYDPDRLSRKLMNQLLIDDEFRKKGVELVFVNGEYANTPEGQLFFSMRGAIAEFEKAKIKERTMGGRRQKAKKGIIIKNSGLYGYTYNKEKRTYEINEDEAKIVRMIFDYYTEQRFHGINSLAKHLTKIGVPTKNGAKEWHRQVVRQILMNESYTGRYYQNKWNTEGAYVRKQAGKVGGMHLREKDEWIETKIPAIISEEQFARAQELLKYARRRTESYGRHQYLLSGLVRCGRCGATMNGKKTVRRGKAKYDYVCRKNYAGAKNKGCGRQMSEQKLDHIVWNQVLEWLNDPEELSKYKPSDNKQYIYEEIKQIETEIEKTRKGRKRLLKLASLDEELELEEIKEQLRELQEKEKTLTEQYSELQRELEEQKSNNNNNEILLKEALEYFLKNKDDITFDKKQHIIRKLIKEIVVVDAETVYIYTY

SEQ ID NO: 10607 - protein, 494 aa, Unknown
  Description of Unknown: Integrase B10608 sequence
  cd00338,PF13408,IPR011109,IPR038109,PF07508, Coil,PS51736,IPR036162,IPR006119,PTHR30461, G3DSA:3.40.50.1390,IPR025827,PS51737,PF00239,SM00857, G3DSA:1.10.10.2600,SSF53041
VNATPAARTRPKRAVLYLRQSTYREESISLELQEAAGREYCARHGYDVIAVEADPGISGRTWKRPAVQRVMGMIESGEADVVVLWKWSRLSRNRKDWALAIDRADIAGGAIESATEPIDTATASGRFARGLMTEYAAFQSEQIGEQWKEAHARRRRLGLPAEGGPRYGYDKRDGFYYPNPDEAPVLAEMYRRYLRGEGFTRIVKWLNTAGHPTRSGMPWSRTVLTHMLDAGFGAGKIIHRQTKNGKRDWNIANATYHPGQHTPVITEAEWETYLARRREQTPGPRTVEPKYMLTGLIVCDDCGAPMHVGNAGLKDYKCSGAQQRRDRPGMYMTRALVEQAVREWVAELASDVDAGTSAVLKQQRRQVVQLDNVATLERRIEEVTQRMGRITLRWSSGKMPDAAYDAAIAQLDEDLTALRARLKRAAPAPEPPVNPGPLAADLTARWDELTVLEQRNLLRALIHQVRIRKPVRQGTGVWRDRVIIIPSWEAPTVG

SEQ ID NO: 10608 - protein, 494 aa, Unknown
  Description of Unknown: Integrase B10609 sequence
  PF13408,IPR011109,PF07508,Coil,PS51736, IPR036162,PTHR30461,G3DSA:3.40.50.1390,IPR006119,PTHR30461:SF3, PS51737,IPR025827,PF00239,SM00857,cd03768, SSF53041
MVAIYARQSIDKKDSISIESQIAFAKREIFSEECKIYEDSGYSGKNTNRPAFTEMMHDIQTGQIEKVVVYRLDRISRSIVDFADFIDVLENNGISFVSATEKFDTSTPMGRAMLYIIVVFAQLERETIAERVRDNYYARVKKGAWGGGPAAYGFDLVRTTLDSKKATIYEPNADLEIVSKIFDTYAQPFTSLADVQKALIRSGALSAGGVNFDSVKLSGILKNPAYVQADIAIYNYYKSKGAIMANEPEDFDGTHGCILAGKRDASERKYKDVSNHLLAIGHHNGVVDSSTFLYCQEKLSKNRQIKNSGKGKHSWLTGLVKCGHCGYAFSVRFASTKDGRIPYFVCSGKYLHKCCDAKQTHRVREIEAQVQARLIQEAEAYHLAREKRENNVIKQHQQKIADIDSKIENLISTLENVSQISAEYINRRIETLHREKQLLIHQYSEALTEFNAVEIIPFTAEDWENMSFEDRRDIAKSMIDRVVLSEDGVDVRFK

SEQ ID NO: 10609 - protein, 494 aa, Unknown
  Description of Unknown: Integrase B10610 sequence
  cd00338,IPR011109,PF07508,Coil,G3DSA:3.40.50.1390, IPR036162,IPR006119,PTHR30461,PS51737,PF00239, SM00857,SSF53041
MDSVPPREYALYLRKSNGPIGILRQRTATTTYIKGKGGVIGPVFEDADRTAFRKGTDRPEREGFDEMLGWLSQRSGAGAAAWHADRFVRDPEEAELLIRVCRDRGHMVETKAGGAYDMSTANGRKHFRQDALDATTEVDHNTERIIEQKAEAAAAGLWLGGLRPFGWEGIPAEPGSETKFLGLRVVPLEAAALRSAAGAILEGTSVTSIAAEWNARGIKGTSGGPWDAGRLKRVLLRPRNAGLVVHNGVEKGTAQWDPVMPLEVFRALEVKLNGRRKPGHPSARVWQGSGLYRCGVCDKPVGVHGGTGGHHRTSYTCPGHVARQAVKVDKHVSAIVTAYLGRLEAAAALAAATVPRGEDVTLLRAQITAIEGRRKRVAERYVDGTADDDELDASVARAREEIAALEKRIAEAGRVNPLTSVAGDQRIGEKWPGYPVSRRQAIIRELLVVRIHPAGPGRPPGVQWPETWFDRDLIEILPGPVFGAAAPAAPLTVP

SEQ ID NO: 10610 - protein, 494 aa, Unknown; identical to SEQ ID NO: 9873
  Description of Unknown: Integrase B10611 sequence
  cd00338,PF13408,IPR011109,IPR038109, PF07508,PS51736,G3DSA:3.40.50.1390,IPR006119, IPR036162,PTHR30461,PS51737,IPR025827, PF00239,SM00857,G3DSA:1.10.10.2600,SSF53041

SEQ ID NO: 10611 - protein, 494 aa, Unknown
  Description of Unknown: Integrase B10612 sequence
  PS00397,IPR038109,IPR006119,PS51737,PF00239,G3DSA:3.40.50.1390 ,PTHR30461,IPR025827,SM00857,G3DSA:1.10.10.2600, SSF53041,IPR011109,PF07508,PS51736,IPR006118, cd00338,PF13408,Coil,IPR036162,PTHR30461:SF3
MDLEMMKARNVLRVALYVRVSSQEQVEGYSIGEQTDRLKKYAEAMGWSIVKVYVDPGYSGGNMDRPGLNEMIKDVEDGKIDTVVVYKLDRLSRSQFDTLYLIEKVFLTNNTDFVSMTENFSTNTPLGRAMIGFLAVFAQLEKDKINERTLMGKEARAKEGKWGGGSSEPIGYDYNPTTEELEINEYEKMQILEAVDLFLKGTPLRTICTIFDQKGYTYRGKSGKLRKWDPKRLKYVFANKIYLGYIKHRNAWYKGNHTPILTEATFKKLQKLLTQRAEDYAEHKKKCGKQTTYLGGFIYCKQCGAKFSKQSGKTRNGSYNHYYACYSRSKKVPKMVKDPNCKNIYWRMGDLDDLVINEIRKLATDPEYFHLIRKEKAEANDSPNKIDILKTEIKKLDDQISRFMDLYGIGTFTIDQVSEKIEPLNEHKKGLEKELENLNAELNVMTEEEVREIVSTFSEVLDRKDLNEIRLAIETLISFIEIDNEDIYIHWKFA

SEQ ID NO: 10612 - protein, 494 aa, Unknown
  Description of Unknown: Integrase B10613 sequence
  cd00338,IPR011109,IPR038109,PF07508,Coil, PS51736,G3DSA:3.40.50.1390,PTHR30461,IPR036162,IPR006119, PS51737,PF00239,SM00857,G3DSA:1.10.10.2600,SSF53041
MPEEIKTAVIYARFSCSKQREASIDDQLRVCRDWCAREGYAIVGEYSDYAMSGRSDDRPQFQKMIANAGESDIVLVYMMDRFSRDEYDAPAYKHELRKRGVEVVSAMEAMPDGPERILIEKIYEGLAAVESVKTSMRTRRGMEGNALKCKTNGVRVYGYGRNEDDEYVVNEDEAAIVREAFRRSCDHEPVDSIASDFARRGVTTRTGRPCGYSMVYQMLHNRKYTGLYSWGGIEVDGGMPQIIDKATFAMAQEVKPKKRRASEDWGTFALSGRAICSECGHNMAGTSGRGKKNVKYEYYGCRCGAKPVRRDWLEHELAEAIRGMLRDRETALRISHMLWDEPEPEIADARRRAMASKRKAENGLQNIMAAIEQGIVMPEFTERIAQLQAQKARAERDLASYDEARIDPEEFADFLQCGGGMDDAAVLDSFVYQVMVTPEECVATLYCDDERNEPARLSIARVRTFSGWCPICKDSRTQVLALGRSVFIRFSRAA

SEQ ID NO: 10613 - protein, 494 aa, Unknown
  Description of Unknown: Integrase B10614 sequence
  cd00338,Coil,PS51736,IPR036162,IPR006119,PTHR30461,G3DSA:3.40.50 .1390,mobidb-lite,PF00239,SM00857,SSF53041
MTAAIYIRKSREDKNKPAHRLTVQRQQLPDYAMAQGWTPIVYDDGHASAARGKTEDLEERNRLEADIKAGKINIILTIELSRLSRDDSMQDYTAWLHLCSQHNVKLATMSRTLDPAQHSDWMLLLMEGGFSSVEMKVLQGRMAEGRKQAIRSGRYIWGNPPTPYVKNPATGAIEIDPDQRTQVDAILTMAETMSVHRIVQQTGLPQIKIRRMISDDRLLFYLGKILDPDSGEEIDGQWPPLIDADRATTIRQARRTRKPYGKNREAGGLLSNLDGLLQCGYCGRTAKAWRNSRIKNDGTRNNYYGCSHSCQKSRLVQQKIIDDKVITNLLGTLKKTDHLAEAWTKNNTAGDIPGQLAAIDSEETDLLEKKQRLIQAITEGVISFADAKNTRQQIENNLSALQLQRRKIQASRQPEPDWHDLQKRAAKWPLMTEKEQRDFLQINLAEIRIYYNYALVSYRYPRTLDGNQTARVHLPEPYKPSTRKPRATNRNTAK

SEQ ID NO: 10614 - protein, 494 aa, Unknown
  Description of Unknown: Integrase B10615 sequence
  IPR011109,PF07508,Coil,PS51736,G3DSA:3.40.50.1390, IPR006119,PTHR30461,IPR036162,PTHR30461:SF3,PS51737, PF00239,SM00857,cd03768,SSF53041
LTGIYVRQSVDRKESVSIEAQIEFCKNELRGDTFRIYDDRGFSGKNTNRPAFKKLMEDVEKGAVSRIIVYRLDRFSRNIADFAGTYDIISRHGVELVSYTERFDTSSAIGKAMLAIVMVFAQMERETIVERVKDNYYKRGELGLFVGGPFHYGFEKEAVTHNGMKTKRLTEIPAEAKNVRQMYEKYASGISKPDILEWFSKVSSTNKTVMFIGQILRNPIYVKSNLAVINYLENRGAKQVNADGRRDGAGIFIYGIQKRTSVLYQDLTGGLLQIAIHDGFIPAELWLKVQKRFDSEYSPRNLGKGKRSWVVGLAVCAYCKLHVYTANKYGWLSCGGRKKKLCKLRKPFPKMSTVEEQVEKSLLEFMKDFPFKLNITKKENESRIQALEAEISAIGRQIDMIVETIVCTESGLKASAMQKFKQKLEALTDKSAELEREVYDLRQAGDNTYDSDIKLAEYVSNWQNFSMEEKNRIAKIFIKQVVLRDGEIEIKFII

SEQ ID NO: 10615 - protein, 494 aa, Unknown
  Description of Unknown: Integrase B10616 sequence
  cd00338,IPR011109,IPR038109,PF07508, Coil,PS51736,G3DSA:3.40.50.1390,IPR006119, PTHR30461,IPR036162,PTHR30461:SF3,PS51737, PF00239,SM00857,G3DSA:1.10.10.2600,SSF53041
MNAAIYARYSSHAQREESIDQQVDVCRAWCASQGHDVVAVYADEHRSGRSTEGRENFLRMVDDAKRGEWQLVVVYKLDRFARDRYDAAIYRKRLRDAGVEVRSAMENIPEGPEGRLLEAVVEGVAEWYSADLAQKTLRGMRHNAERCMANGVQVFGYAIVDGAYAVDERQAAIVRRVFAEWAEGIPAAHIARRLADEGVRTARGRVPKKDWPGAIVHDERYLGTYVWGDVRVEGGMPRIVSDAEWVAAHNRPRRPSMAPKRTHDYTLSGRIWDRATGLPMFGYSARGEGGEYTYYGVIEDGRRRLVRQHLVESAVCRAVRSVLSDAALVDDVVARVMDWQRRTLDSPDVLGARATLRSVAAEEERLLDAIQAGVPLDGIRPRVDALNERKRAARALLERREGDSVTEGDVRSAMAGLAAHGTPQAILRHCVAGVVVDRDAQAVVVTLPIADKKRAPTREGVSARSVWQPVGGHVSNVLWLVEGTTVMLRVPLAA

SEQ ID NO: 10616 - protein, 494 aa, Unknown
  Description of Unknown: Integrase B10617 sequence
  cd00338,IPR011109,IPR038109,PF07508,Coil, PS51736,IPR036162,PTHR30461,IPR006119,G3DSA:3.40.50.1390, PS51737,PF00239,SM00857,G3DSA:1.10.10.2600,SSF53041
MYCIYLRKSRNDEGTIEETLAKHEKILLELSKKQKLSISKIYREVVSGETIASRPVMQHLLSELEKELWEGVLVVEVERLARGATLDQGIMAQAFKYSSTKIITPLKTYDPNNEFDEEFFEFNLFMSRREYKTINRRLQQGRLASVKEGRYLGSIAPYGYNKTKTEDGFTLEPDPDEAPVVKMIFDFYTKERLGVSKIVRKLNDIGIKARKGNWTTSTIQGMLKNPVYIGKIRWNYRKTIKHVIDGKVESTRPKNKEFELTDGLHVRLIDDEVFYTALNYINQNRATPAPKNQPIKNVLAGIVKCGLCGRNMVRRPYGNLKQEDTLMCAYTDCKNVSSPLSLIEKTIIDNLKNYKFNKKSQKNIVNTELLEKNMNDIDSEIETLKKQKDSLHDLLEQNVYDTNTFLERSKKLNEKIKKLEENKFNIESELKSFKNQNIIIPKITKLINSYDKISIKDKNEMLKTILIRVEYLKKEKALKKNASHNVDLKLFPRI

SEQ ID NO: 10617 - protein, 494 aa, Unknown
  Description of Unknown: Integrase B10618 sequence
  cd00338,PF13408,Coil,PS51736,IPR036162,PTHR30461,IPR006119, G3DSA:3.40.50.1390,PTHR30461:SF3,IPR025827,PF00239,SM00857 ,SSF53041
MTCAIYIRKSRDDKDKASHRLTVQRQQLPEHARAQGWQVQIYDDGHASAARGKVEDLRERNRLESDIRNGLINIILSIELSRLSRDESMQDYVSWLHLCAEHGVKLATMTRTLDPAQPSDWMLLLMEGGFSSVEMKVLQSRMKEGRLQALREGRHLGGGIAPPYVYDKSSKQIRIDQDQLREIDHILTLAETHSARAIAQQVNRPEISIRRILSDNRLLFYQALREDPETGEMIQGDWPAIIDAERAARIRAGRRTRRTNAGRREYGALLSNLGILYCGYCGRTAKTWANSRTRKDGTRLDYYGCQVKNSQGACTNSRLIAQPELERRVLDCLFRNVADSAALADAWDAEQAANNPRQEIERLTQQLQKEQAKKQRLIAAITEGIIDFAEAKDQKRTIDTAIEQLQAQLKTARAADTTSPDWDAICIHPEEFSQLAPADQRDYLTLVIHKIRLYNAYALVDFRFPRLTGDRTARVKLPPISRGTRKGLAPRYKA

SEQ ID NO: 10618 - protein, 494 aa, Unknown
  Description of Unknown: Integrase B10619 sequence
  cd00338,PF13408,Coil,PS51736,G3DSA:3.40.50.1390, IPR006119,IPR036162,PTHR30461,PTHR30461:SF3,IPR025827, PF00239,SM00857,SSF53041
MKATTAAIYIRKSREEKDKPSHRLTVQREQLPAHARAQGWTPAIYDDGHASAARGKTESLPERARLERDIRAGKINVILCIELSRLSRDDTMQDYIAWLTLCADHRVKLATPSRSLDPAQHSDWMLLLMEGGFSSVEMKVLQSRMKEGRDEAYRAGKFLGGGCPPPYIYDKAQGRPVVDPELLQQMTQIWTMAETMSARSIASELGRAESFIIRSLSDDRLLFYQAKRVDQQTGELIPCDWQPVMTQEQAKQIKVARSTRHNKTKGVKKHPAALLSNLGIMFCGYCGRTIKTWYNTKERADGSRLNYYGCASKDTRLKCDRARLIAQDVIDFYATTNIFNTLENLEELKGIWEQQQGRVNSGEELKRINEEKKKNEEKKKRLITAITNGIMNLADAKGAMDEIKAKIETLQHRADQIADIIKSPPNWDAIDLTREDYNQLDRINRREFIRTIITRIDIYNMHAIITYTFPRKPDGTATAKINLPATHRGKRIDK

SEQ ID NO: 10619 - protein, 494 aa, Unknown
  Description of Unknown: Integrase B10620 sequence
  cd00338,PF13408,IPR011109,IPR038109, PF07508,PS51736,IPR036162,IPR006119, G3DSA:3.40.50.1390,PTHR30461,PTHR30461:SF3,PS51737, IPR025827,PF00239,SM00857,G3DSA:1.10.10.2600,SSF53041
MKRGAVYIRVSHLKDDGVSPETQMEKAQLQASLSSIDIVKVYEDLDISGRSATKRIGFQQLIEDVKGGKYDVVLVYRLDRFARNVRDFHHYVEVLEKNNCSLISISQSIDTGSPTGRLLRNILIDFAQFESEMISERVRDNMVQNARRGSWNGGQKAYGYDWDDEQKLLVPNDNAKWVLLMFEEYASNPGANRIRNLLYQNAVQAPSDGKWWAPTTIRYILRNSVYIGKIEYAGEVVDGKHQPIISQDIFDRVQHLLSKNSEMAPRSRDSQHLLSGLLICPYCGRHLQARFNGKKRIRRYMCYTRINMGVNECKCKILDADSLETEIINTVLTLGDSLGYFEDAKQSLKEVATAAAEEKPIIDKMEKEKRLKKIRSAMKDLFKDYYEEKIIPREQFMEINKQYLEEESQLVNYLEKLDQIDNHFAAQAADIDLLQRQLSALRTAWTLMTFEERKMSLRDIIKSISPYTDYIEMDIFFRKIEIIPQKNTETTMSF

SEQ ID NO: 10620 - protein, 493 aa, Unknown
  Description of Unknown: Integrase B10621 sequence
  cd00338,IPR011109,PF07508,Coil,G3DSA:3.40.50.1390, IPR006119,IPR036162,PTHR30461,PTHR30461:SF3,PF00239, SM00857,SSF53041
MRAMDEWAVRNNRRLLPPVCDINKSGRTFRKRSVDKIIAAIKDGHYRHVVLWKWSRWARNQAESAVYSSYVHSAGGRVDSATEDFDLDTAIGRLGQGMTGVIDQYQSELISESWSSVHALRREDGLPHGGRERFGYAYGETVVNEERRKRYTKNDEAPILIKAYCDWLDGKSFIKIAQELNAATFVTMLGGRWTPQGVARMMDTGFAAGLIRERSEGMKEKIRGKQVGANSILSYDIWRTGSHEAVIEASIWDTYKARRVAASGLPPRSKAPVHALSAIMFCTECRRRLTTKYAGAGRTHQWQCPWQKSFHPGVAVTVNNRLALVAVREWVRAEIGDELPVAKATNTAREEQAKRLADAQTHRRALSNRIGELEGMINNLTIQIATSSPSVAARFISSIEVWDSEIDQLRAELARSAPRPRAQKDQEALRALDAVWGELPPSVLHEALAKVISRVEVSPRSEISTRASAADRVSAIGVWEDPSTDEWLASRPA

SEQ ID NO: 10621 - protein, 493 aa, Unknown
  Description of Unknown: Integrase B10622 sequence
  IPR038109,PS00397,IPR006119,PS51737,PF00239 ,G3DSA:3.40.50.1390,PTHR30461,IPR025827,SM00857 ,G3DSA:1.10.10.2600,SSF53041,IPR011109,PF07508,PS51736 ,IPR006118,cd00338,PF13408,Coil,IPR036162,PTHR30461:SF3
MSVKYAYGYIRVSTHDQEEISPDSQEHLLRDYAAKNNIVIIKIFTDLGISGRKANKRPSFQEMIGLAKGDDHPVDQILVWKFSRFARNQEESIVYKSLLKKQHNVDVVSVSEPLSDDPFGSLIERIIEWMDEYYSIRLSGEVHRGMKENALRGAYQARPPLGYKIVEHGKPPAIVPEEAKIVRTIFEKYANEGMSFFDIARYLNSLGLKTSHGKPFERRSVEYIIQNPSYCGMIRWNRTENSTNRIKDKDEWIVTEGQQPAIISKELFESAQERFKATYKPVGKRPSSTYKHWLSGLLKCPDCGRTLTSTTMKRVNGEKYSYFSCYGYSKGKCKKPNGISSLVLEKEVLASIKEILDTKDIVYELREYQPTEQFDERKAITEQLESLTGKEERIKASYREGIDTLEEYKANKAIIQKERESLEQQLKELKKAAHKSDPDPADAMLQKVRSVYDILISNNYTYVQKNEALKQIIDKIIYDRKNDSLKIYFFLYR

SEQ ID NO: 10622 - protein, 493 aa, Unknown; identical to SEQ ID NO: 10035
  Description of Unknown: Integrase B10623 sequence
  cd00338,PF13408,IPR011109,IPR038109,PF07508, Coil,PS51736,IPR036162,G3DSA:3.40.50.1390,IPR006119, PTHR30461,PS51737,IPR025827,PF00239,SM00857, G3DSA:1.10.10.2600,SSF53041

SEQ ID NO: 10623 - protein, 493 aa, Unknown
  Description of Unknown: Integrase B10624 sequence
  IPR038109,PS00397,IPR006119,PS51737,PF00239,G3DSA:3.40.50.1390 ,PTHR30461,IPR025827,SM00857,G3DSA:1.10.10.2600, SSF53041,IPR011109,PF07508,PS51736,IPR006118, cd00338,PF13408,Coil,IPR036162,PTHR30461:SF3
MKETLSERKTGAIYIRVSTDKQEELSPDAQLRLLMDYAKTNHTDIPMEYIFQDNGISGRKADKRPAFQQMIALAKSKEHPIDTIIVWKFSRFARNQEESIVYKSLLKKNNVDVVSVSEPLIDGPFGSLIERIIEWMDEYYSIRLSGEVMRGMTQNALRGHYQGDAPIGYQSPGNKKPPEKDPKTIQIPIMMKDLLLSGSSLLQIARKLNEHGYRTKHGNLWDARGVRYVLENPFYAGISRWNYTDRGRQLKPADEVIYTKGNWEPLWDKATLEEIKKHLAMNMRKTKSRDVSAAKHWLSGLLICSSCGGTLAYSGTKNSRGFQCWKYTKGFCNESHYIGIRPIEKMVIEYLESILHSPAIVYTVISSASADADSKLADLEKQLQKVENKEKRIKAAYLNEIDSLEEYKANKAALLKERAAIEKNIKLLTISNTDMSKEEMDKKMKQNISALLTVLQDDSADYVQKGNMMRNVVDHIVFDRGNTSLDMFLKLVI

SEQ ID NO: 10624 - protein, 493 aa, Unknown
  Description of Unknown: Integrase B10625 sequence
  IPR038109,PS00397,IPR006119,PS51737,PF00239,G3DSA:3.40.50.1390 ,PTHR30461,IPR025827,SM00857,G3DSA:1.10.10.2600, SSF53041,IPR011109,PF07508,PS51736,IPR006118, cd00338,PF13408,Coil,IPR036162,PTHR30461:SF3
MSVKYAYGYIRVSTHDQEEISPDSQEHLLRDYAAKNNIVILKIFTDLGISGRKANKRPGFQKMIGLAKGDDHPVDQILVWKFSRFARNQEESIVYKSLLKKQHNVDVVSVSEPLSDDPFGSLIERIIEWMDEYYSIRLSGEVYRGMKENAIRGAYQARPPLGYKVVEHGKPPVIVPKEAKIVQTIFEKYVNESMGFFDIARYLNDLGLKTSHGKPFERRSIEYIIQNPSYCGMIRWNRTENSTNRIKDKDEWIVTEGQQPAIISKELFESAQERFKATYKPVGKRPSSTYKHWLSGLLKCPDCGRTLTSTTMKRVNGEKYSYFSCYGYSKGKCKKPNGISSLVLEKEVLASIKEVLDTKDIVYELREYQPTEQFDERKAITEQLKSLTGKEERIKASYREGIDTLEEYKANKAIIQKERESLEQQLKELKKAARKSDQDPADAMLQKVRSVYDILISNNYTYIQKNEALKQIIDKIIYDRKNDSLKIYFFLYR

SEQ ID NO: 10625 - protein, 493 aa, Unknown
  Description of Unknown: Integrase B10626 sequence
  IPR038109,PS00397,IPR006119,PS51737,PF00239,G3DSA:3.40.50.1390 ,PTHR30461,IPR025827,SM00857,G3DSA:1.10.10.2600, SSF53041,IPR011109,PF07508,PS51736,IPR006118, cd00338,PF13408,Coil,IPR036162,PTHR30461:SF3
MKEKVSERKTGAIYIRVSTDKQEELSPDAQLRLLMDYAKNNHTDIPMEYIFQDNGISGRKANKRPAFQQMIALAKSKEHPIDTIIVWKFSRFARNQEESIVYKSLLKKNNVDVVSVSEPLIDGPFGSLIERIIEWMDEYYSIRLSGEVMRGMTQNALRGHYQGDAPIGYQSPGNKKPPEKDPKTIQIPIMMKDLLLSGSSLLQIARKLNEHGYRTKRGNLWDARGVRYVLENPFYAGISRWNYTDRGRQLKPAEEVIYTKGNWEPLWDKATLEEIKKHLAMNMRKAKSRDVSTAKHWLSGLLICSSCGGTLAYSGTKNSRGFQCWKYTKGFCNESHYIGIRPIEKMVIEYLESILHSPAIVYTVISSASADADSKLADLEKQLQKVENKEKRIKAAYLNEIDSLEEYKANKAALLKERAAIEKNIKLLTISNTDMSKEEMDKKMKQNISALLTVLQDDSADYVQKGNMMRNVVDHIVFDRGNTSLDMFLKLVI

SEQ ID NO: 10626 - protein, 493 aa, Unknown
  Description of Unknown: Integrase B10627 sequence
  cd00338,PF13408,IPR011109,IPR038109,PF07508, PS51736,G3DSA:3.40.50.1390,PTHR30461,IPR006119,IPR036162, PTHR30461:SF3,IPR025827,PF00239,SM00857,G3DSA:1.10.10.2600, SSF53041
VRAAGYFRVSTEQQASADRNSLDLQAAAFRARCAERGYEVAGTFSDVMSGRKNARPEYQRLLAAARAGAFDVIVVTWLDRFGRNDREITMRVLELQDAGITVEPTEEAIPDFITLVLQAWKAGQEVERIAARTSDGLLAAASKGAALGKAAFGYRRRWDLDQDDRRVNFRFEIFEPEARLVRWVFEQYTFHNASLRGLCYALQQQAGPHLHGLWVPREVAMLLDRERYTGVYTYNARANSRRAAVEVRIPGAIPAIISRDLFDAAQARRHTKAALPAGRTQTSTFLLSGILKCGHCGGPMHGAQNWQRRKRDRTGERVQYPFYSCGWHRRQRGCEFLNLHMTHVLDEAVVAFLEDVAGNVARVRDEIGERSTLAQVQLLDVKKALAEVDAKFERTMRLFFAGSISSEEQLGATNRILDGEKRRLTLERDRLLEAIAATAARQREVAELPEDMGVIVDPRASIQDRKTLVQRYIARVEVWNGEPIPRIYPRFFE

SEQ ID NO: 10627 - protein, 493 aa, Unknown
  Description of Unknown: Integrase B10628 sequence
  cd00338,IPR011109,IPR038109,PF07508,Coil, PS51736,G3DSA:3.40.50.1390,IPR006119,IPR036162,PTHR30461, PS51737,PF00239,SM00857,G3DSA:1.10.10.2600,SSF53041
MTTNTYSIPCKEEKVKCVFYGRYSSAAQTEQSIEGQRTVCAEYAERENMCIVAEYTDRAKSGTSDRRPEFQHMISDIESGKIDTQAVLVYKLDRFARNRADSAIYKRKLKEMGIRVISATEPLTDTPEGIILESVLEGMDEYYSMELARKTRRGKEESLKKGYFINWKAPFGYSVADRELIINPVDAEAVRDIFNRYAEGQPLSRIAKDYKEIIPSKFWDGGIISRILHNRIYIGEYRYGTHDTIGKVPAIIDTDLFERVQALLAESLNKQRKRQGQYEYLLTGRFWCEKCHKRIRGSQGSTNKTHYYRCPNCGHHQRADEVHKRVFQALSERFNDSVVEEVAQAAYEQYQECAMPDTELVLQAQLDSINEKLDNATTAILNGLYNPVLHAKIENLQAQKESLEEKMQTATKTKKYTLTQFKTALTHIAQNPPAQMLKLFVSYVVRRNDDLIICIDLSGEGNHSEVGWEELSMIVGMSNLATINNKPCIILAA

SEQ ID NO: 10628 - protein, 493 aa, Unknown
  Description of Unknown: Integrase B10629 sequence
  cd00338,PF13408,IPR011109,IPR038109, PF07508,Coil,PS51736,G3DSA:3.40.50.1390, IPR006119,PTHR30461,IPR036162,PTHR30461:SF3, PS51737,IPR025827,PF00239,SM00857,G3DSA:1.10.10.2600,SSF53041
MNAVIYARFSSSAQREASIEQQINVCMAFAEREGYNVLQTYADRALTGRTDRRPQFLQMIKDARKGRFCAIIVYALDRFSRDKYDSARYKHELRQNGVRVVSATEPISDNPSGILIESVFEGLAQYYSAELAQKIRRGYEDNAKKCLASGSVPFGFRRSADGHYEIMPEEAEIVREIFRRVGSGETYADICRDLNARGIKTRHGSAWNRSSFNTLLSNQRYIGTFISKYHIQEDAIPQIVDKDLFYKVQTISHTKTGPRRTPNGYYSLTGKLFCGLCGDTMTGTSGTSKSGKLCFYYTCHGHRAHKCDQRSRPRDQLEDTICRAIWDDVLSDDSIRWMAHQTILDQDKLRADSDLEIVRLSLAEVQTQKANILNAIKAGIFTNTTKDELLRLEREEADLTEKVKEGEKLLDDQPTEDDIISFLELFREGYTDPEFTRSGLLDAFVTRAEVYENKILVYFRIKKEDRQKYADLPSVPDECSLSTVKWTCGNSKR

SEQ ID NO: 10629 - protein, 493 aa, Unknown
  Description of Unknown: Integrase B10630 sequence
  cd00338,IPR011109,IPR038109,PF07508,Coil, PS51736,IPR036162,IPR006119,PTHR30461,G3DSA:3.40.50.1390, PTHR30461:SF3,PS51737,PF00239,SM00857,G3DSA:1.10.10.2600, SSF53041
MSGDSLNRQRRLIAEWLKVNSDYYLDTITYEDLGLSAFKGKHAQSGAFSEFLDAIEHGYILPGTTLLVESLDRLSREKVGEAIERLKLILNHGIDVITLCDNTVYNIDSLNEPYSLIKAILIAQRANEESEIKSSRVKLSWKKKRQDALESGTIMTASCPRWLSLDDKRTAFVPDPDRVKTIELIFKLRMERRSLNAIAKYLNDHAVKNFSGKESAWGPSVIEKLLANKALIGICVPSYRARGKGISEIAGYYPRVISDDLFYAVQEIRLAPFGISNSSKNPMLINLLRTAMKCEACGNTMIVHAVSGSLHGYYVCPMRRLHRCDRPSIKRDLVDYNIINELLFNCSKIQPVENKKDANETLELKIIELQMKINNLIVALSVAPEVTAIAEKIRLLDKELRRALVSLKTLKSKGVNSFSDFYAIDLTSKNGRELCRTLAYKIFEKIIINTDNKTCDIYFMNGIVFKHYPLMKVISAQQAISALKYMVDGEVYF

SEQ ID NO: 10630 - protein, 492 aa, Unknown
  Description of Unknown: Integrase B10631 sequence
  cd00338,PS51736,IPR036162,IPR006119,G3DSA:3.40.50.1390, PTHR30461,PTHR30461:SF3,PF00239,SM00857,cd03768, SSF53041
MAWYVYVRMSHRSSAYSGISENSQILACMEYISSCNVGEQIGKHKFPNDVPDGVFVDRGKSGWSRSIDARGAGVELLRVLKPGDHIVFYNVERAFRHTINCLTWVGRWLEQGITPHFATEKIDFSTAGGRFVGSVIAAAAQYYSDLISERTKEALAIRRSRLGLTVKTKLVKNAPRICSIKQHAPPASERELDTDIPKALIYNRVSHLDQSISGLSMDAQREENLKLASRIGIPDAAVFEDESISAFSKPFSSRPGAIRLLTDLKRGDHVIIYRVDRAFRNIRDACQIEKQLRDLGVTLHITREGIDTSNEYGRMFFQILSMFAELESSMKSQRQKENAKARRHRGDFLGNVPRHLKVIGSGSNRVVVHDYDAIVDCFTVALLIDAGFPIEQAARILDTDKALSSSYLRKGRFYRNNIRPAIATLPKAVCQVLMERAICQIKYPNERTWRLNNVEKYSYPVRDIEDRLAAADISPELRDLLPSHLQFAIAQA

SEQ ID NO: 10631 - protein, 492 aa, Unknown
  Description of Unknown: Integrase B10632 sequence
  PS00397,IPR038109,IPR006119,PS51737, PF00239,G3DSA:3.40.50.1390,PTHR30461,IPR025827, SM00857,G3DSA:1.10.10.2600,SSF53041,IPR011109, PF07508,PS51736,IPR006118,cd00338,PF13408,Coil,IPR036162
MAVIFLQISHTFYKGDDIMEQLKYAYGYVRVSTGKQDELSPESQERLLKDYARSNNIVLLDTFFEHGISGRRADKRPEFQRMIGMAKSKEHPVDLILVWKFSRFARNQEESIVYKSLLKKQNNVDVVSISEPLIDGPFGSLIERIIEWMDEYYSIRLSGEVLRGMTEKAMREGYQIAPPLGYDAVGNGKPFAINEDKYKIVSLIFDEYDNQNSDFTKIARKLNALHYLTQRGKPFEARSIKRILQNPFYYGLVTWRDISFIGSHEVRLTKEQFEQRMDKMQRNFKPARRRDVSACKHWLSGLIKCGYCGATLAWNGGNPHSPGFQCWQYSKGIHKESCSLSVSKATAAVYEYFEQILSGMDFKYKYHAPETPQKIDRRTQLLEELEKLSTREARIRLAYENEVDTLEEYKENKKRLNLARIDLHNELDNLETSSEANELSREDVLSKVRTVYDIIKDDSVDYETKGVFMRSLIEDIVYDKKNGQMIFTLYIS

SEQ ID NO: 10632 - protein, 492 aa, Unknown
  Description of Unknown: Integrase B10633 sequence
  PS00397,IPR038109,IPR006119,PS51737,PF00239,G3DSA:3.40.50.1390 ,PTHR30461,IPR025827,SM00857,G3DSA:1.10.10.2600, SSF53041,IPR011109,PF07508,PS51736,IPR006118, cd00338,PF13408,Coil,IPR036162,PTHR30461:SF3
MNKPIVHRLRVALYVRVSSHEQIEGYSISEQTERLQKYAEAMGWDVYKIYVDPGFSGGNTDRPALTEMIRDIKNGDIDKVAVYKLDRLSRSQKDTMILIEDVFLAHNVDFVSMNENFDTSTPFGRAMVGLLSIFSQLERENIKERTMMGKEARAKEGKWGGGSSEPIGYNYNPETEELEINEYEKMQIMEAVDLLFKGTPLRTITNTLNNKGYTYRGRSGIVNNWEAKRLKYVFRNKTYLGYIKYAGQYYKGNHEPIYDEETFAKIQAILDMRDEEHAGKYTKTRKQSTYLGGMIYCKHCGARYCRQAGKKWKDGEPPLYYSCYSRNKSVPKMIKDPNCKNKNWRMPDLDNIVLGEIKKLAVDPEYFHTIVKDETAKKDAPTKIDTIKKEIQTLDEQISRFMDLYGLGTFTIDQVSEKVNPLNDQRKKLNRELEILNAEAGVISEEETREIVETFDEVIEHGDLDEIRLLISSLIYYIELDNDDVYIYWKFA

SEQ ID NO: 10633 - protein, 492 aa, Unknown
  Description of Unknown: Integrase B10634 sequence
  cd00338,PF13408,IPR011109,IPR038109,PF07508, Coil,PS51736,IPR036162,PTHR30461,IPR006119, G3DSA:3.40.50.1390,PTHR30461:SF3,PS51737,IPR025827,PF00239, SM00857,G3DSA:1.10.10.2600,SSF53041
MIRAVIYARYSAGPRQTDQSIEGQIADCKRYAESHDMVVTEIYADKHISGKSTEGRDEFLRMIEDAKRKQFEAVIVWKVDRFGRDRTDIAIYKRELRKAGVQLCYAAESVPEGPEGLILESLLEGLAEYYSADLRQKVTRGMKESLKKGQWPGKCPYGYGKDKDKHVIIIEEEAAVIREIYRLCCEDYSIAEIVRSLAAKGIYKKNGSVYRILTNRHYIGEFEMMGLSIDVPGIVSEEEWDMAQTKLKSTAKNGGADANYLLSGKCICSECGSVLTGTHGTGKSGKKFYYYHCPKKCIKPMPKERYEMMILEECREFTLTDELIEQITDRIMELQEADLPHAEIKHVEAQIRDFTKRMNNLTNSIEQGVPADVVMPRIVDYRQKITDLSVELEKMKIKKPLIPRDYLASWLRSFRDGDVADDNFCRRVIDTFIEKVIVYPDHSVIVLNVSGDKTSPECSNLSRFVNLTKQRSNTEKVLLDLPYALLWVESIC

SEQ ID NO: 10634 - protein, 492 aa, Unknown
  Description of Unknown: Integrase B10635 sequence
  cd00338,IPR011109,IPR038109,PF07508,PS51736, G3DSA:3.40.50.1390,IPR036162,IPR006119,PTHR30461,PTHR30461:SF3, PS51737,PF00239,SM00857,G3DSA:1.10.10.2600,SSF53041
MNVAIYLRKSRADENNPLETLERHKEILLSYAKDNNLTVIDIFEEVISGGMLYNRTEMLKLLDAIPSHIYDAVLCIDLDRLGRGSAADSEKIFDVLKENDVKIITLKKIYDLNNEYDEDYSEFEMFMARKELKFITRRMNRGRIKSINDGCFVSGAPFGYRNAVINKKHTLEVYEPEAKYVRMIFDMYVNQSMGITSISRHLANLGVLSKKNTPLHPTTIARMLRNHTYIGKIVWNKSKSVKGKNTQEKTSKDDWLYVPGLHEPIIDEDTFNKAQDIINLKYKPPMRTGTLQNPFAGLLKCANCGRAIVINTSNETVEKYRLCCRTLGCNKASALSIVEDKVFEVLTKEFKDIELSLKNIRQSHNKDKLSCLDTIATLETELKKLDKQQLRLYDLLEQEVYTKELFIERNNAISDRRKKINATIAQEREKFKLVDTSSIEERLPLLRELLTNYHSLSAAEKNSILKNFVKKIEYKREKSAPEGDIFLKIYYK

SEQ ID NO: 10635 - protein, 492 aa, Unknown
  Description of Unknown: Integrase B10636 sequence
  cd00338,PF13408,PS00397,PS51736, IPR036162,IPR006119,G3DSA:3.40.50.1390,PTHR30461, PTHR30461:SF3,IPR025827,PF00239,SM00857, IPR006118,SSF53041
MPRRRNSRSARATVRPLQAGDEVWAYLRVSTGKQAEAGLPINGQREAIEAYCQARAYRLTRTYSDEGISGTTDHRAQFQTMVDEAQALRPRAIILWSWSRFSRDQNDAAFYKALLRRHGVDLLTVEDEVPNVEGFGNILEALIHWRDERENVARGQATKRGHHALAHLGYHPAGNGNCPVGYRAATVLVTIAGREGERRRIELDPALAPMVRRAYEMRLAGGNFEAINEACQLFAHPNDLGAMFRNPTYHGRYHWGDTEVAVPAIVTEAEWQRVYDGLSRGRGGAYSRTRASDYLLSGLVWCGVCGARMKGHSCSPRGRRWHYYRCFTPDCIIRGIPRAELEAAVTERLITRYLTPRLVADMEERARQHQQDSGQQERIAALRAEVRLHDKAITNLVSALERAPDTRELTERLRQRGQERGRLLSKIAALEHSVPTVPSVEDVLGLRERLKQALVDGERRLARELIRQCVERVTVEGSREWRVKWRLLVCPR

SEQ ID NO: 10636 - protein, 492 aa, Unknown
  Description of Unknown: Integrase B10637 sequence
  cd00338,IPR011109,IPR038109,PF07508,PS51736, G3DSA:3.40.50.1390,IPR036162,PTHR30461,IPR006119,PTHR30461:SF3, PS51737,PF00239,SM00857,G3DSA:1.10.10.2600,SSF53041
MNVALYLRKSRADENNPLETLERHKEILLSYAKDNNLTVIDIFEEVISGGMLYNRTEMLKLLDAIPSHIYDAVLCIDLDRLGRGSAADSEKIFDVLKENDVKIITLKKIYDLNNEYDEDYSEFEMFMARKELKFITRRMNRGRIKSINDGCFVSGAPFGYRNAVINKKHTLEVYEPEAKYVRMIFDMYVNQSMGITSISRQLANLGVLSKKNTPLHPTTIARMLRNHTYIGKIVWNKSKSVKGKNTQEKTSKDDWLYVPGLHEPIIDENTFNKAQDIINLKYKPPMRTGTLQNPFAGLLKCANCGRAIVINTSNETVEKYRLCCRTLGCNKASALSIVEDKVFEVLTKEFKDIELSLKNIRQSHNKDKLSCLDTIATLETELKKLDKQQLRLYDLLEQAVYTKELFLERNNAISDRRKKINATIAQEREKFKLVDTSSIEERLPLLRELLTNYNSLSAAEKNSILKNFVKKIEYKREKSAPEGDIFLKIYYK

SEQ ID NO: 10637 - protein, 492 aa, Unknown
  Description of Unknown: Integrase B10638 sequence
  cd00338,IPR011109,IPR038109,PF07508, Coil,PS51736,G3DSA:3.40.50.1390,IPR036162, IPR006119,PTHR30461,PTHR30461:SF3,PS51737, PF00239,SM00857,G3DSA:1.10.10.2600,SSF53041
MPKRAVIYARFSCNRQREASIEDQLRVCREWCAREGYEVAAEYCDRAVSGRTDDRPEFQRMIANAGESEIVLVYMMDRFSRGEYDAPIYKRELATHGVKLVSALEQIPDSPEGIIYEKLLEGLAACESRKTAIRTKRGMEGNALKCKTNGVRIFGYRRNGDDEYEVDEAQAAWVREAFALRLERMSMNAIAREFARRGLRTRKGNPCGQAMVQQMLRDRRYTGRYEWGGIVREGGMPQIVDEVTFMEVQGIKCRKQRSSENWGDFALAGAALCAECGRNLQGVSGRGRNNVKYEYYSCPGSCVRNIRREELEGSIASALRELLGDRGEALQIANMVAERADTAEVRARRRQAEDSLRAAERGLRNILNAIEQGVIAPGVNERIAELEEQQARARYDLEAITDERIDPERFADFLQCGTALDDATLLKAFVWQAVVSEDEILVTLNYDKKGEPARLDIQRVRAKLEWCPICLDSRTEICAVGTVVLLRIPRAA

SEQ ID NO: 10638 - protein, 492 aa, Unknown
  Description of Unknown: Integrase B10639 sequence
  cd00338,PF13408,IPR011109,IPR038109,PF07508, IPR036162,IPR006119,PTHR30461,G3DSA:3.40.50.1390,PTHR30461:SF3, IPR025827,PS51737,PF00239,SM00857,G3DSA:1.10.10.2600, SSF53041
MTSPMTRAVVLDAVVRVSRRNGRIGEAFMSPTDQRDAIERYAAQHGATIADWHDETDSVSGKTVERAGLQAALDRALTGQVDGIIVAKLDRFARSVTGGLSAIGRLEAAGKLLWSAREGVICGDAPANAMETLMRTIWLGLAQWQLQTLTEGWESTRANHIGRGVANHAPYGYRKGEDRRLLPRPGEAEWVPLIFERRADRWSWGRICDWLTAEGARPRRGGGAWSISTVKQLIANRVYLGELRSGEIVNLRAHEPLVTPSQWERANKVGGARKRREAEPYLLTGIIRCASCGCRMFGMTDRRYTNAAGELSIYRQYRCRGRHGAWGTCPAPARVDADEVEALVCDEFRRLFLIGGAIPTDATTEVDAATAALEAADAELESFVTTAAALDTELFAKGVEARTERRDFARLRLSEARSHAVGVALPVGLDDVWDSYGIPERRPYVAAAFAVVAASRGTEPVTDRVRVWVTGTDVPSPLPGVDGWSQLTPIRS

SEQ ID NO: 10639 - protein, 492 aa, Unknown
  Description of Unknown: Integrase B10640 sequence
  cd00338,PF13408,IPR011109,IPR038109,Coil, PS51736,G3DSA:3.40.50.1390,IPR036162,IPR006119,PTHR30461, PTHR30461:SF3,PS51737,IPR025827,PF00239,SM00857, G3DSA:1.10.10.2600,SSF53041
MRVVGYIRVSRVGKRDGERFISPAEQRKAIVAWADLHGHSIVEVIEDLDQPGTKRDRPGLERALGLIEASRAQGVVVAKLDRFGRSVPHLGQLLDLLARHDAALFTVAEGIDTSGRAGRMIATILSAIAEFEVSRIGETWFQARENAVSRGVWVRWTVPLGYEKDADGRLHPDKAAPLVREVFLRRAGGESWTALARWLGDQLDMPISTQRVRYLIQSRAYLGESFGDQGIENLEAHEPLVSPSEWEAANGVRGSRPRRSGRATRPLTGLARCASCRYALKPSVRGRTGAVDYVCKTNAKQSGSQTCSGPVGIAADKLDTYVLEAFWDFAEAARMRRADPSERISVALADLERAEQRRDAAVSDRLGDILGPGGDAHLAVIDKAQVEVERCQAIVDELTASEVDLPDVDLRAEWGNFDVEQQRQLLASTIDCVFLRRSARPGPGTPTGERVHICWRGSGPTLPRPGVLWVPRPYDFPPPLGVPLGHDGDQGT

SEQ ID NO: 10640 - protein, 492 aa, Unknown
  Description of Unknown: Integrase B10641 sequence
  cd00338,IPR011109,IPR038109,PF07508,Coil, PS51736,IPR036162,IPR006119,G3DSA:3.40.50.1390,PTHR30461, PS51737,PF00239,SM00857,G3DSA:1.10.10.2600,SSF53041
MHGILYLRKSREDEQYEKNTGEDVLQTHRERLVMLCKSREITFDERAEVRSGDTIAGRPKFQNILDTDLPSGQYSCIIVTEISRLGRGDMEDAGRIYKTIIHNEIKIVTPNKIYDPLNPSDLRQLRFELFMSREEYESIKERLWNNRNYRATQGYAGNYIVTLGFRQSRGIVEIIPEEEKLVLEIFTMRSENYSYQEIADYFNSRNLKTKRGTKYHESTIYKILKNPRYIGVAKWQGKEYIAKHPAIVSLDLWNSAQDINAERHHKRRGSKNDNPYLVELYCRECGQRMYGERSTPQRVIDGVRKLYKSRDIYICRGRKSIPKCWHHIGASVVHSTILDELGKIISDPQIFLELVNERESRLGVDTNGLSDQVDELNKQVKDKNILLVKIENDYEKGDLSALLYTKHVEKISKEIASIEGRIKKIKADLLKSAIKISPPMELQSILKTFLNNWNAYPNSDKKLIIRSFLPRVEVNKQGEFFIAITLPDSIEI

SEQ ID NO: 10641 - protein, 492 aa, Unknown
  Description of Unknown: Integrase B10642 sequence
  IPR038109,PS00397,IPR006119,PS51737, PF00239,cd03768,G3DSA:3.40.50.1390,PTHR30461, IPR025827,SM00857,G3DSA:1.10.10.2600,SSF53041,IPR011109 ,PF07508,PS51736,IPR006118,PF13408,Coil,IPR036162,PTHR30461:SF3
MVMTKTTNYIKKVRVAIYVRVSTQEQAKEGYSIGEQIDRLKKYAEVHDYVVVKIYTDAGHSGGNMERPALQEMIADIMGGKIDKVCVYKLDRLSRSQKDTMTLLEDIFLENNCDFESMTEKFDTSTSFGRAMIGILSIFAQLERENIKERMSMGMHARIKEGKWRGGAHVPFGYDYEPALEKLVTNEYEAMIVKNLFEAFAEGNSLYSIAEDMREKGHVLHNGKVDNRNLRYILRNKTYCGYMRHLDEWIKGLHDPIIDEETYNKAQVILDENKRRFEEAGYKTGTEAHSTNLGGLIYCSWCGAKFSKNQTGTKEYGFHHYYGCYSRHKKIKSMIKDPSCKNKYWKIDELDNIIFNEIKKLAIDPEYLHSIKQKNSQTDEAKQIHAIESQIKSINGQLSRFMDLYGIGKFSIEEIQEKSAPLQDQRTKLQIELKRLQEDKKKMSEEQVLQLVQSFNDVLEHGDLNERRSIIEALIERIDIDCNDVTIHWNFI

SEQ ID NO: 10642 - protein, 492 aa, Unknown
  Description of Unknown: Integrase B10643 sequence
  IPR038109,IPR006119,PS51737,PF00239,G3DSA:3.40.50.1390, PTHR30461,IPR025827,SM00857,G3DSA:1.10.10.2600,SSF53041, IPR011109,PF07508,PS51736,mobidb-lite,cd00338, PF13408,Coil,IPR036162,PTHR30461:SF3
MDKAVGYVRQSKERKDRDSISPETQIEKMKQYAVFEDDEIIDVFKDIDISGFRIHYSKRTGLKELFDYLKQNDVKKVYVYALSRLSRRIKEFIEIVDMLEEQGISVISVTEKTDMSTPQGRLFRNILLSFNEYYSDSLSSTITDNHRKNVQLGKWNGGNVPYGFTWDKSNMIFNKNDDFKHLELIIKKAKEGWGVKKISNYLNARKIKSPGGKAWSNQSVKYILSNSFYRGSLNYDGESYQSELVDKIISNEKWEIIQKNLSRYKDLGPKGKVSPHLLTGLLKCNICGSRFEIRYNGSTKVRRYICSGRQYRQDCTSYLIDADSLELSILKHIERLVKSSYFDEIIETHANTSKPLEKDVTREIRRLEVELSKVVQAQEDIYEETFVNRSIKKERFFEMNKMFDKQREELENEIKSLYKELDKTDTTYILDYKKELFNFIDLFYELSKDEQRLALHDVVEKIEVTKEEIKVFLPVSETEIKSSSIIRRTMFF

SEQ ID NO: 10643 - protein, 491 aa, Unknown
  Description of Unknown: Integrase B10644 sequence
  cd00338,IPR011109,PTHR30461:SF21,PF07508,IPR036162, PTHR30461,IPR006119,G3DSA:3.40.50.1390,PS51737,PF00239, SM00857,SSF53041
MPRQADLHVPKRARILARLSEADDEENGNGSKGINDQIDDLRAEAARMGWTVLEPPVVEDGVSAFKRRRVTLSDGRKVYRVVRPALAKLLDELTSGVADGLLAYDIDRAFRDPQDLEDLIMVVEMSRPRIPVRSLTGSLRLDNDADITMSRIHVVMANKSSKDTGRRVSRAKLRQALNGEYGGGRRPYGFEADGVTPRPSEVAEIVKAGEEILTGVSLKAIVRDLNARGLVTVTGTQWTSDGLRAVLLRARNAGLMVHRGEEVGPAPWDPLVPEDQWRVIVAKLTDPARKTSPGPAPRWLGSGLYQCGVCGSGLRVHTFGYDATRQPTYRCQATGGGHVARTVASLDAAVVDTIVRWMTSQDVSELVLPRTEGVDVAALRMEVMTLRASLDDLGAMYVDRTIDKRQLESGTKRAHVRMEELQRTLEGATATSPLVSLAGALDVRAAWEALPLGSQRRVIEELMTVTVLPIPEGGRGLSPDTLRIEPKKGGS

SEQ ID NO: 10644 - protein, 491 aa, Unknown
  Description of Unknown: Integrase B10645 sequence
  cd00338,IPR011109,IPR038109,PF07508, Coil,PS51736,G3DSA:3.40.50.1390,IPR006119, IPR036162,PTHR30461,PS51737,PF00239, SM00857,G3DSA:1.10.10.2600,SSF53041
VKEREQKMSYCIYLRKSRPDIEAERHGEGETLARHENMLMELARDRGLDVVQIYREIVSGDSISARPQMQAMLSDIGQGKYKGVLVAEIERLARGDTIDQGIVAQAFRESGTKIITPVKTYDPNNEFDEEYFEFSLFMSRREYKTIKRRMQAGRLASVKEGNYICSSAPYGYRKIQPEPKIHTLEIVPGEAETVKLIYKLYLEGHGSKFIAAELNRMGIAPAKSIYWENPSIKKILANPVYCGKVGWKSKSNGETLYKGLHEPIISEDVFNAVQDKRKNNPAAQVRLNDRLLNYYHNILYCSNCGHQLKRRVISSTGKEYMLCCYKECQGKTVCASMQEVDEAVMASFRYRIESLRELMSKDGKSDTVQADKKTPLENELQKAKKQLSKLYDLLEQDIYDVNTFVERSRALKERINSLEYALKGLESIKPKLSPEESIARIQNVIDNFYSSSPEDKNRLLHSAAERIYYTKTVKMCRNKKFSDLTLKVDFL

SEQ ID NO: 10645 - protein, 491 aa, Unknown
  Description of Unknown: Integrase B10646 sequence
  cd00338,PF13408,IPR011109,PF07508,G3DSA:3.40.50.1390, IPR006119,PTHR30461,IPR036162,mobidb-lite,PTHR30461:SF3, IPR025827,PS51737,PF00239,SM00857,SSF53041
MTTPPPPRIAIWTAVSSKPQAGPDKSSLQDQEAAGRQLAEAVHGHVVVVYSVPGHSRDLIFWHDAEASMPAYRQLRQDCADHTFDVLFALDPDRLGRDPALSNQVISLVEKSGAEVYFASAPHPIGQASTAQRYIYAIQSVRAAEDQTLRIHRFRAGIEARVTRGLCSSHWPLGYRPIPGPNGRIATAEPHPDLAPAVLLATKLFIEGLPYTRIAQALNASPYHPPRGSRWAYSTVQKMMANDVYAGFPHFDHVEPEYPSPHYPALWDPDTHATVIRERNRRRRDRYNKTAGSPLAGVVFCARCGHQMSRQLAHHKHWWLRCTKHAHRSHTGQSCHRNYIREDRVVERIAAYLAALATPAALDAALIITDDTTQLHQEISALGDHLAELEVRRQRLALALAAGQMDPQVYRSADDLLLADVVATRSRLLDLQVLLAAAPDPAQRRAALEALAAIFPDLVATAPPVRTRTLLQNAGLRVEIEAGAITSIRLV

SEQ ID NO: 10646 - protein, 491 aa, Unknown
  Description of Unknown: Integrase B10647 sequence
  PS00397,IPR038109,IPR006119,PS51737,PF00239 ,G3DSA:3.40.50.1390,PTHR30461,IPR025827,SM00857 ,G3DSA:1.10.10.2600,SSF53041,IPR011109,PF07508,PS51736 ,IPR006118,cd00338,PF13408,Coil,IPR036162,PTHR30461:SF3
MQTAAIYARVSTDWQAEHGYSLETQVSACEKYARDLGAVSVTKYIDDGYSGAYLDRPRLDALRDALRAKIYDVVIVYTPDRLARRLSHQLLITEEIEKSGATLHFVNGEYKQTPEGQLFFQMQGAFSEYEREKIKERTMRGKRGKLKSGKPISDHGVFGYAWDEKTKDYIVNEPQAAIVRQIFDMYISGEYGGTDALAVKLNEMNIPSPGGKKWLGSNVCRLLKKSMYTGEYYAYKEYSKKLDAHKRTSTTRPENEWIPMQCPAIVSKETFDAAQRLLDANKKRRKRKLETKQYLLQGVMKCARCGASIVIRRPASGAYYTCFNAVRVGSDTKCHARYAKTDIVDAAFWETLKQICKTPKKLAAYINATDKTAPRVDDTQKLKERLTKIDAEKAAIVEWYTSGYLTQAAATAKLEALTGEAKRIQEKLSAPKTNERAIDIARIYNLVKNCDGSFEAKKNIVHAIIESVIYERVDETHKNGKYDIRFLIHFI

SEQ ID NO: 10647 - protein, 491 aa, Unknown
  Description of Unknown: Integrase B10648 sequence
  cd00338,PF13408,IPR011109,IPR038109,PF07508, Coil,PS51736,G3DSA:3.40.50.1390,IPR006119,IPR036162, PTHR30461,PTHR30461:SF3,IPR025827,PS51737,PF00239, SM00857,G3DSA:1.10.10.2600,SSF53041
MKLACYCRYSSDMQREESIEAQLRAIYDWAKKNDHIIVKEYIDRAITGKTDERPDFLNMIKDSSSASWDGIVVHKLDRFSRNRYNSAIYKKKLKDNNKRIFSVLENLTDAPESIILESVLEGMNEYYIANLARETKKGLNENAYQCKFNGGTPPLGYDVKDGKYIINEKEAKIVKEIFKLYLAGYGLLKIALELNLKGYKTKRGNSFGKNSLFDILGNERYTGVYIYNQSINSNKRVDNENIIKIEGGMPQIISKEDFEKVMEKRAKNKRISGSYRSKTQYALSGLITCGLCGRKYYGITTTRKRKTKTYIESWYRCSGKDKIHNCTNNNIKCDEIENKVYNLIKEKLLESSSIESLINLIQEEYDKMCNDVNSSAIQTEHSIELLNKKINSYVEAIGNGLYSEEIKNSLQNAEAERAILKEQLIAYKNLENHRIIKKEDVERVLKKDFKNLQADKHQLFNKWIKDIKITPDKAEVQFTIFENVVSLHGGE

SEQ ID NO: 10648 - protein, 491 aa, Unknown
  Description of Unknown: Integrase B10649 sequence
  cd00338,IPR011109,PS00397,PF07508,Coil, IPR038109,PS51736,IPR036162,IPR006119,G3DSA:3.40.50.1390, PTHR30461,PTHR30461:SF3,PS51737,PF00239,SM00857, G3DSA:1.10.10.2600,IPR006118,SSF53041
MNVAIYARVSSEWQAEHGYSIGTQLEACRKKAKDLGAFVVKEYVDDGYSGGFLERPALEQLRDAVQEGLYEAVIVHDADRLSRKLIHQLILVEEFEKYKCKPVFVLGEVADTPEGQMTMQMKGVFAEYERAKIRERTMRGKRAKLKAGKAICDSHIYGYDFDRENSCYVINPAEAEVVKMVYKWFVEDRYGGCDAIAARLNDMAIPTPTGSGLWGTSTVQHMLKRSHYTGKYYASTQYHKKTGPKSYKKIPRPREDWIEMTCPQIIDADLHPRALEIIASHRTYKTWKHSQDAGLMQGFAYCGFCGARMRIMTSKKTQKYYSCGSKCEKSRLLGLFYTDELIWSLLESICESPKTLKAYIAANQGSAPKAQLPQQNRQKIKKRLDKIQQERKAVMTWFSQSLLGQTEATEKLQALKAEEEKLQAELAAAENAQDTSKALDVNDICEVVKNCPDDKPAKRKVMLAIIDRVDIARLDNNYGHNYDLDLKISFK

SEQ ID NO: 10649 - protein, 491 aa, Unknown
  Description of Unknown: Integrase B10650 sequence
  cd00338,IPR011109,IPR038109,PF07508,Coil, PS51736,IPR036162,G3DSA:3.40.50.1390,PTHR30461,IPR006119, PTHR30461:SF3,PS51737,PF00239,SM00857,G3DSA:1.10.10.2600, SSF53041
MKKVVFYGRYSSVMQNEQSIEGQLHVCRQYAESNGLEIVSEYIDRAMTGTSDKRPEFQRMISDSESGHFESVLVYKLDRFARNRYDSALYKKKLRQNGVSVISATEQLSDTPEGILMEAIIEGMDEFYSAELGRKLRRGREMSFRKGRFIGKRPPFGFAVRDGMIALDEERVPIVREIFERYASGEKQAHIVADLNRRGIPNAAGNPWNKGNLSYMFQCRLYIGEYTLKSVDMVQSCPAIISHELYDKVQAVKADSVHRARECKTDYHYVLTGHMTCAKCGAAVCGVSMSHGKYHYYQCHKHCGLRIPADVLHDRVRDALMHHLTGDKLEELAAAAYAEYAKCEPPAERECIEHELADVEVRLKNAVNAVLSGINSPTLKDTIEALEAEKKSLSKRMEDVSAAPPKFSQEQFRLALEYIIATAQEGDLSKLVSTVIDRIIIDDQSATICINLTDTNNSPPLEQILFRVGEYSCSLTQNIIIHEKGWLIIPA

SEQ ID NO: 10650 - protein, 491 aa, Unknown
  Description of Unknown: Integrase B10651 sequence
  cd00338,IPR011109,IPR038109,PF07508,Coil, PS51736,IPR036162,PTHR30461,IPR006119,G3DSA:3.40.50.1390, PS51737,PF00239,SM00857,G3DSA:1.10.10.2600,SSF53041
MNKAVIYARYSSDKQRTESIEGQLLVCHEFAKKYELDIIKEYIDKAKSAKNDSRLAFQNMIYEAKLGLFSHVIVYKTDRFARKERDAIIYEDQLNSLGITVLYASQPFLNNQGGRIVKAIFRVQDEQYLEYLSERTKLGLRVNFEKGYATNARMPAGYKVVNKKIVIDSEFEFVPKTIFEMYANEISNQDIIDKLIDMGYRKIHSSTIVSTIKNKKYIGTLIFEGKEYPNKIEPIISEELFERANKVLKNKKGARPRAKEKYLLSGYVFNAKGSPYIGTSATSRNGKTHRYYHQGKHYIKKSILENAVIKEILRVISSESEQLSNQIFKKIQSSQVSNDKNLEIKKNIKKIEYELDNIVNAIKQGLFSESLKNEATRLEKQKNTYQIELKSINRYSLSKEDVLDFIRNIKKRHLTEDSKTSLVQMFLDKVIIHDGNGYLWFNITGETISFEDVLMALSNGPIKLHHTNIEIDTSKYIYIYSAFEIEKRAFS

SEQ ID NO: 10651 - protein, 491 aa, Unknown
  Description of Unknown: Integrase B10652 sequence
  cd00338,PF13408,IPR011109,PF07508, Coil,PS51736,G3DSA:3.40.50.1390,IPR036162, PTHR30461,IPR006119,mobidb-lite,PTHR30461:SF3, PS51737,IPR025827,PF00239,SM00857,SSF53041
VERQREIIEDWARRNDHEIVGWAEDLDVSGSLDPFKTPALGPWLNEKKHDWDILCAWKLDRISRRAIPMGNLFGWLLENEKTLVCVNDSIDLSTPMGRLIAYVIATIAEGELEAISDRNRASQKKLRELGRWTGGKPVYGYEAVERDDGGWELVPDSYSAAVLVSIIDQVLAGESLSSIADGLNDRGELSPADYIRARAGREPRGHAWTANNIGRILRSPALLGVTTHKGVTVRDASGLPIRKGRQVISQDLWDQLQAKLEGRSVLSSTRTRKTSPLLGVALCGVCGGRMYHRKVYDAYRYYVCRNGHPVNSVKAEELEEAVGEAFLAAYADVPVVEPVFIPASNHQTELDEAVRAVDEITPLLGTTTSATVRSRLLGQLEALDSRISELEQIPPSEARWETRILDETYGELWERATDAASRRQLLLKWQVSVKVSTVGPSGVVLDITTAHIPENAEKPPAGTSVPEGGDSVQGRTSVSCFGLGADKPEAR

SEQ ID NO: 10652 - protein, 491 aa, Unknown
  Description of Unknown: Integrase B10653 sequence
  cd00338,IPR011109,IPR038109,PF07508,Coil, PS51736,IPR036162,IPR006119,PTHR30461,G3DSA:3.40.50.1390, PS51737,PF00239,SM00857,G3DSA:1.10.10.2600,SSF53041
MKVAIYIRKSREDKDEYKEDTLLRHERLLKEYCNKYDLRYSEKTIYREIVSGDSINNRPEMQKLLKDVENGLYDGVVVVELQRLSRGNGIDQEIIKETFRKSGTIIYTLNKAYDLSSGDELDEDMLELSLFLSRQELKAIKRRMIRGKKQAQKEGYYTGATVPFGYNKEKQNKGYVLVPNEKEAPIVQMLYNKYAYEGINIAELVDYLNDNGIRTRKGLLWQPTLLRRLLKNKINIGYINSTTNGVTTHFKGKHQPLIDEETYNRVLEKFNQNAPKVKSDNILKNPLATFLRCGGCGKVMNMKFKCKTTNKPAMLDCKNKYCSNKGAYFHFVEKKLIEELEEELKNFNYFLENTADETRKIKETKEKEKSFIKSNIEKKKAMIDRCCEMLEEGIYSKDRYLERVQAIEEDLKALNLKYEELNVIEVDEEDRVKKAIPILENVLKEYWNLDPVDKNTLLKTIIERVEYTKTKRKTYKEEIDNNFELKIFLKI

SEQ ID NO: 10653 - protein, 491 aa, Unknown
  Description of Unknown: Integrase B10654 sequence
  cd00338,PF13408,Coil,PS51736, G3DSA:3.40.50.1390,IPR006119,IPR036162,PTHR30461, IPR025827,PF00239,SM00857,SSF53041
MNAAIYIRKSREEKDRPSHRLTVQREQLPAHATAQGWSYEIYDDGHASAARGKAESLKERGRLEADIRAGKIGVILTIELSRLSRDDSLQDYVAWLHLCAERRVKLATMSRILDPSQHSDWMLLLMEGGFSSVEMRVLKGRMKDGYDQAYREGRFLGGTPPPPYVYDPRAKKPVIDPEQLAKLQRLWAMAETMSAISIATELAMPEIAVRRAISDERLLWYQALRPDQSTGEYIVCEWEPCMTAEQASRVGAGRRTRIKGVSRRPYAALFSNLQLLHCGYCGGTAKTWQNSRVKKDGTRNDYYGCQTKNVKNKCAKARLIPQAVLHEKVLAHLFNTLADLDKIKEFWLLQEEGGDSAKDLEDLAKKEQRERAKKQRLVTAIGEGVLEFADAKAAIAKVNQVLEQISAERQALMAQSTEAPEWGALDLTREEFEDLPEDEQREVLQAAIDRITIYENYAVITYPFARTADGSREARIQFPPRQAGYIRLQRK

SEQ ID NO: 10654 - protein, 490 aa, Unknown
  Description of Unknown: Integrase B10655 sequence
  cd00338,Coil,G3DSA:3.40.50.1390,IPR006119,IPR036162, PTHR30461,PTHR30461:SF3,PF00239,SM00857,SSF53041
MRTAVETYELIPAYARLSRKSRGGRIESIPHQFATLDRLAGYRGDTIGLRFADKHLSAWDQSVTRPDWEAFLAELDTGRHRAAMSYHADRLSRNGMDTERLLQIGERWNIVLITPEGVYDLGNGDQRAMFRHLAAMTINQSDATHRRVSDHKDEARLAGLMRDVYGGSPPVGFRQGKDDWEVDPEQADWLREAARLVLADPDHRVGTAYRQLPAIVTNPADPRDPDSVGRPVSLKMLRAALQRPASAGLITSRDGEVMGESDAGGPLDLVTYNRLQLVFASRKPGRPVTARVYPFGPVTRCGKCGNQLTGTPGFQKRGYYSCRNPHLINGVKVGPCRGVSIPAADLHELIRLFIETWADSDAARAAFAENPQTGERRAELDADLDDLGAQLAALSGRRLRERGQVARLTYDGLIGEAEAAIAVVEAELAELDRLDAAPGLPASLDWATMTDAERLRVLAQAARLPIVILPGKSGPKPMPVIDRVILEPQG

SEQ ID NO: 10655 - protein, 490 aa, Unknown
  Description of Unknown: Integrase B10656 sequence
  cd00338,Coil,PS51736,G3DSA:3.40.50.1390,IPR006119,IPR036162, PTHR30461,PF00239,SM00857,SSF53041
VTRCAIYIRKSREEKDKPSHRLTVQRQHLPAFAQSQGWQITIYDDGHASAARGKAINLPERARLEADIRSGKVDIILVIELSRLSRDDTLQDYLSWLTLCADYRVKLATLSRSLDPSQHSDWMLLLMEGGFSTVEMKIMQDRMREGRQEAFRSGKYLGGPCPPPYYYDPAQRKPAVDQVALARCKRLWQLAETNGCSSIARELNMPLIAVRRALQEERLLFSQAIRPDPDTGELIPCDWPAVMTAEQAQLIRQRREDRKRGYSRARYGGMLSNLQAILVCGYCGRTVRSWSNQRKDKKGVSPTWYGCKALENSSICTNARMIAQADLDGPVVTNLLNTMSDPESLRKIWIAAHQADNTAEQLADISLLIADLQTKKQRLVHAIAEGVIELADAKKARAGIETALQSAETKRSGLLASVPIELDWDVLTISRPEFESLCTDYKREFILACIKEIKLYSSYAIITYRFPRDTSGSALARVHLPPPRPTRPQK

SEQ ID NO: 10656 - protein, 490 aa, Unknown
  Description of Unknown: Integrase B10657 sequence
  cd00338,IPR011109,IPR038109,Coil,PS51736, IPR036162,G3DSA:3.40.50.1390,IPR006119,PTHR30461,PS51737, PF00239,SM00857,G3DSA:1.10.10.2600,SSF53041
MKVIGLVRVSTQAQEFESQSVRVKEAILADGYDESDIILIEDKESGSKLSEEERSGLNKLKYYIETEQISSVYVYEISRISRKETVLYSIREYLQLHHVQLVCITPPFKMFNDDWSISDAAAFTFSIFSTLSSQETRIRVARITRGKEKKKAEGKLTCGKPIFGYDVDKDHFIIPHKKNADIVREIFERYCNLESSGSIGKDLYQRNALGNDKSKEITVQTYVCSILKEKRYAKIDEDSIYPPIISKELFYKAKNIRENKGEMFIKKSKTVRTYPLQGYLYTEDGYMLSSSYTNNRYLKMNDASIKRVSLNMNAADGLTKIIMTEYINSGVLDIDREKELKEMSNVLSLNKVKISGIEIKINEMREENERINSRIVKGRMSEKTGDKMIDDNILSMNKLEDEKQELIYQNGVIVNKIDYLSNPLFTPSSTFEINTLEELKDLVMKYLKKAVVHKIGFSRYKIDYYFLDGRMKSGCFYSVQGKGISYYDIK

SEQ ID NO: 10657 - protein, 490 aa, Unknown
  Description of Unknown: Integrase B10658 sequence
  cd00338,PF13408,IPR011109,IPR038109, PF07508,Coil,PS51736,G3DSA:3.40.50.1390, IPR036162,IPR006119,PTHR30461,PTHR30461:SF3, PS51737,IPR025827,PF00239,SM00857,G3DSA:1.10.10.2600,SSF53041
MKKCVFYGRYSSVMQNEQSIEGQLHVCRQYAQQNGLEIIGEYIDRAFSGTTDKRPEFQRMINDSEKGEFETVLVYKLDRFARNRYYSTLYKKKLRDNGVQVVSATEQFTDTPEGILMESIIEGFDEFYSAELGRKLQRGREMSFRKGKFVGKMPPYGYKLIDDRLAVDELTAPIVREIFERYANGEKQAQIITDLNNRKIPNSTGNKWIKGNLSYMFKNKIYIGKYTHGKIPLEMPCPAIISEELFEKVQKAKSESLHRARESKTGFDYILTGHMTCAKCGAAVCGVSMGHGKYHYYQCHKHCGHRLPAEQLQERVLSAIGEYLTDDKLEELAEAAYAEYSKNDWNTERELLEREYEETDKKLKNAINAILNGVDSQMLKDTVEQLETRKNELFVQMNEVSAPAPKFSAEQFRFSLEYIIETAHSKSLKKIIDAFVNRIIIDDDKVIICINLTDKDCLPPLEQIMFSVKEYSYSATQNIIYMNNWILIVA

SEQ ID NO: 10658 - protein, 490 aa, Unknown
  Description of Unknown: Integrase B10659 sequence
  PS00397,IPR038109,IPR006119,PS51737,PF00239, cd03768,G3DSA:3.40.50.1390,PTHR30461,IPR025827,SM00857, G3DSA:1.10.10.2600,SSF53041,IPR011109,PF07508,PS51736, IPR006118,PF13408,Coil,IPR036162,PTHR30461:SF3
VADLENVTDLYIRVSTAEQAEEGYSVGEQEARLRSYCEAYGYIINAVHVDPGYSGATLERPGIKEVIKDVRAGRCNKVIVWKLDRLSRSQKDTLILLEDVFLENSCDFVSLMESFDTSTPFGRCVIGILAAFAQMERENIRARLMMGKQAGLKAGNYYGPTAPIGYKWEMQPNGKRELLVDPFYSQIIQEAYRLYGSGQSLSDVVRVIKAKYGHSFATYQNDAATRLGRVLRNPIYAGRVRMVDREYEGKHEALVSPEIWQAVNNRLSGNAPAYRNRYGNGSKGGGLCSGLLFCGCCGGRLSIRGWGYKSAKVDKYVCYSVSKCNKRMIKDPNCTNRKNHFKVEDLDALIVEEVKKLSLDPAALDALLQDGTGKPGPEEEAAAFRERMENVERQITRLLNLYQAGAVDLEEIAGRLSDLKEERAALSCSLEELENDAPGKMSKEEARAAVASFSSVVASGDPVALFALVHSLIEKIEVLNGDITIFWKFQ

SEQ ID NO: 10659 - protein, 490 aa, Unknown
  Description of Unknown: Integrase B10660 sequence
  cd00338,PF13408,IPR011109,IPR038109,PF07508, Coil,PS51736,G3DSA:3.40.50.1390,IPR006119,IPR036162, PTHR30461,PTHR30461:SF3,PS51737,IPR025827,PF00239, SM00857,G3DSA:1.10.10.2600,SSF53041
MKNAVIYARFSSDLQREESIDAQVRACREYAAKKGLKIIEVYSDEAVSGRTANRTQYQRLLRDCQKKNFEIILIHKYDRIGRSLGEHVNLSARLDKLGIELIAVSQDFGSSAEAKIMKTLVWSMSEYYVDNLAAETKKGLKENALKALHNGGVAPFGYDIVDKKYVINDFEAEYVRKIFSAAIQKKGFTEIIRELSDCGIKGKRDKPIKYSQIYEILRNEKYTGVYVYSVDEEEKRSDRRAKPNAIRIEGAIPVIIDRKIFEEVQEIMNERKQTGKKADYLCSGLVYCKCGAKMHGMKSVRKGHTYHYFTCSEHCGASSVRMEDIDNAVKEYLCNLLSKENQEKISHALRTYKFDEQERSSDFNKILKKRINEKQKRYDNLLANLSTDLLPAPVVADIGKEMEELKSEIECLKNTEPPKSFTADIICNWLDSIKNSPNPSAVRMLVERIDIKDKTVFNIQSTLKTVLGKTGCGGSQHILPKILFKYIFKK

SEQ ID NO: 10660 - protein, 490 aa, Unknown
  Description of Unknown: Integrase B10661 sequence
  PS00397,IPR038109,IPR006119,PS51737,PF00239,G3DSA:3.40.50.1390 ,PTHR30461,IPR025827,SM00857,G3DSA:1.10.10.2600, SSF53041,IPR011109,PF07508,PS51736,IPR006118, cd00338,PF13408,Coil,IPR036162,PTHR30461:SF3
MTELNEKKAAVYIRVSTDDQTEYSPDSQMKLCIAYAKDNNIDILPEHIYRENGISGRTVDKRPQFQKMIANAKKKPKPFNTILVYDFSRFARNREESVTYKTLLRKKLEIEIISITQPIDEKKKESVILESIYEAMDEYYSLNLSENVKRGKKEKATRGEFQGVAPYGYKYDKNTQQLYIDEEKAEIVKMIFKKWIEPDTTIRKLCKFMNDTNFKTTRGHKWCDRSMKLILQNITYTGKVRFTEGGMKRNYDHPDMIISQGKHPPIIDDELWNLAQKKMQEHKDKWYKYKKEYSKNEHWLRGIIKCSECGASLSHVNAMKGRSGHFQCCGYNKGRCLSSHYIRDSVIIPTILEQLKKDYSERLDINIGENTESIELSEISLLKKQLDRLEIKRKRIKDAYINGIDTINEYKENKTELDKEESNLKKELEKLNYNQSVKMRKERTYKICEEAYKILSDDSVPPNIKDTLAHKLFEKIVYNKQEETIEITYK

SEQ ID NO: 10661 - protein, 490 aa, Unknown
  Description of Unknown: Integrase B10662 sequence
  cd00338,PF13408,IPR011109,IPR038109,PF07508, Coil,PS51736,G3DSA:3.40.50.1390,PTHR30461,IPR006119, IPR036162,PTHR30461:SF3,IPR025827,PS51737,PF00239, SM00857,G3DSA:1.10.10.2600,SSF53041
MKKQNNKIINNRAIAIVRVSTAEQATEDRYSIPHQRTHIAQECKARGLDLVHFFEFVQSGAKVLSGTSKERASVIKFITDYGISVVIVHELDRLARSMLDTLLFVDELDKLGVAFISIHDGFDTTTAQGQLQMHILSAFSEYFRKQLASKVIGGMIERAKQGKHMCRRPLGYDIGPNGFVINEEEARMVRMIFSMYLEQNLGLRAIAEHLNSMGLKSLRGNTWAHVSVKEIIKNEVYTGTFTWDVIRVENNHPPIIDPETWKKVQERRIRKGDISGRAQNSFYLLSGLLRCGICKSATMIGRYARKKKAKEGFWEYRYYVCNNYSTRGLGTCNQLYIKANELEALVLNDIQELATQGVSVVGREEIPSNIGLLKEELAFKHKEMDKLKLMTLRAAEAYERGDYDLDFFSERKASIAEQRESLGKDIDRLKAQIEGQVTPEEIAARTGQRQKIAAALLEETDPVKAKALLQTIIDHIEVVSVDDITIAYRS

SEQ ID NO: 10662 - protein, 490 aa, Unknown
  Description of Unknown: Integrase B10663 sequence
  cd00338,PF13408,IPR011109,IPR038109,PF07508, PS51736,IPR036162,IPR006119,PTHR30461,G3DSA:3.40.50.1390, PTHR30461:SF3,IPR025827,PS51737,PF00239,SM00857, G3DSA:1.10.10.2600,SSF53041
MKKQNNKTINNRAIAIVRVSTAEQATEDRYSIPHQRTHIAQECKARNLDLVHFFEFVQSGAKVLSGTSKERASVIKFITDYGISVVIVHELDRLARSMLDTLLFVDELDKLGVAFISIHDGFDTTTAQGQLQMHILSAFSEYFRKQLASKVIGGMIERAKQGKHMCRRPLGYDIGPNGFVINEEEARMVRMIFSMYLEQNLGLRAIAEHLNSMGLKSLRGNTWAHVSVKEIIKNEVYTGTFTWDIIRVENNHPPIIDPETWKKVQERRVRKGDISGRAQNSFYLLSGLLRCGVCKSATMIGRYARKKKAKGGFWEYRYYVCNNYSTRGLGTCNQLYIKADELEALVLNDIQELATHGVPVVGREEIPSNIGLLKEELVFKHKEMDKLKLMTLRAAEAYERGDYDLDFFSERKASIAEQRESLGKDIDRIKAQIEGQVTPEEIAARTEQRQKIAAALLEETDPVKAKALLQTIIDHIEVVSVDDITIAYRS

SEQ ID NO: 10663 - protein, 489 aa, Unknown
  Description of Unknown: Integrase B10664 sequence
  cd00338,IPR011109,IPR038109,PF07508,Coil, IPR036162,IPR006119,PTHR30461,G3DSA:3.40.50.1390,PTHR30461:SF3, PS51737,PF00239,SM00857,G3DSA:1.10.10.2600,SSF53041
MKKMNVVLLRISTDNQETLSQELAINSYCEQHNIIIDKVIKSEGVSGFKVPLNAREDLNEIRNLAIEGKLDKLIVFNLDRIGRRLELVSFLNLLDECNVKIISVTEGELNSGQDSDFLINSIKLWVAQTESKKTSVRVKNGKRANWTDTNYVSGKISFGYKIIDKKIVIDETNAEIVRTIFDLYIKYGTSKCVDYLDSLNLKNLNGKKYTRHSVLGMIKNRSYLGIRKSIAYNEEFYVPSLRIIDDYTFKKANEVLESRTIRKNKFVFTNRCTDNKYESLLYHKCYDGTINKLHSSFTYANDIKYSTVVCSHCKHFKYPIRKTYATKKLFEELDKAIDLRLDSLSSDKIESELKEKKSCVIKELELQININENSLDEDKRLLEGLNQTLDKIFKGELKFDLQQILDRVSDTQKVIIEKERVILELKTNLEIEKNKVENKNKLLERFKNFKNIYDLGTDEQKKMVLRELVNRVIIDGNKNITIELKYIED

SEQ ID NO: 10664 - protein, 489 aa, Unknown
  Description of Unknown: Integrase B10665 sequence
  PS00397,IPR038109,IPR006119,PS51737, PF00239,G3DSA:3.40.50.1390,PTHR30461,IPR025827, SM00857,G3DSA:1.10.10.2600,SSF53041,IPR011109, PF07508,PS51736,IPR006118,cd00338,PF13408,IPR036162,PTHR30461:SF3
MPTAAIYARVSTDRQAEQGYSIETQIAACEKYARDLGASTVTQFVDDGYSGAYLDRPRLDALRDALRAKIYDVVIVYTPDRLARRLSHQLLLTEEIEKAGAALHFVNQEYKATPEGQLFLQIQGAFAEYEREKIRERTMRGMRGKLKSGKPLRNQHVIGYDFKYGQYIINSIESKTVQQIFNMYISSGVGTDEIARRLTEMRIPSPSKLTHWQGASVHRILRNQMYTGEYFALRKVSTKTGAHSRKLSPRSKEEWIPLKCPQIIDAETFAAAQNLLDTNKTQLKRTKDNGVYLLQGLMRCAKCGEKIILTNNRAGRFYACYAHSKRKAAGHTCDARFAKTDIVDNAFWATLRNICSSEKRLAAYIKRTGKTISTKTDTAALKARLAKIEEEKVAVVDWYTNGLLTQQATTDKLSALTSEAKAISAKLAQPDKEKAVDTARIYNIIHNCGDNPENKRNAVRSVIDKIIYERTDGEKKPKAYSISFVIYFK

SEQ ID NO: 10665 - protein, 489 aa, Unknown
  Description of Unknown: Integrase B10666 sequence
  PS00397,IPR038109,IPR006119,PS51737,PF00239,G3DSA:3.40.50.1390 ,PTHR30461,IPR025827,SM00857,G3DSA:1.10.10.2600, SSF53041,IPR011109,PF07508,PS51736,IPR006118, cd00338,PF13408,IPR036162,PTHR30461:SF3
MPTAAIYARVSTDRQAEQGYSIETQIAACEKYAADLGASAVTNYIDNGYSGAYLERPRLDALRDALQAKIYDYVIVYTPDRLARRLSHQLLLTEEIEKSGAALHFVNQEYKATPEGQLFLQIQGAFAEYEREKIRERTMRGMRGKLKSGKPLGNVRVLGYDFVDSQYIINEAESKIVKQIFDMYISSGVGTDEIARQLTDMRIPSPSKLTHWQGASVHRILRNQMYTGEYFALRKISKKTGAHTRTLSPRPMDEWIPLKCPQIIDAETFNAAQNLLDTNKTQLKRSKDNGIYLLQGLMVCAKCGEKIILTNNRAGRYYACFAHSKRKAAGHSCDARFAKVEIVDEAFWSTLRRICSSEKRLAAYIKRTGKAVSTKTDTAALKARLAKIEEEKVAVVDWYTNGLLTQQATTDKLSALTSEAQAIQAKLSQPDKEKAVDTARIYKIVHACGSSLEKKRTAVRSVIDHVVYERTDGEKKPKAYSISFVIYFK

SEQ ID NO: 10666 - protein, 489 aa, Unknown
  Description of Unknown: Integrase B10667 sequence
  IPR011109,IPR038109,PF07508,Coil,PS51736, G3DSA:3.40.50.1390,PTHR30461,IPR006119,IPR036162,PS51737, PF00239,SM00857,cd03768,G3DSA:1.10.10.2600,SSF53041
MFKIIVFSRVSTEKQDLDQQTETLINYCKSIGYKDDEIYVIQVKESAIKLSEEERIGLQRLKEAVLKYKGIDTVICWEISRLSRRMEQIYSMRTFFIEHHIRWIVYYPYMELIDKDGKQSQNANLMMAIYSTFAENEMNLKKERAKRVYEYRKSLGKFAGGKILLGYKVDDEHNVQVDKESSELVKLIFNMYSTGEYSFRSLAKELKSRGYFENSSEHVIYGRISKYLHDERYIGKVFGWPQIIDEELFYKCKNIAEKQNIIQKPVNKREMLCKGLIFSKLRKISLIPEPAKHVYQTHPDYGKPSLTISSKYIDKLILDYTQEQIDKYFNDMRKIEEEWAASQQIFFKKISTFTKNRLKIQEKLNRAEELYIDGGITKERLDKKTRDLKLELAEYTRNIEDLDKEYSERERRFFNQKPVVLSEVSFEEKRKYVKQFISRIEIEKEKPLGRRSKVYIHNIYDNKVYVYLLYSQNSKYERKIKKPELLEVI

SEQ ID NO: 10667 - protein, 489 aa, Unknown
  Description of Unknown: Integrase B10668 sequence
  cd00338,IPR011109,IPR038109,PF07508, Coil,PS51736,G3DSA:3.40.50.1390,IPR036162, IPR006119,PTHR30461,PS51737,PF00239, SM00857,G3DSA:1.10.10.2600,SSF53041
MNVAIYIRKSREDREETREETLQRHENILIDYCSKNNLSIIKKYKEIVSGESIEKRPQMQLLLDDVKNNLYDGVVVVELERLSRGNQIDQAEILEIFKKSKTKIYTLNKVYDLSSEDEFDEEFFEFGLFMSRREYKIIKRRLIRGKKQAQKEGYFISATLPYGYNKEKQGKGYVLIPNEKESQIVQTIFEKYVNQNQSILEIRNFLNNNGINHNTKADKWTTQRVRRILSNKTYIGYIVAETKTENPIYYEGNHLPIIDETTFNKAQEKLKIKLVRTKRGSALQNPLASLLYCSDCGKLLHRNIAGKNPETKYSCRTVGCSNVQEYCYIVENKLISELQSELKNFNYFLSNYESEMKSKQVTINKEINIIENEIIKKENMINKACELLEEGIYSKEKYLNRVNILEQDLKALKSNLNDLKSLNYDETERYTTAIPILEKVLQKYWDLKPKQKNDLLKSIIEKIEYTKTERNKKGNIDPDLVKLKIYLKI

SEQ ID NO: 10668 - protein, 489 aa, Unknown
  Description of Unknown: Integrase B10669 sequence
  cd00338,IPR011109,IPR038109,PF07508,Coil, PS51736,IPR036162,G3DSA:3.40.50.1390,IPR006119,SSF103657, IPR027267,PTHR30461,PS51737,PF00239,SM00857, G3DSA:1.10.10.2600,SSF53041
MNIALYLRKSREEEIETREETLARHERILEDYCTKNNLTIIKKYKEVVSGESIENRPQMQQLLQDVQAGLYDGVVVVELERLSRGNQIDQAEILEVFKKSKTKIFTLNKIYDLSSDNDFDEEFFEFGLFMSRREYKIIKRRLQRGKQQAFKEGYFTSATCPYGFTKTRIDKGFVLIPDEHESKIVKLIFNKFVVEDLGIFAICKYLNDNGIKPRKAIDWQPKRIKMILRNRTYIGYLGCNYYSGYAHDYIKGKHDGFIDETIFNKAQDKLDSQMSKEKPTTRLANPLSTFTKCGVCGRTMRSTYSTHRKKYVLQCLTHNCPTITSSLESVEKQVIKELQDELNNFNYFLENFSDEISKKKIMIDNEIKILKTEINKKENMINKCCEMLEEGIYTKEKYLSRVNVLEEDLKALKSNLEALKSTSFDESDRYEKAIPILSEVLNQYWTLEPAAKNQLLKTIIERINYTKSKKNTRHNIDQNLFELEIFLKI

SEQ ID NO: 10669 - protein, 489 aa, Unknown
  Description of Unknown: Integrase B10670 sequence
  cd00338,PF13408,IPR011109,IPR038109,PF07508, Coil,PS51736,IPR036162,IPR006119,G3DSA:3.40.50.1390, PTHR30461,PTHR30461:SF3,PS51737,IPR025827,PF00239, SM00857,G3DSA:1.10.10.2600,SSF53041
MKRAVAYIRVSTKSDAQLHSYDYQVEYYKDLIERNPNLEYVGIYSDWGISGRWLAKRPQLNQLLEDAKEHKFDVVYTKSVSRLSRNTTELLEMVRELRDLGVKVVFEKENIDTFDPSAEVFLTIAAAVAENDLRVYSENQRWAVRKRFESGYMTIGCRILGYTMDKDTNTLIVNEEEAKIVRRIFELYLQGFGFAPISLILKNEGYINTKGTTEWGRGTISYILKNEKYKGCSLTQKSYNKDGMKYTNHGELTKYYMENTHEPIIEPEVFDKVQRIIYERCSKEQIGREKIPPYPFTGLITCGCCGHKYSHKFTAKDKPWRKAIWSCSHQNNYSRKVCTSSRIVDDVLKEKFVEVYNEFIETKPDNEIVTEIKRRIEELIAEETELNALRVNHLIEITDYNNEVEKVRAEIKENTQELNHHLMRGVTKSDFVKIDEFDETKVNKFIEEIIIDNYQVTFCFTNGISISRKYTNGPSGNQKGWKNKQQRNS

SEQ ID NO: 10670 - protein, 489 aa, Unknown
  Description of Unknown: Integrase B10671 sequence
  cd00338,IPR011109,PF07508,Coil,PS51736, IPR036162,PTHR30461,IPR006119,G3DSA:3.40.50.1390,PF00239, SM00857,SSF53041
MRAALYLRSSKDRHDVSLDAQRDELTKLAETRGLTIAAEFADAVESGSSENRPGFISLLEAIRNPKRGWEVLLVFDTSRIARRRYIAQAVKHEATKRRIQIIYSKLPVDLDPVSEVVLESVFQAMDEVHSLLSAEKGRMGMRQNVKRGFRAGGRAPIGYQLDRIPTGTIRDGQPVTKSKLITSPDAPVVTRYLKARASGLPRSRLIRELGMKWSPSTLIHVEWNALVYAGHTCWNQRVAGKKVSRDEWEITRNTHQPLITDAEAETLIRQLETSDIGRAVAAGKAAVTPHLLTGILMTSLGEKWTVAKGGKVYRIAGKFVQADLVNQAVLDTIRRDLSNLGFWKTLLDAVQKNDPTAGIDKEIKRLERERERAARKAVETDDGGIFVGVVEERTRQINALRRERELASREGGLFELVSRTTPADLAQMALENPSAAVSALVEEVTLNRDLTCQIRYRCVSMASPRGANRYAPVSPVYLDRTPEKRLQRV

SEQ ID NO: 10671 - protein, 489 aa, Unknown
  Description of Unknown: Integrase B10672 sequence
  cd00338,PF13408,IPR011109,IPR038109, PF07508,Coil,PS51736,IPR036162, PTHR30461,IPR006119,G3DSA:3.40.50.1390,PTHR30461:SF3, PS51737,IPR025827,PF00239,SM00857,G3DSA:1.10.10.2600,SSF53041
LKKVVFYGRYSSNNQTEQSIEGQLHVCQKFAELNDMVIVREYIDRAVSGKTDDRPAFQKMIADSKKKQFEGVLVYKLDRFARNSFHAAIYKQKLNENGVRVISATENISDNPEGRMLEGFLIHINQFYSEELSQKVNRGLNESFHKGYYMKKIPPFGYRLENRKLVPDEATAPLAKEIFERYNKGQKIVQIADWLNSLGMANQLGNKWRPMNISTHLHNRIYMGEYYYGQFKEPMPVPALVSAELFNSVREKLKASANRSHKKSDYDFILTGKLICAECGHSVSGSTAHGKNHYYYCRHCKKEKRHCIPADYLHEKVFTALAEYLTEAKMEELAEAAYAVYEKEHQHDERPALERELKQVEKQLQNAVEAVLNGFASESLKVTMQELEDRRDKLRESILASSVPIPKFEKEYFTFLLRHMAEMQEADLLDTVVNHIILKGDDTVIICINLTDETNLPPLEQVLFTVSEREGNRKVNNITFTLGWLYIAA

SEQ ID NO: 10672 - protein, 489 aa, Unknown
  Description of Unknown: Integrase B10673 sequence
  cd00338,PF13408,IPR011109,IPR038109,PF07508, Coil,PS51736,IPR036162,PTHR30461,IPR006119, G3DSA:3.40.50.1390,PTHR30461:SF3,IPR025827,PS51737,PF00239, SM00857,G3DSA:1.10.10.2600,SSF53041
MDIPITKVYADRAISGRTDKRPQFQQMMKDANTGTFHCVIAWKSNRMGRNMLQAMYTEDTLNRLGIRCLYVEEDFEDTAAGRFALRNMMNVNQFYSENMAEDIRRGMMDNAAQCKVNGYIPFGLKKGEDGRYAIDENKAPIVHEVFRRVAEGEQYAAIARDLTARGIRSNYGKEFGRTSLQAMIHNEKYRGVYQFAEVRVENGIPRIVDDDLFYRVQEVVKTKKNPEGAVRNSGDYLLTGKLFCGHCRSPMIGVSGTSRTGNPHHYYKCQKKHRTKDCQKKNVRRDDIETAVTKALMNYALTDEAIEKVADFTMDYFKRKEEESGILLMEEELAGVEKSLGNILKAIESGIINETTQERMLELENERKNLKGKIALAKADYVPVERDTVVEGLKMFREGNADDPRYRMKLFDLFLKAVYVYDDDRIEIFFSYDRNKNGMIVNLGGKISDAIVRMDAKEAHHFNSYEPGIDFYFINGLVVLVSTLSFFLE

SEQ ID NO: 10673 - protein, 489 aa, Unknown
  Description of Unknown: Integrase B10674 sequence
  IPR038109,IPR006119,PS51737,PF00239,G3DSA:3.40.50.1390, PTHR30461,IPR025827,SM00857,G3DSA:1.10.10.2600,SSF53041, IPR011109,PF07508,PS51736,mobidb-lite,cd00338, PF13408,Coil,IPR036162,PTHR30461:SF3
MDTMIPAAAYRRVSTDAQVEDGISLDSQKEEIDRWALSHGYRIVMDFCDAGKRGSDDQREEFVRMRHLATSRTPPFRAIIAWKSNRIARSVEIAAAFRGLLKRHGIDLLFVAEPSVDGPIGSLIAAILDGVNEFYSGQLGEDTLRGMRTCASRGFWQGGKPPYGFRVVEVEGGKALCPDTIEGAIVFDIHNLYAAGLGVNDIARQHNERGIPTRSGAAWTGSMVHHVLFRNREYNLGHMVFNRERKDKSGKRLYVKPRDEWTIANNTHEPIISPDMADAVDTAKHGRFCLRSLVNAEDKRALLVGVIRCGHCGYRMVRGHGHRTGNGRRLYYRCAQRIDAKNHGAGDDWCRAPMIHAEPIEETVLHLIRERYLSGDIAITPPDEPRHDENHAARRDEMTRRRDNLLRAIETGMVEWDEAKTRIDAIRREIARLDAEYEATRPREGKGHTVDLDMLRERLTTGENLRAVVTSTISRIDATKTRLDVSWLV

SEQ ID NO: 10674 - protein, 488 aa, Unknown
  Description of Unknown: Integrase B10675 sequence
  cd00338,PF13408,IPR011109,IPR038109,PF07508, Coil,PS51736,G3DSA:3.40.50.1390,IPR006119,IPR036162, PTHR30461,IPR025827,PS51737,PF00239,SM00857, G3DSA:1.10.10.2600,SSF53041
MNVAIYLRKSRDDQEETREETLARHERMLLDYCKRNNLLIKEIYKEVVSGESIENRPEMQRLLDDVSKCKYEGVVVIEIERLSRGNQIDQAEILEIFKKSKTKILTLNKIYDLSSDNDFDEDFFEFGLFMSRREYKIINRRLLRGRKQAQKEGYFIGTTPPFGYSKERIDKGFVLVEDENADVVRLIFNKFAYENWGLGDLRRYLTENNIKGLINQQRWENRAIKRILSNKVYIGYVNCNTKKAEANSIKGKHKPIIDEKTFSIVQEMLKQRECKTTNNKELVNPLATILKCGNCGRTMSRFTKSDDKRTTVYRCPLYCGNISSNCDLVEHKLIGELKEELQNFNYFLENTGQELNKKKQQIENEKSILLKEISKKETMIDRCCEMLEEGIYTKEKYLKRVNTLESELNALKSNLEGLNNISFDDEEKALRTIPILEKVLDEYWNLTGKQKNEILKSFIEKIEYTKTTPTRGQVANDKPIELKIYLRI

SEQ ID NO: 10675 - protein, 488 aa, Unknown
  Description of Unknown: Integrase B10676 sequence
  cd00338,PF13408,IPR011109,IPR038109,PF07508, Coil,G3DSA:3.40.50.1390,PTHR30461,IPR006119,IPR036162, IPR025827,PS51737,PF00239,SM00857,G3DSA:1.10.10.2600, SSF53041
MSGEANGPLRVAIWCAVSSRQQAGPDKASLDEQERAGHEFAEALGGHVVATYRVPGHSRDYVLWAEAEAEMDAYRRLREDCEEGVFDVLHAVDPDRLGRTAALIHQAIGLVERGGAEVYFASSPHLVGQRATSRLYMHAILAARADEAQEIRRRRHRMGMRRRVKRGLTPTRWPYGYRVVRDSTGRAIGGEFVEEELAALRLMTRLFLQGESYYEIARELTAAGYPPPGGDKWYFSTITSMTKNDVYAGLPVWGDVHAEEPTDRYPILWDEETYKAILQERRYRANNRSRRVSSPLHGVVFCARCGKPTHRCPSPHRVYQRCSTHRKPGETCHRNTTPEDDIWDALLKFLAGLTDLEALREQISRDSEDTETKRQLQELEERRQDIAQQRQRLAYALAQGAMDPLMYRRTDDGLVSRLNAIERERAQVEELRDARPSAEDRIAALEDLRASLAQRFEDMPGNKLNALLRHAGIRVECEDRHVVAIRIE

SEQ ID NO: 10676 - protein, 488 aa, Unknown
  Description of Unknown: Integrase B10677 sequence
  cd00338,IPR011109,PS00397,PF07508,Coil, IPR038109,PS51736,IPR036162,PTHR30461,IPR006119, G3DSA:3.40.50.1390,PTHR30461:SF3,PS51737,PF00239,SM00857, G3DSA:1.10.10.2600,IPR006118,SSF53041
MRAAAYCRVSSLQQKESQTIESQLRVLPEFVASRGWTLAGTYVDDGRTAKAGHLERREAFQRLIADAQAGRFDVVAVVDLDRLTRSEDVQERGYVYGIFQRAKVRIAVQATGQLLDLNSSDGDLLAGIFAWVAAEENRKRREKAHRGREQSILRGRKPAGQTPYGLAWTHEDGWAEDEAEAAIVREIFSRVASGESARSVGMDLERRQVTPPRRGRWYSGVPRIIRKTTYRGQWEADRGRFVSVPPLVDEDTWDAANASMSENRLRGLRTAKRVYFCDRGLAVCELCGERIGAAYLNLNDSTAYYYCNQRRRPRPHAPRCALPMRRSYEVDGRLWFAVERALLGDKFVKRAAELRQMAAADDPGKIRAELKRLAGAEAAVLERFTNGLISDAAMDAHVAKLTAKRAALEQRLASASAGPTDVRALLEELRARLAVTTPAEQRELVRTLIPPKGVTIGSTRIMATIIVGSTEGSGRCSFGRTIAIQVAA

SEQ ID NO: 10677 - protein, 488 aa, Unknown
  Description of Unknown: Integrase B10678 sequence
  cd00338,IPR011109,IPR038109,PF07508,PS51736, G3DSA:3.40.50.1390,IPR006119,PTHR30461,IPR036162,PTHR30461:SF3, PS51737,PF00239,SM00857,G3DSA:1.10.10.2600,SSF53041
MFLRKSREDVEAERAGKGETLAKHRAVLSRLAGDMGIEVSHVYEEIVSGGDLSARAGAQRMLEDVRAGMWDGVLAFDLQRVTRGDMIDQGTVVLAFQLSRTLIITPQKVYDLRDELDGNFAELEMLFGRMELARITRRLTAGKEEAVRQGQYLGSIAPYGYDKAVSGRKKTLVPNDDAERVVSWYRRVADGGATPRKIADEMNDMGIPTPRAGLWDRTLVTKIIRNPVYKGYVRWNGKRTVEAFGPDGQKAKVREKADEIIALGLHEPLVDAELWQRAVDAISVRRHATPDDRTLKDPLASLLVCSGCGRSMQRVRDARRDVAYYNHPSVNRKACWQKSTRMEDVVRAVVAALSEAAADVEARIGRVEAPPATDQIERDLAAEERSAETLFRLVEKGIISDEEFAERKGLSDARLAAIRARLDEAVAAARRSGADGELTVSLKRAIADLGSYEGRAEEVNRFLKTFISRIEYEKDPESGSLRLRVFFR

SEQ ID NO: 10678 - protein, 488 aa, Unknown
  Description of Unknown: Integrase B10679 sequence
  PS00397,IPR038109,IPR006119,PS51737, PF00239,cd03768,G3DSA:3.40.50.1390,PTHR30461, IPR025827,SM00857,G3DSA:1.10.10.2600,SSF53041,IPR011109 ,PF07508,PS51736,IPR006118,PF13408,Coil,IPR036162,PTHR30461:SF3
MTDYIKKNIRVAIYVRVSTQEQAKEGYSIGEQTDRLKKFAEAHDWLIVQVYTDAGHSGADTNRPALQDLLSDVRDGKIDKVLVYKLDRLSRSQKDTLTLIENEFIPHGTDFESMSEKLDTSTPQGRLFLGILAAFAQLEREVIKERMSMGIQARIREGKWRGGAQVPFGYDYEPALEKLVVNEYESMIVKYIFDAFVEGKSIYQISETMMEKGQTFKSGKADHRNIRNLLRRKTYCGYQKHNDEWIKGLHDPIISEETYNKAQEIIIEKKRRFDESGLKVGTAATSTDLGGIIYCARCGARYSKYRTGSKQYGFHYNYGCYSRHKKAKAMIKDPNCMNRNYRKDELDNIIFNEIKKLAIDPEYMQSIKKEAARTDEVQQIHAIEEKIKSINSQLSRFMDLYGIGKYDMDELDEKTTPLREQKNKLQREVERLREESKTMTEDQVLQLVESFEEALNNGDLHDRRSIIEQLINRIEIDGDDITIHWNFV

SEQ ID NO: 10679 - protein, 488 aa, Unknown
  Description of Unknown: Integrase B10680 sequence
  cd00338,PF13408,IPR011109,IPR038109,PF07508, Coil,PS51736,G3DSA:3.40.50.1390,IPR006119,PTHR30461, IPR036162,IPR025827,PS51737,PF00239,SM00857, G3DSA:1.10.10.2600,SSF53041
MNVAIYLRKSRDDQEETREETLARHERMLLDYCKRNNLIIKEIYKEVVSGENIANRPEMQRLLEDVAKQKYEGIVVIEIERLSRGNQIDQAEILEIFKKSKTKILTLNKIYDLSSDNDFDEDFFEFGLFMSRREYKIINRRLLRGRKQAQKEGYFIGTTPPFGYSKERIDKGFVLVEDENADVVRLIFNKFAYDNWGLGDLRRYLTENNIKGLINQQRWENRAIKRILSNKVYIGYVNCNTKKAEANSIKGKHKPLIDEKTFYVVQEMLKQRECKTTNNKELVNPLATILKCGNCGRTMSRFTKSDDKRTTVYRCPLYCGNISSNCELVEHKLIDELKEELQNFNYFLENTGQELNKKKQQIENEKSILLKEISKKETMIDRCCEMLEEGIYTKEKYLKRVNTLESELNALKSNLEGLNNISFNDEEKALRTIPILEKVLDEYWNLTGKQKNEILKSFIEKIEYTKTTSTRGQIANDKPIELKIYLRI

SEQ ID NO: 10680 - protein, 488 aa, Unknown
  Description of Unknown: Integrase B10681 sequence
  cd00338,IPR011109,IPR038109,PF07508,Coil, PS51736,IPR036162,PTHR30461,IPR006119,G3DSA:3.40.50.1390, PTHR30461:SF3,PS51737,PF00239,SM00857,G3DSA:1.10.10.2600, SSF53041
MKKVAFYGRYSSVMQTEQSIEGQLHVCEQYAAANDLQIVRQYVDRATSGKTDNRPQFQQMISDSERRLFESILVYKLDRFARNRYDSLIYKHKLKEQGIRVISATEPLSDTPEGVIFEALIEGMDEYYSAELGRKMKRGKQESFRKGRFIGKLPPFGYKVVNHRLAVDELAAPIAQEIFSRYAAGEKQNKILTDLNRRGIHNAAGRPWNKVNMTMMFKNRIYIGIYSVADYGEAECPAIIDKEVFDMVQKKKQESVHRARANKTDFDYILTGHMTCARCGASVCGCSMQQGKYHYYQCHKHCGHRIRAEELHERVKRALAEYLTEDKMQELAQGAYDVYLNEQVSDERPLLEKELADVEKQLQNAVQAILRGVELDTLNNTIEELKARRDELRAKIEDAPTPLPKLTYDMFVAMLHLIVERAAETDDLAKLLHTVINRIIIDDQDIIICINLTDEDNEPPMEQIRFRVMDKSATLTLNLTQNWLLIPA

SEQ ID NO: 10681 - protein, 488 aa, Unknown
  Description of Unknown: Integrase B10682 sequence
  PS00397,IPR038109,IPR006119,PS51737,PF00239,G3DSA:3.40.50.1390 ,PTHR30461,IPR025827,SM00857,G3DSA:1.10.10.2600, SSF53041,IPR011109,PF07508,PS51736,IPR006118, cd00338,PF13408,Coil,IPR036162,PTHR30461:SF3
MTISAAGYLRVSTDEQAEHGVSLPSQKSRIIAYCQSQGWNLYDLYIDDGYSGKNLNRPGMSKLIDDVKEHKIDAVIVIKLDRLSRRQKDVLYLLEDVFEPNKVGFKSVSEPFDTTTPFGKAAIGMMAVFAQLERETIVERVKEGKKEAAKQGRFMGGPIALGYNFNRDTRKLEINELEAETVRFIFSEYLTSGKGYQYIADELNERCIPTPGTATEWIRGTVRAILRNAFYAGLVEHKNSMHKGQHPAIISEENFYSAQKIKSIRTTYNPDAESGLLTGIIYCGECGARMRMKKVWKNPRKPMLPKVGYYTCYSQDGCAKSMIRDVNCKCGYKRAPEIDRAVVEHLYEYRQNPKLLKEAMDTLLDTNMNKHITKAKAQATKDLNTIKNKLEKWYDAFEKNIISADDLVDRIKDLREQRVFLENKILGYDETLNLNISKAVTVKEISHILKNFDVIWENATNEEHRQLLLSFVKSVTIDKNNNINITFG

SEQ ID NO: 10682 - protein, 488 aa, Unknown
  Description of Unknown: Integrase B10683 sequence
  cd00338,PF13408,IPR011109,IPR038109,PF07508, Coil,PS51736,IPR036162,IPR006119,PTHR30461, G3DSA:3.40.50.1390,PTHR30461:SF3,IPR025827,PS51737,PF00239, SM00857,G3DSA:1.10.10.2600,SSF53041
LKKAVFYGRYSSVNQTEQSIEGQLHVCEKYAEQNGLEIIAQYVDRAQSGKTANRKEFQRMITDSEKGMFEAVLVYKLDRFARNRFDSAMYKRQLRENGVKVISATENISDTPEGIMMEAVLEGMDEYYSAELARKLHRGMAESFRKGYFINRAAPFGYRVENHRLVIDEQKAPLAAEMFRRYASGERFTDLIQWLDGMGIPNGNGRSWQNWNLSVILKNRAYIGEYTRSDMEGFAPCPAITDKETFNKVQNRLAEFAHRARENKTKNHFDYFLSGFLICGECGKHIGGSSVAQKFHYYRCSGCRKKNYNAEKLHERVLTTLAEYLDSDKLDQLAQAAYEAYQQEQETSEVPALEHELQDVEKQLRNAVNAILKGVDTPFLKETMDELEKRRAALKSAILDAPTPLPEFTVNQFRYILEKKLSNSAREMLSTFVNRIILTEDELVICINLTDENNTPPLEQYLCKVGDMSGSPCLHKVIYMSGWLFVAA

SEQ ID NO: 10683 - protein, 488 aa, Unknown
  Description of Unknown: Integrase B10684 sequence
  IPR038109,PS00397,IPR006119,PS51737,PF00239,G3DSA:3.40.50.1390 ,PTHR30461,IPR025827,SM00857,G3DSA:1.10.10.2600, SSF53041,IPR011109,PF07508,PS51736,IPR006118, cd00338,PF13408,Coil,IPR036162,PTHR30461:SF3
MLNEQKRAAAYIRVSTDDQLELSPDSQLKEIKNYAKAHGYTLDEEYIFHDDGISGKNAKRRPGFMLMIATAKKKPKPFDAIIVWKFSRFARSREDSIVFKSQLKKLGISVLSVSEPITDDKMSIIVEGLIESMDEYYSANLSEEVKRGMLEKFSRKQAMTAAPFGYRLENKKYIPEPAEAEIIKECFDRFVNKNDTVWGIARDLNARGIKSKRGNPIERRTVQYWLQNPVYIGCIRYTTDGGGSRMRYSDGNYLLQKDCHEPIIDKATFEAAQKIFKKNREIYKTERTVSFHEYALKGIVKCSECGHNLTFCTHKEAPRVHCPAYVHSKCSSASSVKLDLLNEALLNDLRSALKDEHLTVDFSLADADKNNIQLQLEAELKKEQKKLDRIKTAYADGIDTLEEYKENKTAQLARIAELEKKLKTASAPLSSEQKQKRKKDLRQKIKTAIDALQSTAISEKEKNALLKSFISKALYNSKTKTLTVFYYA

SEQ ID NO: 10684 - protein, 488 aa, Unknown
  Description of Unknown: Integrase B10685 sequence
  IPR038109,PS00397,IPR006119,PS51737,PF00239,G3DSA:3.40.50.1390 ,PTHR30461,IPR025827,SM00857,G3DSA:1.10.10.2600, SSF53041,IPR011109,PF07508,PS51736,IPR006118, cd00338,PF13408,Coil,IPR036162,PTHR30461:SF3
MKTSKAYIRVSTLEQAREDRASIDTQKDRISSFARSQGLELSEQDFYIDTSSGATFVDRPSLERLRQDIRRGRVKHLFVWKQDRLSRTARDTLELLQEFKNYGVTYKSVTEPFDTSSKFSEAIMGIIAVFAQMERDNIAERMITGRYTKVQRDGTNFGSEPPFGYKTIEKRFVIVEEDAEIVRLIYKLYLQYKSDNRVRIELERRGISARVKLDRRQIMRILTNVKYTGRMKVKEIIYEQKHPPIIEIPMFEEVQRIRDANFKGYEASWSCVAPDFILRDVAKCGLCGREMVKREVPSQKKDRGRLGYYACSSCHRRNKKRDCEHRKFHKKEKLEGSVKEMIFEHIGALLNDSRYMQRHLNVTSQQEIDHIKAQIENKQKTLKSKDLAKKKWLQVFEKQDSPPDEFLERYEAIRKEIKELEGDISSLKASLEVEKAKKEDFKQKERFYREFDQNWEEASLQEKRDMINALIKIIRVFPKGNVEIDYNF

SEQ ID NO: 10685 - protein, 488 aa, Unknown
  Description of Unknown: Integrase B10686 sequence
  cd00338,IPR011109,IPR038109,PF07508,Coil, IPR036162,IPR006119,G3DSA:3.40.50.1390,PTHR30461,PS51737, PF00239,SM00857,G3DSA:1.10.10.2600,SSF53041
MLRPAAAGAEPLRAFIYDRNSRDPRRLGTAVRDQGVENQRLCEAYGWRIVEVFEDAGKSASRYATRTRPDYEEMLRRAEARECDVIVAWEASRLNRNTETYLSLRNLCERLGILLCYNGRLYNMERSDDRFATHLDALLAEREADAIRDRNKRTHRLILERGTPPGRLPYGFAREYDARTGALVRQVVDPAQGEVVREIARRVLEGQSCSSIARELNRRGVPAPWTSPAWTLESVKRVVVRPSSAGKRDHRGRVVGDAAWPAILEESDWQACVRVLTDPARLNHRGAQVRHLLSGLVFCGPCGGASRLRPKKVKGAVSYLCQRCYRVSMRAPMLEAFAVELVLGYVEREAFASSLLAVDVERGDVAARAVAEARAYEAQLAEATALAGQLAPGRGGLMVPALSAARLAAMEADLLPKIDAALARARGASVPAVLRDTAGPGARDLWEEDLDIGQRRVVIREVVRLQLNEGGMGARKIAPGRVTYEWLR

SEQ ID NO: 10686 - protein, 487 aa, Unknown
  Description of Unknown: Integrase B10687 sequence
  PS00397,IPR038109,IPR006119,PS51737,PF00239 ,G3DSA:3.40.50.1390,PTHR30461,IPR025827,SM00857 ,G3DSA:1.10.10.2600,SSF53041,IPR011109,PF07508,PS51736 ,IPR006118,cd00338,PF13408,Coil,IPR036162,PTHR30461:SF3
MNDIKRGALYIRVSTDDQTEYSPDSQIKLCYKYAKEHNIEILKEHIYQEDGISGTNVEKRTSFKRMIATAKKKPKPFDVILIYSFSRFARNREDAIMYKSLLRKKLGIDVVSITQPLSEGKESILMEALYEAMDEYYSVDLAEQSIRGKIEKASRGEHQGGTPYGYIYDKNTKTLYPDKEKAEIVKLIFKEWIKPEQSIRGLCRMLNDMNILTTRGCKWSDRSMYLILQNPAYIGYSRFTVGGMKRNYKHPDTITAKGKWEPIIDMETWNLAKQKMDDHDKKWFKYKKHYTKNEFWLRGIVKCSDCGKSLVRCNVKGKPVPFFQCTGFTKGRCQDSHYIRQDQLVPAILEQIKKDYTDKLNIKITEGKDTPQYDQISIIKKNIEKLKTKRERIKEAYINEIDTLEEYKENKKKLDNEEKQLKEQLKELNYKEKQEVRKEKTYELCKTAYEILSDEETSFDLKDDVAHRLFDHITYNKKENTLEIVYK

SEQ ID NO: 10687 - protein, 487 aa, Unknown
  Description of Unknown: Integrase B10688 sequence
  IPR038109,PS00397,IPR006119,PS51737,PF00239,G3DSA:3.40.50.1390 ,PTHR30461,IPR025827,SM00857,G3DSA:1.10.10.2600, SSF53041,IPR011109,PF07508,PS51736,IPR006118, cd00338,PF13408,Coil,IPR036162,PTHR30461:SF3
MNDIKRGALYIRVSTDDQTEYSPDSQIKLCYKYAKEHNIEILKEHIYQEDGISGTNVEKRTSFKRMIATAKKKPKPFDVILIYSFSRFARNREDAIMYKSLLRKKLGIDVVSITQPLSEGKESILMEALYEAMDEYYSVDLAEQSIRGKIEKASRGEHQGGTPYGYIYDKNTKTLYPDKEKAEIVKLIFKEWIKPEQSIRGLCRMLNDMNILTTRGCKWSDRSMYLILQNPAYIGYSRFTVGGMKRNYKHPDTITAKGKWEPIIDMKTWNLAKQKMDDHDKKWFKYKKHYTKNEFWLRGIVKCSDCGKSLVRCNVKGKPVPFFQCTGFTKGRCQDSHYIRQDQLVPAILEQIKKDYTDKLNIKITEGKDTPQYDQISIIKKNIEKLKTKRERIKEAYINEIDTLEEYKENKKKLDNEEKQLKEQLKELNYKEKQEVRKEKTYELCKTAYEILSDEETSFDLKDDVAHRLFDHITYNKKENTLEIVYK

SEQ ID NO: 10688 - protein, 487 aa, Unknown
  Description of Unknown: Integrase B10689 sequence
  cd00338,IPR011109,PF07508,Coil,PS51736, IPR036162,IPR006119,G3DSA:3.40.50.1390,PTHR30461,PS51737, PF00239,SM00857,SSF53041
MLNQKGIYAAYLRKSRADAEAEAVGKFETLAHHQQILTALADREGIKVARWYKELGSGDTIQDRPEMQALLHDVRSGLYDGVLVTEVSRLARGRTADQATVSEAFQVNGTLIITPSKIYDPSDDADETFIDFELFMARQEYKYIRKRMKAGKRQALLNGSYINWRPPFGFDRDEKNMSLTPNEDAPFVIQLLHDFADGKLTVADAIRRMRSYTGQETWSYTSLRYLLTNPAYIGMSQIDVAPTVKVSDGGKVTTKRIESKKPTLVKAKWDGLIDEETHAKILARFGTAPRTKTGTDLRNPFSGLLRCGKCGQTLVLNIPRDAKPRIIHLHGVRSGGCNCASCTLPVLIEGIADALEESLPYQEATFERKQKRVNTAPIRKKIADARKKQERLYDLFEDGTYTAEEFRKRRAYYADQISELETQLEEAEAVRSKPPVTISTKDAIRLIRDPSTPPRIINDYLKSIIEKIDYFRESAAEPPRLFIYPKQ

SEQ ID NO: 10689 - protein, 487 aa, Unknown
  Description of Unknown: Integrase B10690 sequence
  IPR038109,PS00397,IPR006119,PS51737, PF00239,G3DSA:3.40.50.1390,PTHR30461,IPR025827,SM00857 ,G3DSA:1.10.10.2600,SSF53041,IPR011109,PF07508,PS51736 ,IPR006118,cd00338,PF13408,Coil,IPR036162,PTHR30461:SF3
MNDIKRGALYIRVSTNDQVEYSPASQIKLCKKYAKEHFIEIIPEHVYQEDGISGTKADKRPQFQKMIANAKSKPKPFDVILIYDFSRFARNKEESVMYKALLRKKLDIEVVSITQPLTEGKESIILESMYEAMDEYYSVNLSENVKRGKIEKASRGEFQGQAPYGYTYDKNIKNLIINEETADIVKMIFKKWIEPEMTIKKLCNYMNNTGIKTTRGHLWCDRSIKLILQNPAYIGKVRFTEGGMLRNYNHPNMIIKDGKHQPIIDMKTWNLAKQKMDDHHKKWYKYKKEYSAHKHWLNGLLKCDNCGSSLTHVGGMKNRYPHFQCCGYTKGRCKVSHYLRDSQIIPVIIEQLKKDYTEKLDIKIINKESTSEYENIQLLEKQLKRLESKLKRVKAAYINEIDTLEEYKENKKTIEKEKEQINKELEKLNYQQTKEKRKEKTYKLCEEAYKILSNENASEELKDDISHRIFEKIVYNKKEESIEITYK

SEQ ID NO: 10690 - protein, 487 aa, Unknown
  Description of Unknown: Integrase B10691 sequence
  cd00338,PF13408,IPR011109,IPR038109,PF07508, PS51736,IPR036162,PTHR30461,IPR006119,G3DSA:3.40.50.1390, PTHR30461:SF3,PS51737,IPR025827,PF00239,SM00857, G3DSA:1.10.10.2600,SSF53041
MKIVGYVRLSRASREESTSIVRQREVIAKHCELRGLELVEIVEDDNTSATKTRLDRPGLTRVRQLVRDGDADAVMVWRLDRLVRSVVDVGVLLDEGLQIISATESLDTTSPMGRAMVEILQVFASMEAKTTGLRVAASQEHLRQVGRFPGGVVPYGYRAVPHPSGVGRALEPHPEEAAVVRRVADEVLAGSSVYAACVRLNAAEVKPRRAAEWGSTALQRVLRSDAVLGRVRTGSVRAPHPATGKPHIVKPAELIRDENGLPVVFWEPILPVEDVERLRALTDWTPTPGRAEATQRGRRKKAARLLSGMISCPGCGGNLVRKNRRSTTGHDIYACHAAGQGRDCPRGVAVECHRVEEEVERQFLAIVGHYLVVEQRVTVRDVPGLAAVDEALRDTTAALSRPGADLPPLMERLQRLHAERARLDATPAAPSVELVETGETFADTWRRRDMLGRRELLIASGAEVEIAPARQRGKWDPSRVTLTLTAG

SEQ ID NO: 10691 - protein, 486 aa, Unknown
  Description of Unknown: Integrase B10692 sequence
  cd00338,IPR011109,PS00397,IPR038109,Coil, PF07508,PS51736,IPR036162,IPR006119,PTHR30461, G3DSA:3.40.50.1390,PTHR30461:SF3,PS51737,PF00239,SM00857, G3DSA:1.10.10.2600,IPR006118,SSF53041
MIIAAAYVRVSTDEQTDYSPAAQLADIKEYATHNGYHIPEEFIFMDEGISGKRADKRPAFQAMIRQARKKSNHIQYIIVHKFDRFARNKEDSVLYKALLKKDGVKVISVKEPIPQDDKFAVIYESMLEAMAEYYSLNLAEEVNKTMIKKAQAGEWQATAPFGYKNENKSLTIVPEEAKMIRYIFEQYIAGTSMFALSRQMNQMGYRTHRGNVFEHRTIQYILNNPVYKGYLRWTPGKKINRNFNDSASIVAKGDWEPIVSKEIWDAAAARFKNEKRTYYKHKRPETEGIHWLSGMVKCSSCGRSLVVGAKYKSGAAQFQCGGYCHGQCHDSHAVSSNRLIPAILSELEKIAAHPDTEGCRYTIRRELPASDELDVYVPLLAKAQQRLKKAKDAYLNDIDTLEEYRSNKMNIEKEIAELKEHIAEIEERQNMPFDQAAFSTKIASVIEILRDDSRQMEDKRKAFKSVCDKIIFHKHDSSLELFLIDQ

SEQ ID NO: 10692 - protein, 486 aa, Unknown
  Description of Unknown: Integrase B10693 sequence
  IPR038109,PS00397,IPR006119,PS51737,PF00239,G3DSA:3.40.50.1390 ,PTHR30461,IPR025827,SM00857,G3DSA:1.10.10.2600, SSF53041,IPR011109,PF07508,PS51736,IPR006118, cd00338,PF13408,Coil,IPR036162,PTHR30461:SF3
MPELKIAAVYLRVSTDDQKELSPDSQLEALRAWAEKNACVIPEQYVYVDEGISGRSAEKRPKFMEMIGAAKSAEHPFDAVLVWKFSRFARSQEESIVYKAMLSKVGVDVISISEPVIEGPFGSLIERIIEWMDEYYSIRLSGEVKRSMTVNAQRGVPQIAPPFGYRKNPAEGSPFMVPEETEAAVIREVYSDYLSGVPVWKIVDGLNVRGIRTHRGGKIENRTVTYWLQNPVYIGMVRWTPSGRTRRDFHNPDTITAPGDHEPLVSREDFDAVQLLVAAAAETHRPKSRPSFELKDWASGVVRCASCGSTLVFQRPRYFICNGYVRARCKNRNSITVDALHTAILEKLRADSSAAYPLRYKITRSDDTERELRVLRQQADQYDRKLSRIRDAYAAGIDSLDDYRRMKEALDAQHAELLGKIAELESRVDPAAAEAALTESIRKTLETLEDSDTPLHEKNTAAKALFETVIWDKATETLTITYRVFI

SEQ ID NO: 10693 - protein, 486 aa, Unknown; identical to SEQ ID NO: 9864
  Description of Unknown: Integrase B10694 sequence
  cd00338,PF13408,IPR011109,IPR038109,PF07508, Coil,PS51736,G3DSA:3.40.50.1390,IPR006119,IPR036162, PTHR30461,PS51737,IPR025827,PF00239,SM00857, G3DSA:1.10.10.2600,SSF53041

SEQ ID NO: 10694 - protein, 486 aa, Unknown
  Description of Unknown: Integrase B10695 sequence
  cd00338,IPR011109,IPR038109,PF07508,Coil, PS51736,IPR036162,IPR006119,PTHR30461,G3DSA:3.40.50.1390, PS51737,PF00239,SM00857,G3DSA:1.10.10.2600,SSF53041
MNVAIYLRKSREEDNETREETLARHERILLDYCNKNDLLIKQIYKEVVSGESISNRPQMQLLLDDVRNNLYDGVVCVELERLSRGNQIDQAEILEIFKKTKTKIYTLNKIFDLSSEDELDEEFFEFGLFMSRREYKVIKRRLIRGRRQAQKEGYFIGSILPYGYSKEKQGKGYVLIPNEQSKIVQLIFNKYVIENLSSAQICDYLNELGIKSQKLDKWNTTAVRKVLRNITYTGIIQADTEKEVKLFYDGKHEPIISDEIFSQAQSKLKSLTTKKKKDCDLQNPLATLCKCHYCGVTMRRTVTPKVKYPVFKCGTRGCVNMSASLYDVESKVIEELEKKLKDFKYFINNYSDEISNKKKLVNDEIELINKEISKKESMIDKCCEMLEEGIYTKEKYLTRVNILENDLKALKVALNGLKSTNFDESDNILKTIPKLELVLKEYWNLDAENKNRLLKTIINKVTYKKDTRKVRNEPDIFDVEVDIKYI

SEQ ID NO: 10695 - protein, 485 aa, Unknown
  Description of Unknown: Integrase B10696 sequence
  cd00338,IPR011109,IPR038109,PF07508, Coil,PS00397,PS51736,G3DSA:3.40.50.1390, IPR036162,IPR006119,PTHR30461,PTHR30461:SF3, PS51737,PF00239,SM00857,G3DSA:1.10.10.2600,IPR006118,SSF53041
MKIAAAYVRVSTEEQTELSPDSQVKLIREYAKKNGYIVPKEFIFHDDGISGRSTAKRQGFNQMIGTAKLKPKPFDAILLWKFSRFARNREDSIVYKSMLRKLGIDVISISENVGDDKMSVLIEAMIEAMDEYYSINLAEEVKRGMTEKFGRGLKVSGPPLGYDMKNGEFVVNEQGAEIVHRIFDMYVNQDMGYLNIARELNAEGIRTLHGNDFETRTIAYIIKNPVYIGMQRWTPGGGGSKGHYRSAAAENVVVTQAPHPAIIDKEIFEKAQQKAAKARRPYERSGFTKHEYMLRGLLKCSSCGSNLTMGSVKSGTLQCYQYAHGRCKESHAITIGKIDKAVIEDIQGLVDGTATDYKLVDQSPAKPKKDTSKFETQLERERMKLERVKAAYADGIDTLEEYKRNKSEVLASIAELESKLRQAQPPRAQPTADRLPDLKVRAQEVLKVITSPNATPVEKNNALRTIVDKVVFDRKTSSIEMYYLC

SEQ ID NO: 10696 - protein, 485 aa, Unknown
  Description of Unknown: Integrase B10697 sequence
  IPR038109,PS00397,IPR006119,PS51737,PF00239,G3DSA:3.40.50.1390 ,PTHR30461,IPR025827,SM00857,G3DSA:1.10.10.2600, SSF53041,IPR011109,PF07508,PS51736,IPR006118, cd00338,PF13408,Coil,IPR036162
MTDLKIAAAYIRVSTDDQVELSPASQLVEIRKWGAANGYLVPDEFVFVDEAKSGRKVTGRDEFRRLIATAKTKPKPFDAILLWKFSRFARNRDDAVYYKSILRKQLKIEVISIKEPIEDGKMGVIMESMIEAMDEYYSINLAEDVKRGMEEKHRRGELQATPSFGYTVLDNVLVPVPEEAVYVQEIFSRFVSGEGFYTIARWLNSMGVKTHRGSTFENRTVEYILRNPVYIGKLRWNPAGRSRRDYADPNIIVTDGKHEPLVSEETFQQAQTRIAQLKAAMPYKARPLGSNKDWVSGLVRCASCGSTLIFAKPHYWKCNNYVRGRCRASQHISSDLLKKAILDRLHMDAAASAPLSYDVLRVNGRDGDTTAALRTQRASLERRLERLREAFLAGVDTVEEYRQLKEDAQAQIQRIDQELSAAAAENRRAGDVSIMRSAISDALAVIENEDASLEQRCNAARSIIDRITWDKAQNLLTIHYRLMLE

SEQ ID NO: 10697 - protein, 485 aa, Unknown
  Description of Unknown: Integrase B10698 sequence
  cd00338,IPR011109,IPR038109,PS00397,Coil, PF07508,PS51736,G3DSA:3.40.50.1390,PTHR30461,IPR036162, IPR006119,PTHR30461:SF3,PS51737,PF00239,SM00857, G3DSA:1.10.10.2600,IPR006118,SSF53041
MSPNPRIAAIYIRVSTDDQAELSPDSQLETVRAWAGQHGYLVPEQYIYVDEGISGRRADKRPAFNDMIALAKQKDRPIDAILLWKFSRFARNQEESIFYKSMLRRNGVEVVSVSEPIIDGPFGTLIERIIEWMDEYYSIRLAGEVRRSMVLAAQRGQRQTAPPFGYQRNPAGKPFMVPHPEEAEIIKGVFRDYLAGVPVLRMVDTLNAAGVRTHRGGPIENRTIMYWLQNPVYIGKNRWTTTGRARRDFHHPDSVIVDGDHAPLVSQEVFDEVQKRVAEAAAAHRPKARPSFELKDWMGGVCRCATCGSTLVFQRPHYFICNGYVRARCRDRQMITLEDLHDAVLSRLRADGSLSRPLRYTVTSSDETAQELKSLRLQADQYDKRLARLRDAYLNGVDTLEEYKNARDQLNQSQAETQQRIKALESRSDPQLAETALKKSILSTLATLESDADLHEKNAALKMLIDSCTWQKSTKTLEITYRVFL

SEQ ID NO: 10698 - protein, 485 aa, Unknown
  Description of Unknown: Integrase B10699 sequence
  PS00397,IPR038109,IPR006119,PS51737,PF00239, cd03768,G3DSA:3.40.50.1390,PTHR30461,IPR025827,SM00857, G3DSA:1.10.10.2600,SSF53041,IPR011109,PF07508,PS51736, IPR006118,PF13408,IPR036162,PTHR30461:SF3
LLFCYARRNEDRMRVIIYVRVSTAEQAQEGYSIGEQTERLTAFAAAMSWTVVRVCTDPGYSGAKLERPGLKELIRSVEAGQTDKVLVYKLDRLSRSQKDTLYLIEDVFLKNGVDFVSMSENFDTASAFGRATIGILAVFAQLERETIKERMLLGKVGRAKDGYYTGKQILVGYDYVNKLLVPNAYETMLIRTIFDDFLSGRPISTIAAELNKKGLYHRGRPWYSQTVRRILSNRTYIGEVLYQGVWYAGRHEPIIERDVFDRAQRLLQLRAESYTSSNNHVSPLTGFLWCGRCGAKYGRQRWMKRNDGTRKVCYMCYTKSKKCKTMITADHCDNKNWETDELEAVIFNEIRKLGTDPEYLTSEKKRAQEEREATDSAQLIRSEVTGLSSQISRLMDLYSLGSLSLSEVDAKIRPLAERRDKLEAELKAMTTPEGAIPTDEAAQLVQSFGDVIDRGDLTEIRLVLTSLIRKIVLDGDNIEIYWNFT

SEQ ID NO: 10699 - protein, 485 aa, Unknown
  Description of Unknown: Integrase B10700 sequence
  IPR038109,IPR006119,PS51737,PF00239,G3DSA:3.40.50.1390, PTHR30461,IPR025827,SM00857,G3DSA:1.10.10.2600,SSF53041, IPR013087,IPR011109,PF07508,PS51736,cd00338, PF13408,PS00028,Coil,IPR036162,PTHR30461:SF3
MRKAVFYGRYSSANQTEQSIEGQLHVCEKFAAQNDIQIVRHYIDRAISGTSDNRPQFQQMVVDSKQKNFEIVLVYKLDRFARNRYDSAIYKKKLRDNGVRVVSATENITDSPEGIIMEGLLEAMDEYYSAELSRKMMRGKEESFQKGYYLNHVAPFGYKLVDRRLALDEATAPLVPKIFRSYLDGKKIGQIANELNAKGISTAAGTHWKPMDVSRLLHRRLYIGEYTFGDFEGVMPCPQIVPHELYDAVQKYIAEAAARKRKRKDYNYMLTGKLRCAECGKSVCGSTSGKNHYYYCRHCNGARSIDADYLHDKVLSALGEYMTEDKVAEIAAAAYAEYQQEEQMDERPALERELKSVDTQIQNAVNAIVAGAALPELQDKIAQLKERQETLRKALLDVPTAMPRLTEAHFRLVLSEMAKQSSEELFKTVVGLVLLKGDTVIICVNLTDETNIPPLEQILFRVTDAGTSDTQNKAIQMSGWLLIAA

SEQ ID NO: 10700 - protein, 485 aa, Unknown
  Description of Unknown: Integrase B10701 sequence
  cd00338,IPR011109,IPR038109,PF07508,Coil, G3DSA:3.40.50.1390,IPR006119,PTHR30461,IPR036162,mobidb-lite, PS51737,PF00239,SM00857,G3DSA:1.10.10.2600,SSF53041
MKTRVAIWAAVSSKPQAAGDKTSLSDQEHLGRQYAERIGGEVVRIYKVPGHTRDVTFWDEAASAMPAYRELREDAEAGAFDDLWVLDPDRLGRDPALSHQVASLVKKGGQRLWVEDGQYYVSEESSAGGYMFAFQSQRGGEMQRKRVMRHDSGMRGRVKRGLPPNNWPHGYRGVRDENGKVFKGEFVQGEIEAVRLATELYLAGAGIFTIAHDLDASPWKPRQSEHWSFATVRKMLHNSIYAGIVHYGEVRNPKQSDKFPAVWDEATYKEIIREHQRRKRGGTRPASPVSGCMICAREGCGWSMSSLERKGVRYFRCSRHAAYGGCHHNLIRESIIIENLEFAISKELQRPGGVEAALNQIGPGRATIEQEIGAIQAQVAAIEDKQYRLAILAEDGAIDIEAARRRTSELAEQLAAADRSLRQAQEKLTTLPDPGEMCQRLEQVAELVDLRSKPLEVVRNLLLRAGVKVYVENREIVRITFGELS

SEQ ID NO: 10701 - protein, 485 aa, Unknown
  Description of Unknown: Integrase B10702 sequence
  cd00338,IPR011109,IPR038109,PF07508, Coil,PS51736,G3DSA:3.40.50.1390,IPR006119, IPR036162,PTHR30461,PTHR30461:SF3,PS51737, PF00239,SM00857,G3DSA:1.10.10.2600,SSF53041
MQHENFSIDSQRRICAQFCEIRGWKIINEYVDDGFSAKTTSRPDFERMLAAARGSEFDVIVCHKLDRFSRSILDILTTLNELEKYRVAFASATEQHDFTTPLGRVLLTLLAAFAQWYIDNLSVETARGKRERFEQGHHNNRPPIGYTRTDDTIEFDANAPHIKAAFEMYATSNHSDEDIATYLSARVGKPIGKDSAAAILRNPFYAGWVVYRGGGGDKRGSKTKMRLMRGNHAALIDQNTYDEVTRIRASRSRHGGAPKSDRIYLFGEQLAVCAACGRPLRAKALSDRDYAKTYRCTSRERGLECSASQSPVREAFLTDQLERMIAALTLPKNMRDLALSEISSNSLAESVERERKSLEAERERVLKLFQRGHITEAGLDTETERIAADLARLPTPTRQDNAAIAAYLDDTLKIWRGADETAKRDILRILIERVIIDTNSKKIAAFVPRRDFINMFEASKQLRYLVDGSDGFQHITRGIAAYKLP

SEQ ID NO: 10702 - protein, 485 aa, Unknown; identical to SEQ ID NO: 9849
  Description of Unknown: Integrase B10703 sequence
  cd00338,IPR011109,IPR038109,PF07508,Coil, PS51736,IPR036162,IPR006119,PTHR30461,G3DSA:3.40.50.1390, PS51737,PF00239,SM00857,G3DSA:1.10.10.2600,SSF53041

SEQ ID NO: 10703 - protein, 485 aa, Unknown
  Description of Unknown: Integrase B10704 sequence
  IPR038109,PS00397,IPR006119,PS51737, PF00239,G3DSA:3.40.50.1390,PTHR30461,IPR025827, SM00857,G3DSA:1.10.10.2600,SSF53041,IPR011109,PF07508,PS51736 ,IPR006118,cd00338,PF13408,Coil,IPR036162,PTHR30461:SF3
MNEKNNNFLNIEKLYNDYYIKCEENFTKGCAYIRVSTDDQVEYSPTSQLKLILKYALENRIFIEEKYIFHDDGISGTKADKRTSFLKMISIAKSKPKPFDIILVYDFSRFARNKDESVMYKTLLRKKLNINVISITQPLTEGKERVILESLYEAMDEYYSLNLSENVKRGKREKAERGEHLSYAPFGYTQVDKKLVIHEENAKLVKSIYDMFINTENIKHICNTLNDLGIRSTRGKLWGRKTITLILKNKTYAGYVKNRDKYYKGIHEPIIDEEKFEKVQKIWQYRDEHFKKCKNQVQHNHWLRGILKCGECGYGMYYFKRKDRDYAIFNCGGYTYGRCSSHYVKVTDVENAIIKQIKNDFTKKIDINITSNNMNDSEYKIALSNLNSIENKLIRIKEAYINGIDTLEEYKENKVKLQSQLEIANKKIKETQIPSKKVIYKKCEQAYKIFKDPEVDKKIKFDISHELFDKIVYDKKNEKLIITYK

SEQ ID NO: 10704 - protein, 485 aa, Unknown
  Description of Unknown: Integrase B10705 sequence
  IPR038109,PS00397,IPR006119,PS51737,PF00239,G3DSA:3.40.50.1390 ,PTHR30461,IPR025827,SM00857,G3DSA:1.10.10.2600, SSF53041,IPR011109,PF07508,PS51736,IPR006118, cd00338,PF13408,IPR036162,PTHR30461:SF3
MKNVAAYVRVSTQEQADEGYSIGEQQDRLKKYCEAQGWNLVHTYTDPGFSGAKLDRPALQQLLSDIPSGAFDTVLVFKLDRLSRSQKDTMYLLEDQFIKNNIDFCSIMESSLNTSTPLGKAMIGILSVFAQLERNNITERMTMGRIGRAKSGKHSGGVAPFGYDYANGELVINEAEAVQVKLIFDLFLHGLNGKEMSLNQILSYLHERYMIRGAEWIHASTIPRILQNPVYCGMIKFSGKPYPGTHEAIIPLKEWEIAQAKYQSYTSSFSETAANFKKSAHLLTGLIKCGLCGGNFGATTWKNRHVTATSQPYYGYYGCRQRFAKVNKIKCGNSHYGIRQLEDRIIKEIRSLSLDPEELKAVGSDKKTSPEPPAYTAALKHLAEIDKQINKLLDLYQVDGIDISVVSARIKTLNEDKDRTNVILSEFESQRSVHSSSVDEAIEVLRNFDDVVASGDTELLRTAIRSLIDSIVAFPDHIEIHWSFA

SEQ ID NO: 10705 - protein, 485 aa, Unknown
  Description of Unknown: Integrase B10706 sequence
  IPR038109,PS00397,IPR006119,PS51737,PF00239, cd03768,G3DSA:3.40.50.1390,PTHR30461,IPR025827,SM00857, G3DSA:1.10.10.2600,SSF53041,IPR011109,PF07508,PS51736, IPR006118,PF13408,IPR036162,PTHR30461:SF3
MKKVVGYVRVSTHEQADEGYSISEQQDRLKKYCDAQGWTLVHIYVDPGYSGAKLDRPALQQLLSDIPSGAFDTVLVFKLDRLSRSQKDTMYLLEDQFIKNNIDFCSVMESSLNTSTPLGKAMIGILSVFAQLERNNITERMAMGRVGRAKSGKHSGGSTAPFGYDYINGELAINESEAVQVRLIYDLFLNGIDGKDISFQQMLQYLRKRYLKRGMEWAHSSSLSRIIQNPVYCGMIRYSGQTYPGLHDPIVSREIWDKAQVKYSHYITSTAAATNFDKTPHLLTGLIKCGVCGATYRTCTCKNKYLTASSHPYYGYYMCRPSGHHKAKCSNKSYKMDILEEQVLKEIKSLSLNPEELKGMGSEPKTKFSESPLYIAAMKHLEEINKQVRKLLDLYQIDGIDIADVSERIKILNEDKYRTNVIISEFENSIQNPSSSVDDAIEVLKSFDDVSSSGDIELLRTAIRSLIDKIVAYPDHIEIHWSFAG

SEQ ID NO: 10706 - protein, 485 aa, Unknown; identical to SEQ ID NO: 10000
  Description of Unknown: Integrase B10707 sequence
  cd00338,PF13408,IPR011109,IPR038109,PF07508, Coil,PS51736,G3DSA:3.40.50.1390,PTHR30461,IPR006119, IPR036162,PS51737,IPR025827,PF00239,SM00857, G3DSA:1.10.10.2600,SSF53041

SEQ ID NO: 10707 - protein, 485 aa, Unknown
  Description of Unknown: Integrase B10708 sequence
  cd00338,IPR011109,IPR038109,PF07508,Coil, PS51736,G3DSA:3.40.50.1390,PTHR30461,IPR006119,IPR036162, PS51737,PF00239,SM00857,G3DSA:1.10.10.2600,SSF53041
MKPQIGAYCRISYDRDGRELGIERQLADLTSLADKRGWEIAATFIDNDVSAFNKSITRPAFEQLYDRLKSDKTLGIASYDLDRLWRQPRDLERIIDLYENTKRPFATIQGDVDLSTSNGRAMARVMVAFANKSSEDTARRIKRKIQEQAENGQPHWGKRPYGYNLDGTLDPEEAPVVRRIGEQFLNGYSYRDITYRLNEDGIFSRAGKPWTVGNIRRFMVAERFAAIRLHDGVEYVGSWTPIFTRDEWARIQHLVKARKEPYADRPKAKKYLLTGMLYCACGGFLHGMTKRDGKMKSLPEGRLRRTYQCPSSSATERRTKNCASTTVGAEPLEHFLKEAIIMRLDSPELASYLAEDASGNEQLPALLAERAEVDASLNELASDYYTHKLLSRDEFFAARGSTQGRLRALDRTIDSLRVSRFKLDLSAGETVRQAWDERPDSWRRELMEVLIEKVVINKSSMKPYYVFDNKKTRFDANRVEIAWKV

SEQ ID NO: 10708 - protein, 485 aa, Unknown
  Description of Unknown: Integrase B10709 sequence
  PS00397,IPR038109,IPR006119,PS51737, PF00239,cd03768,G3DSA:3.40.50.1390,PTHR30461, IPR025827,SM00857,G3DSA:1.10.10.2600,SSF53041,IPR011109 ,PF07508,PS51736,IPR006118,PF13408,Coil,IPR036162,PTHR30461:SF3
MSIKKISNNRVILYVRVSTQEQAREGYSIQEQIERLTKYCEAMGWTIVHVYTDPGYSGATMDRPGLTKLIKDVKNGLADKIVVYKLDRLSRSQLDTLYLIEKVLLANDTDFISMNENFDTSTPFGRAMVGILAVFAQLEREQIRERMMMGKEARAKEGKFHGSKNIPIGYDYVDGLLTPNQFEKIQVVEAYNLAAAGLSPYKIAKRLKEAGYSHKYGEWTDRAVRRILNNKTYLGYIKHAKDWYKGLHEAFISEETYETAQKILNERSEQHLQYNRRAGLATSYLGGFLYCKKCGAKYSKNTSLYTSKTGKRRYSAFKCNSRDGRKKYLVKDPNCKNKIWKEDVLTDLVFEEIHKLATDPEYIARIQAEKIEDERPAIISAEKEKLEDQISKLMDLYTLGNMPLEMVEKKIHEINDHKAKLETELEKIIQENAAKLTEAEAIELVRTFGDILDRGDFDEIRITIATLIEKIEIDDELVEIHWNFV

SEQ ID NO: 10709 - protein, 484 aa, Unknown
  Description of Unknown: Integrase B10710 sequence
  IPR038109,PS00397,IPR006119,PS51737,PF00239,G3DSA:3.40.50.1390 ,PTHR30461,IPR025827,SM00857,G3DSA:1.10.10.2600, SSF53041,IPR011109,PF07508,PS51736,IPR006118, cd00338,PF13408,Coil,IPR036162,PTHR30461:SF3
MKTGALYVRVSTDDQVEYSPDAQIRLGLEYAKKNNIIIPKQFIFQDDGISGRKATNRPAFQELIAMAKSDEHPIDVILVWKFSRFARNQEEAIVYKNLLKKADVDVVSVSEPIPDGFIGELVQRIFEWMDEYYSINLSGEVMRGMTERASRGGYNAAPPLGYKMQDGIPVIVPEQAEIVKKIFTWYVDDKMSFFDIAVKLNALGYRTKRNGKFQNRTIAYIIRNEFYNGKIIWNRLEHATRNVKDKSEWIVTDGGHDTFISNELFTAAQKRDKATKRPGKKVRPASTYKHWLSGLLVCSACGGRLVRAGKSKSGNTYFQCTAYNHASCNESHLTNENALKPAILEALQKVLDNGTVEYVVHSTNQEEKSESELIENKLNRIDMKEERIKEAYRDGIDTLEEYKANKEILQREREQLTAMLEQYSKKPEDENESILLNKIRSAYDIIKSDNSTDRQKHDALTSVVDKIVYDKKGGALLMYFYIND

SEQ ID NO: 10710 - protein, 484 aa, Unknown
  Description of Unknown: Integrase B10711 sequence
  cd00338,IPR011109,IPR038109,PF07508,Coil, PS51736,G3DSA:3.40.50.1390,PTHR30461,IPR006119,IPR036162, PS51737,PF00239,SM00857,G3DSA:1.10.10.2600,SSF53041
MKKVLLYLRKSRDDENESKEETLARHERMLLDYCSRYDLSIEKIYREVVSGESIAARPEVQKLLDDIQAKDYDGVVVVELERLSRGNPIDQAEILEIFKKSQTKIYTLNKIYDFSVDDDLDEEFFEFGLFMSRREYKVIKRRLLRGRKQAQKEGYFIGSITPLGFEKKKDGKGFVLYPDENANKIITIFDMFVNQSRPLSDIRDYLIHSGLRPARAVEWTSRRVRQILENQNYIGNIKVMGEWQQGKHDGIIPEDVFNAAQVKLQNDLPKVRKQYQIKNPLAGICKCAICERPLQLSANEYAGRTPIKCRTTNCPTVSTYLEILEPMIIEGIQDALEGYRLELDDLPTTAAKRREAMKKEREIYITELEKKQAMLDKASEMLEIGVYSVEKYLERENILRKDISALQANLDALSDTSELEEIEKLENAVPILEKCLDEYWTLKPAEKNEILKSFVDKILYRKSIKNNSHHKNLDDANVEIFLKI

SEQ ID NO: 10711 - protein, 484 aa, Unknown
  Description of Unknown: Integrase B10712 sequence
  PF13408,IPR011109,IPR038109,PF07508, Coil,PS51736,G3DSA:3.40.50.1390,IPR006119, IPR036162,PTHR30461,PTHR30461:SF3,IPR025827, PS51737,PF00239,SM00857,cd03768,G3DSA:1.10.10.2600,SSF53041
MNETRVALYPRVSTQEQAKEGYSIGEQIERLTKYCEAMGWTIYKIYTDAGYSGGSTDRPGLQMMLQDIRDGKVDKVVVYKLDRLSRSQKDTLTLIEDEFLANNVDFVSMNENFDTSTPFGRAMIGILAVFAQLEREQIKERMTMGRDARAKEGLFHGGPKCPIGYDYIDGKLEVNEYEAMQVKELFNKFIAGVPFRSIENSFKKRGLVHKNGDWSNKTLRRVIQNEIYIGKVKFDGEVYDGIHTPILDEETFKKANLLYADRKTQFTTNDRRKTGQFNFLTGFTYCAKCGGRYHHIHYKKKYKKGLTDYNYYTCYSRSKVVLSMIKDRDCKNKNWKREILEGLVFDEIKKLATDPDYISQVKDLKVKDEFIDDSIAILQAEIAKLEKQISKYMDLYSMDSLSYEEVEDKIKPLSARKKSLSSELEVLTEEITPALTEENTITLVQSFEDILERGDYDEIKLTLDTLIKKIVIDGEDVTIYWNFQ

SEQ ID NO: 10712 - protein, 484 aa, Unknown
  Description of Unknown: Integrase B10713 sequence
  IPR038109,PS00397,IPR006119,PS51737,PF00239,G3DSA:3.40.50.1390 ,PTHR30461,IPR025827,SM00857,G3DSA:1.10.10.2600, SSF53041,IPR011109,PF07508,PS51736,IPR006118, cd00338,PF13408,Coil,IPR036162,PTHR30461:SF3
MANTDLTVAAAYIRVSTEDQTDLSPESQLEKVKEYAAKNNMLLPSEFIFHDDGVSGRAANKRPGFQRMIAAAKDPVHPFSVIIVWKYSRFARNQEESIFYKSILRSKCNVDVISVSEPLIAGPFGSLIERIIEWMDEFYSVRLSEEVKRSMTVNAKNGVLQSTASFGYKVENGVLVPVPEEAELIKEIFHRFLSGEGFYPIAQDLNSRGIKTHRGSRFENRTVEYIIRNPVYIGKLRWNPAGRTRRDFHNENIICAKGAHEPLIDEETWEAAQLRVEQLKSQWAYHGRPSSDRKHWLCGIVRCASCGATLIWSQPHFLKCNNYARGSCKTSQHIAVELIEESFIQQLRHDFSFSSEISYQIIDIPKPQDTRAGQLRRNRDRMLSRLARSRDAYMNGIDSLEDYAAIKASIQKEIDQIDAELSTLESASGASTEVSMKDSIKRTLETLESDAPISKKYDAVKRIIDTCTFDKQNMLLSIVYRYEI

SEQ ID NO: 10713 - protein, 484 aa, Unknown
  Description of Unknown: Integrase B10714 sequence
  IPR038109,PS00397,IPR006119,PS51737,PF00239,G3DSA:3.40.50.1390 ,PTHR30461,IPR025827,SM00857,G3DSA:1.10.10.2600, SSF53041,IPR011109,PF07508,PS51736,IPR006118, cd00338,PF13408,IPR036162,PTHR30461:SF3
MNKKVRVAIYVRVSTQEQAKEGYSISEQTDRLTSYARINDYAIVKVYTDAGFSGGNMNRPALSEMISDITAGRIDKVCVYKLDRLSRSQKDTMTLLEDIFLKNHVDFESMTERFDTSTSFGHAMIGILSIFAQLERENIKERMSLGMYARLKQGKWKGGARTPFGYDYDQPNDVLVVNDYESMIVKYIFEAVASGKTLFTVSETLRKNGYAFHNGKVDRKTMRYILRSKTYLGYIKCKDEWIKGLHPAIIDKETYDKVQAILDANQRRFESSGYKTGTSAISTNLGGFIYCAHCGSKYSKYKTGDAKSGWHYNYACYSRHKKVKTMIKDPNCKNKIYRIDDLDGIIFDEIRKLAIDTSYIDAIRQDHRQDETGRQISAIRQQIGSINSQISRLLDLYSTGRYSIDDLDSKTLPLTDQRNRLQATLESLQESTDTMTDAEVIDLVESFSDALDHGTLQERRTIIEQLINKIVIDNDEITIHWNFA

SEQ ID NO: 10714 - protein, 434 aa, Unknown
  Description of Unknown: Integrase B10715 sequence
  cd00338,PF13408,IPR011109,IPR038109,PF07508, PS51736,IPR036162,IPR006119,PTHR30461,G3DSA:3.40.50.1390, mobidb-lite,PS51737,IPR025827,PF00239,SM00857, G3DSA:1.10.10.2600,SSF53041
MARTIKKVEFLPKMPKLLNVAAYARVSSGKDAMLHSLSAQVSYYSEKIQKHTGWKYCGVYADEAATGTKDNREQFQKLLEKCRAGSVDLILTKSISRFARNTVTLLETIRELKDLGVDVYFEEQNIHSLSADGELMLTILASYAQEESRSASENRKWQIRKDFKEGKIGSITIFGYRRNADGILEIEPTEAEIVKMIFSDYLSGMGGLKIAKKLNEMGIRTAQGNLWTSPRIKELLSNEKYVGDMLLQKYFRNNHIEKRKMQNNGELPKYLVEDAHEAIIDRDTFQKVQELIAQRQSKFSHTGSKNRYPLSGMIQCGCCGKNYQRKVFKQGSAWICATFARRGKKYCPAAKQIPENILQSVLCEVLGLEKYDDDAVLKYIRQIIVPEPNELIFIFYNGKQVQKHWENPSRSESWTEEMKQKAKERSLQWHEKSQ

SEQ ID NO: 10715 - protein, 484 aa, Unknown
  Description of Unknown: Integrase B10716 sequence
  cd00338,PF13408,IPR011109,IPR038109,PF07508, Coil,IPR036162,G3DSA:3.40.50.1390,IPR006119,PTHR30461, IPR025827,PS51737,PF00239,SM00857,G3DSA:1.10.10.2600, SSF53041
MARLRPVPQAQPRALALIRVSKEREGMVSPELQDTAIGDYCARRGYVITERMEGLDESGSRSKSRWWAKLDTAVGMIEAGAVDVIVVWKFSRTARHRLRWAVALDRVETAGGRLESATEQVDVSTSTGRFTRGMLAELNAFEAERIGEQWKEAHARRLGKGLPSRGGDRYGYVRDGDAYSPDPTTGPVLAGMYADYLDGVGFSTIARRLNRAGERTLAGQVWSSERVAAVLDSGFGAGQLAIGKRRDVTWVPGVHRPVVDAKTWAAYREARGERRGQPSSGAPLYPLSGLLYCGDCGALMYAARLGRVAGYGFICSRWAKTGEGRCVTVSRAKAERTVLAWLASYAAEVEEQAARQAVRAAAQLVARSDATDLRRQVVRLDERLNKLTAGWTEGLVPDAAYAATRDQLTAQREDLVVRAREAEGRSVALKRPAAPMVTELLATWDEKPAAGIRDMLSHLVRRVVVVRPVDGPVEVRVEPVVDLE

SEQ ID NO: 10716 - protein, 484 aa, Unknown
  Description of Unknown: Integrase B10717 sequence
  cd00338,IPR011109,PF07508,Coil,PS51736, IPR036162,IPR006119,PTHR30461,G3DSA:3.40.50.1390,PS51737, PF00239,SM00857,SSF53041
MKTPSRARRAGLYIRISDDREGAGLGVKRQADDCRELAERLGWKIVETYDDNDLSATDRRKKRKGYARLLADIESGRVDGILAWHPDRLYRQPRELEDLIDLVEAHEVEIKTYTAGEMDLNTPTGRAMARMIGLMAKYEVEHKQERVLRKVQELVQAGAIHNGGHRPFGYERLFDGEGRRRKVIEDRIDETEAKYVRDWAKRALEGESLYSLVTDANTRGIKTSTGGAWSYQGMRFLLSSGRIAGLKEHKRQVVGKAVWPAIISEDEHKALRALLSDRAEQAKASGAQRTSTALKYPLSGLVRCTCTEEGIRMRTAPSSNRKGPVYRCPPKGDGGCGGRTIRIEDLERLVEKLVFAKLEEVEPLDVAVPDDPRPSLEAKVAKWERRVKELKEELLDGDRPAREVREAIDTLNSRITQAQREAAQYSLKDRALEIDAEELRKDWEEYTPAKKQSHYRALIREIRIHPAVPPKNVFNRARVEIRWR

SEQ ID NO: 10717 - protein, 484 aa, Unknown
  Description of Unknown: Integrase B10718 sequence
  cd00338,PF13408,IPR011109,IPR038109, PF07508,Coil,PS51736,G3DSA:3.40.50.1390, PTHR30461,IPR006119,IPR036162,PTHR30461:SF3, IPR025827,PS51737,PF00239,SM00857,G3DSA:1.10.10.2600,SSF53041
METAIYGRVSTEEQAQEGYSIRGQVEKLKSYISAKGWSIYDVYLDEGISGKNITERPAINRMIEDIKAGHIKNVLIFKLDRLTRSVADLVYLIDLFKNYGCAFNSLSESIDTSTASGRMFIKIIGIFAEFERENIGERVRLGKERKAKEGFTTACATISYGYDRAKGEKVQTINEEEAITVRRVFDLYVTNNMSLNGIAKELNKDKIPTKQGTFWNSGTVVTLLKNPNYMGNVRYSMDNRERYFEAEGKHEAIISPELFNEAQTLLEKNKRATPTKRGLERNYYVGLVYCALCGRKLKPHMAVSRTGKTEYSYVCAGRVPGACVAKMVSSRKIETAVFEYITNFPDIVPDTEKEEKEKQAAAARIEEMRDKITTIDAKEKEMLDSYIEDNASLVEYRSVKKLLDEERRKLLQEIETLSPPEENATDPKTKAEIILTFTKSWNNYTDTEKRQFLLKHISKIEIINKPIKDRNEGKCEVQNIEFNL

SEQ ID NO: 10718 - protein, 484 aa, Unknown
  Description of Unknown: Integrase B10719 sequence
  IPR038109,PS00397,IPR006119,PS51737,PF00239,G3DSA:3.40.50.1390 ,PTHR30461,IPR025827,SM00857,G3DSA:1.10.10.2600, SSF53041,IPR011109,PF07508,PS51736,IPR006118, cd00338,PF13408,Coil,IPR036162,PTHR30461:SF3
MNKVAIYVRVSTTMQAEEGYSIDEQIDKLTSYCKIKDWTVYDIYKDGGFSGGNIERPAMERLISDAERKKFDTVLVYKLDRLSRSQKDTLFLIEEVFGKNDISFLSLNESFDTSTAFGKAMIGILSVFAQLEREQIKERMLLGKIGRAKTGKAMMFSKVSFGYTYDKLKDELVVNQAESIIVRKIFEAYLGGLSLNKLRDYLNSNGIYRGDKPWNYQGLRRILSNPVYIGMIRYRGEIYPGNHQAIIDIDDYNKTQEEIKKRQITALEFSNNPRPFRAKYMLSGIAKCGYCGTPLRIILGSKRKDGSRNMRYQCINRFPRNTKGVTVYNDGKKCNSGFYEKADVEEFVINQIRDLQFNINKLDNLFDKHPSIDIKSIERQISSLDNKLKRLNDLYLNDMIDLEDLKKQTQLLRQQKTMLEDELLNNPAITQEKNKKYFKEFLATKDITKLDYETQKNIVNNLINKVFVKSGYIKIEWKIPFKKM

SEQ ID NO: 10719 - protein, 484 aa, Unknown
  Description of Unknown: Integrase B10720 sequence
  PS00397,IPR038109,IPR006119,PS51737,PF00239,G3DSA:3.40.50.1390 ,PTHR30461,IPR025827,SM00857,G3DSA:1.10.10.2600, SSF53041,IPR011109,PF07508,PS51736,IPR006118, cd00338,PF13408,Coil,IPR036162,PTHR30461:SF3
MNKVAIYVRVSTTMQAEEGYSIDEQIDKLTSYCKIKDWTVYDIYKDGGFSGGNIERPAMERLISDAERKKFDTVLVYKLDRLSRSQKDTLFLIEEVFGKNGISFLSLNESFDTSTAFGKAMIGILSVFAQLEREQIKERMLLGKIGRAKTGKAMMFSKVSFGYTYDKLKDELVVNQAESIIVRKIFEAYLGGLSLNKLRDYLNNNGIYRGDKPWNYQGLRRILSNPVYIGMIRYRGEIYPGNHQAIIDIDDYNKTQEEIKKRQITALEFSNNPRPFRAKYMLSGIAKCGYCGTPLRIILGSKRKDGSRNMRYQCINRFPRNTKGVTVYNDGKKCNSGFYEKADVEEFVINQIRDLQFNINKLDNLFDKHPSIDIKSIERQISSLDNKLKRLNDLYLNDMIDLEDLKKQTQLLRQQKTMLEDELLNNPAITQEKNKKYFKEFLATKDITKLDYETQKNIVNNLINKVFVKSGYIKIEWKIPFKKM

SEQ ID NO: 10720 - protein, 483 aa, Unknown
  Description of Unknown: Integrase B10721 sequence
  cd00338,IPR011109,IPR038109,PF07508,Coil, PS51736,IPR036162,IPR006119,G3DSA:3.40.50.1390,PTHR30461, PS51737,PF00239,SM00857,G3DSA:1.10.10.2600,SSF53041
VNYADLVIGDLYARKSTVDQGKSAARQKRHWELDCTREGHQTGRMFVDPDLSASRYSRKDRPDYAALVEHITAGGSEMVCLWEASRGTRQLAEWVAFLDLCRSKGTLIRIFGKDPHTYDPRIQRDRNELVRMGMDAETETEHLSGRVKDGLDDIARAGKPTGRLLFGYARRYDERGNYVEQVILPEQAELIRRMAADTLAGIPLGTQASRLNDAGIPTPAGKKWSGVNIRRMLLNPSYVGTRMHNGEALVTDAWPPILDRSTAARLKLLLSEPGRRLAQDLSLKHMLSGEPRCDECDSRMRSSSYQRYGCVQRGCQKASVQIDTLDRFVSSMVRARIKALRSGGLVAPPTPESGLAEAEADLRSLRERLASFYKAAAGGDLSADGLVHVENQLRPQIAAAKGRVRQLSAPSPLTEYDDIDLVGEWARLPVGVRRSVVHALARLRVVPVGRGGRWTPWRLHKSMWVGESETWGEQWEREGLERP

SEQ ID NO: 10721 - protein, 483 aa, Unknown
  Description of Unknown: Integrase B10722 sequence
  PS00397,IPR038109,IPR006119,PS51737, PF00239,G3DSA:3.40.50.1390,PTHR30461,IPR025827, SM00857,G3DSA:1.10.10.2600,SSF53041,IPR011109,PF07508,PS51736 ,IPR006118,cd00338,PF13408,Coil,IPR036162,PTHR30461:SF3
MVIKSINKTRVLLYIRVSTHEQALEGYSVQEQTERLEKYADAMGWTIVKTYTDPGYTGADTHRPGLREMIRAVEDGRADKVLVYKLDRLSRSQKDTLYLIEDVFLKHNTDFVSMSENFDTGTAFGRAIIGILAVFAQLERETIKERMTMGREARAKNGYYSASARILTGYDYIDGLLKVNEYEAMLIKQIFEMFNGGTPIRTIAEDLNEKGLYHRATKWNDTTIRRLLDNRHYIGEVKYAGKWYPGRQNPIIDKKTFDTTQKILKMRADSYVGSNKHSVALTGFIWCGCCGAKYHRQLWKARNDGTRKANYMCYSKSRKVKSMIVDPNCQNKTYRVDELEEIVFNEIRKLGTDPEYLEKIREDIIQEREADESIKIIKKEIESLTSQISNFMDLYSINRLTLSEVDAKIAPLADKRDKLETDLRIKTKPADGALSPEEIEELVDSFGDILDRGDLDEIRLTLTALIKKIIITGDDITIHWNFA

SEQ ID NO: 10722 - protein, 483 aa, Unknown
  Description of Unknown: Integrase B10723 sequence
  cd00338,PS51736,IPR036162,IPR006119,PTHR30461, G3DSA:3.40.50.1390,PF00239,SM00857,cd03768,SSF53041
MSYAWIYCRVSKKEQAADGTSLPTQWRYCQDYCDRHQLLMGTASNYNNPGVFADPGISAWKVPIFERPGFQKLWSHVQPGDSIAVMTLDRAFRSVNDFSNTWMKFDRNEVTPIFVRENINMGTAMGKMIGHMTATFAQFRSDLMSERTREALAFKRETGQPMGCPSRPAKMTASENSVIAELCAKYRNEQDSGVLLPGRVFGYIRVSTANQKLGAQANIVNGYLDHINQQEGIAVGGTFEDHGVSAFRTSWCERPGGKKLFAAMRPGDTVVVSRIDRVFRSIVDMSKTIRFLTESGIHLVTTCGIDTRTEQGRQCVEILAVMAEWESRTNSFKVKEARKHSRKLRGKWERISEVPRYLTPVTLGNNQWSVHPNMTWLDQARTVRSIREDGNTWDKVSDIMESHLAAIQNRPMIPRYGVDRTFFLRQLKKRGQHTEEQIESLTDWFDGQKPRRDGEFIREWSPSACKAELQHIPFVEDLISETA

SEQ ID NO: 10723 - protein, 483 aa, Unknown
  Description of Unknown: Integrase B10724 sequence
  cd00338,PF13408,IPR011109,IPR038109, PF07508,Coil,PS51736,IPR036162, IPR006119,G3DSA:3.40.50.1390,PTHR30461,PTHR30461:SF3, IPR025827,PS51737,PF00239,SM00857,G3DSA:1.10.10.2600,SSF53041
MKKAVFYGRYSSANQTEQSIEGQLHVCEKYAATNDIEIIAQYIDRAATGTNAQRREFQRMISDSEKNMFEAVLVYKLDRFARNRFDSAMYKRKLSENGVKVISATENISDGPEGIIMEAILEGMDEYYSAELSRKMRRGLEESFRKGRYLSNIAPYGYQKENHKLVVDKTTSPIVKEIFQKYLNGTKELAIVRHLNEKGITNSVGSKWTKSDIDRLLRKTIYKGEYRYADFEGSIPCPAIIEPEVFDRVQELLEDSRRRTRENRTGYNYILTGKLHCVECGTRMSGVSVGGKYFYYTCQTQKHRVRADKLHEKVITAIGEYLVPEKITEFAEAAYKAYKEETAAQPDERPAIEKEIVSVERQIANAVKAILAGVELAELTEKLEELKKRKAVLEKTLLETPTPLPEFSVDQFRAILERIIENTPEEILRVFVNSIYVYDDKAIILINLTDETNEPPLEQILCRVSACGIFATLHKTTLIIIAA

SEQ ID NO: 10724 - protein, 483 aa, Unknown
  Description of Unknown: Integrase B10725 sequence
  PF13408,IPR011109,IPR038109,PF07508,Coil, PS51736,G3DSA:3.40.50.1390,IPR006119,PTHR30461,IPR036162, PTHR30461:SF3,IPR025827,PS51737,PF00239,SM00857, cd03768,G3DSA:1.10.10.2600,SSF53041
MSDVKRVAIYTRVSTQEQSQEGYSLGEQEERLRMYSKAHGWAIYRVYTDPGYSGAKLDRPAIHELVRDCGSGAFDAVLIYKLDRLSRSQKDTLHLIEDVFTPAGIGLISMNENFDTKSAFGRAMIGVLSVFAQLERDQITERTTMGRQARAKEGYYAGGSQAPIGYTYSKGDKILRIDEPEAAQVRLVYDLYLHGLDGHDMTYTAIRGYMHSRYRTRYGSYTHTSTISRMLQDPTYCGMISWGGEYYHGKHEAIIDPDTWQAVQAKIRRSPTNYAERFKGVHLLTGLLRCGICGKPYQIYNHTVHKRQKDGSMRYGKVTLRYVCASRRTGSCGNAPIIAEELESTVIGEIRKLKADPDLVYHAAVAPGDDRKREAIMARIGAIHTQQSRLIDLYQIGSIDMDEVRRRSDALREEEVKLQKDLSDAEVRPAPLAPDDAIRILGNFDGIFGSGSLEDQRALLQSLIEYIEVFPDHIAIHWLFSAQ

SEQ ID NO: 10725 - protein, 483 aa, Unknown
  Description of Unknown: Integrase B10726 sequence
  cd00338,IPR011109,IPR038109,Coil,PS51736, G3DSA:3.40.50.1390,PTHR30461,IPR036162,IPR006119,PS51737, PF00239,SM00857,G3DSA:1.10.10.2600,SSF53041
MLRAMAEWAGIVRVSHMGARREGAQDFHADRDQIALINRAVPKGDRVHILAPELNVSGGLPLEERPALLAAVEGVERGRYAGIIVAYLSRLGRNLKEQLRVYDRVHAAGGQIIVAQEGIDARTRGGRLQRNILAAIHEDEREAHVERFEDLRREATAAGVWQRRQTPLGYSRDPGTRRLAPNRDANRVRAAFAARANGDSVSSIARTLGMTTSGTRHLLRNRVYLGELRVGDHINPSAHPALITEDTWVAAQIPRTVRPALRDREVALLAGLARCCGCGHLMSRMNTSNVVYACHRDHSAGRCAAPAAITARLVDEYVERVAVAQLARLTTRAVRDDGAVERARSAVASAERELAAYVEAVSAADIGAEAFRVGAQARQRAVDDARAGLEATVAARVPSVPADIADRYRGMSVTHRNRLLRSLVETVLVARSGRGRVVPVEARVRVIVAGAGIAGGRHHGGGAPLPLRVIELPDGDDPRVLGV

SEQ ID NO: 10726 - protein, 483 aa, Unknown
  Description of Unknown: Integrase B10727 sequence
  IPR038109,PS00397,IPR006119,PS51737, PF00239,cd03768,G3DSA:3.40.50.1390,PTHR30461, IPR025827,SM00857,G3DSA:1.10.10.2600,SSF53041,IPR011109 ,PF07508,PS51736,IPR006118,PF13408,Coil,IPR036162,PTHR30461:SF3
MSMKKAALYIRVSTLEQAQEGYSIGAQKDRLTAFCKAHDWAIADFYIDGGYSGSNLDRPGIQKLIGEVASFDVVLVMKLDRLSRSQKDTLYLIEEVFLPNNVDFVSMNESFDTSTPFGRAMIGILSVFAQLERETIKERTFMGRLERAKEGLFHGGANYPIGYDYGEDGHLVVNEYEAVQVRKIYEWYLEGTAPDKIAERLRSEGYTNRYGSWSEASGSFRIRHILQSDLYLGTLRFGSVVVENAHEAIIDRESFDKAAALRKKRREVYGDSPYHAKYMLVGMIWCGQCGARYAVKHNYKDYKYYVCYSRARTVKRMIRADHCENKNWRLDELDSVVERRVSRLLFEPGYYEMLKKRNAESKKKAPGNAEAEAIKGKISTLDKQIGRLMDLYQDERMPMDVLSGRIDRLHREKQALEAQLSSLEPPKPRKDFDGDSFMDLLADFASVWKTADVDEKRQIIGSLVKKITLDGENVDIEWAFLDD

SEQ ID NO: 10727 - protein, 482 aa, Unknown
  Description of Unknown: Integrase B10728 sequence
  PS00397,IPR038109,IPR006119,PS51737,PF00239, cd03768,G3DSA:3.40.50.1390,PTHR30461,IPR025827,SM00857, G3DSA:1.10.10.2600,SSF53041,IPR011109,PF07508,PS51736, IPR006118,PF13408,Coil,IPR036162,PTHR30461:SF3
MRPALYVRVSTEEQAVKGNSLYEQEERGIAYCKAMGWRQPVIYIDDGYSAKDIHRPELTRLLESVQNKEHDTVITTKLDRLSRRLLDILKLVDYFEKNSCSYASISESFDTSTSAGKLSLQVLGAVAEFERERIRERVRDNLMSLARQGKLISKASYGYNVVDGQLEINLEESLVVKNIFKWTLEGTGPLNIAGRLNQMGIKSKNGKTWEEKTVRRLLESETYIGQFVYNRKYRKGTVEVVRPRDEWIIAEDHHEPIIDRTTYDKVQEILSARKYVQRQNYNNERYLLTGLVRCEHCGNKMNGREVSRPTNKTKKFDYHYQCSGYGKKAICFFHFIDRGDLEFEVIRQIKLLASSRPRKMNIIISKATPKLSEIQLLESKLTKLDARMQKQLELYEDGDLSKDDFRRARDRIEKERKEIQDTIDELKRIESQSEVAAAQEKARNLLEDIESGDRLKMKQAIASIIESITVKDGSGVSIVFRR

SEQ ID NO: 10728 - protein, 482 aa, Unknown
  Description of Unknown: Integrase B10729 sequence
  cd00338,IPR011109,PF07508,Coil,PS51736, G3DSA:3.40.50.1390,PTHR30461,IPR036162,IPR006119,PTHR30461:SF3, PS51737,PF00239,SM00857,SSF53041
MARSRFDKTESQTNNDEEIRVVIYTRISVDRETEQSIKNQIRECKAYAKLNGWVVVDEFYDRGKSAYKLETERPGFDNALAAINSGKANRLLIWKLDRMTRNARGFMQINDRLESMGAKFASVKEPYFDTGSAIGLSIVMLMAAMAQIEAESIQGRALSWHEGRLLDLMPPTGNRPFGYRRPRKGDNDWKKGGALIPVPDEVAVIEEMAARIVAGESLRAIARDFSERKIPTAQRNSKRQTNTDWSHSTIRSVMLSPTTAGLVEVAKGEFMPSDKWEPIIPEPTWRIIRAILSDGNRCSHIEGGSDARKLKHLLPGLMACGKCGGRMVTASHTRGRQYECSDCGLSIMGDVADSVVTDWIMENVTVDQWNRLRAAGKGSVAVEELQGRINELFIERSLHPNRIPRDIYESTVAELESQIAAAQTDAAIPMPEVTNLGTGWLDMSNADKRTVIGGVIDSIRVLPYRAGVTGRNRISIIGADLR

SEQ ID NO: 10729 - protein, 482 aa, Unknown
  Description of Unknown: Integrase B10730 sequence
  cd00338,PF13408,IPR011109,IPR038109, PF07508,Coil,PS51736,IPR036162, IPR006119,G3DSA:3.40.50.1390,PTHR30461,IPR025827, PS51737,PF00239,SM00857,G3DSA:1.10.10.2600,SSF53041
MSNTVAIYLRKSRDEDNETRDVTLARHEKLLIEYCERNNLYIKKIYKEVVSGESIAARLEMQRLLVDITSGKYDGVVCIELERLSRGNQIDQAEILEVFKKTGTKIYTLNKTYDFSTDNEIDEEFFEFGLFMSRREYKVICRRLSRGRTAALLEGYYTGSSLPYGFFKEKRGKGYVLIPNEDEAKIVRLIFDMYTSGSGIAAIAAYLADNGIKPRIAKAFCTNRIRQILENKTYIGYLKIQNKKIAEDWTLGKHEPLIDPKIFNQAQERLKSGEIKIIRDHSLKNPLSSLVKCGVCGYAMILQHSSNGHYLKCRAFRCSTAASKLDKIEAQVIEELKEELKGFKYYLDNQAEEDRRKALSRQNEINVIKQAIKKKEKAINNCCEFLEDGIYTKEQYFNRVNTLNGEISSLQANLESLETISDDKRETIASTVPILEKCLEKYYDLSIEDRNKVLKSFIERIEYFRTDSTRYAPFNLKIYLKI

SEQ ID NO: 10730 - protein, 482 aa, Unknown
  Description of Unknown: Integrase B10731 sequence
  cd00338,PF13408,IPR011109,IPR038109,PF07508, Coil,PS51736,G3DSA:3.40.50.1390,IPR006119,IPR036162, PTHR30461,PTHR30461:SF3,IPR025827,PS51737,PF00239, SM00857,G3DSA:1.10.10.2600,SSF53041
MKNGFIIVDEYIDRAISGKTDNRPSFQRLIKDSEKHKFEAVIMYTLDRFARNRYDSAVYKAKLKKNGVKVYYAKQPMPDTPEGIILESVLEGYAEYYSENLARSIKRGMTENALHGIAMGTPPLGYVIGEDRKYQIEPVGAKAVQTIFEMYADGHSATQIVKWLNEQGFKTSRGNAFNKNSLDRILRNDRYIGVYRYADIVLENSVPPIIDKTLFEKVQARLKHNFSARARNKAKEDYLLTTKLFCGHCGSPMVGESGTSHTGKLHLYYKCIDRKRKHQCNKKNEKKNWIEELVVRYTVNHVLTDENIEMISTKAWELIEKEMEDTSLLIGLKEALRETNKKIKNLMSAIEQGIITSTTKARLEELEDERRDLEGQIAREENKKPLLSKERIAYWLTSFKSGDINDVEYQRTIIDTLVNSVFVYDEGDKGRKIVLTFNISGNNTLTISGSDIEGITPPNSANPNPIFFVKHVFGFVLIVEEV

SEQ ID NO: 10731 - protein, 482 aa, Unknown
  Description of Unknown: Integrase B10732 sequence
  cd00338,IPR011109,IPR038109,PF07508,Coil, PS51736,IPR036162,IPR006119,PTHR30461,G3DSA:3.40.50.1390, PS51737,PF00239,SM00857,G3DSA:1.10.10.2600,SSF53041
MRNVLLYLRKSRDDENESKEETLARHERMLIDYCKRYDLKVEKVYKEVVSGESIAARPEVQKLLDDVAYGSYDGVVVVELERLSRGNQIDQAEILEIFKKSGTKIYTLNKVYDFSSENDIDEEFFEFGLFMSRREYKVIKRRLLRGRKQAQREGYYTGSVLPFGFTKENDGKGFILKPDANADLVKELFELYVNQGKGISYLRNFLNASGVKPLKAYDWTGTRVRQILQSRCYIGEIKCDGEWYEGKHEPIVDLNTFEAAQVKLLSKETKTKQSKALKNPFATIARCSVCGSVLKLKRSPKRFAIGCSRAFCSNISMLFEDFEMLVISGLQDELEGYKLELGDLPTTAANKREAIEKERKIYLSEIEKKQSMLDKASEMLEIGVYSVEKYLERENILRKDIDALQANLDALSDTSELDEIDRLENAVPIIEKALDEYWSLSPQAQNDILKSFVDKIIYTKTIANHKHHSGRDDASVEIFLKI

SEQ ID NO: 10732 - protein, 482 aa, Unknown
  Description of Unknown: Integrase B10733 sequence
  cd00338,PF13408,IPR011109,IPR038109, PF07508,Coil,PS51736,G3DSA:3.40.50.1390, IPR006119,IPR036162,PTHR30461,PTHR30461:SF3, IPR025827,PS51737,PF00239,SM00857,G3DSA:1.10.10.2600,SSF53041
MKVAAYTRVSKEEQAEKDLSLPAQKERIQMYCQSQDWEIYDVYCDDGYSAKNLNRPEMKRMIQDAKAGLFNAVVVVRLDRISRSQKDVLYLIEDVFEKNNVGFKSVTQSFDTTTAFGKAAIGMLAVFAQLERDQLIERITDAKREAAKQGRHGGGFTLYGYYNNPAAKKLEINELEAKTVQFIYNEYIKGDSYQTISETLNAKKIPSPKNKEWSRVTVRDILLNPKYTGKIKHKGNLYEGKHDAIITQDEWEQVQAIAKSKTKFLPGANPGMLSGIIYCGECGMKMRKKAVWQNYPNTNPKKVTNYYVCYNQDGSYLSNKNCTCGYKHVEVIDKKAVDKLLMYSINPKTIKEELSKMFDKTSDNTKAISQAKRELSQVKMKLDKWYLAFEKGALDPDELTERVKELREQRSYLEQQLVSLEVQTGKMKEKDRHLEQFYTVLKNLKKTWKGASPEERTALFHNLVKKVSVTLEDRVSIEFFED

SEQ ID NO: 10733 - protein, 481 aa, Unknown
  Description of Unknown: Integrase B10734 sequence
  PS00397,IPR038109,IPR006119,PS51737,PF00239, cd03768,G3DSA:3.40.50.1390,PTHR30461,IPR025827,SM00857, G3DSA:1.10.10.2600,SSF53041,IPR011109,PF07508,PS51736, IPR006118,PF13408,Coil,IPR036162,PTHR30461:SF3
MQILGYIRVSTEEQANDGNSLFEQRERLQAYCKAMLWPEPIFFIDDGYSAKDTNRPDLQKLLKIVGENKTELKIMVTKLDRISRKLLDLLTMIELFQNHGASFVSVSEQFDSNTPAGRLTLQVLGAVAEFERERTRERVIDNMDSIAKNTNKALTRPCFGYDIVDGEYQINNSEQKFGDMMLDLAESGDGYRMIAKKLNDAGSRTKKGKPWDQKNVKRWLTGIETIAGIKIRNKRDTQNGKVVFRDEKDWIVVENNHPALVSLERLLKIRDVLKSRSRAHKHAENESYLLTGLVKCKFCGGNMKGATSRNKNNGKEYMYHRYICSAYVSGYGCRYHAVHRDDLELKIIDLVKEIAEGSNADLVIKATVNQSVDERIKEINTQLAKISKRIVKQIQAHADDLISGADLKMASNIAESERVKLNEELKKLTKHEEAPHKVRQTATTILGDISGVDRIKAKNALRLLFERIEIENESISVVVKG

SEQ ID NO: 10734 - protein, 481 aa, Unknown
  Description of Unknown: Integrase B10735 sequence
  IPR038109,PS00397,IPR006119,PS51737,PF00239, cd03768,G3DSA:3.40.50.1390,PTHR30461,IPR025827,SM00857, G3DSA:1.10.10.2600,SSF53041,IPR011109,PF07508,PS51736, IPR006118,PF13408,Coil,IPR036162,PTHR30461:SF3
MITTNKVAIYVRVSTTNQVEEGYSIDEQKDKLSSYCDIKDWNVYKIYTDGGFSGSNTDRPALESLIKDAKKRKFDTVLVYKLDRLSRSQKDTLYLIEDIFIKNNIAFLSLQENFDTSTPFGKAMIGLLSVFAQLEREQIKERMQLGKLGRAKAGKSMMWAKTSYGYDYHRDTGTITINPAQAVAVKFIFESYIRGRSITKLRDDLNEKYPKHVPWSYRAVRAILDNPVYCGLNQFKGEIYPGNHEPIISKEDYDKTQAELKIRQRTAAEKSNPRPFQAKYILSGIAQCGYCGAPLKIMLGVKRKDGSRLKKYECHQRHPRTLRGVTTYNDNKKCDSGFYHKDKLEAYVLKEISKLQDDNGYLDKIFSEDSAETIDRESYKKQIEELSKKLSRLNDLYIDDRITLEELQSKSAEFISMRGTLETELENDPALRKDKRKDEMRKLLNAEKVFSMDYESQKVLVRGLINKVRVTAEDIVINWKI

SEQ ID NO: 10735 - protein, 481 aa, Unknown
  Description of Unknown: Integrase B10736 sequence
  IPR038109,PS00397,IPR006119,PS51737,PF00239, cd03768,G3DSA:3.40.50.1390,PTHR30461,IPR025827,SM00857, G3DSA:1.10.10.2600,SSF53041,IPR011109,PF07508,PS51736, IPR006118,PF13408,Coil,IPR036162,PTHR30461:SF3
MITTNKVAIYVRVSTTSQAEEGYSIDEQKAKLSSYCDIKDWSVYKIYTDGGFSGSNTDRPALEGLIKDAKKRKFDTVLVYKLDRLSRSQKDTLYLIEDIFIKNNIAFLSLQENFDTSTPFGKAMIGLLSVFAQLEREQIKERMQLGKIGRAKAGKSMMWAITSYGYDYHRETGEVTINPAQALAVKFIFESYLSGRSITKLRDDLNEKYPKHVPWSYRAVRTILDNPVYCGFNQYKGEIYPGNHEPIISKEEYDKTQSELKIRQRTAAENVNPRPFQAKYILSGIAQCGYCGAPLKIMLGVKRKDGSRLKKYECHQRHPRTLRGVTTYNDNKKCDSGFYYKDNLEAYVLEEISKLQDDADYLDKIFSGDNAEAIDRESYKKQIEELSKKLSRLNDLYIDDRITLEELQSKSAEFISMRATLETELENDPALRKNKRKADMRQLLNAEKVFSMDYEKQKVLVRGLINKVQVTAEDIVIKWKI

SEQ ID NO: 10736 - protein, 481 aa, Unknown
  Description of Unknown: Integrase B10737 sequence
  cd00338,IPR011109,IPR038109,Coil,PS51736, G3DSA:3.40.50.1390,IPR036162,IPR006119,PTHR30461,PS51737, PF00239,SM00857,G3DSA:1.10.10.2600,SSF53041
MSKCIILSRVSTAKQELDSQTQAIKNEALKQGFKEKDFIIIADVESAIKLSEEERNGLNKMKKAIEEDKKITHVFIYELSRLSRRQLVLFSIRDYLIEHKIQLVCCTPYFRLLEDGKLSQTANLMFSIFASMAESEMSLKQDRMKRGRLRNKMTGKNNCGPVLYGYKTLEDKTIVVDEETMPFVVDMFTMYASGLFTQLEVAKELYLKYGKTSDTKEKMKHKINNLLHRKEYCGTTKYPRVISEDLFDKAQQALITNRITTKKSHREDALLKRIIFDKKTGCHLTYSSNACTQRYTLKQGNTPNVDKNVLDKYIWQLVVALHTNYITDTSKVKNEIREKMDAESQKAITLKLKTVDIQKKLDLVEERLIYGSLSKEKAEQMIANLENEKQTCESEQKLAIEKASNYQKMLDAVTPNELPDYDNLSFDEKVAIVRSMIERIDISKPSYMWVKAEIRTKVDHFLYTLDIETRKKICTMSSRLA

SEQ ID NO: 10737 - protein, 481 aa, Unknown
  Description of Unknown: Integrase B10738 sequence
  IPR038109,PS00397,IPR006119,PS51737, PF00239,G3DSA:3.40.50.1390,PTHR30461,IPR025827, SM00857,G3DSA:1.10.10.2600,SSF53041,IPR011109,PF07508,PS51736 ,IPR006118,cd00338,PF13408,Coil,IPR036162,PTHR30461:SF3
MPEPRIAAAYIRVSTDDQMELSPDSQMEKIREYAAKNGLLLLSEYIFHDDGISGRAAEKRPGFQQMIATAKDPSHPFDVIIVWKFSRFARNQEESIFYKSILRSKCKVDVVSVSEPLIAGPFGSLIERIIEWMDEFYSVRLAEEVKRSMTVNAKNGTLQATPSFGYRVENRQLVIVPEEAEIIREIFRRFISGDAMFRIAKDLSSRGIRTHRGNPFENRTIDYILNNPVYLGKLRWTPTGRTHRNFKNEDSIIADALHEPIIDAETWDAAQARCAELKKSYKRYGKPSSERKHWLCGVVRCSTCGATLIWASPHFMKCNNYAHGRCTTTQHIAVEALEESFLAQLQHDLTFAESVACVVQAAKPAHSDQRLQQQRARIVSRIDRLRESYLDGVETLETYKAARQQMQAQLDDLDAQIAESAAVPVVDAAALLRNAIAAVLETLRSPTATVAQKYESAMSIIDRCTFDKSQMLLAISYKFIF

SEQ ID NO: 10738 - protein, 481 aa, Unknown
  Description of Unknown: Integrase B10739 sequence
  IPR038109,PS00397,IPR006119,PS51737,PF00239,G3DSA:3.40.50.1390 ,PTHR30461,IPR025827,SM00857,G3DSA:1.10.10.2600, SSF53041,IPR011109,PS51736,IPR006118,cd00338, PF13408,Coil,IPR036162,PTHR30461:SF3
METGKFMGGENYIEEVAAYIRVSTQEQKLHGISLEAQVEKLTEYAQNHGMKIVKFYKDEGVSGRKLIKNRPALQEMIQDAEKGKFKRIIFIKLDRFFRSVAEYHECMKRLSVGGVIWTATEEKYDLSTPSGEAFVNMKLTMAQFEADQAGERIRMVNEYKIKSGQPLYGSQCLPFCYAVGCPEEGERHKYIGKRDEEIMRDLIDYVMKNHSVRAGMNYINQKYNRNFLYNAVMNALKNEMICGTYKGNPNYCEPYITREEFNQLQKIISRNPRTTEKRTYLFTGLIRCPRCGYRLSGGQYYTYSRPNKETGKREKRRGYLAYKCGRSRVNNQCDFNNIVQEQRLEKMLLEQLDDIIAGKKLQAISVKSAGKKVSKHDVEALTAELDRLNYAWQKGRIKSVEEYDKSYDDLMEKIHAAENEQAELNQEPDYEKIQAVLSNGWQEIYKELDGEHKRAFWRSFIEEIQVVWSKDKKEIKDIIFF

SEQ ID NO: 10739 - protein, 481 aa, Unknown
  Description of Unknown: Integrase B10740 sequence
  cd00338,PF13408,IPR011109,IPR038109,PF07508, Coil,PS51736,G3DSA:3.40.50.1390,PTHR30461,IPR006119, IPR036162,PTHR30461:SF3,IPR025827,PS51737,PF00239, SM00857,G3DSA:1.10.10.2600,SSF53041
LAAPRNTKRGRKAEAETIGVIYARYSSHNQKEESIEQQVEECTAFALANNIRIIEVYADKAISGKTDKRKNFQRMMRDAEKQKFTVVIAYKSNRIARNMLNALSYENRLESFGIRTLYAKEEFGDTAAGRFALRTMMNVNQFYSENMAEDIRRGMADNAADCKVNGRLPLGYKNVGGHYAIDETTAPIVREIFERFLNEETFASIATDLNGRGIRTSYGNPWNKGSFHRLLQNDNYIGTYRHSGIVKEDGIPAIITKEVFYAVQERLKTKKNPQGRKRDSADYLLTGKLHCGHCKSYMVGISGTGKHGELHYYYTCNDRRTGGGCKKKNVKRDWIEQKIAELTKDLILQDDVIEWIAENALEFQKQARRTVEITTMEDRLAEARKAAKNIVTAIEQGIFTATTRSRLLELEEEISTLERSLTLARSANQPIEKDRIIYALEQLQEGDVQNKSYQAKLINTFVKAVYLWDDKIRIDYYYTGK

SEQ ID NO: 10740 - protein, 481 aa, Unknown
  Description of Unknown: Integrase B10741 sequence
  cd00338,PF13408,IPR011109,IPR038109,PF07508, Coil,G3DSA:3.40.50.1390,IPR036162,PTHR30461,IPR006119, PTHR30461:SF3,IPR025827,PS51737,PF00239,SM00857, G3DSA:1.10.10.2600,SSF53041
MKNDFVVIDEYCDRAISGKTDNRPMFQKLIKDSEKGHFQAVIMYTLDRFARNRYDSAIYKAKLKKNGVRIFYAKQPMPDTPEGIILESVLEGYAEYYSENLARSIRRGMKENALHGVAMGTPVLGYKIVDKKFEIDPVGAKAVQAIFTMYAEGKSQNEIVEYLNAQGYKTSRGNPFNKNSLSRILRNDKYIGVYRFDDVVLEDAVPPIISRELFEKVQALFKHNYAARARNKAIEDYLLSTKLFCGHCGSAMVGESGTSKSGKLHYYYKCVNRKRKHNCDKKVEKKDWIEKLVVQYTVENVLTDENIELIATRAMELIEKELQDTSVLVSLQGMLKETNKKIKNLLTAIEQGIFTSTTKGRLEELEAERRDLEGQIAREEMKKPLLTKERIMFWLASFKKGDINDIEYQRRVIDTLVNSVYLYDYGDKGRKIVLTFNISGANTLTIQCSDIEGIAPPNNANPNTLFFVKHCFGFVFIVEEV

SEQ ID NO: 10741 - protein, 481 aa, Unknown
  Description of Unknown: Integrase B10742 sequence
  cd00338,IPR011109,PS00397,IPR038109,Coil, PF07508,PS51736,IPR036162,IPR006119,PTHR30461, G3DSA:3.40.50.1390,PTHR30461:SF3,PS51737,PF00239,SM00857, G3DSA:1.10.10.2600,IPR006118,SSF53041
MNTDLKTAAAYIRVSTDSQTELSPDSQIKVVREYARKNGYIIPNEFIFRDDGISGRHADKRPEFNRMIAIAKQKPSPFCAVLLWKFSRFARNQEESIFYKSMLRKNGVEVLSISEPMIDGPFGTLIERIIEWSDEYYSIRLSGEVKRGMTEKVERGLPVSIPSFGYSIENKQYVINPETAPIVKKIFADYLNGVPVVTIARQLNDMKIRTTRGGLWENRTVEYILYNPVYIGKIRWNPKRRTRRNYSDKDIMIVDGSHEPIIDTDTFEKVQERLAEQKRAYKRYIKSNITEEYMLHGLVKCSSCGSSLSMCQRGVGLQCVKYTRGQCKTSHYISIKKMNALVISAIEVAFATESIELTVKSAESNESSGLTEIEINALIDKENLKYSRIREAYENGIYNLDELTEAKKQTDDNIKQLKKLLKPEKTTEQIKKQFIHDKQDIISLLKTDNISEGEKNQILRSFIDKIVFNRSDCTVRIFYFI

SEQ ID NO: 10742 - protein, 481 aa, Unknown
  Description of Unknown: Integrase B10743 sequence
  PS00397,IPR038109,IPR006119,PS51737,PF00239,G3DSA:3.40.50.1390 ,PTHR30461,IPR025827,SM00857,G3DSA:1.10.10.2600, SSF53041,IPR011109,PS51736,IPR006118,cd00338, PF13408,Coil,IPR036162,PTHR30461:SF3
MEMKELNSEDLQVRNVLSVECVAAYVRVSTQEQKLHGLSLDAQKMKLTEYAKKNNMRIVEWYVDEGVSGRKLIKNRPELQRMIQDAEKGKFDRIIFIKLDRFFRSVAEYHECMKRIAPVLWSTTEEEYDLTTANGRMLVNMKLTIAEMEADQTGERIRIVNEYKVSTGQPLVGKQSLPFGWMVGRDEKTGRKNVVRDPDEEPILRDLLEHYMKHQSKTKTLTYLHAKHHIAMDHEPLSRLLANPMLYGAYRDNPSYCEAYIDKETFDKIQEIVKRNIKGNTSENRAYLFSGLIKCPECGRLMKGFVCTQKSSAGTILKYKKYRCGIHYLNGRCSYNKVVSENVMERKLLANIGEYLKDAKIRATNIESADTVKIPQYNIEELHNQIDRLNYSWQTGKIRKVEQYEKDYAELMEKLEIAEAERGPAEVKDFSKIDNILQLGWRSVYRNLDDAHKRAFWRSFIQSIEINWTTETKEIVRVNFF

SEQ ID NO: 10743 - protein, 481 aa, Unknown
  Description of Unknown: Integrase B10744 sequence
  IPR038109,IPR006119,PS51737,PF00239,G3DSA:3.40.50.1390, PTHR30461,IPR025827,SM00857,G3DSA:1.10.10.2600,SSF53041, IPR011109,PF07508,PS51736,SSF144292,cd00338, PF13408,Coil,IPR036162,PTHR30461:SF3
MKIDGTTSSGLRVAIYTRVSTDHQAEEGFSMEVQHEKLMEYINRNKLTMFKFYSDPGVSAKNLNRPGIKELLRDFDDDLFDIILVHKLDRLTRNIGDLHNLVEMINERKKKLISYTEDIDTSTPAGRMFVYFLGVIAQMYRENLGEEVTKGMRKRVEKGMHNVTVDLYGYTRDANGDLVIKDDEAQWVKWAFENYVSGMGSTQLSIHLNNMGIIRNRGGRWEQSNVIKMLENKHYIGKVHCKFKRDDETTISEGKHEQIISDELFNKAQRVLERRREGLISMNSYDYIFGGIVKCGACGASYIGRYSVTRSAKRTINRQYVCSNHVKHKTCDQGGISEIKLAKLFFKSIKLIGKNYTRKDMPKKERSEFEEIQKTIKASEERRERWQLAYGDGNMPYEDFSKRMRTEMERIQELEKKLSTIPQQAVSFLTPEDAINQINELQKNWNYLDQLTKKEVVQSLFQQIVILKTGDSWEIVKTILS

SEQ ID NO: 10744 - protein, 481 aa, Unknown
  Description of Unknown: Integrase B10745 sequence
  IPR038109,PS00397,IPR006119,PS51737,PF00239,G3DSA:3.40.50.1390 ,PTHR30461,IPR025827,SM00857,G3DSA:1.10.10.2600, SSF53041,IPR011109,PF07508,PS51736,IPR006118, cd00338,PF13408,IPR036162,PTHR30461:SF3
MGGGFKVGAAYIRVSTVEQTELSPASQLKTIRDYAKNHGYIIPDEYIFQDDGISGKSADKRPAFRLMIATAKEAEKPFDAIFVWKFSRFARNQEEAIMYKNLLRKKGVEVVSISEPSNDSPFSSLIERIIEWMDEYYLINLAGEVRRGMKEKASRGEPTGRCAFGYRVENKCLVPTDDAAIVRMIFEQYAAGKGVFSIVTGLNDSGLKIRGKPFAKNSVQYLLNNPTYIGKIRWEEDGHLKYNRASYIPALDELPDGKHQPIISRELWDAVQERLKNSRQEIRYARAGHDVYMLKGLCRCSACGNTLVKVTQGPSRAPALQCCGYGRGACRVSHYIPIHNADAAVIAALEMVIASSAYKFTPKTPPKSVQAQDWDKLIAAEKTRLSRAKEAYLGSVLSLEEYAEIKAAAGDSITKLEAARYKDSSTAAVDVAAYSARVLQVLDVVRADGVSGEAKNQALRSIIDKIVFNKAGGTFDFFFLP

SEQ ID NO: 10745 - protein, 481 aa, Unknown
  Description of Unknown: Integrase B10746 sequence
  PS00397,IPR038109,IPR006119,PS51737,PF00239, cd03768,G3DSA:3.40.50.1390,PTHR30461,IPR025827,SM00857, G3DSA:1.10.10.2600,SSF53041,IPR011109,PF07508,PS51736, IPR006118,PF13408,Coil,IPR036162,PTHR30461:SF3
MTKKTKVAIYVRVSTQEQAKEGYSIHEQIDRLTKYCEAHSWEVYKVYTDPGFSGGDTNRPGLQAMLKDIKRGRVNKVIVYKLDRLSRSQKDTLNLIEDEFLKTGVDFVSMSENFDTSTPFGRAIVGILAVFAQLEREQIKERMAMGKEARAKLGKWNGGRNAPIGYELIQGELIINAFEKLQVQEAFELASKGESPYKIAETFNKKGYNTRYGEWDNKAVRRVLRSKSCLGYTKYNDTWNKGTHEPIISQKLFDEVQAILDIRSDNYKSNRGHGKITTYLGGYLYCSKCGAKYSKITARRKKPNSNDYYVYEFLGCNSRTKRNKAVIKDPNCKNKNWKLKNLNDLVFSEIKQLALDPDYMHELKEDKAPDERPKILEDRIKDIDKQLSKLMDLYVIGKMPMNILQDKIQELDDQKTRLEAEIDIIQSEIDSKLNQEQIKHIVEDFPDVLERGDFEEIRAVIGDLIEKIEIDNDDITIHWNF

SEQ ID NO: 10746 - protein, 456 aa, Unknown
  Description of Unknown: Integrase B10747 sequence
  IPR011109,IPR038109,PF07508,PS51736,IPR036162, IPR006119,G3DSA:3.40.50.1390,PTHR30461,PTHR30461:SF3,PS51737, PF00239,SM00857,cd03768,G3DSA:1.10.10.2600,SSF53041
VNDTPSKKARQRCAVYCRVSTDERLDQEFNSIDAQREAGHAYIASQRAEGWIPVADDYDDPGFSGGNTERPGLKRLMADIERGLIDIVVVYKIDRLTRSLADFSKMVEVFERRKVSFVSVTQQFNTTTSMGRLMLNVLLSFAQFEREVTGERIRDKIAASKRKGMWMGGVPPLGYDVVNRQLIVNEAEAAIVQRIFKEMLTNGSTTQIAAGLTAEGFTTKSWVTRSGQMRSGTRIDKKFLYKLLRNRVYLGEISHKGNWHPGVHAAIIDHGLWGQVHEILASDGHTRSVETKVRSRTDALLRGLLYAPTGERMYPTYSNKRGRKYRYYFSKSEARFGAESKTYARLPADEVEAATVAQIKTVLSSPESVAGVCQFIRKNGAAVREDMAVMAMRQLGNVWEQLYPAEQHRIVNLVIERVDIVPGGLKVKWRELGWKDLIEEFAQDSIGAELVEMEEA

SEQ ID NO: 10747 - protein, 481 aa, Unknown
  Description of Unknown: Integrase B10748 sequence
  cd00338,PS51736,G3DSA:3.40.50.1390,IPR006119, IPR036162,PTHR30461,PF00239,SM00857, cd03768,SSF53041
MSLTSQFEECRKHVDFKGLQLGSESNYDNPGVFSDPGVSAWKVPIFERPGFKELWRVAKPNDNIVTLSLDRAFRSVMDFTHSWERFESTKIMPIFVRDNVDMSTATGKFMAHIAAAFAQFKSDLISQRTREAFAYRRENKLAEGRVKQKKIRPADNHALAMLHAKASPSELEAAVNDTGRVFGYVRVSTDQQEIEAQHSIVERCMGHMAEDGFQPSTIHVDHGVSAFTKDWKDRAAGKMLWDEMREGDCIVVLRIDRIFRSIRDMAVTTKELLSRGVHLVTSCGIDTRSMAGRQAIEIMAMMAEWESRDIGWRAKLGVQQAAKTRGKWTGRATVPRYMDIVYDKEGEWSVKPNLKLINEFREVQELHELGMSYPEVSDCFEERLAAREGRPMTPPTPFRHNVFSRNKTRQGISKSQKKAMRKWFRENKRHMFRGEYIRSWSWLRVRGSLKLAHEYDEILQAYDIAEPNRLNRSTSQLTAAG

SEQ ID NO: 10748 - protein, 481 aa, Unknown
  Description of Unknown: Integrase B10749 sequence
  cd00338,IPR011109,IPR038109,PS00397,Coil, PF07508,PS51736,IPR036162,IPR006119,G3DSA:3.40.50.1390, PTHR30461,PTHR30461:SF3,PS51737,PF00239,SM00857, G3DSA:1.10.10.2600,IPR006118,SSF53041
MNTDLRTAAAYIRVSTDSQTELSPDSQIKVVREYAKKNGYVIPNEFIFRDDGISGRHADKRPEFNRMIAIAKQKPSPFCAVLLWKFSRFARNQEESIFYKSMLRKNGVEVLSISEPMIDGPFGTLIERIIEWSDEYYSIRLSGEVKRGMTEKVERGLPVSIPSFGYSIKDKQYVVNPETAPIVKKIFADYLNGVPVVTIARQLNDMKIRTTRGGLWENRTVEYILYNPVYIGKIRWNPKRRTRRNYSDKDIMIVDGSHEPIIDTDTFEKVQERLAEQKRTYKRYIKSNIKEEYMLHGLVKCSSCGSSLSMCQRGVGLQCVKYTRGQCKTSHYISIKKMNALVISAIEVAFATESIELTVKSTESNESSGLTEIEINALIDKENLKYSRIREAYENGIYNLDELMEAKKQTDDNIKQLKKLLKPENSTEQIKKQFIHDKQDIINLLKTDNISEGEKNQILRSFIDKIVFNRSDCTVRIFYFI

SEQ ID NO: 10749 - protein, 481 aa, Unknown
  Description of Unknown: Integrase B10750 sequence
  IPR038109,PS00397,IPR006119,PS51737,PF00239, cd03768,G3DSA:3.40.50.1390,PTHR30461,IPR025827,SM00857, G3DSA:1.10.10.2600,SSF53041,IPR011109,PF07508,PS51736, IPR006118,PF13408,Coil,IPR036162,PTHR30461:SF3
MKTMNKVAIYVRVSTTNQVEEGYSIDEQKDKLSSYCDIKDWNVYKVYTDGGFSGSNTDRPALESLIKDAKKRKFDTVLVYKLDRLSRSQKDTLHLIEDVFIKNGIEFLSLQENFDTSTPFGKAMIGLLSVFAQLEREQIKERMQLGKLGRAKSGKSMMWAKTSYGYDYHKETGTVTINPAQALTIKFIFESYLRGRSITKLRDDLNEKYPKHVPWSYRAVRTILDNPVYCGFNQYKGEIYPGNHEPIISKEEYDKTQSELKIRQRTAAENVNPRPFQAKYILSGIAQCGYCGAPLKIMLGVKRKDGSRLKKYECHQRHPRTLRGVTTYNDNKKCDSGFYYKDKLEAYVLKEISKLQDDADYLDKIFSGDNAETIDRESYKKQIEELSKKLSRLNDLYIDDRITLEELQSKSAEFISMRGTLETELENDPALRKNKRKADMRKLLNAEKVFSMDYENQKVLVRRLINKVKVTAEDIVINWKI

SEQ ID NO: 10750 - protein, 481 aa, Unknown
  Description of Unknown: Integrase B10751 sequence
  IPR038109,PS00397,IPR006119,PS51737,PF00239, cd03768,G3DSA:3.40.50.1390,PTHR30461,IPR025827,SM00857, G3DSA:1.10.10.2600,SSF53041,IPR011109,PF07508,PS51736, IPR006118,PF13408,Coil,IPR036162,PTHR30461:SF3
MITTNKVAIYVRVSTTNQVEEGYSIDEQKDKLSSYCDIKDWNVYKVYTDGGFSGSNTDRPALESLIKDAKKRKFDTILVYKLDRLSRSQKDTLHLIEDVFIKNGIEFLSLQENFDTSTPFGKAMIGLLSVFAQLEREQIKERMQLGKLGRAKSGKSMMWAKTSYGYDYHKETGTVTINPAQALTIKFIFESYLRGRSITKLRDDLNEKYPKHVPWSYRAVRTILDNPVYCGFNQYKGEIYPGNHEPIISKEEYDKTQSELKIRQRTAAENVNPRPFQAKYILSGIAQCGYCGAPLKIMLGVKRKDGSRLKKYECHQRHPRTLRGVTTYNDNKKCDSGFYYKDKLEAYVLKEISKLQDDADYLDKIFSGDNAETIDRESYKKQIEELSKKLSRLNDLYIDDRITLEELQSKSAEFISMRGTLETELENDPALRKNKRKADMRKLLNAEKVFSMDYENQKVLVRRLINKVKVTAEDIVINWKI

SEQ ID NO: 10751 - protein, 481 aa, Unknown
  Description of Unknown: Integrase B10752 sequence
  cd00338,IPR011109,PS00397,IPR038109,Coil, PF07508,PS51736,IPR036162,IPR006119,PTHR30461, G3DSA:3.40.50.1390,PTHR30461:SF3,PS51737,PF00239,SM00857, G3DSA:1.10.10.2600,IPR006118,SSF53041
MPEPHIAAAYVRVSTDDQMELSPDSQMEKIREYAAKNGLLLLSEYIFHDDGISGRAAEKRPGFQQMIATAKDPSHPFDVIIVWKFSRFARNQEESIFYKSILRSKCKVDVVSVSEPLIAGPFGSLIERIIEWMDEFYSVRLAEEVKRSMTVNAKNGSLQATPSFGYRVENRQLVIVPEEAEIIREIFRRFISGDAMFRIAKDLSARGVRTHRGNPFENRTIDYILNNPVYVGKLRWTPTGRTCRNFKNEDSIIADALHEPIIDAETWDAAQARCAELKKSYKRYGKPSSERKHWLCGVVRCSACGATLIWVSPHFMKCNNYAHGRCATTQHIAVEALEESFLAQLQHDLTFAESVACVVQAAKPAHSDQRLQQQRARIVSRIDRLRESYLDGVETLETYKAARQQMQAQLDDLDAQIAESAAVPVVDAAALLRNAISAVLETLRSPTATVAQKYESAMSIIDRCTFDKSQMLLAISYKFIF

SEQ ID NO: 10752 - protein, 481 aa, Unknown
  Description of Unknown: Integrase B10753 sequence
  IPR038109,PS00397,IPR006119,PS51737,PF00239, cd03768,G3DSA:3.40.50.1390,PTHR30461,IPR025827,SM00857, G3DSA:1.10.10.2600,SSF53041,IPR011109,PF07508,PS51736, IPR006118,PF13408,Coil,IPR036162,PTHR30461:SF3
MITTNKVAIYVRVSTTNQVEEGYSIDEQKDKLSSYCDIKDWNVYKVYTDGGFSGSNTDRPALESLIKDAKKRKFDTVLVYKLDRLSRSQKDTLHLIEDVFIKNGIEFLSLQENFDTSTPFGKAMIGLLSVFAQLEREQIKERMQLGKLGRAKSGKSMMWAKTSYGYDYHKETGTVTINPAQALTIKFIFESYLRGRSITKLRDDLNEKYPKHVPWSYRAVRTILDNPVYCGFNQYKGEIYPGNHEPIISKEEYDKTQSELKIRQRTAAENVNPRPFQAKYILSGIAQCGYCGAPLKIMLGVKRKDGSRLKKYECHQRHPRTLRGVTTYNDNKKCDSGFYYKDKLEASVLKEISKLQDDADYLDKIFSGDNAETIDRESYKKQIEELSKKLSRLNDLYIDDRITLEELQSKSAEFISMRATLETELENDPALRKNKRKADMRKLLNAEKVFSMDYESQKVLVRRLINKVKVTAEDIVINWKI

SEQ ID NO: 10753 - protein, 481 aa, Unknown
  Description of Unknown: Integrase B10754 sequence
  IPR038109,PS00397,IPR006119,PS51737,PF00239,G3DSA:3.40.50.1390 ,PTHR30461,IPR025827,SM00857,G3DSA:1.10.10.2600, SSF53041,IPR011109,PF07508,PS51736,IPR006118, cd00338,PF13408,Coil,IPR036162
MNENFLDFDSLYNDYYLKSNEYYTKCACYIRVSTDDQVEYSPTSQLKLLLKYALDNDLFIDKKYIFHDDGISGTNTKNRDSFLNMIATAKSKPKPFEKIIVYDFSRFARNKEESVMYKTLLRKKLKIDVISITQPLTEGKERVILESMYEAMDEYYSLNLSENVRRGKREKVERGEHSSYAPFGYTLVDKKLVIHEENAKLVKSIYDMFINTENIKHICNTLNDLGIKSTRGKLWGRKTITLILKNKTYAGYVKNRDKYYKGIHEPIIAEEKFEKVQKIWQYRDEHFKKCKDQVQHNHWLRGILKCGECGYGMYYFKRKDRDYAIFNCGGYTHNRCSSHYIKVTDVENAIIEQIKNDFTNKIDINITTNNNDSEYKIALSNLKSIENKLVRIKEAYVNGIDTLEEYKENKSKLQNQLEVANKKIKESQKPSKEVIYKKCEQAYKILSDPKAEKNLKSEISHNLFEKITYYKESNTLAITYK

SEQ ID NO: 10754 - protein, 481 aa, Unknown
  Description of Unknown: Integrase B10755 sequence
  PS00397,IPR038109,IPR006119,PS51737,PF00239, cd03768,G3DSA:3.40.50.1390,PTHR30461,IPR025827,SM00857, G3DSA:1.10.10.2600,IPR013809,SSF53041,IPR011109,PF07508, PS51736,IPR006118,PF13408,Coil,PS50942,IPR036162,PTHR30461:SF3
MDKINKVALYVRVSTTSQMEEGYSIEEQKAKLESYCDIKDWHIYKVYTDGGFSGSTTERPALEQLIKDAQSKLFDTVLVYKLDRLSRSQKDTLYLIEDIFLKNNIEFVSLLENFDTSTPFGRAVIGLLSVFAQLEREQIKERMQLGKLGRAKAGKSMMWAKTSYGYNYEKETGSMTVNEYEALAVKEIFTSYLAGMSITKLRDKINGEYPKQPAWSYRTIRGILANPVYCGLNQYKGQTFQGTHKPIISLMDFEQTQRELAKRQQTAKELSNPRPFQSKYMLSGLAQCGYCHAPLKVILGQKRKDGTRFKRYECYQRHPRKTRGVTVYNDNKKCESGYYDMELLEHYVLTRIAQLQNDPDKIQELFSDDTSPAVDKQAIQKQIDSLTLKLSKLNDLYLDDRITLDELRTKSADFIKQRSSLEAEIKKASNDEQAGQREKIEKLLDASSVLEMSYDNQKVIVRELIDKVQVTSDKVVIRWKI

SEQ ID NO: 10755 - protein, 481 aa, Unknown
  Description of Unknown: Integrase B10756 sequence
  PS00397,IPR038109,IPR006119,PS51737,PF00239, cd03768,G3DSA:3.40.50.1390,PTHR30461,IPR025827,SM00857, G3DSA:1.10.10.2600,SSF53041,IPR011109,PF07508,PS51736, IPR006118,PF13408,Coil,IPR036162,PTHR30461:SF3
MKSINKVAIYVRVSTTSQAEEGYSIEEQIDKLESYCKIKDWSVYKVYTDGGFSGSNTERPALERLIKDADKKKFDTVLVYKLDRLSRSQKDTLFLIEDVFIKNGIEFLSLQENFDTSTPFGKAMIGLLSVFAQLEREQIKERMQLGKLGRAKAGKSMMWTKTSYGYDYHKETGTMTINPVQSLAIKFIFESYLSGRSITKLRDDLNEKFPKEKPWNYRAVRVILGNPVYCGYNQFMGEIYKGNHEPIISKEDFDKTQKELKIRQRTVAENINPRPFQAKYMLSGIAQCGYCLAPLKILMGMYRKDGTRLVKYECHQRHPRKLRGVTTYNDNKKCDSGFYFKDELEAFVLKEVNKLQHDSEYLESILSDNHKEAIDRESYQKQIRELSKKLSRLNDLYIDDRITLEELQSKSSKFLSMRALLEKELEDDPALKQEETKNTIKQSLSKGDIYKMDYESQKTIVRALIKKVQVTADSIVIKWRI

SEQ ID NO: 10756 - protein, 481 aa, Unknown
  Description of Unknown: Integrase B10757 sequence
  cd00338,IPR011109,IPR038109,Coil,PS51736, G3DSA:3.40.50.1390,PTHR30461,IPR036162,IPR006119,PS51737, PF00239,SM00857,G3DSA:1.10.10.2600,SSF53041
MTVTSVQTRARAGVTYAVGVIRVSQQGKREAERFKSPSEQRDRIAAEIRRQGAELAQCFQEIDISGKLPLARRHGLRQAVEAIEAGHARVLVVAYFDRLVRNLRVQAEVVQRVEAAGGRVLALDFGEVTEKTAAQWLSSTLMGAVAEYYARSVGERLASTAAMAIASGVPVGALPPGYRRDPATRRVVLHEAEAAVMREAFAMRADGASWSAVRGFMAANGIVRSIGNTRTLLHSRTYLGELTLGDVVNPGSHTPLVDLETFERIGRQKGEAFKAAPGRKSELLLSGLRLLRCATCGHSLLASTQTTRFGKSFRLYRCNPGLVCSRRVAIDAALADQAVTDYVRELVANDAETEGPGMELIEARAAVDAAQAALDTAIRGYIAAGVLDEASAQQSLRELREKRDAAADRASDLERAARAVGDGITLNGSADWDALTLADRREIITAVLARVVVAPGGGKVRGASRLTFVTVRDELGGDALG

SEQ ID NO: 10757 - protein, 481 aa, Unknown
  Description of Unknown: Integrase B10758 sequence
  cd00338,IPR011109,IPR038109,PF07508, Coil,PS51736,G3DSA:3.40.50.1390,PTHR30461, IPR006119,IPR036162,PTHR30461:SF3,PS51737, PF00239,SM00857,G3DSA:1.10.10.2600,SSF53041
MSNVAIYLRKSRDEENESRDVTLARHEKMLREYCERNDLIIKKIYKEIVSGESISARYEMQKLLIDVRAGLFDAVVVVELERLSRGNQADQAEILDVFKRTGTKIHTLTKIYDLASDNEIDEEFFEFGLFMSRREYKVICRRLLRGRVSALLEGYYTGSVLPFGFDKERIEKGFVLVPNKDEADIVRLIFTKYVSGDGLTAIAHDLNSYGMKQRNGKDWQPQRIREVLKNKTYIGMLHIKNAKLDAEWTKGKHEPLIDIDLFETAQRKLSSGVPKAKRSLNIVNPLAGLVKCSECGSAVVMKKNVAGVKYLACNTLKCSTCSSKFDDVESQLLLELSEALRGFQKYVDDNSSRIELKASERANLSVKIDAEISKKESMLERCCELLEEGIYTKEKYLSRVKILEEEIAGLTETRNQISYNHDEEEMENIKTGIPILEKCLQKYDQMDVVAKNEILRSLIDKIEYSKQARGKSFDLRIYMKI

SEQ ID NO: 10758 - protein, 480 aa, Unknown
  Description of Unknown: Integrase B10759 sequence
  cd00338,IPR011109,PF07508,PS51736,IPR036162, PTHR30461,IPR006119,G3DSA:3.40.50.1390,PS51737,PF00239, SM00857,SSF53041
MECMTRTSTLGGAPRCAAVYCRISDDREGRGLGVERQEPVCRQLVAANGWVVHDVYVDNDVSAFRGKPRPAFERMVEDIKAGRVNAIAAWAPARLTRHNRELEDLIDLLDANDVEVATHIAGKYDLSSSGGRLVARVVGAVARHESEEKSERIKSKMEQLASHGSFHGGKRPYGYEADGRTIRPEEAENIRFMAQAVLEGASVVKVAAELNERGVPAAQGGAWTHSRVRALLALPRLAGLRIHNGEVVADAGWPAILDRATFEAVQAVVADPKRRHRGYSVHFLTGLLYTPDGRRLVGNRQVYPKAGIEKDAYAAKPGVVDGQRLAGLTIEASAVETWVEEYVLDYTDRVALASGPAVPQPSTEVVDLEAELAELADMRGAGEISFAEWRAAREGINVRLEAARARVPEMPSVPPTMAVVLGQRGELRRRWPSLNTRQRRQALEAVLERVIVKPVGKGWGKGMARGTAPALSDRLEAVLR

SEQ ID NO: 10759 - protein, 480 aa, Unknown
  Description of Unknown: Integrase B10760 sequence
  PS00397,IPR038109,IPR006119,PS51737, PF00239,G3DSA:3.40.50.1390,PTHR30461,IPR025827, SM00857,G3DSA:1.10.10.2600,SSF53041,IPR011109, PF07508,PS51736,IPR006118,cd00338,PF13408,IPR036162,PTHR30461:SF3
MDVKIAACYVRVSTDDQQEYSPDSQLKIVRDYAKREGFIVPDEYVFQEKEGISGKTAEKRPRFRMMIATAKQDPPPFSAIFVWKFSRFARNQEEAIMYKNLLRKRGIDVRSVSEPSSDDPFSSLIERIIEWMDEYYLINLAEEVRRGMKEKSRRGEACGRAPFGYDVQNKILVPNKDAEIVRFIYDRFASGSGIRGITAELVRRGIKTKNGLEPSIRWTRYILMNPVYIGKLRWNESGHLKYERPNVCAGGGDLSDGQHEPIIDMQTWEIAQKKLTGKDPDYYRRTSGTGEVLLRGLVRCSSCGNTLIRITQYGRGYLQCCSYTRGTCKVSHRITEQEANDAVLDALEQCIANETYTIERQKPETPVSPAWEPVIAAEQKKLDRATEAFLNGVFSNEEFKNIRQKIQKKIQDLQLGIENDQKTKEQKTDISQVKERTVKIMDILRSPDVPVTEKNRQLRTVIDKIVFDRSAWTFDVYFKP

SEQ ID NO: 10760 - protein, 480 aa, Unknown
  Description of Unknown: Integrase B10761 sequence
  IPR038109,PS00397,IPR006119,PS51737,PF00239,G3DSA:3.40.50.1390 ,PTHR30461,IPR025827,SM00857,G3DSA:1.10.10.2600, SSF53041,IPR011109,PF07508,PS51736,IPR006118, cd00338,PF13408,Coil,IPR036162,PTHR30461:SF3
MKRVALYVRVSTQEQAEEGYSVGAQLEKMRLYCKSKEWIIVEEYVDGGFSGSNLDRPAMQKLIFDSARSTIDMVLVYKLDRLSRSQKDTLHLIEDVFKPNGVDFTSMQENFDTSTPFGMAIVGILSVFAQLERSQIAERMTLGRDARAKEGRYLGHSKSPIGYDYDLVKGELVVNDYESLQVKEVFRLFTEENMNILAIQKYMNARYTQKYGNYTSDSTIRCILTNPVYTGRFKYKGEIYESNHEPIIDDDTFKKAERILEIRRKKIEKRKSVPFARITLLSGLLYCGECGARMGGETQVHVYKGKKYERHIYSCYTRKRNKKMMTADSCDMRYMNRSELDALIWDEILSLNIKASDGSGNIWKENDHSEEIAIIEKEIKSVDDKILKLMDLYAVGSMPTDLLGKKINAMNKDKEKLINRIKALDESEENIDRDEILDQIRSAKDVKEHGSIDDQRSLIFALIDRITVFQDHIHIKYKFV

SEQ ID NO: 10761 - protein, 440 aa, Unknown; identical to SEQ ID NO: 9754
  Description of Unknown: Integrase B10762 sequence
  cd00338,PF13408,IPR011109,IPR038109,PF07508, PS51736,IPR036162,IPR006119,G3DSA:3.40.50.1390,PTHR30461, mobidb-lite,PTHR30461:SF3,PS51737,IPR025827,PF00239, SM00857,G3DSA:1.10.10.2600,SSF53041

SEQ ID NO: 10762 - protein, 480 aa, Unknown
  Description of Unknown: Integrase B10763 sequence
  PF13408,IPR011109,IPR038109,PF07508,Coil, PS51736,G3DSA:3.40.50.1390,IPR006119,PTHR30461,IPR036162, PTHR30461:SF3,PS51737,IPR025827,PF00239,SM00857, cd03768,G3DSA:1.10.10.2600,SSF53041
MLVGIYTRVSTQEQVEGYSLSEQENRLKAYCTARDWAVANIYSDAGFSGGNTDRPALQKMINDIRNKKIDTVIVYKLDRLSRSQKDTLNIIEDIFIKNNINFISINENFDTSTPFGKAMIGILSVFAQLERDTIKERMRLGAIGRARDGYFHGGGYTPIGYDYIEGKLIINEYEAIQVREIYDLFLKGYPISRIRKILSSKYTNKYGNWYSDSSVKSCLTTPLYYGKITYAGEMYDGQHDPIVSEELFNKVQHRLKELDASKTERAKTPFKPTQLLGGIVWCQNCGARYYTHHINGRKHLKDHKGWDYYSCYSRTKSNKRMIKDPNCKSKNWRVDEVDKLVIGEILKLQFDESYLQAIIDNNKEDNTEDKEKIINQRIKEISSQLDKVMDLYQLGNVPLDKIAERINTLTNERTALETELENIKNDIEDNKKISLTEVNDILKNAKNILESNDLDSKRMLVHSLIDRIELGDDIKIYWAF

SEQ ID NO: 10763 - protein, 480 aa, Unknown
  Description of Unknown: Integrase B10764 sequence
  IPR038109,PS00397,IPR006119,PS51737,PF00239,G3DSA:3.40.50.1390 ,PTHR30461,IPR025827,SM00857,G3DSA:1.10.10.2600, SSF53041,IPR011109,PF07508,PS51736,IPR006118, cd00338,PF13408,Coil,IPR036162,PTHR30461:SF3
MRVALYVRVSTQEQAREGYSIGEQIERLQKYADAMGWIVFKVYTDAGFTGANTDRPALKDLIKDVKNGKVEKVVVYKLDRLSRSQLDTLYLIEKVFLANNTDFVSMNENFDTSTPFGRAMIGILAVFAQLEREQIKERMTMGKDARAKEGKWKGGKCPIGYKYVDGELVVDEFTAMQVKELFKVFTEGMPLRTIERVFNEKGYKNQYGKSWSPRQMRRTLDTKIYIGLIKHKDTWIQGTHEPIIDEETFELAGKVLHERQRVFAESGVKGGIANQSTYLGGLLHCTHCGGRYSKYRTGSSQSKIYCNYGCYSRHKKVKNMIKDPNCKNKSYRVEELDNIIIDEIKKLAIDPSYIYEIKTHHQQTDEIIQKTNIIQEKIADLENQISRFLDLYGKGRFTFEQLDKQIIPLEEQKNKLNEELESLADEETESMSEDEAIEIIESFEEALERGNFDEIRGIITSLINHIDIDNDDITIYWNFM

SEQ ID NO: 10764 - protein, 480 aa, Unknown
  Description of Unknown: Integrase B10765 sequence
  PS00397,IPR038109,IPR006119,PS51737,PF00239,G3DSA:3.40.50.1390 ,PTHR30461,IPR025827,SM00857,G3DSA:1.10.10.2600, SSF53041,IPR011109,PF07508,PS51736,IPR006118, cd00338,PF13408,Coil,IPR036162
MDNFLEFDSVYNDYYLKSNEAYTKCACYIRVSTDDQVEYSPTSQLKLILKYALENNLYIDKNSVFHDDGISGKNTKARDGFLKMIATAKNKPKPFDKILVYDFSRFARNKEESVMYKTLLRNKLSIDVISITQPLSEGKERVILESMYEAMDEYYSLNLSDNVKRGKREKAERGEHNSFAPFGYTTQDKKLVIHEENAKIVRNIFDMFVEHQNVKLICTTLNNLGIKSTRGKLWGRKTIKLILTNKTYIGYVKYKNEYFKGNHEPIIDEKIFDRAQEIWKDRDEHFKRCKEQVQHNHWLRGILKCGDCGYGMYYFQRKNRKYAIFQCGGYTQGRCSTHQLLVKDVEKAVLEQIKNDFIKKVDIDVSKTNTNSEYEIILTNIKALERKLNRIKEAYINGIDTIEEYKENKKQIQEQIDSSNKRLNEIKEPSKEIIYKKCEQAYEILSNPNSENELKSEISHKLFEKIVYYKDSGMLTITYK

SEQ ID NO: 10765 - protein, 480 aa, Unknown
  Description of Unknown: Integrase B10766 sequence
  cd00338,IPR011109,PS51736,IPR036162,IPR006119, PTHR30461,G3DSA:3.40.50.1390,PS51737,PF00239,SM00857, SSF53041
MTTQAALYVRASLDKTGEGESVTRQIEACGALAASRSYSVVDTHADNDRSAKGHVLRPGFEALLKGIAQGRYGVVVATELTRLTRNKRDELRLMEAARDAGVSIALVRGQDIDLASASGRLVAEILASVARQEIDTMSERLSSGLRQRAVKGHPHWSARPYGYTLTGALVAPEAALLRRAYSDLLEGASLAQIGRDLGMPRGTVLKVMKAARNAGLRTYKGEIVGKGEWPAIVDEAAWRAACAVLADPVRDRGGRTPKWLLTGIAVGPEGHTVRTVVSHGRTAYSAPGVSRGAAQADAAVSRLATVVLAMPEARGVLTERETPDLTAARQERAELVRRRDVDLPEGLAAGISVAQVAAATRTINTRVAEIDALLLDTQRAEVFAGLWDEGHLYDDYPTARFDALPLHRRRAILPMLFTRISVVPGRGPEAVHVTPTALALRIVETTTRTDTAHLAELQDAVTALHAIASAQHKALQDCTG

SEQ ID NO: 10766 - protein, 480 aa, Unknown
  Description of Unknown: Integrase B10767 sequence
  cd00338,PF13408,IPR011109,PF07508, PS51736,IPR036162,G3DSA:3.40.50.1390,PTHR30461, IPR006119,mobidb-lite,IPR025827,PS51737, PF00239,SM00857,SSF53041
MTGNGVRAAVYCRISRDSEGSGLGVARQLKACRELAERLGWTVAEVYIDNSRSAYDRTKKRPEYERMLADVQAGRIDGVLCYAVDRLTRHPIELERLVEVFVANRTAVRTVVGGELDLNTEEGQLRARIMGSVARFESGRKGERLRAKAEEMVAAGKRPCGGPRPFGYDRHYDDPGSPHRKITGETVNEREGEAIRDAAVRLLAGESMRSVSAAWSAEGLLTSMGNPWSITSFRQMITSPRLAGMIVHRGRVVDGVQAQWPPILERETHEQLAALLAGRGTPRESNARRFWLTGFVFCSCGTAMSVGKAASGKRRYECKAKAEGGCGGRVVSLPDLERFMSVLVIRRLRDPLLLHDLAVRGDTTKAETKLLMHSIDQDERRLPLLEDQLTDGDPAAIPEIRGALRKVRARIAENRDSLARLVGVDPLTGVDTDDLEDRWDSLDVARRSALLRVARISRIVIKPTSLRGRFDPDRIELVPT

SEQ ID NO: 10767 - protein, 477 aa, Unknown
  Description of Unknown: Integrase B10768 sequence
  cd00338,PF13408,IPR011109,IPR038109,PF07508, Coil,PS51736,G3DSA:3.40.50.1390,IPR006119,PTHR30461, IPR036162,PTHR30461:SF3,IPR025827,PS51737,PF00239, SM00857,G3DSA:1.10.10.2600,SSF53041
MQMAHYKNYIESRADWDFVGMYSDEGISGTNTKKRDGFNQMIEDALAGKIDLIITKSVSRFARNTVDSLQNVRKLKENGVEIYFEKENIWTFDTRGELLITIMSSLAQEESRSISENTTWGKRKQFAEGKTSVGYSAFLGYDKDFEINEEQAKIVRLIYKLFLGGRSFYAITKELETRCIKSPSGKDKWYISTVRSILTNEKYRGDALIQKEYTADFLDKTRRKNTGEIPQYYVEEHHEAIIPPDLFDFVQLEIKRREQNGKHSGVSIFANKIKCGCCGGYYGAKVWHSTDKYRRVIYRCNKKYAHKGKPCSTRHLTEEEIKQIFVKALNSLMEVKENVIAELRALIDSVCQTGELVEEHGRVEQELTLLTERLEKLIRENARVAQDQTTYLKQENEIRALYLEKQGALEKLDKQIAERESKRNILEGMIQVVCGINGEQVAFDEELWGGLLDHIVVKEDGAVVVVFKGGIETAIEG

SEQ ID NO: 10768 - protein, 479 aa, Unknown
  Description of Unknown: Integrase B10769 sequence
  IPR038109,PS00397,IPR006119,PS51737,PF00239, cd03768,G3DSA:3.40.50.1390,PTHR30461,IPR025827,SM00857, G3DSA:1.10.10.2600,SSF53041,IPR011109,PF07508,PS51736, IPR006118,PF13408,Coil,IPR036162,PTHR30461:SF3
MNKVAIYVRVSTKGQAEEGYSIDEQIALLTSYCSIHKWKIHDTYVDAGISGATIERPELSRLSRDAQKKKFNTMIVYDLKRLGRSQRNNISFIEDVLEKNGIGFISLTENFDTSTPLGKAMVGILSAFGQLDRDTIRERMMMGKIGRAKSGKPMMTSTIAFGYTYDKITSSLNINPAEAIIVKTIYKEYLSGRSLTKLRDYLNENDLLRNGKPWNYQGVSRILRNPVYMGMVRFRGEVYQGNHDPIIDSETFEAAQKELKKRQLETYEFNKNTRPFRAKYMLSGIIKCGYCGSPMGVTLGTKRKDGTRNIRYQCVNRFPRTTKGITVYNNGQKCNSGFYEKDDIEIYVLGQVRLLQLNKAKLNKMFETPEIINVEEIENQINSLNNKMKRLNDLYLNDMISLDELKTQTYTFLKQKDLLESELNNNPAIHQEENRKQFQKLLGTKDITQLSYEEQSFAIKNLIDKVFVKPGIIDINWRI

SEQ ID NO: 10769 - protein, 479 aa, Unknown
  Description of Unknown: Integrase B10770 sequence
  IPR038109,PS00397,IPR006119,PS51737,PF00239, cd03768,G3DSA:3.40.50.1390,PTHR30461,IPR025827,SM00857, G3DSA:1.10.10.2600,SSF53041,IPR011109,PF07508,PS51736, IPR006118,PF13408,Coil,IPR036162,PTHR30461:SF3
MNKVAIYVRVSTKGQAEEGYSIDEQIALLTSYCSIHKWKIHDTYVDAGISGATIERPELSRLSRDAQKKKFNTMIVYDLKRLGRSQRNNISFIEDVLEKNGIGFISLTENFDTSTPLGKAMVGILSAFGQLDRDTIRERMMMGKIGRAKSGKPMMTSTIAFGYTYDKVTSSLNINPAEAIVVKTIYNEYLSGRSLTKLRDYLNENDLLRNGKPWNYQGVSRILRNPVYMGMVRFRGEVYQGNHDPIIDSETFEAVQKELKKRQLETYEFNKNTRPFRAKYMLSGIIKCGYCGSPMGVTLGTKRKDGTRNIRYQCVNRFPRNTKGITVYNNGQKCNSGFYEKDDIEIYVLGQVRLLQLNKAKLNKMFETPEIINVEEIENQINSLNNKMKRLNDLYLNDMISLDELKTQTYTFLKQKDLLENELNNNPAINQEENRKQFQKLLGTKDITQLSYEEQSFAIKNLIDKVFVKPGIIDINWRI

SEQ ID NO: 10770 - protein, 479 aa, Unknown
  Description of Unknown: Integrase B10771 sequence
  cd00338,PTHR30461:SF21,IPR011109,IPR038109,Coil, PF07508,PS51736,IPR036162,G3DSA:3.40.50.1390,IPR006119, PTHR30461,PS51737,PF00239,SM00857,G3DSA:1.10.10.2600, SSF53041
VHTALYSRVSQDATGERLAVQRQYDDCAVLADRLGWTIVEHFSDNDISAYDGSARPGFEAMLAAIKRGEVNAIICWQPDRLYRSLKDLERLVDATDRGVQIATVNGGDLDLSHSTGRMLARILGSVSRQESELKAERRRRANMQRAGLDGKGAARRPGRWRADQPRVFGYTQRGEPLEPEATAVRQAILDVLGGRSLRSIAAEWNERGLLTPRSAKRGGGRWSNLTLRRVLVRPVYAGLVVYQGKVVGRGEWQAIIDEDTHRGLVAYLSDEARRPATAFERRHMGSGVYQCGVCDGKLYATFPSAARPMLYSCKPHKHVARLAAPLDELVTEVVLGVLRRDDIASRLRPREGFDVVVMHARREALQSRMDELAAMFARGEIDASQLRSGTAEHRGRVGEIDRILAEQVRTSPTIVLLDGDPDDLENRWDALPPDMQGKVIDELATVIVKPTNGAKGVDRDGIVDLDFVDIIPKKLPGDA

SEQ ID NO: 10771 - protein, 479 aa, Unknown
  Description of Unknown: Integrase B10772 sequence
  IPR038109,PS00397,IPR006119,PS51737,PF00239, cd03768,G3DSA:3.40.50.1390,PTHR30461,IPR025827,SM00857, G3DSA:1.10.10.2600,SSF53041,IPR011109,PF07508,PS51736, IPR006118,PF13408,Coil,IPR036162,PTHR30461:SF3
MNKVAIYVRVSTKGQAEEGYSIDEQIALLTSYCSIHKWKIHDTYVDAGISGATIERPELSRLSRDAQKKKFNTMIVYDLKRLGRSQRNNISFIEDVLEKNGIGFISLTENFDTSTPLGKAMVGILSAFGQLDRDTIRERMMMGKIGRAKSGKPMMTSTIAFGYTYDKVTSSLNINPAEAIVVKTIYNEYLSGRSLTKLRDYLNENDLLRNGKPWNYQGVSRVLRNPVYMGMVRFRGEVYQGNHDPIIDSETFEAVQKELKKRQLETYEFNKNTRPFRAKYMLSGIIKCGYCGSPMGVTLGTKRKDGTRNIRYQCVNRFPRTTKGITVYNNGQKCNSGFYEKDDIEIYVLGQVRLLQLNKVKLNKMFETPEIINVEEIENQINSLNNKMKRLNDLYLNDMISLDELKTQTYTFLKQKDLLENELNNNPAIHQEENRKQFQKLLGTKDITQLSYEEQSFAIKNLIDKVFVKPGIIDINWRI

SEQ ID NO: 10772 - protein, 479 aa, Unknown
  Description of Unknown: Integrase B10773 sequence
  cd00338,PF13408,Coil,PS51736,IPR036162, IPR006119,PTHR30461,G3DSA:3.40.50.1390,PTHR30461:SF3,IPR025827, PF00239,SM00857,SSF53041
MYTVYKQLEEYRQERKQVRVAKYGRCSSDEQKKNGYTISDQLDLMEEFCQENELIGAGEYVDEGISATLEISKRKALAQLIKDAKAGKFDLVIFKCIDRFFRNVGEYYECQKQLRKAGVSWVSIEEPDLDPEDDDAAFKINIYLTMAEYEAKKTSKRIRFNNKMRIKNKQVIAGGQCFLFPWKVVGEKRCRHLERNMERAPELYDILDYFEKFQTKAGTLAWYNMKYAKDMSITSLTNLLTDTLLYGEYKGVPDYVEPFITKERFDRIGEILKRNARYSAKSPGVFLFSGLLKCRGCGRNLVGNYKKPGPTAKTSKGTYNYRCNKHRLEKTCSNNHAISERIIEKQLLDNLEMYITNEIIKVENVSEVAAPKTDHSKKIDGIKKEMDRLNMMFRKGRIEEEEYDRDYYALEKELKQLEALVEKPEERDLEGLKGLLETDYRTLYNELDKEHRKAFWRNIIKEFSMGEDRKVDPESIIFF

SEQ ID NO: 10773 - protein, 479 aa, Unknown
  Description of Unknown: Integrase B10774 sequence
  cd00338,IPR011109,PS00397,PF07508, IPR038109,Coil,PS51736,G3DSA:3.40.50.1390, PTHR30461,IPR006119,IPR036162,PTHR30461:SF3, PS51737,PF00239,SM00857,G3DSA:1.10.10.2600,IPR006118,SSF53041
MDDLKIAAAYIRVSTDDQTELSPDSQIKVVREFAKQKGYLIPKEYIFRDDGISGRKASKRPEFNHMIAVAKQTPSPFSAIMVWKFSRFARNQEEAIFYKGMLKKRGIDVISTSEPIIDGPFGSLIERIIEWFDEYYSINLSTEVKRGMTEKVSRGGAVSIPAFGYDIVDKKYQVNPINAPIVQRIFIKYLNGVGCRAIANELNDLGIKTTRGNNWENRTIEYILRNPVYIGKIRWNPKRRNRRNYDDKDIMIVDGIHQPIIDTDLFDKVQKKLDENKAKYRPYITDRQNGKDYMLKGLVKCSNCGATMSMSCNGLQCIKYTHGTCKVSHYIQLNKLNEVVINAIDDTLKSGDFQLKPKEQPHEEPQELNIDFMIEKENTKLRRIKEAYEEGVYNLAEFKQRKELIESKIHSLQKQNKPPEPKSDHLLAKKKLMSRRKEIISTLKSKSTPEVEKNALLCTFIDKIIFNRSLSSVELFFCF

SEQ ID NO: 10774 - protein, 479 aa, Unknown
  Description of Unknown: Integrase B10775 sequence
  cd00338,IPR011109,PS00397,IPR038109,Coil, PF07508,PS51736,IPR036162,IPR006119,G3DSA:3.40.50.1390, PTHR30461,PTHR30461:SF3,PS51737,PF00239,SM00857, G3DSA:1.10.10.2600,IPR006118,SSF53041
MKTAAAYIRVSTDDQTEYSPESQRKAVIAYAKQHDMIIPEEFIFTDEGISGRSVKRPAFQKMIGTAKLKPAPFDVILVWKFSRFARNREDSIVYKSMLRKQCGIDVISVSEQLSEDKTSVLIEALLEAMDEYYSINLAEEVVRGMTEKAHRGGVMGSQPFGYRAENGKILIDEEQAQIVRSIFADFNNGIPMRKIANALNDSGIRTKFGNLWDNRGIEYLLRNVAYLGKSHWTPEAVKSTHAEKLSEKTIITDSHEAIISEEEFAQAQERIAELKRTHIYKAHPQHGKPFMLKGLCRCSSCGATLVRSSDSGLQCHRYTTGKCTVSHYISFPNINRMVIEKLQEDFENPSFDISAFLKQQTAVKPDTKAQEAQLGKLRQQLKRIKEAYAAGVDTLEEYKENKIRIQNQINAVQETVQKIPVQTITAEELSAQLKTAIQSALIIADSDSSEELKNEVLRTLIQKIIFNRKTSQVVIFYQF

SEQ ID NO: 10775 - protein, 479 aa, Unknown
  Description of Unknown: Integrase B10776 sequence
  cd00338,PF13408,IPR011109,IPR038109,PF07508, Coil,PS51736,G3DSA:3.40.50.1390,PTHR30461,IPR036162, IPR006119,PTHR30461:SF3,IPR025827,PS51737,PF00239, SM00857,G3DSA:1.10.10.2600,SSF53041
MRGVIYARYSPGPHQTEQSIEGQVADCQQYAEEHGIDIIEIYADRHVSGKSVVGRDEFQRMLRDAEKGRFDCVLVWKIDRFGRDRQDIAMGKMALKRAGVKLMYARESVPEGPEGIILESVLEGLAEYYSADLRQKVIRGMKETAKKGQYCGQSLPIGYKVDAERHIVVDEREAAVVREAFKLHIAGGQIRDIVQLFADRGVMGRRGKPVSNAVVYRMLRNEKYLGEFYIQDVKLNVEPIIDQATFLEAARHFKTSRNNAAGRAKVNYLLSCKMFCGYCGSMISAEAGTGKLGKVYRYYKCGDKKRGKKCELKPFPKDHLEDAIILATVNDMLTDEMIEKLTVRILEVQEQENADDPVVGLRRRLDSNKKRQRNLLDAIEEGGARGLVSRLAALEEEEEQLVLEIQRAEIKRPRLTHEVVEAWLRSFRVGDVTDDDFRARLVDTFIARVELRNDEALIFYNIREKGPHSRVRVRPEWWS

SEQ ID NO: 10776 - protein, 479 aa, Unknown
  Description of Unknown: Integrase B10777 sequence
  cd00338,PF13408,IPR011109,IPR038109,PF07508, Coil,PS51736,IPR036162,IPR006119,G3DSA:3.40.50.1390, PTHR30461,IPR025827,PS51737,PF00239,SM00857, G3DSA:1.10.10.2600,SSF53041
MRGVIYARYSPGPHQTEQSIEGQVADCQQYAEEHGIDIIEIYADRHVSGKSVVGRDEFQRMLRDAEKGRFDCVLVWKIDRFGRDRQDIAMGKMTLKRAGVKLMYARESVPEGPEGIILESVLEGLAEYYSADLRQKVIRGMKETAKKGQYCGQPLPIGYKVDSQRHVVIDEREAAVVREAFKLHIAGAQLRDIVQLFADRGIMGRRGKPVSNAVVYRMLRNEKYLGEFYIQDVKLNVEPIIDQATFLEAAQHFKTSRNNAAGRAKVNYLLSCKMFCGYCGSMISAEAGTGKLGKVYRYYKCGDKKRGKKCELKPFPKDHLEDAIILATVNDMLTDEMIEKLTVRILEVQEQENADDPVVGLRRRLDSNKKRQRNLLDAIEEGGARGLVSRLAALEEEEEQLVLEIQRAEIKRPRLTHEVVEAWLRSFRVGDVTDDDFRVRLVDTFIARVELRNDEALIFYNIRKKGPHSRVRVRPEWWS

SEQ ID NO: 10777 - protein, 479 aa, Unknown
  Description of Unknown: Integrase B10778 sequence
  cd00338,PF13408,IPR011109,PS00397,IPR038109, Coil,PS51736,IPR036162,PTHR30461,G3DSA:3.40.50.1390, IPR006119,IPR025827,PS51737,PF00239,SM00857, G3DSA:1.10.10.2600,IPR006118,SSF53041
MRAVAYIRVSTEEQSGPGHVSLEVQEQRCRDYIASRGWTLIGVERDIESGLKPTRAGYQRVIELARAGSIDAVVVMQASRFGRKASEVLLRVEELRSLNVELVSTAEDLTSFLMLGIQAVLNEHETRVILSRTMPAKQQRTRDGYWLAKAPFGTVNVRGVLQPGPHFDLIRLAFQLAADGENVADITRRINEAIAPRTMHYGNVIKLLKNKAFVSVVQWGGITAPAQWDPLIDPELFNRANAAIRARYVQRRQLSRSYPYWILGLAFCARCGHRMHPKVHVTSWGPGVYPYLICGRVEMRGLERPCRGKYVSILDVQAWVLERVEQQTADAGDVARYIARIQERAEEQAAAEDERRRSLRAERSRLEARLQAAKSAHLDAPDTFTIADVRRIDAAVRDSVAAIDRELAVPVPSVRGEQEIRELRQFFEERAWLGLRDTDPQAFRALLQVYIERVDVRGPGAYELVWRDVFAEALTHSRS

SEQ ID NO: 10778 - protein, 479 aa, Unknown
  Description of Unknown: Integrase B10779 sequence
  cd00338,IPR011109,IPR038109,PF07508,Coil, PS51736,G3DSA:3.40.50.1390,IPR006119,IPR036162,PTHR30461, PTHR30461:SF3,PS51737,PF00239,SM00857,G3DSA:1.10.10.2600, SSF53041
MKKVAFYGRYSSAMQTEQSIEGQLHVCEQYAAANGLEIVRQYVDRATSGKTDNRPQFQQMISDSERGLFEGILVYKLDRFARNRYDSFIYKHKLKEQGIRVISATEPLSDTPEGIIFEALIEGMDEYYSAELGRKMKRGKKESVLKGRFIGKLPPFGYKVVNHRLAVDELTAPIAQDIFRRYASGEKQNQILTDLNRRGIHNAAGRPWNKVNMTMMFKNRIYIGIYSVSDYGEAECPAIIEKEVFDMVQKKKEESVHRARANKTDFDYILTGHMTCAQCGASVCGASMQKGKYHYYQCHKHCGCRLRAEELHERVKRALAEYLTEEKMQELAQGAYEVYLKEQTADERPLLEKELSGIEKQLQNAVQAILDGYASDALKDKMNALEVRRDELRALIEDAPAPLPKLTYEMFVAMLHLIVEKAAEKDDLTKLINTVVNRIIIDDQDVILCINLTDEDNEPPMEQIKFRVKDKSISSPVLR

SEQ ID NO: 10779 - protein, 479 aa, Unknown
  Description of Unknown: Integrase B10780 sequence
  cd00338,IPR011109,IPR038109,PF07508,PS00397, Coil,PS51736,G3DSA:3.40.50.1390,PTHR30461,IPR006119, IPR036162,PTHR30461:SF3,PS51737,PF00239,SM00857, G3DSA:1.10.10.2600,IPR006118,SSF53041
MKNAAAYLRVSTEKQDEYSLDSQLKLIRDYAARNDYIVPDEFVFVDDGISGRNAKKRPAFQNMIGWAKDKSHPFDAILVWKFSRFARNQEESIVYKSMLARSGVEVISISEPLAAGPFGSLIERILEWMDEFYSIRLSGEVKRGMSEKVSRGEVVTIPSFGYDIVNKNYQPNADADIVRRIYRDYLSGVGMGTIARQLGLDGVLTRRGNPPDNRWVEYILTNPVYIGKIRWTKDGKSNYQRGGDSSRSYLTDGHFEPIIPVPTWEEVQAMIAEKKAGRPKYARSEQNADWMLKGLCRCSACGSTLVYSSTACPTMQCHKYSRGQCQTSHALSIAKANRLVIAALEYAADNCLFSMDPSSLPAPALGPDYEKQIAVERTKLRRVQEAYEAEVYTLEEFRERKEKLSEGIRRLEEQAAASRAEAEAKAFDPLDYQKKVRNVLTLIQDPDQSEDAKNTALRSILSYIVYEKADRRLALYFYP

SEQ ID NO: 10780 - protein, 479 aa, Unknown
  Description of Unknown: Integrase B10781 sequence
  PS00397,IPR038109,IPR006119,PS51737,PF00239, cd03768,G3DSA:3.40.50.1390,PTHR30461,IPR025827,SM00857, G3DSA:1.10.10.2600,SSF53041,IPR011109,PF07508,PS51736, IPR006118,PF13408,Coil,IPR036162,PTHR30461:SF3
MKKVVLYVRVSTKEQAEEGYSVGAQLEKMRYYCKSKEWIITEEYVDGGFSGSNMDRPALEKLIRDASHHKMDMVLVYKLDRLSRSQKDTLYLIEEIFNANGVDFTSMQENFDTSTPLGMAMVGILSVFAQLERSQIAERMMMGKDARAKEGRYLGHETPPIGYDYDQIKGELIPIEYEALQVREIYRMFIEENMPILAIQKAMHEKYTNRYGDYGFDSTIRNILTNPVYTGRFMYKGEIYNSTHEPIIDDETFAKAGELLDLRKKKNDRRKSAPFKPTTLLAGLIWCGQCGARLGGDTQQHRYKDKKYSKRFYACYTRKKNPKMMTADSCDMRYIDRDELDAFVWDEILSLSLKVKNGEDVFEEPDHDEETKIIEKEIKSVDEKIMKLMDLYSVGSMPTDLLTSKIQKLNEDKQKLVDQITELETPNENINKNEILDHLRSAKEIKENGSLDDQRALIFALIDRITINQASIHIKYRFN

SEQ ID NO: 10781 - protein, 479 aa, Unknown
  Description of Unknown: Integrase B10782 sequence
  cd00338,IPR011109,PF07508,PS51736,G3DSA:3.40.50.1390, IPR006119,PTHR30461,IPR036162,PS51737,PF00239, SM00857,SSF53041
MPPRPAVNAGPVRAGIYCRISLADEGDYVKTDDQERICRELAERHGWEVGDGYGHPYPTGVYTDHKRSAWQRNRRRPAWDAMLADVDKGVINGIIVYHGDRLVRRGQDLARLLTLSESKGVRLASPSGTRDLDTERFELWIRAAVAEEESQRTSERRIAQYERWRRAGKVRPGGRGGRAFGFATDGTTHVEAECEVIREMARRVLAGETVGSVSRDVSARGHRTPAGNEFSHATVRKMLARPRYAGLMPDGEAKAAWEPVLDRATWERLCLVLEAKAAGFAYATNARKWLLSGIARCGRPLGDGECGAPMRLNPSKGKDGTRVNGYQCTRRGCSTYRSAELLDAYVSGRALGALNSGGTPQAHAPATPDAAPEWRALATERAATAALLADYGKSAGRAALLMERLDGIDARMGQLREREAGDARSRLLARYRGITREEFGALALDVRRSLVAALVSVTVLPASKRGPGFRVQDVRVEER

SEQ ID NO: 10782 - protein, 479 aa, Unknown
  Description of Unknown: Integrase B10783 sequence
  cd00338,IPR011109,IPR038109,PF07508, Coil,PS51736,IPR036162,IPR006119, PTHR30461,G3DSA:3.40.50.1390,PS51737,PF00239, SM00857,G3DSA:1.10.10.2600,SSF53041
MADHIETFKKIKKVAGFLRISTEKTDFEGKKTDAEETLKNHTETMTTFFAQWGIELVLYSEVLSGGSDFEDRKALQDILNDLKDENQNFDAMAIIELERLARDTYVSGIIKKALEESGAKLIVLEPFQVLDMNNSSDSLMFGLASVIAEHNRKIASNRVKLNKLAMARQGLNSSGSVPYGYVRNPQTKKLEIETIETVDEKGNKIKVESDKPKIVRQIFQWHVEGMGQRSICDKLNEMGILNKQGNKWVPQSLRYLLTCETYIGTLTAKSNQKIKGKLVPAEIVTMENNHPPIIDEDIWEKSQRLRNAKRDRSGVDQRSNDWNSKRNTSTLDGLIYCGCDSCNRKSTIKWYSSKNKFYIVKCTRFDAHGGKDCNNGGIAVGEVEQEIFQKILEYKQEVEKRISSFESNDFASRNTELQDTKEMLEKQMNQLKVNARSIRQQEIAYFQKRDETGIVDEFEEEMIAEDKQINHAKRMSVQQ

SEQ ID NO: 10783 - protein, 479 aa, Unknown
  Description of Unknown: Integrase B10784 sequence
  PS00397,IPR038109,IPR006119,PS51737,PF00239, cd03768,G3DSA:3.40.50.1390,PTHR30461,IPR025827,SM00857, G3DSA:1.10.10.2600,SSF53041,IPR011109,PF07508,PS51736, IPR006118,PF13408,Coil,IPR036162,PTHR30461:SF3
MNKVAIYVRVSTKGQAEEGYSIDEQIALLTSYCSIHKWKIHDTYVDAGISGATIERPELSRLSRDAQKKKFNTMIVYDLKRLGRSQRNNISFIEDVLEKNGIGFISLTENFDTSTPLGKAMVGILSAFGQLDRDTIRERMMMGKIGRAKSGKPMMTSTIAFGYTYDKVTSSLNINPAEAIVVKTIYNEYLSGRSLTKLRDYLNENDLLRNGKSWNYQGVSRVLRNPVYMGMVRFRGEVYQGNHDPIIDSETFEAVQKELKKRQLEAYEFNKNTRPFRAKYMLSGIIKCGYCGSPMGVTLGTKRKDGTRNIRYQCVNRFPRTTKGITVYNNGQKCNSGFYEKDDIEIYVLGQVRLLQLNKAKLNKMFETPEIINVEEIENQINSLNNKMKRLNDLYLNDMISLDELKTQTYTFLKQKDLLENELNNNPAINQEENRKQFQKLLGTKDITQLSYEEQSFAIKNLIDKVFVKPGIIDINWRI

SEQ ID NO: 10784 - protein, 478 aa, Unknown
  Description of Unknown: Integrase B10785 sequence
  IPR038109,PS00397,IPR006119,PS51737,PF00239, cd03768,G3DSA:3.40.50.1390,PTHR30461,IPR025827,SM00857, G3DSA:1.10.10.2600,IPR013809,SSF53041,IPR011109,PF07508, PS51736,IPR006118,PF13408,Coil,PS50942,IPR036162,PTHR30461:SF3
MNKVALYVRVSTTSQLEEGYSIDGQKAKLESYCDIKDWNVYKIYTDGGFSGSTTDRPALEQLVQDAQSKLFDTVLVYKLDRLSRSQKDTLYLIEDVFLKNNIEFVSLLENFDTSTPFGRAVIGLLSVFAQLEREQIKERMQLGKLGRAKSGKSMMWAKTSYGYDYDKETGSMTVNEFEALAVKEIYASYLSGISITKLRDKMNAEYPKKPAWSYRTIRGILANPVYCGLNQYKGQTFQGSHKAIISLDDFEETQRELKKRQQTAQERLNPRPFQAKYMLSGIVQCGYCHAPLKVVLGQKRKDGTRTKRYECYQRHPRTTRGVTVYNDNKKCESGYYYMDVLEHYVLTRIAMLQNDPDKIHELFLDSTSQTVDKQAIQKQIDGLTLKLSKLNDLYLDDRITLDELRNKSSDFIKQRATLEEEIKKATSDKQVSKRKKIEKLLDASSVFDMSYDDQKVIVRELIDKVQVTSDKIVINWKI

SEQ ID NO: 10785 - protein, 478 aa, Unknown
  Description of Unknown: Integrase B10786 sequence
  cd00338,IPR011109,PF07508,Coil,PS51736, G3DSA:3.40.50.1390,IPR036162,IPR006119,PTHR30461,mobidb-lite, PS51737,PF00239,SM00857,SSF53041
MDTPKSAGVYCRLSYSPDGSLEKVERQEADCRALGGRLGWGIREVYSDNSRSAWKRDRKRPQWDRMLADIKAGLLDGILVYHGDRLIRQPWDLELLLSLADDKALPLASPSGTRDLNREDDRFILRIEAAAACRSSADTSRRVKRDNDARAIAGRPSGGGNRPFGYGLPTGKNGVTGKPLHDLTQQVPEEAAVGREAVERLLAGQSQGGVIAWLNTVSTTTNGNRWKPPAFRAWLKTPRLAGLIEHKGSLMPGAWEPIVTREQWEDVQALLKASSELHGEQGRVRVHLLSGIAECSSCGGKLRTKPVTGKSPNARQYFCAAPECPHRVSRNIIHLDAYVTGRVLRRLNDPAFIAALHANDDQPGVGAEIISLERRKAEAKKVLEELADHPDIDPALQAKSLMGFDRKIAQLRDHLTTTTRQRLLARLAGVTLEQWDAEPVDVRAETARSLFRVVVLPATRRGPGFDPASVRVERVEVT

SEQ ID NO: 10786 - protein, 478 aa, Unknown
  Description of Unknown: Integrase B10787 sequence
  IPR038109,PS00397,IPR006119,PS51737, PF00239,G3DSA:3.40.50.1390,PTHR30461,IPR025827, SM00857,G3DSA:1.10.10.2600,SSF53041,IPR011109,PF07508,PS51736 ,IPR006118,cd00338,PF13408,Coil,IPR036162,PTHR30461:SF3
MKTAAAYIRVSTEDQTEFSPDSQLKAIRKYAKEHDLILPDEFIFADEGISGRKTDKRVQFQRMIGTAKLKPKPFDVILLWKFSRFARNREDSIVYKSMLRKQCGIDVVSISEQLSEDKTSVLIEALIEAMDEYYSLNLAEEVRRGMNEKFSRGGVVSQPPFGYRMQDGIFFPDETAAPIVQMIFNDYLAGMPTKRIALKLNDMGIRTRHGNPWENRTVEYLLTNPVYIGKLRRSKDGDRSDRFHEQDECIDGQHQPIITPAIYDAVQAKRADTKKNYRKYARQGQPVQFMLKGLVRCDHCGATLVMCQSGASKFLQCNNYNRGKCKVSHAISVTKINPVVLEKIRADLDDQNLRLKLEAQCAPKSPDAASRLPAAIEREEKKLLRIREAFEAGIDTLEEYRENKQRITERIAVLRQTLAEEQPPQIDTAAFIGKVRSGLRILEDAGASEIIKNDVLHTFVEKIIFMKPSGRIEIVYHL

SEQ ID NO: 10787 - protein, 478 aa, Unknown
  Description of Unknown: Integrase B10788 sequence
  PS00397,IPR038109,IPR006119,PS51737,PF00239,G3DSA:3.40.50.1390 ,PTHR30461,IPR025827,SM00857,G3DSA:1.10.10.2600, SSF53041,IPR011109,PF07508,PS51736,IPR006118, cd00338,PF13408,Coil,IPR036162,PTHR30461:SF3
MKTAAAYIRVSTEDQTEFSPDSQLKAIRKYAKEHDLILPDEFIFADEGISGRKTDKRVQFQRMIGTAKLKPKPFDVILLWKFSRFARNREDSIVYKSMLRKQCGIDVVSISEQLSEDKTSVLIEALIEAMDEYYSLNLAEEVRRGMNEKFSRGGVVSQPPFGYRMQDGIFFPDETAAPIVQMIFNDYLAGMPTKRIALKLNDMGIRTRHGNPWENRTVEYLLTNPVYIGKLRRSKDGDRSDRFHEQDECIDGQHQPIIMQDVFEAAQAKRADTKKNYRKYARQGQPVQFMLKGLVRCDHCGATLVMCQSGASKFLQCNNYNRGKCKVSHAISITKINPVVLEKIRADLDDQNLRLKLEAQCAPKSPDAASRLPAAIEREEKKLLRIREAFEAGIDTLEEYRENKQRITERIAVLRQTLAEEQPPQIDTAAFIGKVRSGLRILEDAGASEIIKNDVLHTFVEKIIFMKPSGRIEIVYHL

SEQ ID NO: 10788 - protein, 478 aa, Unknown; identical to SEQ ID NO: 9818
  Description of Unknown: Integrase B10789 sequence
  cd00338,IPR011109,IPR038109,PF07508,Coil, PS51736,G3DSA:3.40.50.1390,IPR006119,IPR036162,PTHR30461, PS51737,PF00239,SM00857,G3DSA:1.10.10.2600,SSF53041

SEQ ID NO: 10789 - protein, 478 aa, Unknown
  Description of Unknown: Integrase B10790 sequence
  IPR038109,PS00397,IPR006119,PS51737, PF00239,cd03768,G3DSA:3.40.50.1390,PTHR30461, IPR025827,SM00857,G3DSA:1.10.10.2600,SSF53041,IPR011109 ,PF07508,PS51736,IPR006118,PF13408,Coil,IPR036162,PTHR30461:SF3
MNSEKRVFLYVRVSTQEQAKEGYSIDEQIDRLKKYSEAHGWIIVKKYVDAGYSGGNTNRPSLQDMIESIRRGMADIVLVYKLDRLSRSQKDTLELIEDVFLANNCDFVSMNENFDTSTPFGRAMIGILAVFAQLEREQIKERMSMGREGRAKEGKYIGGGLAPIGYDYIDGELVINEFEAMQIRDLFDMYLTGASFKKIEQTFADKGYYHKYGKWTAKRMSGIIQSRLYIGDVKFARNTYKGNHQAIIDDETFRKANEIKSMRSDMYSRGGGKKKGGQLSLLGGMIYCKNCGAKYGYSYSEWKGKRYNYYSCYSRRRQNLSMIKDPTCKNKTYRQDDLDQIIFDEIRKLSTDPEYIAEIRDENLTPDDRDRERIIKKEIESIDTQRSRFLDLYGLGKYSMEELQKKTDPLDDRKMKLERELQSLRKSEMAVEEATDIISSFGDILDRGSFDEIRLTIETLIDRIIIDGDDIIIKWKFA

SEQ ID NO: 10790 - protein, 478 aa, Unknown
  Description of Unknown: Integrase B10791 sequence
  cd00338,IPR011109,IPR038109,PF07508,Coil, IPR036162,PTHR30461,IPR006119,G3DSA:3.40.50.1390,mobidb-lite, PS51737,PF00239,SM00857,G3DSA:1.10.10.2600,SSF53041
MPTQPPEQPLRAFIYNRASRDPKRRGRSTKDQSAENHAECEDQGWTVVGEFTDDNRSASRHARRTRDQFEAMAVRIRAGECDVLVTWESSRANRTMDGYVELRKLIEESGVLWRYGGHTFDMNDRRDRREATRDAAQAEDEAEQIRERNLRTVRLNAAKGRPHGRIPFGYMREYDPHTGELVAQRLHPTEGPDLETAYKRYAAGESAPPIAAWLNERGHTTRTGKDWDGDALLKVFRSQTNIGKRIHQGKVIRNADWPELIDPATFWAVQAMLSTPGRNDGAGRPLSHLLSGIAVCGVCGRADLYILKNRGRSTYVCRPRAHVAILETRLDAYVESALVSWLSSPAAVEAFKPADPGSSVSAILAEVDELNAELQEARLLAASRKLSAVSLAAVESGILPQIERLQDRVQRAMVPPVLRGLLGAPDADARWNALVLERRRMVLRACVAVTVSPGRRGVRRIEPGRVDLRFGPQVPDVL

SEQ ID NO: 10791 - protein, 478 aa, Unknown
  Description of Unknown: Integrase B10792 sequence
  cd00338,IPR011109,IPR038109,PS00397, PF07508,Coil,PS51736,IPR036162, IPR006119,G3DSA:3.40.50.1390,PTHR30461,PTHR30461:SF3, PS51737,PF00239,SM00857,G3DSA:1.10.10.2600,IPR006118,SSF53041
MKTAAAYIRVSTDDQIEYSPDSQLKAIRKYAKEHDLILPEEFIFVDEGISGRKADKRPSFQRMIGTAKLKPKPFDTILLWKFSRFARNRQDSIVYKSMLRKQCGIDVVSISEQLGEDNTSILIEALIEAMDEYYSLNLAEEVKRGMNEKFSRGGVVSQPPFGYKMKDGIFAPDEVNAPIVQMIYSDYLSGMGTREIALKLNDMGLRSAKGNLFENRTVEYILTNVTYTGKLRRSRNGRDNLDRFHESENTLIVDGKHEAIISQEIFQAVQKKRSEHKKTYTRYSRQAPVEFMLKGIVRCDTCGATLTMCAGKTSLQCYNYAHGTCKVSHSVTLKKLNAAVIEHLKSDFEQQSFAIDVIAAEPERKTSAPDLSALIEREKKKLSRIREAYMAGIDSLEEYQENKKNIQERINELTAAAPPAPMSEEEIKAAISGRITAGLQILEDEDTSETLKNLTLRSIADRITFIKPKGIIEIFYKI

SEQ ID NO: 10792 - protein, 478 aa, Unknown
  Description of Unknown: Integrase B10793 sequence
  cd00338,PF13408,IPR011109,IPR038109,PF07508, Coil,PS51736,G3DSA:3.40.50.1390,IPR006119,IPR036162, PTHR30461,PTHR30461:SF3,IPR025827,PS51737,PF00239, SM00857,G3DSA:1.10.10.2600,SSF53041
MNVAIYTRVSTQQQAEHGYSIEEQENACRKKALELGATSIKVYRDSGFSGAYLERPALDDLRDAVAQKLHDLIVIYDIDRLSRDTMHLLLLTEEMEKNAQLVYVNSEYSRTPEGQLFFEIRGSFAKYERVKIQDRFQRGKRGKLRKGLPISDHHIFGFDWNGENYIVNPVTADIVRSIFDRYANHIGGIQSVADWLNGKGIPSPQGKVWSSTAVNRLLRQEMYTGEYFSYKMYHKKVSARKFTQIPRDSSEWIPMQCPSVISRELFDRAQNKLHRNKTQKIHETNHIALFSGVLYCADCGRKMLPTWNSKKSYRYYQCFSRVQKTPCKNHVVGVDVLDAMVWEIIQKTCRNETMLKRYIAQKQPKPKDDSDAIKKQLAGIETKRQAIMSWFSANLISDEESTQKLQALKKQEQNLTERLQTKKEDIPTDQIVKDVRHRITPEDKRQFVLDHISKVIVLRKDFVNRYDVDLDVTIIFGS

SEQ ID NO: 10793 - protein, 478 aa, Unknown
  Description of Unknown: Integrase B10794 sequence
  cd00338,PF13408,IPR011109,IPR038109,Coil, PS51736,G3DSA:3.40.50.1390,IPR036162,IPR006119,PTHR30461, IPR025827,PS51737,PF00239,SM00857,G3DSA:1.10.10.2600, SSF53041
VKPWAGYIRVSHVGGRTGDRFRSPTDQAQAIKDWARRRGEPVILLPPELDESGGRADRPILTDAVRRIEAGEYRGLVVAYLSRAGRSVRHMLELWDRIERAGGEIHAVAENIDTTTPAGRLTRTMLAAIAEHELDLHRERFEALRAEATKAGIWQRRQTPRGYRRDPRTRRLVPDRDAPLVRRAYAARLAGASWSELARMLGMTAAGAQRLIANRVYLGELRVGRHINPRAHPPLVDAEIWHAAQRTTVARPPRSGRLALLAGLVRCAGCGHMMSRSDQKRAVVYACHGWHSAGRCPAPASITMRRLDEHVEPIALAALARLQASSTHDDRALKQARAALREAEAELAAYLEAVSAADIGPEAFAAGAKLRRQRVDTARARLARLIAAAPAGAVSGDIIERWPTLTVEQRNHLLRHLIEAVLVRKAGRGVLLPPAQRVRIVAHGVGLVRPYKGGGGPMPIQPIWIDDPDDPRTLRMQG

SEQ ID NO: 10794 - protein, 477 aa, Unknown
  Description of Unknown: Integrase B10795 sequence
  cd00338,Coil,PS51736,G3DSA:3.40.50.1390,IPR006119, IPR036162,PTHR30461,PF00239,SM00857,SSF53041
MFESYGNEIKQAIKYTRVSTNQQDDKGSKEIQDLKINEFAIKNNFDIVASFSDTDHGDNPLRPGINSLKDYLRINREVKYVICLYADRFTRSFREAMENLYFLEDLGVTLVTLNEGIIKIDGSFQSIASMVHFMGAQEEKKKIVKKTKDSMYNYAITSNRFLGGSVLPWFKVVRGNLNGVRCSLIVKNEETWDFYKKVFIDVIKFSSVKKSSETNNIPYPTLREWLHKPEIAGYRTFGKRGRNENNYKKGRRKTYQISEEKLLPALLDDDEMEKIRNIYANSFSYYQKKSYPYLFTKLAHCVCGGKYYGNHFISRGSSYNYYKCEKCNKRYLAKKLEKIIIENLMNDDSLKMLNDYDFRISDLLDEITKLEQQKSIEQKKENDILNLITEDLISMDTAKEKLKGLKDVIRNIQKEISKIEEDIEREKNKEITSDMLESFRYLLLNYDEDTLEELQQILNLIIKKIIIHSYNEIEIVY

SEQ ID NO: 10795 - protein, 477 aa, Unknown
  Description of Unknown: Integrase B10796 sequence
  IPR038109,PS00397,IPR006119,PS51737,PF00239,G3DSA:3.40.50.1390, PTHR30461,IPR025827,SM00857,G3DSA:1.10.10.2600,SSF53041, IPR011109,PF07508,PS51736,IPR006118,cd00338,PF13408,Coil, IPR036162,PTHR30461:SF3
MMNRNKVAIYVRVSTQGQVDEGYSLDEQVDLLTNYCKLKAWTLYDVYVDPGISGKNMHRPEIERLTRDAKHKLFDIVLIYDLKRLGRSQKENIVLVEDVFNKNGIRLVSFTENFDASTPVGKMVFGMLSAYAELDRANIAERMMMGKIGRAKAGKAMSWGMPPFAYDYNKETGNLELDEAKAPIVEMIFSDYLKGASVNQIVQKLNSMDYNGKDHEWKHHAVTVILENPSYCGMTRYIDQIYEANHKPIIDKVTFDLVQIERKKRLSKYHDNDLVGPFQRKYIGSKFCYCGLCGANLKSEKDKRNKHTGIRPISFYCPNTRSRGTNDCTNKRFRQDILEGYILKEVAKLQQQPEKLRVIKPKKDAENESKLDNYKNKIQQNTSKLSKLNELYINDLMPIDELKKRSKTLYDENEFLEKQIEQLSSTTREDELRNKIDTFLAFPDILTADYETQKQAIEIVVSRVEVTKNGIDIFFNF

SEQ ID NO: 10796 - protein, 477 aa, Unknown
  Description of Unknown: Integrase B10797 sequence
  IPR038109,PS00397,IPR006119,PS51737,PF00239, cd03768,G3DSA:3.40.50.1390,PTHR30461,IPR025827,SM00857, G3DSA:1.10.10.2600,SSF53041,IPR011109,PF07508,PS51736, IPR006118,PF13408,Coil,IPR036162,PTHR30461:SF3
MNKVALYVRVSTTSQLEEGYSIDEQKDKLISYCDIKDWNIYEIYTDGGFSGSNTERPALEQLIRDAERKKFDTVLVYKLDRLSRSQKDTLYLIEDIFLKNNIEFVSLLENFDTSTPFGRAVIGLLSVFAQLEREQIKERMQLGKLGRAKSGKSMMWAKTSYGYDYQKETGSLTINPAQSLVVKYIFERYLAGRSITKLRDDLNEKYPKEISWNYRVVRGILSNPVYCGYNQYKGQLFPGEHEPIISEDEYKRTQEELKIRQMAAAEKTNPRPFQAKYMLSGLAQCGYCHAPLKLIMGGIRKDGTRFIRYECYQRHPRKTAGVTVYNNNQKCHSGAYEKDDLEKYIITEISKLQHDQNYIEQLFSTKSSTIDRDSYQKQIEDLTKKISRLNDLYIDDRITLDELQKRSSEFMTMRTALEEELKNDPEIQGQERRNNIKQVLDCEDIASIDYDGQKAIVRALIEKVQVTSERVVINWRI

SEQ ID NO: 10797 - protein, 477 aa, Unknown
  Description of Unknown: Integrase B10798 sequence
  PF13408,IPR011109,IPR038109,PF07508,Coil, PS51736,G3DSA:3.40.50.1390,IPR006119,IPR036162,PTHR30461, PTHR30461:SF3,PS51737,IPR025827,PF00239,cd03768, G3DSA:1.10.10.2600,SSF53041
VLVFKLSRFGRNAADVLNSLQLMQDFGVNLICVEDGIDSSKDAGKLMISVLSAVAEIERENIRTQTMAGREQKAREGKWNGGFAPYGYKLENGNLVIAEDEVEVIRVIYDRYIHTNEGVAGVAKYLNRNGFIKKLRQNNTIPGFSRNFVQDVLDNPVYMGKIAYGRRRTEKKQGTRNEMHVVEQSEFPVYDGQHEAIISEEDWYLAQEKRKINSFKREKVNNPDHAHILSGILKCPCCGKSMYGNIAKAHSKDKKTRYYYYCKNTVTPTGHECSFRLNIEQAEINKFVAKVISAMVNNPRFVEAIQAKIGTAVDTEDMEKQIDVLQGQLKQAFGTKSRLERQMDTLDINDAHYDRKILDLQRRYDEQYDTIEEIEVQISELQSRIRSIQQEKISGDNIYRLLLAFDEVYHSATEAEQKEFMKAFIERIEMFPEKRKDGSWIRKIVFNFPVPVDGEEVKELPLETETTVETVCLLSRK

SEQ ID NO: 10798 - protein, 477 aa, Unknown
  Description of Unknown: Integrase B10799 sequence
  IPR038109,PS00397,IPR006119,PS51737,PF00239,G3DSA:3.40.50.1390 ,PTHR30461,IPR025827,SM00857,G3DSA:1.10.10.2600, SSF53041,IPR011109,PF07508,PS51736,IPR006118, cd00338,PF13408,IPR036162,PTHR30461:SF3
MLKKRVFVYVRVSTAHQAEEGYSIPQQIERLQKYCDAMGWQLVKIYTDDGYSGGSLDRPAMNQMIQEIEAGHADIVLVDKLDRLSRSQFDTLYMIQKVFDANGVAFVSRNEAFDTSTPFGKAMVGILAVFAELERSRIKERMMDGQEGRAKEGKFRGGGFIPTGYDYNLDKGILEINDYEAMQVREVFELFNNRMPIFTIMTTLNDKGYRTKYGEWKEQTIRGMLSRRIYIGEIVHKGKIYEGQHEAIITREVFDKAQKIIAEREKANENRKIGKAYKSPLGGMIYCGHCGSRYHFRSGANNKDGSRRNYYTCYSRSKGDKKYIKDPNCKNKNYRDNILDEIVFNEIRKLKSEPTYIPAIQDSVDNSHRIGMIEDRIKQIDGQISRFMDLYSVGGMDLDAIGGKIKPLNDEKKSLEQELESIEVPEAPISKEEIISLVDAFEEVLIEGDCQKIHGAVSTLIEKVEIDGEDIRIHWAF

SEQ ID NO: 10799 - protein, 477 aa, Unknown
  Description of Unknown: Integrase B10800 sequence
  cd00338,IPR011109,IPR038109,PF07508,Coil, PS51736,IPR036162,PTHR30461,IPR006119,G3DSA:3.40.50.1390, PS51737,PF00239,SM00857,G3DSA:1.10.10.2600,SSF53041
MRNLRPVADTPPRAIIYLRQSTYREESISLDLQERACRDYAERCGYDVISVLADPGISGRTWSKRPKVQAVMTEIEEGRADVILLWKWSRLSRSRKDWAVAADRVDVAGGRIESATEPIDTATASGRFARGVMTEYAAFQSEQMGEVWEDVRQRRLSLGLPASGRLPFGWVWAGGGKIEPHPERAPHVVEMFQRYLSGSGYAEIAKWLNDNGVPGPLGNAWTRTRPKTVMDSPIHVGLIPYRGATYPGAHEGIIDSETWNAYLAERSRRTTRGEKQRRAEYMLSHLMRCACGERMSGKGAITGGKWYGGYICAHRSTHPHDGRAYVSALAIEPAITTWLMGFDIDDSDAEGDDPLAAVSSRRDRLVRQLAQLEDEAVQILRARTRGDAPASTYDRALALISDERQKLDDDLRKVDENLRRRPDALVVHEIRRDWQLWPVTEQNRALRRLVARIELRPDGRSADVYPSWGGLPSRVSW

SEQ ID NO: 10800 - protein, 477 aa, Unknown
  Description of Unknown: Integrase B10801 sequence
  IPR038109,PS00397,IPR006119,PS51737, PF00239,cd03768,G3DSA:3.40.50.1390,PTHR30461, IPR025827,SM00857,G3DSA:1.10.10.2600,SSF53041,IPR011109 ,PF07508,PS51736,IPR006118,PF13408,Coil,IPR036162,PTHR30461:SF3
MIKTGLYVRVSTHEQAKEGYSIGEQIDRLTKYAEAHGWLIIKVYNDAGYSGSNMDRPALQEMIEDVKAGRIDKVVVYKLDRLSRSQKDTLNIIEDVLLANSCDFESMSEKFDTATPFGKAMVGILAVFAQLEREQIKERMALGIEARIKEGKWRSGCSRPYGYDYDAENGKLVINEYEAMIVKKIFDEFLAGKSVYTIYTEFKNVGYVVRNGKIDTRNIKYILRNKTYCGYQKHNDDWIKCNHEAIISEDSYNQAQEILDEKKRKSDESGHRNESSTLLGGIIFCARCGARYGKYKTGSPQYGFHLNYCCYSRSKRSGTMVMDPNCKNKIYRIEELDNIILNEIRKLAMDPDYINSIKDPEPEDSTATIATLQKQIDSLSHQTSRLMDLYSLGTFSIEELEAKIKPLQEQRTKLKEQVESLQSTRHTMTNDQVIHLIQSFDEVLDKGTMADKRIIIDQLIDRIDIDGDDVIIHWNFA

SEQ ID NO: 10801 - protein, 477 aa, Unknown
  Description of Unknown: Integrase B10802 sequence
  IPR038109,PS00397,IPR006119,PS51737,PF00239, cd03768,G3DSA:3.40.50.1390,PTHR30461,IPR025827,SM00857, G3DSA:1.10.10.2600,SSF53041,IPR011109,PF07508,PS51736, IPR006118,PF13408,Coil,IPR036162,PTHR30461:SF3
MIKTGLYVRVSTQEQAKEGYSIGEQIDRLTKYAEAHGWLIVKTYTDAGFSGSNMDRPALQEMIEDVKAGRIDKVVVYKLDRLSRSQKDTLNIIEDVLLANSCDFESMSEKFDTATPFGKAMVGILAVFAQLEREQIKERMALGIEARIKEGKWRSGCSRPYGYDYDAENGKLVINEYEAMIVKKIFDEFLAGKSVYTIYTEFKNVGYVVRNGKIDTRNIKYILRNKTYCGYQKHNDDWIKCNHEAIISEDSYNQAQEILDEKKRKSDESGHRNESSTLLGGIIFCARCGARYGKYKTGSPQYGFHLNYCCYSRSKRSGTMVMDPNCKNKIYRIEELDNIILNEIRKLAMDPDYINSIKDPEPEDSTATIATLQKQIDSLSHQTSRLMDLYSLGTFSIEELEAKIKPLQEQRTKLKEQVESLQSTRRTMTNDQVIHLIQSFDEALEKGTMADRRIIIDQLIDRIDIDGDDVIIHWNFA

SEQ ID NO: 10802 - protein, 477 aa, Unknown; identical to SEQ ID NO: 10767
  Description of Unknown: Integrase B10803 sequence
  cd00338,PF13408,IPR011109,IPR038109,PF07508, Coil,PS51736,G3DSA:3.40.50.1390,IPR006119,PTHR30461, IPR036162,PTHR30461:SF3,IPR025827,PS51737,PF00239, SM00857,G3DSA:1.10.10.2600,SSF53041

SEQ ID NO: 10803 - protein, 477 aa, Unknown
  Description of Unknown: Integrase B10804 sequence
  cd00338,PF13408,IPR011109,IPR038109,PF07508, IPR036162,IPR006119,PTHR30461,G3DSA:3.40.50.1390,PTHR30461:SF3, PS51737,IPR025827,PF00239,SM00857,G3DSA:1.10.10.2600, SSF53041
MRAVIVAAVSTGAQASEERYSIPQQLDLCRGMCAQRAWQVVGEITIAGHSRAYNWLDELCADCAEYGNLLRTIRADATDLVVCRDYDRLWRTDALRAQLMAVCREHRVQIYALNQPVEPVDPALLAHSSDSSLIITAVSGVVSQLENESRKRRTMAGLRGRVARGLPPGAAKPRYGYARVDKHLVVNEAEARWVRWIHERYAEGQGAPALTFALNDMGIPGPTGGRWHRDTVRHIIAHPVYAGMVRYGDILTKGQHEAIVSPELWQRCHDAQQRRHVPQMRNPAYILSGLVRCGYCGGALTYATPHHGIAILRCATYAHWGGRQCQVNSIRAVELEGYVLYQVKAALDNPLAFAEAQRVDKRVDESAELATYQAAYVANADKWARWDRLYEAGGIDANELLTHRAEIQAAQQALQARITAIESIAQREASRHNRLVELASTLDTLDTLPPERLSQLYRLLIARVIVHRAYPPCIEWL

SEQ ID NO: 10804 - protein, 476 aa, Unknown
  Description of Unknown: Integrase B10805 sequence
  cd00338,PF13408,PS00397,Coil,PS51736, IPR036162,IPR006119,G3DSA:3.40.50.1390,PTHR30461,PTHR30461:SF3, IPR025827,PF00239,SM00857,IPR006118,SSF53041
MSPKNKKIERIACYIRVSSQEQKLHGLSLDAQRDTLTRYAEAHGLNIIEWYEDEGVSGRKLIRRRPALQRMLNDAKAGKFDRIIFIKLDRYFRSVAEYYECQKILEANKVTWTATEEKYDLTTANGRYWVTQKLAMAEYEADQTGERIDLVNEYKVRTGQPLAGAQNQGLAFTVGRDEQTGLKNVIPDPETKDMITDYINYFLVHQSVAGSVAYINNKYGTTYEYARLRKVLTDTKLWGHYRGNDFYCKGYVDKATFDKIQTILKGNVRKRSSNRVYLFSGLMYCPCCGRKLTGITSVNRKTVKPNGKVYIHTNPIYQYRCNKFKMSKTCTFNKYPNEERMEKALLNNLNRYINNHITHVKITANTNTHTDGVKNSIANLQAEMNRLNTMFRKGRVKEEEYDREYEALERQLAELQASLTPVEERDVTVYEELLAKDDWKELYNALNRENKRAFWRKYIKAIKLDTEGKIDEIIFF

SEQ ID NO: 10805 - protein, 476 aa, Unknown
  Description of Unknown: Integrase B10806 sequence
  cd00338,PF13408,IPR011109,PS00397, Coil,PS51736,G3DSA:3.40.50.1390,IPR036162, PTHR30461,IPR006119,IPR025827,PS51737, PF00239,SM00857,IPR006118,SSF53041
MSPVNKKYQRIACYIRVSSQEQKLHGLSLASQRDILQRYAEKHGLKIVEWYEDEGVSGRKLIRRRPALQRMLNDAKAGKFDRIIFIKLDRYFRSVAEYYECQKILEANKVTWTATEEKYDLTTANGRYWVTQKLAMAEYEADQTGERISLVNEYKIRTGQPLTGAQSLGLAFTVGRDEVTGLKNVIPDPETKELVTDLIKHFLVHQSVSGTVSYINNKYGTKYEYQTVKRVLTDTKLWGHYRGNDFYCTGYVDKATFDKIQKILKGNVKKRKTNRVYLFSGLFTCPSCGRKLTGVCSVNRVNKKASGKVYVYSDPIYQYRCNKSKMSKLCTFNKYPSEEKMEKALLNNLNRFINNHITHIKVTANTNTHTDGVKTAIVNLHAEMSRLNTMYRKGRVKEEEYDRDYEELERQLGELQDSLTPVEERDLTIYEELLEKDDWKELYNALNRENKRAFWRKYIKAIKLGTDGKLDEIIFF

SEQ ID NO: 10806 - protein, 476 aa, Unknown
  Description of Unknown: Integrase B10807 sequence
  cd00338,PF13408,IPR011109,PS00397,Coil, PS51736,IPR036162,G3DSA:3.40.50.1390,IPR006119,PTHR30461, PTHR30461:SF3,IPR025827,PS51737,PF00239,SM00857, IPR006118,SSF53041
MSPVNKKIERIACYIRVSTQEQKLHGLSLDAQRDALRRYAEAHGLNIIEWYEDEGISGRKLIRRRPALQRMLNDAKAGKFDRIIFIKLDRYFRSVAEYYECQKILEANKVTWTATEEKYDLTTANGRYWVTQKLAMAEYEADQTGERIRLVNEYKVRTGQPLTGAQAFTIAFAVGKDEETGLKNVIPNPETKELVTDFINHFLTHHSLSSSTEYINTKYGTKYEYGQLKKVLIDTKLYGHYRGNDFYCTGYVDKATWDKIQEIARGNVKKRKTNRIYLFTGLLQCPCCGRKLTGICSANRKTVKPNGKVYISPNTIYQYRCNKAKMSKLCSFKKYPNEERMEKALLSNLNRFINNHITHVKITANTNTHTDGVKNSIANIQAEMNRLNTMFRKGRVKEEEYDKDYEALEKQLAELQESLTPVEERDVTVYEELLAKDDWKELYNALNKENKRAFWRKYIKTIKLDTEGKIEEIIFF

SEQ ID NO: 10807 - protein, 476 aa, Unknown
  Description of Unknown: Integrase B10808 sequence
  cd00338,IPR011109,IPR038109,PF07508,PS51736, IPR036162,IPR006119,PTHR30461,G3DSA:3.40.50.1390,PS51737, PF00239,SM00857,G3DSA:1.10.10.2600,SSF53041
VKRAAIYARYSSHNQRDVSIDIQVENCRAYCKERGWQVVGEYCDHAVSGRTSERARFRKMMDDAEKGLFDVVVIWKVTRIMRNRDEMALVRLSLKAAGVDIAYAGESFPDGSSGLLMLGMLEVLAEWESVQTAERIQAGIRKNAEGLKASGVRLIGYTVDDSDNFVIDEETAPAVRLAFRMAADGETVAAIVRALAGYRSKWGRPISQQSVTNMLRNRRYMGEYSYAGVVKEDGMPAIIDRDTFDKVQRVLDSRNPKPRDRGHRYVLVGRLFDPDGQPMTGTSATGRNGKRHYYYRTKAGKRVRCDVVERCVADAVAAALADTATRERIADLFGEYQDANEVDASETSEAREMRQIDAKIARIETAIEDGLPFDRDRLLALHDRRAELEKMRADSSPRKYGRGEVLGLLEKAAQMDSERAIDVFVAAVVHGDDRTAVHFSFDDAPPERLAQVVNWWRRWEDKPTVHPVPGGFVMVA

SEQ ID NO: 10808 - protein, 476 aa, Unknown
  Description of Unknown: Integrase B10809 sequence
  PS00397,IPR038109,IPR006119,PS51737, PF00239,G3DSA:3.40.50.1390,PTHR30461,IPR025827, SM00857,G3DSA:1.10.10.2600,SSF53041,IPR011109,PF07508,PS51736 ,IPR006118,cd00338,PF13408,Coil,IPR036162,PTHR30461:SF3
MNVAIYARVSTEQQAEKGYSIVTQIEACQKKAMEMGADTIKVYKDDGYSGAYLERPALDSLRDALAAGLHDVVIVYDTDRLARDTMILLLITEEIEKHARLVFVNAEYSRTPEGQLFYEIRGSFAKYERLKIQDRMARGRRGKLKAGKPLKEYKIYGYDYVNGQYVINEAEADLVREIYRLYLENTVGLHSIPELLYKKGIVALSGKKFHHSTIHKILTHQHYTGTYYSYRTYNKKTGANSHTILKRDSSEWIQMHCPRIIPQDTWDAVQNKLARNRAEHIRDNKYNALFQGVLYCECCGHKMRLTRYKTAMYYACGQNRDAPGSCESKMIRAEVLDALLWRTIFDICKDEATMKKYLKRNAQPPKKTENIEERLEAIAKIRTAIMGWYSNNLIDMETCTRKLEELKRQENALRQRAVPADDKPVDITAAVRSVKVLNADYTTKRNIITKIVAKAYVKKEGNSRKNYSLNFNIIFA

SEQ ID NO: 10809 - protein, 476 aa, Unknown
  Description of Unknown: Integrase B10810 sequence
  cd00338,PF13408,IPR011109,PS00397,PF07508, Coil,IPR038109,G3DSA:3.40.50.1390,IPR006119,IPR036162, PTHR30461,PS51737,IPR025827,PF00239,SM00857, G3DSA:1.10.10.2600,IPR006118,SSF53041
MRIGAAYIRVSTDDQLDISPESQLDEIQRYAKSHDILIPEEYIFMERTGRSGKRADNRPEFQRMIATAKEKPQPFEVILVWKFSRFARNQDESTFYKGMLRKKLKIDIESVSEPIMEGMYGRLIEMIIEWQDEFYSYNLGVEVKRGMAKKAELKGYQLVPPLGYAAVGNGKPYVIREDEYKIVEMIFHMYAVDRLDMTAIARQLNASGYLTRRGNPFEKRSIDRIIQNRFYVGTVEWNGYSFEGTHKTRASVTDLFEQCQERRKAEFRPMRHRNVSTCKHWLSGLMRCSVCGATLSYTGSGAVPYFTCWKYSKGLHPESCSISVKKMERIVLRSLDGILESGHFEYTPAASASGSPADPSNEIQSIHTQLDRLRHQEERARIAYENEVYTLDEYKESKARLRSEIQRLSDELQRLLEQPAESAPPQKELLDRVRNVRDLLASPSVGFETKGNALRSILKCIVFDRKTEHFDFQYYA

SEQ ID NO: 10810 - protein, 476 aa, Unknown
  Description of Unknown: Integrase B10811 sequence
  PS00397,IPR038109,IPR006119,PS51737,PF00239,G3DSA:3.40.50.1390 ,PTHR30461,IPR025827,SM00857,G3DSA:1.10.10.2600, SSF53041,IPR011109,PF07508,PS51736,IPR006118, cd00338,PF13408,Coil,IPR036162,PTHR30461:SF3
MITAIYVRVSTEEQAKEGYSIGEQTERMKAYCDAKGWKNIKVYTDPGLSGSNMNRPALQKMLTDIDRKEVDRVVVYKLDRLSRSQKNTLFLIEDVFIKNGVDFVDITENLDSSTPIGRMMIGVMSAFSQLEREWIKERMAMGHEARAKAGLYHGGGPAPIGYDYEDGLLVLDPYEAMQIKYLYEEYAKDTSLRELKRLMNEKYKTKYGAWTSDSSIRRSLSQKLYIGKIDFKNDTYDGLHEPIVSKELFDKVQSKLLERSWGKRHAGKSRPFTAKSLLTGLLYCGHCGARYFGRSQLYVYKDKREPRHYYTCYSRCGYPAHMVKDPTCKNKNYPVKKLDTKILNEIKILSLDLDSLDTMVTRQNETSQKSILQSQLNKLDKQISKLLDLLQNDKMPFEAVSKRLETLNTDRKIILNDIDNLKVEPKLAVPEAKRIITSIGESFDDLDLIKKRKLIHDLINKITITDDDITIQWAFI

SEQ ID NO: 10811 - protein, 476 aa, Unknown
  Description of Unknown: Integrase B10812 sequence
  cd00338,IPR011109,IPR038109,PF07508,Coil, PS51736,G3DSA:3.40.50.1390,IPR006119,IPR036162,PTHR30461, PS51737,PF00239,SM00857,G3DSA:1.10.10.2600,SSF53041
MKAILLIRVSTEAQDLVQQREKVVDAAKRDGYDELILIEDKESAVKLSEEERNGLNRLKEAIEKDSSIKAVYSYEISRISRQAKIVYSIRDFLINHHIQLVILNPYFKMLKDDGTLSETSNIFFGIFASMAENEGYIRKARMRRGVQKKKELGMHAGGQVMYGYKTIKTENGHKYIIDEAQATIVKRIFTDYVNGKSMRMLTRDLQEEGHFKGVKYLTAVQEVYNILHRDCYCGRKKGMPAIIYESLYDKSVEMRKHNELKVSRTSNMSLCKGILRDSDSGLLLSSNTAANMYYSKRCKGVSVSMHIMDPIIWEYSVELHKEYNKMDVEQLLNGLIRRRQMNERKMKTLYEKEKELEEKKDKIEERLIMGKLSEKKADELEEQINNEIKDIRERAREIMDDNMNIETEGNRIYSTRDVKINYEELNKEQRYDIVHAVIDKVMLKRTERAILEINIYNKVNNEVKSLTYNSFKRKFT

SEQ ID NO: 10812 - protein, 476 aa, Unknown
  Description of Unknown: Integrase B10813 sequence
  cd00338,IPR011109,PS00397,PF07508, Coil,IPR038109,PS51736,IPR036162, IPR006119,G3DSA:3.40.50.1390,PTHR30461,PTHR30461:SF3, PS51737,PF00239,SM00857,G3DSA:1.10.10.2600,IPR006118,SSF53041
MQTAAAYIRVSTDDQIEYSPDSQLKAIRKYAKEHSFILPEEFVFIDEGISGRKADKRPAFQRMIGTAKLKPKQFDTILLWKFSRFARNRQDSIVYKSMLRKQCGIDVVSISEQLGEDNTSILIEALIEAMDEYYSLNLAEEVKRGMNEKFSRGGVVSQPPFGYKMKDGIFAPDEVNAPIVQMIFSDYLSGMGTREIAIKLNDMGIRTTKGNFFANRTVEYILTNVTYTGKLRRSKNGRDALDRFHESENTLIVDGKHEAIITPEIFEAVQKKRSEAKRTYTRYARQAPVEFMLKGIVRCDSCGATLTMSSGKTSLQCHNYAHGTCMVSHSVTIRKLNSAVIEHLKSDFEHQNFTIDVEEQKQTSAAPDITAMIEREKKKLSRIREAYMAGIDTLEEYQQNKKIVQSRIDELTAAIPPAPLSEEKIRETISGRIQAGLQILEDEDTSETLKNITLRSIVDRIVYIKPKGIIEIFYKL

SEQ ID NO: 10813 - protein, 476 aa, Unknown
  Description of Unknown: Integrase B10814 sequence
  IPR011109,PS00397,PF07508,Coil,IPR038109, PS51736,IPR036162,IPR006119,PTHR30461,G3DSA:3.40.50.1390, PTHR30461:SF3,PS51737,PF00239,SM00857,cd03768, G3DSA:1.10.10.2600,IPR006118,SSF53041
MTVGIYIRVSTEEQANEGYSISAQRERLKAFCLAQNWHDYKFYVDEGISGRDTKRPQLKKMMEDIRAGHIKVLLVYRLDRLTRSVRDLHRILDELEKYSCTFRSATEFYDTSTAMGKMFITIIAAIAEWESANLGERVTMGQVEKARQGEWAAQPPYGFFKDDKHKLQIHKEEINAVKLMVKKIREGMSFRQLAFYMDSTQYKPKRGYKWHVRTLLSLMHNPALYGAMYWKEQIYENTHQGIMTKEEFNQLQKIISSRQNYKSRNVSSHFVYQTKLICPDCGSRCTSERYTWKRKTDNVVEVRNSYRCQVCALNNPKTTPFSVREVKVDEALIEYMVNFTVAPSEAVELNENDQLLDIKNNLRKIENQREKYQRAWANDLITDDEFKVRMDESRLQFDSLQNELKNIEGEKYDVVDIERYKEITKSFNDNYLNLTQEERRTFIQTFIESVKVEIVEHTKGKGYRNQKIRIADVSFY

SEQ ID NO: 10814 - protein, 475 aa, Unknown
  Description of Unknown: Integrase B10815 sequence
  PS00397,IPR038109,IPR006119,PS51737,PF00239,G3DSA:3.40.50.1390 ,PTHR30461,IPR025827,SM00857,G3DSA:1.10.10.2600, SSF53041,IPR011109,PF07508,PS51736,IPR006118, cd00338,PF13408,Coil,IPR036162,PTHR30461:SF3
MKREIKDDNYTKLGRKDPKRVAIYIRVSTDEQAKHGLSLPSQRKTLEDYCKKHGHRIVDTYIDEGLTARKTLRKRVEFNRMIEDVKKDKIDLIIFIKLDRWFRNVRDYYNTMDILEAHNCTWIATEEDYDLTTSTGRLNLNIRLSISQNESDQTSDRINFVFANNRAEGRVVSGACPFGYKIEDKRYVIHEENAERVRDIFDHFTKQGSLMKTLTYYRDKYNNRLSYNAIKKYVRNTAYIGEYRTEKGELIEDYTPAIIDRDTFEFAQTLLKKNIKQSRNNSDPAEFIFTGLLKCGLCGSNYARNCKVKRNSKGEIKQYYYYRCYRVAGMNCNNKTTANQEKLEEDLLAMVKIEAEKYIAENKIKGTKQVNKPVDNTGKIKTKLKNLRELFIDGDIEKEEYLQRKQKLEKELNENIALLNSADTPKDTRHLEALINSDFETIYHSLTKENKRRFWASIIDKAYVLDKKIVKIDFL

SEQ ID NO: 10815 - protein, 475 aa, Unknown
  Description of Unknown: Integrase B10816 sequence
  IPR038109,PS00397,IPR006119,PS51737,PF00239,G3DSA:3.40.50.1390 ,PTHR30461,IPR025827,SM00857,G3DSA:1.10.10.2600, SSF53041,IPR011109,PF07508,PS51736,IPR006118, cd00338,PF13408,Coil,IPR036162,PTHR30461:SF3
MVTTNKVAIYVRVSTSSQAEEGYSIDEQKAKLEAYCEIKDWKIYDTYIDGGFSGANTQRPELERLISDAKRKKIDIVLVYKLDRLSRSQKDTLFLIEDVFAKNDVAFISLQENFDTSTPFGKASIGMLSVFAQLEREQIKERMMLGKEGRAKNGKSMSWTTIPFGYDYSKETGILSVNPTQALIVDRIFTEYLNGKSVVKIIRDLNAEGHVGRKRPWGETITKYLLKNETYLGKVKYKDQVYEGQHEPIITQELFDLVQLEVEKRQISALEKYNNPRPFRAKYMLSGLMKCGYCGASLGLKYTRKDKNGISHHKYQCRNRHSKDLEKRCESGWYSQEELEKDVIKELERLKLNPKYRNETLAKKEETIKVEEVKKQLDKLNNQVSKLTELYLDEVITRKELDEKNAKIKTERQFLEEQLENQKSNVLSIRKRKLTRLLKDFDVEKLSYEDASKIAKNIIKEIIVTKDGMSITLDF

SEQ ID NO: 10816 - protein, 475 aa, Unknown
  Description of Unknown: Integrase B10817 sequence
  cd00338,IPR011109,IPR038109,PF07508,Coil, IPR036162,IPR006119,G3DSA:3.40.50.1390,PTHR30461,PS51737, PF00239,SM00857,G3DSA:1.10.10.2600,SSF53041
MQAGPQNLSAAIYTRLSKGFGRSIEEQEAEDRAECGRLGWGIADVYSDASRSASRFATKGREDWARLLADLDSGRFGVLMLWEPSRGDRDAESWLGLLNLCRRRGVKIHITSHGHTYDMTRRRDWRALADEGIDSADESEKISERIRRDVRANAALGRPHGKTPYGYERIYDSRTKQLAEQRPDPRTAPVVAEIYWRVGSGEPVLAIARDLNARGEPAPGGKQWSRVMIRNIATSPVYAGRRVWKGEQIPGIWQPLVDEAAWHRAKRVLTDPSRARVRPTRARHLLSYIGQCGECGAPLAAAPRGAKRNLYGCSERGCVFIREDWLDDEVTRRVIAILSSAEIYRARQGASDAAVLAAMAEADKLQERLDEMAGQAARGEIELRALSIGEAELRPKIRAAHDRANAAAVPLEIRDLAEHRESMPDVWLTMPLARKKQLLRTLIADGALCVKVRKPQPGGVRGKFDPARVVTEPGR

SEQ ID NO: 10817 - protein, 475 aa, Unknown
  Description of Unknown: Integrase B10818 sequence
  IPR038109,PS00397,IPR006119,PS51737, PF00239,cd03768,G3DSA:3.40.50.1390,PTHR30461, IPR025827,SM00857,G3DSA:1.10.10.2600,SSF53041,IPR011109 ,PF07508,PS51736,IPR006118,PF13408,Coil,IPR036162,PTHR30461:SF3
MKTTNKVAIYVRVSTSYQAEEGYSIDEQKDKLEAYCKIKDWKIYDVYVDGGFSGSNTKRPELERLIDDTKRKRFDIVLVYKLDRLSRSQKDTLFLIEDVFLKNDVAFISLQENFDTSTPFGKASIGMLSVFAQLEREQIKERMILGKEGRAKKGKAMSWTTIPFGYDYSKETGILSVNPTQALIVNRIFTEYLNGKSVVKIIRDLNAEGHVGRKRPWGETITKYLLKNETYLGIVKYRGQKYEGQHEPIISQELFDLVQLELKKRQIDALKRNNNPRPFQAKYMLSGLLKCGYCGGSLGLYVTSKNRKGKAYQRYQCRHRFDKDKSKRCNSKWYDKQELEEKVIERLSKIKLEPKYRKEMLAKNDETMKVEEIKEQLKKLNNRLEKLTELYLDEIITRKELNAKNEKLKIEKAFLEEQLESKKKNTINIRQRKLARLLKGFNPEKLSYEDASKIVKSVVNEIVVTKEEMTITLDF

SEQ ID NO: 10818 - protein, 475 aa, Unknown
  Description of Unknown: Integrase B10819 sequence
  PS00397,IPR038109,IPR006119,PS51737,PF00239, cd03768,G3DSA:3.40.50.1390,PTHR30461,IPR025827,SM00857, G3DSA:1.10.10.2600,SSF53041,IPR011109,PF07508,PS51736, IPR006118,PF13408,Coil,IPR036162,PTHR30461:SF3
MKTTNKVAIYVRVSTASQAEEGYSIDEQKSKLEAYCEIKDWKIYDTYIDGGFSGANTQRPELERLISDAKRKKIDIVLVYKLDRLSRSQKDTLFLIEDVFAKNDVAFISLQENFDTSTPFGKASIGMLSVFAQLEREQIKERMMLGKEGRAKNGKSMSWTTIPFGYDYSKETGILTVNPTQALIVKRIFTEYLNGKPVVKIIRDLNAEGHVGRKKPWGETITKYLLKNETYLGKSKYKGKVFEGQHDAIISQELFDLVQLEVERRQITTLEKNNNPRPFRAKYMLSGLMKCGYCGASLGLYVAPKNKNGVSKYKYQCRHRYHKDKAVRCNSGWYSKVELEKRIIKELERLKFDPKYKEETLAKKDETIKVEDIKKQLERINKQVSKLTELYLDEIITRKELDEKNAKIKTERQYLEEQLENQKSNVMSIRKRKLSRLLKDFDIEKLSYEEASKIVKSVIKEIVVTKDDMTITLDF

SEQ ID NO: 10819 - protein, 475 aa, Unknown
  Description of Unknown: Integrase B10820 sequence
  IPR011109,PF07508,PS51736,G3DSA:3.40.50.1390,IPR006119, PTHR30461,IPR036162,PTHR30461:SF3,PS51737,PF00239, SM00857,cd03768,SSF53041
MRIGLYARVSTGSDEQEAALEQQLDRLRAAAAGHETVEFIDVASGTKDDRQQLNALMAACRAGQLDRVICTRLDRLSRSMAHGAELLSYFSAEDTPSLLALDDALDLATIGGRLVARMLINLGQAESERLSERVRHGRAYQRKLLIPLGPKAPYGYRFNAERTNYELDPETAEAARWLVQQFLESGQLRPLLRQAKELPGCPWTSVPGMRSWLMNPTLAGYRVYGHDETYRDQDGRLKKRRLKAGVYKEVVPDAHKPLISAVEHAKVQARILEHVDRKRSGLLKGYVRELTKLVVCSHCGRFMSYQHHVRLGPIYLRCTYWPCASEKRNRIKVQTVKDAIWSKLKASREQLIAYLTASNGMKNGQLDDAIKLDEEIRELEGRQDPDLQEAILHKRMKLSALMQMHGHRLDVEATAVEMRKQLGNETAWSLMANDEEATREMFVRFVEKVLVRERAVEAVVLRLDGCGAISSLGLG

SEQ ID NO: 10820 - protein, 475 aa, Unknown; identical to SEQ ID NO: 10433
  Description of Unknown: Integrase B10821 sequence
  IPR038109,PS00397,IPR006119,PS51737, PF00239,G3DSA:3.40.50.1390,PTHR30461,IPR025827, SM00857,G3DSA:1.10.10.2600,SSF53041,IPR011109,PF07508 ,PS51736,IPR006118,cd00338,PF13408,Coil,IPR036162,PTHR30461:SF3

SEQ ID NO: 10821 - protein, 475 aa, Unknown
  Description of Unknown: Integrase B10822 sequence
  Coil,PS51736,IPR036162,IPR006119,G3DSA:3.40.50.1390, PTHR30461,PTHR30461:SF3,PF00239,SM00857,cd03768, SSF53041
MKAFLYNRVSHKDSKASDISIPDQMVRTTNYATSVIPEAEQVVVTDAGVSAWSKSFAGRPGGGRIIEQVKPGDHVICLQIDRLCRNLRDFCNLMHFFEEKGIFVHFINNQINTTTASGKLQANILAAMAQYASDVTSERIREALLIKRLQNSQSSNTKPKVKWMNSEFVLPQKIKTERPTGTIRMYERVSTEPQYVSGLGLKWQGTANAKYAEDLAEKLQCPVGPVYSDPAISAFSVPFMEREAGKRLMNDLQPGDDVVIYRMDRGWRNTLDAMKTIAEIQRKGAYVHFVCERIRTDTGQGKEWISLMASIAQLESQMKSNRNKETAAWCQANGRPNGLPRAGFKIEQISEHQKRLAVDKKQLLQAGQIWVMKYELGLSTTQIEDMIIAIKARELGVKANLTMLKRSYVQRRLRQIDIMHEMIGSSLWGKCKHKARLSLKKPFSADHLRLIHRWKWTHSPVLPSASKPRASRSRA

SEQ ID NO: 10822 - protein, 475 aa, Unknown
  Description of Unknown: Integrase B10823 sequence
  PS00397,IPR038109,IPR006119,PS51737, PF00239,cd03768,G3DSA:3.40.50.1390,PTHR30461, IPR025827,SM00857,G3DSA:1.10.10.2600,SSF53041,IPR011109 ,PF07508,PS51736,IPR006118,PF13408,Coil,IPR036162,PTHR30461:SF3
MIALYCRVSTREQTKEGYSIGEQQERLKNYCAAMNWKKYKLYVDGGYSGGNMERPALKNLISDIKKGLVEKVVVYKLDRLSRSQKDSLVLIEDVFLKNNVDFISMSENFDTSTAFGRAMVGILSVFAQLEREQIKERMIMGIEARAKEGKYCGSCSPVGYDYIDGELKINDFEALQVKEAFELTLEGLSPYKVADILNKKGYRTKFGIWSEYRVRWVVRSPLYIGRVKYSGEYFDGIHEPIVSEELFNDVQNYLEKRAAENAKCNYCAGKATTYLGGFLICAHCGGKYSKQLQLSKKADGTYLRYYYYICQSRSKKKKSQVKDPNCKNKNWNIEKLTNIIFDEIRKLSLDPNYFEEVREVSIQEDKKNILVAEIEKIDGQLSGIMDLYVFDNIPMKTLEEKTNALNEQRLKLEQELEGLQEQRLDKLSKEEAEEIFQNFDDIIKRADFQEIRSVLSALIEKIVLDGENIEIHWRF

SEQ ID NO: 10823 - protein, 475 aa, Unknown
  Description of Unknown: Integrase B10824 sequence
  cd00338,IPR011109,IPR038109,PF07508,Coil, PS51736,IPR036162,G3DSA:3.40.50.1390,IPR006119,PTHR30461, PS51737,PF00239,SM00857,G3DSA:1.10.10.2600,SSF53041
MYKVISFTRVSSQQQNLESQNKEVHDAIIRHGYSEDEILYVQQKESAIKLSMEERVSLQQMFNLIKQYNTIEYVFVYEISRLSRQPKMLYELRDFFIEHKVNLKSLKPELTLLDDDFKLSQTASIMFSIFASLSESEMMLKKERMARGREYKRAQGLYAGSPIAIGYKQDKDKIVIDEPNAALVRRIFTDYISGKSVRTLAKELQNEGWRKNTKFLTLCQSILNILHREYYCGDKLHPAIITREQFEQAKQVAQSKTIYRTSRTNALLKGLIYDKESGYLMSSNMSNGQYYSRRYGHCTISMKAADTLVSGVAREWYEQIYVVKADEYRQMIESEIERNKRIISTMTDNITNNQDKIDRIEERYIDGKISKEKADELERKAFEELNYYKSNLENAKVQVDILQQKLQNYNLRTDDIYDIVHDVINRIYCRRLSKYVCEVTIINKYTGEQRIYEYNTRKMQIVHFEVVTRPALYLL

SEQ ID NO: 10824 - protein, 475 aa, Unknown
  Description of Unknown: Integrase B10825 sequence
  PS00397,IPR038109,IPR006119,PS51737, PF00239,cd03768,G3DSA:3.40.50.1390,PTHR30461, IPR025827,SM00857,G3DSA:1.10.10.2600,SSF53041,IPR011109 ,PF07508,PS51736,IPR006118,PF13408,Coil,IPR036162,PTHR30461:SF3
MNRCAIYVRVSTQEQARDGYSIGEQRERLKLYCESHDWTVVKDYVDAGYSGASTDRPFLNQMIEDVTRGMIDKVVVYKLDRLSRSQKDTLHLIEDIFLANGCDFVSMNENFDTSTPLGRAMIGILAVFAQLEREQIKERMMMGKEARAKDGKFNSGKTPIGYDLIDSDLVVNDYERIQVQRIFQEYASGKSPVAIARDLTESGYSHKYGAWQPETIRHLLTNQTYTGVICYNGTVYQGEHDVIIDDELFQRVQSKVSRKREEHLHLNRRAGKASSYLAGLLVCGCCGAKYSKLSHKETKGGRTYTYAYYKCNSRAKKSAHLVKDPDCKNRIWRMQDLDELIFGEIRKLATDPDRISDLSDDIDVDKQSVLRDEISGLNRKIERLIGLYAVEDMPLDVLQKQVSDLEEQKSRLEAEMERLSDEQSKKASIADAIDAVSSFGEVLDKGNYDEIRTVLCALIDKIVLDGDDITIHWRF

SEQ ID NO: 10825 - protein, 475 aa, Unknown
  Description of Unknown: Integrase B10826 sequence
  cd00338,IPR011109,IPR038109,PF07508,Coil, PS51736,G3DSA:3.40.50.1390,IPR006119,IPR036162,PTHR30461, PS51737,PF00239,SM00857,G3DSA:1.10.10.2600,SSF53041
VQPRLVPDTPPRAVIYLRQSVHKDDSISIEMQEFAGRDYCARMGYTVVAVEADEGLSGRRWDNRPAVKRAIDLIEGRNADVIILWKWSRLSRSRRDWALASDRVDVAGGRIESATEPIDTGTASGRFARGVMTEYAAFQSEQIGEQWEEVRQRRIRNGLPVSGRLPWGWEKHEGQLRPVPEQAAYVVEMYAKFLGGQGSASIARWMNAQGIPSPEGKIWSRERPGTLLDSPIHAGLIPYRGEVHEGAHEGIIDRATWDEYLATRASRREGKQKPRMSKYLLSSLVRCHCGYQMSGRGHRKNGHWYSGYACQSMAPDHGPNYISSRKLDPLVHQWLATIAKELDDVVDVVALVEMTTDLDQLRREHTALQKQLTNLTLQLAADIVPEAAYSEARAQIEARQTEIMAAIDRHGRQQSLASRVSNEFIRGLVRDWEFMPFDGRRDTIRTVLERITVTPGPAATVEFTSRWGTSAVLRV

SEQ ID NO: 10826 - protein, 475 aa, Unknown
  Description of Unknown: Integrase B10827 sequence
  cd00338,IPR011109,PS51736,G3DSA:3.40.50.1390, IPR036162,IPR006119,PTHR30461,mobidb-lite, PS51737,PF00239,SM00857,SSF53041
MTVTAHSYARISTRKQRSIERQHTDNTAAATEHGWAVGRRYEDTGSASSYSQKPRGDFQRLMADLRAGNIPSQDVLILWESSRGSREQVEWGTLLNLLRDNRIGVHVTSHRRTYDLTNPRDRRSLDEDGVDSAYESGKTSGRVHIAAVENAQTGRPWGPVPFGYTRVFDPVTGRLIGQEKDPKRAPIVAELFARLEAGHSLRSIAADFAERGITRAPREGRPEGPISAAQLRNMAMQAGYAGIRASDTIGQTFDAVWPAIVTPRQYHAVHRILTDSARKTSRPGRGKWFLSMIGKCGADDCDSPLSVRYRRGPRYRCHEKSHVLIDMEELDQVAETVILDYLNRNDVVEALSAAWSAEDQRLATIRDQLDTVRAELRELAAGVGAGKVTLDFAAMAEPGVRRRIKDLEAQERDAALPAVLRGLVGVGLTRAQWRAKPMSTRREVARLLLSPKYLGELRVGRVDELRIRFDRAAVA

SEQ ID NO: 10827 - protein, 475 aa, Unknown
  Description of Unknown: Integrase B10828 sequence
  cd00338,IPR011109,IPR038109,PF07508,Coil, PS51736,IPR036162,IPR006119,G3DSA:3.40.50.1390,PTHR30461, PS51737,PF00239,SM00857,G3DSA:1.10.10.2600,SSF53041
MTHTLTAHPDPAIIYLRQSLDRTGQRLAVARQLEANQSLCAARGIPVLEVIEDNDVSASSRKRRPGFERLVGMITSGQVRTIVAYAVDRLTRTLLDLERLIDLVERYQVTVVTVSGDLDLSTPVGRAVARILASIARQEVEVKAARQQLRNKQALTDGMPLASGMRTVGYVDAALSAVIPNEVTLIQEGYAQLLAGASTSSIARLWNAQGLRTSRNGKWTASTVKIALTNPRYSGISAYRENRQTKQVMGTGRWTAIIDMDTWEAAQSILNDPARKTTTGPARKYLMSGMALCAVCGEHSVYSAHVSGKLVYRCPKLHLSRRIEQVDGYVREVVAEYLRQPGGPQLAADTSDAKALRQEAAAVRARLDRLTAMFMDDRITEAQLDRGTADARARLEAISNAQAANAGLGALAPLLAAVDPGQAFLDAPLDVQRTLVDMLVTVRLSSLGRGKGRAPFDPSTIQLDWKVSEATAVAA

SEQ ID NO: 10828 - protein, 474 aa, Unknown
  Description of Unknown: Integrase B10829 sequence
  IPR038109,PS00397,IPR006119,PS51737, PF00239,G3DSA:3.40.50.1390,PTHR30461,IPR025827, SM00857,G3DSA:1.10.10.2600,SSF53041,IPR011109,PF07508 ,PS51736,IPR006118,cd00338,PF13408,Coil,IPR036162,PTHR30461:SF3
MLRAAAYIRVSTDEQTEFSPDAQLKAIQKYCNDNELALDREHIYIDEGISGRKAEKRPAFQDMIKHAKKKEFDVILVHKFDRFARSREDSVVYKSLLKKECNVRVISITESIEDDKFSVILEAMLEAMAEYYSLNLADEVKKGMTEKAMRGGYQTYAPFGYTMKDKKLVIKEDEAKAVKTIFNEFIKGTGYLPIAKMINNMGFKTRFGNKFENRTIEYILRNPTYKGYARWTPTGRVRRNFANEDTLIVKSEHEPIIPEETFDQVQELVAKRKTIHRKYFKGINPANLHWLNGLVRCSTCGKTLVRSTKVYYQCNGYSKGTCPTSQMVKITDIEQAILQQLKKDMTAGLNLAKRSKVISTDNTDTFIVQLNKLPEKEARAKEAYINGIDSLEEYKQNKINIENQRKMLEAQIKSSKKEVYNPKTLQKQIKKLYEILTDENISMKQKHEVSHLVIDKIVFDKSAQTLHLTYLYQM

SEQ ID NO: 10829 - protein, 474 aa, Unknown
  Description of Unknown: Integrase B10830 sequence
  cd00338,PF13408,Coil,PS51736,IPR036162, IPR006119,PTHR30461,G3DSA:3.40.50.1390,PTHR30461:SF3,IPR025827, PF00239,SM00857,SSF53041
MYKQLERYRAEKGRVRIAKYSRCSSDEQKKNGYTVKDQLDFIEIFARENELIVVEEYVDEGISATLEINKRKALAQLIEDAKAGKFDIVVFKCIDRFFRSVAEYYECQKQLQKAGVTWVSIEESDLDPEDDDAAFKINIYLTMAEYEARKTSKRIKFNNKMRIKNKQVVTGVQCFHFPWVVCGEKKNRHLEKNTEKEHILFDMLKHYETHQSKRGTLVYINMKYNMDLSITTITNILTSTLLYGEYKGVPDYVEPYITKERYNGIQAIMERNARHSDKSPAVFLFSGILKCPGCGRNMAGSYKKPDNKKLIGYNSYRCNKYRQARTCNNSKSFSEKQIEQQLLTHLKQYITNEIVKIESIKEKTTPVSDNTKRIESLKKEMTRLNTMFRKGRIEEGEYDSEYAALESELKQLDKKEEKPAERDLDMLKGLLEMDYKTLYAGLDKAHQKAFWRKIIKSFTMGEDRKIDPDSIIFF

SEQ ID NO: 10830 - protein, 474 aa, Unknown
  Description of Unknown: Integrase B10831 sequence
  cd00338,PF13408,PS00397,IPR038109, Coil,PS51736,G3DSA:3.40.50.1390,IPR006119, IPR036162,PTHR30461,PTHR30461:SF3,IPR025827, PF00239,SM00857,G3DSA:1.10.10.2600,IPR006118,SSF53041
MTTFDKERKIKRAFDTSKVIRTAAYIRVSTDEQAKHGFSIEAQKEGLQKYADEHGYRIVDWYIDDGKSARKKTSKRKEYLRLIEDAKKGKFEMIIFKCLDRWFRNISEYYKAQSVLDDKGIGWECSEEDFDTTTRDGRWKLHIYLMLAQDEADKTSERINYVFAHKIQNREAISGSQPYGFKVKEIDGIKRVVKDKTVSHIVDDIFDNFELFNSKRAALYFVQDKYDIKVEYKLISNILTNSYYYGHYRGVDDYIWGGSYITKERYDRIQKMLKKNVKARKNKKNQDYIFSGLLVCSICGCKLSAHSSRFPLADGSEKTYLFYRCNRSAMANKCTSRGTFSEIKLEQKLIQSIEEEIEDYICEYELDIKKEKKPQIDTKSIKEEIQRLNISWRKGRMEEAEYDYEFERLQKKLQKAQEELPEKHDLTPLYDFLNSGWKDIYDTLTSVEKRALWRSVIDEIKVDVLNKEFKIKFI

SEQ ID NO: 10831 - protein, 474 aa, Unknown
  Description of Unknown: Integrase B10832 sequence
  PS00397,IPR038109,IPR006119,PS51737,PF00239, cd03768,G3DSA:3.40.50.1390,PTHR30461,IPR025827,SM00857, G3DSA:1.10.10.2600,SSF53041,IPR011109,PF07508,PS51736, IPR006118,PF13408,IPR036162,PTHR30461:SF3
MKRVAIYIRVSTQEQADEGYSIPEQTERLKKYCEAMKWTVVQIYTDGGFTGSNINRPALSSLISDTKSNLVDIILVYKLDRLSRSQKDTLYLIEDVFLKNNVEFVSMCENFDTSSPFGRAMIGILSVFAQLEREQIKERLAMGHVGRAKEGYWRGGSGVPIGYDFTDGNLIINEYEALQVKEIFDLFLQGKSMNGICDIMRSKYSNKYSSWNNHGAISKILQNKIYIGAIKYKNNEYDGQHVSIIQKDIFNTVQSKLKEYQKTFTEHYKTPFRGSNLLSGLVFCGTCGARYFTISTMSKIHGTYQYYKCYSRDGNRQMKKIDGCKNPNYKKSELDDIITNEIMELAFDETEIDRMAAQTKSKPSDKNGTLKNRIVDIDKQIGKLMDLYQVGGIPLEQIGGRIKPLQKERDVLEAELQSNVEPVILSTTEAKKIVHKAEKILNSGDLSKKRQLIDSLIRKIVIYPDTIKIFWKFI

SEQ ID NO: 10832 - protein, 474 aa, Unknown
  Description of Unknown: Integrase B10833 sequence
  cd00338,PF13408,IPR011109,IPR038109,PS51736, G3DSA:3.40.50.1390,IPR006119,IPR036162,PTHR30461,PTHR30461:SF3, PS51737,IPR025827,PF00239,SM00857,G3DSA:1.10.10.2600, SSF53041
MWILGSKKPCRVKRQGDEMKRNDFGNQCLYYYYSTDSPQMEGDAMKRTAIYMRVSTDKQAQEGDSIPAQREALTKYVTDHADLVLAGEYLDDGVSGQKYQRDELQRLLDDVRQGKIDQICFVKLDRWFRSVRHYTATQEVLDKYGVGWTAIWEPIYDTTTPSGRLIVNQMMSIAQFEAENTSQRIRQVFRYKAAKGEVLSGNQPFGFSIENKRLVPNQDAEKVVDLFNFFRANPCYSELAKYAHIKYGLTKKQANWKRMLQETKYIGVYKGVSDYCEPIIPIALFEAVQRQMQAPVKASTRHVYIFSGIFFCAECGCAMNGTSRTDGYLVYRCQRHFCAVPACDNQKTMFEKTLEKELLSRITLQGSLEAQVMERKPKKNIKSLERKIERLKELFVNDLISLDEYKADREAIEAQITALQAPYSPKHEALDKIIGQDVQTLYKGFNSEEKRLFWRSIVKEIRMDASKQLTVEFA

SEQ ID NO: 10833 - protein, 474 aa, Unknown
  Description of Unknown: Integrase B10834 sequence
  cd00338,IPR011109,IPR038109,PF07508,Coil, PS51736,IPR036162,PTHR30461,IPR006119,G3DSA:3.40.50.1390, PTHR30461:SF3,PS51737,PF00239,SM00857,G3DSA:1.10.10.2600, SSF53041
MGTIIYLRKSRADETKADSLENHRKVLTNLCKNNNWEYEILEEIGTSQSIAKRVQMTELISLIKQHKVHRVVVIDVDRLSRENYDLAYLRKIFTEYNIELVTPQKVYDWSNEVDLMMFGFNSIIGENEYRQIRKRMLLGKQLGAESGIWVTGEPPLGYKKNKDTKLLELVPAETKLYRYIIDSYISGQYSAHSLAIHLNTIGYRGRRGALWDASRVQNLMNNKCYLGMVKYDNKWYVGKHQALITEEDWNKVQQQLKGNRIVSPRTTIKKKKKVSGICKCGVCGRTMTVIVDYKRGKNFIKCHYKDKMNGKRCGNRAVQENYIVEQLEKAIEQHIHALEQHVADGQNEYQNEQLKNYLNQISDIDSQISKMNNRIANTKEMTKEGLLTLLEAKEEMKACENNIQSLLDNRSELEFIINNLSKNKEKELATFKDGYRYLKEQKDTELYNEAIRLLINNVTVTRLVDDIDISINFL

SEQ ID NO: 10834 - protein, 474 aa, Unknown
  Description of Unknown: Integrase B10835 sequence
  cd00338,IPR011109,IPR038109,PF07508,Coil, PS51736,IPR036162,IPR006119,G3DSA:3.40.50.1390,PTHR30461, PTHR30461:SF3,PS51737,PF00239,SM00857,G3DSA:1.10.10.2600, SSF53041
MKNLAGYIRVSRVAGRSGERFISPDVQRERVEAVAVAGGHKIVRWFEDLDESGAKADRPGFQKCLGLIESGELDGIVVAKLDRFSRSVADAADALRRIDAAGGALLSAEDSLDTSTPMGRFALHMMLAVAELEWERRRESWAVSRGRAVARGVHIASRTPTGYDRLPDGRLVPNDFAPRIEESFRMKARGASWAEIRKQMAGVPTPYGSVEWADRSLSHVLANRVYLGEARSGEFVNAEAHAPIVDAGTFQLAQRKEQKASPRHGKSLLTGLLRCAGCRYCLKSDTMGPKFEERRVRSYRCRGTRAAGRCQAPCSTLARKVEPFVVDAFLARHAKVGERQVVDDTEAQEARLEVARAVTQRDAFLTLDIADAKAAQRELNRRQELVDAAESHLASLTIPDALDMSMLVETWPELDNDEKRELLRAGIGAIFLRRAPSRGHWPIEDRVKILWAGDEPDGLPGPGRRNLPLVSFDW

SEQ ID NO: 10835 - protein, 474 aa, Unknown
  Description of Unknown: Integrase B10836 sequence
  cd00338,IPR011109,IPR038109,PF07508,PS51736, IPR036162,IPR006119,PTHR30461,G3DSA:3.40.50.1390,PTHR30461:SF3, PS51737,PF00239,SM00857,G3DSA:1.10.10.2600,SSF53041
VYLCKQWSPCGNLVAMAHHTPPRGKLRVILLARISKEKEEGTDTSIPTQVAIGTAYVNTKPGWELVKVITEEGVSGFKENVSRPKLEQALRMIETGQADVLLVWKLDRLTRSLLRFMGYWGRIQKAGGEFASVVESFDTTTTMGKLMLLIVATFAEMESEMKRDRALPWHEHRREQGLPVGGPRPYGYLRSKNALTVIDEEAAVIRDMAEAVLEGETLSHIAGRLIAAGIHGPYVDKQGQPVNLTVKGIKGILTGPTVAGLRKNLDGTFVPAQWTAILERDEWEQVRTVLHDPARRTNFADGKPAYLLTGFAECSECHVKLTRKNHPKGLRLLCRKCNSSLPMKVADDAATLWLMDNIDAQAWQNLKEQGRGFDPEVVAALEAEKSEIAQMKADGDIDLAQFKILNRDLNARIAAAHDETPLDLPDIADLQTGWETLNLADQRSVIQTLLETVAISQHSSDCQGRDRVMIERAI

SEQ ID NO: 10836 - protein, 474 aa, Unknown
  Description of Unknown: Integrase B10837 sequence
  cd00338,PF13408,IPR011109,IPR038109, PF07508,PS51736,G3DSA:3.40.50.1390,IPR006119, IPR036162,PTHR30461,PTHR30461:SF3,PS51737, IPR025827,PF00239,SM00857,G3DSA:1.10.10.2600,SSF53041
MTGARHDRPGYQAMLAAAEAREFEVLLVDDLSRLSRDELESKRAIRALRFWGIRVIGVSDGIDTDRKGHKIEVGLRGLMSELYLDELADKTHRGLMGRALAGSSAGGLPFGYRVAGAGQRVIDQAQAAVVCLIFTRYASGQTPRAIAADLNRLGTPGPRGGSWCMTAIYGDWRRGIGILANPIYRGQMIWNRSKWSKDPFTGRRRRSEKPESEWVSVEHPELRIIDEDLWNAVQRRFAEVNARTQGRRNPGAKPKYLLSGLMKCGTCGASMVVVDRYRYGCAANKDRGADVCDNGIRVARARAEAVLLQAVREELLSAEAYRAFEAEARRVLRETIPDPKAAHRELAEAQRIRANLVENIRQGVVSPTVRAELFKAEGAVATAQAALEQLQRCGPTQLLPRARETWERLVQQLDRVDDVDGARAALRELLGEIRLVPEAGRLVAEMAGGVSEIGMVAGAGYGLNLIASPLRLPL

SEQ ID NO: 10837 - protein, 473 aa, Unknown
  Description of Unknown: Integrase B10838 sequence
  PF13408,IPR011109,IPR038109,PF07508,Coil, PS51736,G3DSA:3.40.50.1390,PTHR30461,IPR006119,IPR036162, PTHR30461:SF3,PS51737,IPR025827,PF00239,SM00857, cd03768,G3DSA:1.10.10.2600,SSF53041
MTTAIYARVSTESEDQAHALEQQLSRLREQAEKLGEPVVEFVDVASGTRDDRPELKRLLECCDQGLLNTVLCTRMDRMSRSTVHGGKLLRLFNQDSWPNLICLDQSIDLSTAMGRFYANLLMGMAQMESELIGERVHHGQVYARKQLKPQAGKPPFGYRYTEGKLNYELDPETAPVARQIVEHFLASGSLRDAFDYQYKECAQAFRSLEGLRRWLLNPAIAGSRVYGTFRWKLDADGNKSRLLNKPGEVEEIHPHAHEGLVSHEEQVEIQQVMQSLRVRSTTPIRQRRSRVLTGLVHCGHCGGLMHYHQPRQPGPIYLRCTHEVCPVRPHKGIKEETVLEAVLQRLWEKRELLAYSSVVDELRLKQRLSPEIKQLQGQISDLRLLEDADLAEVIERKEQRLSTLLQDCVSDGGSRFTLSDALEALDQPQVWAEMTRTPEQTRRLLSQWVDRVVVSDGAVQQVRLRAGEAAAHP

SEQ ID NO: 10838 - protein, 473 aa, Unknown
  Description of Unknown: Integrase B10839 sequence
  PS00397,IPR038109,IPR006119,PS51737,PF00239,cd03768 ,G3DSA:3.40.50.300,G3DSA:3.40.50.1390,PTHR30461,IPR025827, SM00857,G3DSA:1.10.10.2600,SSF53041,IPR011109,PF07508, PS51736,IPR006118,PF13408,Coil,IPR036162,PTHR30461:SF3
MYAAIYVRVSTEEQAEQGYSLDVQKERLIAFCKSQGWDDTKIYIDDGYTGTNLERPAMKRMIRHIEEKKIHTVVVFKLDRLSRKQKDVLKLLEDVFEPNNVVFKSATEPFETSTAFGKAMIGVLAVFAQLERDMIVERTTSGRREKIRQGIWSGGRIPFGYSWNKSLQKFEIVPEEAWIVKEIFRRYLLGNSRLSIAEWAADRTNERTIDHSTIRDMIARPVYKGDLVNADQTYEGSHEPIIDPEVWEAAQRETLKRKEGATPIGEYLLTGLLKCGVCGGNIVHVLRKDKKYGKVYIYNYYTCKNQHVRKKDSTNNCSLNYIPRERIEKFVIDEIKETFLYPSRMKSLLESSDQEDEFDYSEKNIKERVKKIEADLENLYDAIQSGDIKASAVSSRIKKLEEEKEFLENDLDEINLNNYTSTISKNEFKAAIKDVGVAWDYMTEEEQKNALRRLISTVTLNRDSDPVIEWNFF

SEQ ID NO: 10839 - protein, 473 aa, Unknown
  Description of Unknown: Integrase B10840 sequence
  cd00338,IPR011109,IPR038109,PF07508,Coil, PS51736,IPR036162,IPR006119,PTHR30461,G3DSA:3.40.50.1390, PS51737,PF00239,SM00857,G3DSA:1.10.10.2600,SSF53041
MINDVAIYLRKSREDEELKEETLARHEKMLLDYCARNKLNIVQIYKEVVSGESIANRPEMQRLLDDVATGIYNGVVCVEIERLSRGNQLDQCEILETFKASNTKIHTLTKIYDLSKDEIDEEFFEFALFMSRREYKMINRRLQRGRRQARQEGYYIGSILPFGFDKIRGEKGYILTPNANAEIVKYIFNQYLDGVNVATIANYLNDNGIRSQFQNKEWTTATVRNILKNKIYLGMINTDNRNNYVKGKHEAIIDELTFNRAQEQLAKAPRVTNKRKLANPLAGLMYCSECGRTMIRKINAMKFEYITCPSLRCANRSLKLETAEDLIINELKAELKGFNYFIDNYADEIKTQRLKIDNELSLLEAELNKKVDMIERACEMLESGIYTKELFTRRVGVLENDIEAIKDNINKLKETTIEDDGRAYKAIPILEKVLEKYHGLNSQEKNLILKSIIESIEYTRLKDDVALNIKLLL

SEQ ID NO: 10840 - protein, 473 aa, Unknown
  Description of Unknown: Integrase B10841 sequence
  cd00338,PF13408,Coil,PS51736, G3DSA:3.40.50.1390,PTHR30461,IPR006119,IPR036162, PTHR30461:SF3,IPR025827,PF00239,SM00857, SSF53041
MYTNYKQLERYRHNDKVIRIAKYGRCSSDEQKKNGYTINDQLELIDEFAVENELVAVETYVDEGISATLEINKRKALSELIKDAKKGKFDIVVFKCIDRFFRNVGEYYECQKQLRKAGVTWLSIEESDLDPEDDDAAFKINIYLTMAEYEAKKTSKRIKFNNKMRIKNKQVITGSQCFLFPWIVEGEHRNRYLVKNKEKEEMLYDLLEFFETHQSKSATLGYINVKYATTMTITTLTNLLTDTLLYGEYKGVADYVEPYITKERFDKIQETLKRNARMGTTPHRVFLFSGLIKCPVCGRNLTGNYSRPQPTRDYHGYRCNQYRQQKTCTFNRSISELQLEKQLLNNLERYITNEIIKIEGVQDTTPKNNNEIKIAKIKSEMERLNVMFRKGRIEEKEYDEDYFKLEKELKTLEVEEKPVKRNIDNLKGILETDYKGLYDQLTKENKKAFWRNLIKEFSVDDNKKIIEDSIVFF

SEQ ID NO: 10841 - protein, 473 aa, Unknown
  Description of Unknown: Integrase B10842 sequence
  cd00338,PF13408,IPR011109,Coil,PS51736, IPR036162,IPR006119,PTHR30461,G3DSA:3.40.50.1390,PTHR30461:SF3, IPR025827,PS51737,PF00239,SM00857,SSF53041
MYKQLERYRKEGKPIRIAKYSRCSSDEQKKNGYTINDQLDLLEDFCQEYELIGAGVYVDEGISATLEISKRKALAQLIADAKAGKFDIVIFKCIDRFFRNVGEYYECQKQLRKAGVTWISIEESDLDPEDDDAAFKINIYLTMAEYEAKKTSKRIRFNNKMRIKNKQVTTGSQCFLFPWHVVGEKRQKHLERNMDNAPILYDLLEFFETHQSKSATLGYINMKYSMSMSVGTLTNLLTDTLLYGEYKGVSEYVEPYITKERFDNIQAILKKNARYSKNANRIFIFSGLLVCPECGRNLVGNYTRNKANGGAGTFSYRCNKYRQEKTCSFDKSTSERIIEKQLINNLDKYITDEIIAVENISEKKEQLPDNKKRIEKLKNEMDRLNMMFRKGRIEEEEYDREYFALETELKKIDVVDKPVQRNLEPLKELLASDYKALYDQLDKAHKKAFWRKLIKEFSIDENKKIIPESIIFF

SEQ ID NO: 10842 - protein, 473 aa, Unknown
  Description of Unknown: Integrase B10843 sequence
  cd00338,IPR011109,IPR038109,PF07508, Coil,PS51736,IPR036162,PTHR30461, IPR006119,G3DSA:3.40.50.1390,PF00239,SM00857, G3DSA:1.10.10.2600,SSF53041
MLQKDGIYAMYLRKSRADVEAEARGQFETLAHHLQILTDLADKYEIHVQKIYKEIVSGDSIEGRPEVKKLLQEVSAGVYDGVLVTEVSRLARGRTKDQGIVAEAFRSTGTLIITPSKIYDPSDDADETFFDFELFMARQEYKYIKKRMQRGRELSFQNGNWIFPHVPIGYRKEGLRLVPGEYSDIIRSVMFAYRDGKRTFTETVVFLRAAIPSRKWATNTIRRMLTNPIYAGYLSRSTKIPNAKNLDTSGYIPANCEPLITLQDHVDIIARIAPSPRLKNGTELKNAFAGLVVCQKCGYKMIYNNDHGYPVLMHQSSMDVPRCRCSPISYPVAYKALTEKIIEDLPYMEQDADQKPDPEAIAALRAQLRRAETIKADLFEKLENGLYTASEFRERKILREQEIQGLKRALEGLEEQNKKVETTKVSTDDIKAILRNGSPQEVNSILKILIDRIEYSKPSRKDDPSFTIIYARS

SEQ ID NO: 10843 - protein, 473 aa, Unknown
  Description of Unknown: Integrase B10844 sequence
  IPR038109,PS00397,IPR006119,PS51737,PF00239,G3DSA:3.40.50.1390 ,PTHR30461,IPR025827,SM00857,G3DSA:1.10.10.2600, SSF53041,IPR011109,PF07508,PS51736,IPR006118, cd00338,PF13408,Coil,IPR036162,PTHR30461:SF3
MKLVKNGKKVFIYVRVSTQEQAKEGYSIDEQIDRLKMYCKAMGWVVVKIYVDGGYTGSDMNRPALQDMIKDIKAGKADSVVVYKLDRLSRSQKDTLHIIEDILLKHSTDFVSMNENFDTGTSFGRAMIGILAVFAQLEREQIKERMTMGKEARVKSGKWGGSCNAPVGYEYKDGELVINDFEAMQVRKIYELYLKGLNFCQIERELNDKGYTHRYGKWNRTLVRNAMVNKIYQGYVKYNEEYHKGNHEPIIDEKTFEKANTLYQSRDFSKFKNNGRSTYLGGLIFCECCTARYTLSKNGNYRYYICHSRRKSTRHMVKDPNCKNKIYKLEVLDNAILEEIKKLALNPDEIEVLQKANLSDEMKEKEMLIKKELDRLHAQKSRFMDLYGVGEFTLEEVNAKVKPINEHREKLEKELQGLNGNRNMTKKEVIEIISNFEDIINRGVFEEIRLMIASLIEKIEINGDNVNIFWRFA

SEQ ID NO: 10844 - protein, 473 aa, Unknown
  Description of Unknown: Integrase B10845 sequence
  cd00338,PF13408,IPR011109,IPR038109,PF07508, Coil,PS51736,G3DSA:3.40.50.1390,IPR006119,IPR036162, PTHR30461,IPR025827,PS51737,PF00239,SM00857, G3DSA:1.10.10.2600,SSF53041
MINDVAIYLRKSREDDELKEETLARHETMLLDYCKRNNLNIVKIYKEVVSGESIANRPQMQRLLDDVSRGLYAGVVCIEIERLSRGNQIDQVEILEVFKSSDTKIYTLNKIYDLSKEDIDEEFLEFALFMSRREYKIINRRLQRGRNQSRQEGYYIGSILPFGFNKVRGERGFILVPNDNAKVVQFIFNQYLDGVNVATITNYLNDNGIKPQNHNKIWTPPTVRNVLKNKLYIGMINTNNRGGTVKGKHEPIIDELTFNRVQEQLAKTPKVTNRRKLSNPLAGLVYCSECGRTMIRKINTLKFEYITCPSLKCNTRSLKLETLESILLDELKKELKGFNYFLDNYGEQIKTEKEKVAVELKLLETELTKKTSMIETACEMLESGVYTKELFTRRISVLKEDIKAIQENISKIKNNPLKDDTRAYKAIPILEKVLEKYHTLNAKEKNLLLKSIVERVEFTRLEENASLNITLLL

SEQ ID NO: 10845 - protein, 473 aa, Unknown
  Description of Unknown: Integrase B10846 sequence
  PF13408,IPR011109,IPR038109,Coil,PS51736, G3DSA:3.40.50.1390,IPR036162,IPR006119,PTHR30461,PTHR30461:SF3, IPR025827,PS51737,PF00239,SM00857,cd03768, G3DSA:1.10.10.2600,SSF53041
MTTAIYARVSTESEDQAHALEQQLSRLREQAEKLGEPVVEFVDVASGTRDDRPELKRLLECCDQGLLNTVLCTRMDRMSRSTVHGGKLLRLFNQDSWPNLICLDQSIDLSTAMGRFYANLLMGMAQMESELIGERVHHGQVYARKQLKPQAGKPPFGYRYTEGKLNYELDPETAPVARQIVDHFLASGSLRDAFDCQYKECGQAFRSLEGLRRWLLNPAIAGSRVYGTFRWKLDADGNKSRLLNKPGEVEEIHPHAHEGLVSHEEQVEIQQVMQSLRVRSTTPIRKRRSRVLTGLVHCGHCGGLMHYHQPRQPGPIYLRCTHEVCPVRPHKGIKEDTVLEAVLQRLWEKRELLAYSSVVDELRLKQRLSPEIKQLQGQISDLRLLEDADLAEVIERKEQRLSTLLQDCVSDGGSRFTLSDALEALDQPQVWAEMTRTPEQTRRLLSQWVDRVVVSDGAVQDVRLRAGEAAAHP

SEQ ID NO: 10846 - protein, 473 aa, Unknown
  Description of Unknown: Integrase B10847 sequence
  IPR011109,IPR038109,PF07508,PS51736,IPR036162, IPR006119,G3DSA:3.40.50.1390,PTHR30461,PTHR30461:SF3,PS51737, PF00239,SM00857,cd03768,G3DSA:1.10.10.2600,SSF53041
MKPNMTRSTITPKRRCAVYTRKSTDEGLDQEYNSLEAQRDAALAFISSQRHEGWIVIDDGYDDGGFSGGNMNRPALKRLLADIEDGRIDVVVVYKIDRLSRSLGDFAKIVDLFDAHGVTFVSVTQQFNTTTSMGRLTLNILLSFAQFEREVTGERIRDKLAASKAKGMWMGGVPPLGYDVQDRKLIINEPEAALVRDIFTRYAEHGSAAQLVRELQIEGHTTKAWVTQGGRHRQGRTIDQQYLFSMMRNRLYLGEISNHGQSYPGQHQAIISRELWDVVHAIIQKRKKGPRIHNTENPALLAGLLYAPDGQRLIPSHTTKKDGRRYRYYVPYLEKRQSAGASNQPGRRGMGALPAAEIESAVLAQVHQILQAPEMIIGVWQASMALRDRDAFDEPTILVAMRQISTVWGQLFPAEQHRIMRLLIERVQLRDDGLDIIWRDDSWHQFRRELERHPFVEEQRDGALEGIDEMETV

SEQ ID NO: 10847 - protein, 473 aa, Unknown
  Description of Unknown: Integrase B10848 sequence
  IPR038109,PS00397,IPR006119,PS51737, PF00239,G3DSA:3.40.50.1390,PTHR30461,IPR025827, SM00857,G3DSA:1.10.10.2600,SSF53041,IPR011109,PF07508 ,PS51736,IPR006118,cd00338,PF13408,Coil,IPR036162,PTHR30461:SF3
MKLVKNGKKVFIYVRVSTQEQAKEGYSIDEQIDRLKMYCKAMGWVVVKIYVDGGYTGSDMNRPALQDMIKDIKAGKADSVVVYKLDRLSRSQKDTLHIIEDILLKHSTDFVSMNENFDTGTSFGRAMIGILAVFAQLEREQIKERMTMGKEARVKSGKWGGSCNAPVGYEYKDGELVINDFEAMQVRKIYELYLKGLNFCQIERELNDKGYTHRYGKWNRTLVRNAMVNKIYQGYVKYNEEYHKGNHEPIIDEKTFEKANTLYQSRDFSKFKNNGRSTYLGGLIFCECCTARYTLSKNGNYRYYICHSRRKSTRHMVKDPNCKNKIYKLEVLDNAILEEIKKLALNPDEIEVLQKANLSDEMKEKENLIKKELDRLHAQKSRFMDLYGVGEFTLEEVNAKVKPINEHREKLEKELQGLNGNRNMTKKEVIEIISNFEDIINRGVFEEIRLMIASLIEKIEINGDDVNIFWRFA

SEQ ID NO: 10848 - protein, 473 aa, Unknown
  Description of Unknown: Integrase B10849 sequence
  IPR038109,PS00397,IPR006119,PS51737,PF00239, cd03768,G3DSA:3.40.50.1390,PTHR30461,IPR025827,SM00857, G3DSA:1.10.10.2600,SSF53041,IPR011109,PF07508,PS51736, IPR006118,PF13408,IPR036162,PTHR30461:SF3
MKKKTRVLLYVRVSSQEQMINGYSVGEQTDRLQQYAAAMDWTVIRTYTDPGYSGATTDRPALQELIRAVRSGNVDKVAVYKLDRLSRSQKDTLYLIEDEFLANGTDFVSMSENFDTSTPFGRAMVGILAVFAQLEREQIRERMLMGRVARAKAGGYHGGSRAPLGYQYIDGQLVVDDFTAMYVRKAFYDFVRGKKLTTICKEFLAAGVTTQFWPNQNLKRMLSNRHYLGEVAFDHQWYPGHHEPIIDQETFDAAARRLEIYKENAESVKGHLLTGLLFCAHCGGRYFFATRHDRGKIRTYYYCYSRAKAVKRLIKDPNCMNKNWRSKDLEELILGEVRKLAVDQDYLNRITQEHEAAPEPDRKAILQAEADALTNKIAHYMDLYALDRLTLTDIDRAIAPLTEKRAAIEAQLRNMEPAEEAPDLSKQDARLLLDSFGDIIDRGDQDEIRLLLTTLIRKIVIDGEDIIIHWRFA

SEQ ID NO: 10849 - protein, 473 aa, Unknown
  Description of Unknown: Integrase B10850 sequence
  IPR038109,PS00397,IPR006119,PS51737,PF00239,G3DSA:3.40.50.1390 ,PTHR30461,IPR025827,SM00857,G3DSA:1.10.10.2600, SSF53041,IPR011109,PF07508,PS51736,IPR006118, cd00338,PF13408,Coil,IPR036162,PTHR30461:SF3
MKIAAAYIRVSTDDQTELSPDSQIKQIREYAKSHDYIVPEEFIYRDDGISGRKTKNRPAFAQMIATAKSKKPPFEAILVWKFSRFARNREDSIVYKSMLKKQGIDVISISEPVGDDKMSVLIEAMIEAMDEYYSLNLSEEVTRGMLEKLSRGKCVNSAPLGYYFKDGELVIDEEKAEIVRWIYADFLDGVPIVQIARNLNAEGIKTLYGKQFENRSIEYILRNPLYCGKLRFTKGGGSKSHYHKCEDVMIVDGTHEPIIALDDWNRAAEKIQAIKAKHRKYYHEYANKHTLMLTGLLRCSTCGASLTHSADGYQCIKYIHGFCNVSHYVSQNKIHKAVIAALSDASIGDIHISPKVQKPKTTDNTAKLIAREEAKLDRVKDAYAAGIDTLEEYKENKQKIIAEIERLKSTQAQEKPAAINMEDIQAKRLSFLEMASDPEASPEMLNSALKEFIDYIVYDKASEHITIFYSRTL

SEQ ID NO: 10850 - protein, 473 aa, Unknown
  Description of Unknown: Integrase B10851 sequence
  cd00338,PF13408,IPR011109,IPR038109,PF07508, Coil,PS51736,G3DSA:3.40.50.1390,IPR006119,PTHR30461, IPR036162,PTHR30461:SF3,PS51737,IPR025827,PF00239, SM00857,G3DSA:1.10.10.2600,SSF53041
MSETTQIGVIYARYSSDKQRDESIDGQIRECMAYAEREGITITNTYIDRALSAKTDDRPEFRQMILDSNKQAFNYVLVYQLDRFSRNRYDSAIYKAKLRKNGIRVISVKENIKDDPSGIILESVLEGMSEYYSAELSQKVMRGMTDNVLQGKWVGTVVPYGYKLSNNRQLEINEHEANVVRKLFDMYLQRHTLSEMASYMNANGHLTHKGKPFNTNSIKAIISNEKYIGVYSWGSERIENAIPPIIDKNIFEKAQHKRNLRAKKKGNRSELYQLCGKLECGRCGGNYVGSTGTSKTGALHHYYVCSNRRRKNACKAQNIRRDALDDIVISQTLAILNKPNVVNKIAKYAASSGKNLQSETVAQIDIIDAHIRDLKKSLDNYMTAIANGFISDVLKHRIESTEQELKDQIEIKTNLENTIIPVELTEDHIRFFLLKMAKENPSTLRGRARIIEAFVHHVTIYEDHIEIVFNYKN

SEQ ID NO: 10851 - protein, 472 aa, Unknown
  Description of Unknown: Integrase B10852 sequence
  PF13408,IPR011109,IPR038109,PF07508,Coil, PS51736,G3DSA:3.40.50.1390,IPR006119,IPR036162,PTHR30461, PTHR30461:SF3,IPR025827,PS51737,PF00239,SM00857, cd03768,G3DSA:1.10.10.2600,SSF53041
MQTKRKVAIYSRVSTLHQAEEGYSIGQQIEALAKYCQAMDWSIYDNYSDAGFSGGKLERPAMQKMIQDAESGKFDTVVVYKLDRLSRNVRDTLYLVKDVFNANNVDFVSLQENIDTKSAMGNLFITLLSAIAEFEREQIKERMQLGVKGRAKSGKTTSWTTPPFGYEYDTNTQLMTINHYQAEIVRDMFDKIISGWSIMGITTHLRKTNNKKWTHVRVKRILENVAYIGKVKYRDEIFDGEHAPILTEEIFYKAQKALEERTSKKDNTRPFQGLYMLSNIAKCGYCGTPLKIDSYKPRKDGTRKRTYTCINRNPKRIKTATYNDGKQCKESGRYDVKDVEKYVLTEISKLQLNPKSIESLYRDKPEENIAAHQERLKKLETKLSKLNDLYINELISMEVLKQKSAELLKEKSSLETFINNNKRKTNNKPAFEKLAKMDDIFKMSYDDQKRIVKTLIKRVEVKRDEINVIFKL

SEQ ID NO: 10852 - protein, 472 aa, Unknown
  Description of Unknown: Integrase B10853 sequence
  IPR011109,IPR038109,PF07508,PS51736,IPR036162, IPR006119,G3DSA:3.40.50.1390,PTHR30461,PTHR30461:SF3,PS51737, PF00239,SM00857,cd03768,G3DSA:1.10.10.2600,SSF53041
MRTSRTSVASAPSFIPKKRCAIYTRKSTDEGLDQEYNSLEAQRDAGLSFVSSQRHEGWLALDDTYDDGGFSGGNIDRPGLKRLMADIEARKIDVVVVYKIDRLTRSLPDFAKLVEVFDRNNVSFVSVTQQFNTTTSMGRLTLNILLSFAQFEREVTGERIRDKIAASKAKGMWMGGTPPLGYDVVDRKLLVNEREASLVQDIFRRYAEHGSAARLVRELDIEGHSTKSWITQSGQHRAGRPIDQQYLFCLLRNRIYLGEISHKGEYFPAQHASIISQELWEGVQAFVNKRKQGPRERKDEYPALLGGLLFAPDGQRMIHHYTKKKNGRMYRYYVPYLEKRRSAGATQDGSAQSIGALPAAEVEAAVLNEIELALMEPEALIGVWRSCLQHSAGADLQEDKVVVSMRRIADVWKQLFPAEQQRIAQLLIERVDFKDGSLDIHWREDGWIGLDPSIVAHPYVEEAKEYADEVVA

SEQ ID NO: 10853 - protein, 472 aa, Unknown
  Description of Unknown: Integrase B10854 sequence
  cd00338,PF13408,IPR011109,IPR038109, PF07508,Coil,PS51736,IPR036162, IPR006119,PTHR30461,G3DSA:3.40.50.1390,IPR025827, PS51737,PF00239,SM00857,G3DSA:1.10.10.2600,SSF53041
MKRLTSVSTSATGPVRCGIYTRKSTSHNLDRELNSLEVQREACLRYIAAHAHEGWRAVDTRYDDGGYTGANLERPAFQQLMADVAAHRLDVVVVYKVDRFSRSLLDFATVMHRLDQGRCAFVAVTQNFSTADAMGRLTLNMLMSFAEFEREMIAERTRDKIGAARRRGMWTGGSVPLGYRTEDRKLVPHAAEAAVVQQVFAQYQLLGSARAVAAELNRTGVKRRGRLRTDGQGRRARAWDKSDVLRMLTNVVYAGRIAAGADVVDGAHPAIITPAVFDAVQATLAAKRQERASADRVVYPLRGRLRCGGCGMAMTPATAKRGDASHRYYRCSTRDKQGISACPVAPVRASMLEDAVVGEVAQAARDPAVLALVQDAVRARLENRRQALLDDRRVAEAESLAPDELARLDRALAELGQRQRDAGWIAETLTRLDDVWAVMTPENRARLIGAVVTEVRFDPDGTASVSLVRGDG

SEQ ID NO: 10854 - protein, 472 aa, Unknown
  Description of Unknown: Integrase B10855 sequence
  cd00338,IPR011109,IPR038109,PS51736,IPR036162, IPR006119,G3DSA:3.40.50.1390,PTHR30461,PTHR30461:SF3,PS51737, PF00239,SM00857,G3DSA:1.10.10.2600,SSF53041
MASKRKSQQTIDSEIKRVAIYVRYSNLGGRNKETLTTLDTQESGCRAHCAYKGWEVVKVLADPGRSAFKKNTPRPEYDEALRMIQTGQIDAIVVWKVDRFTRSLHQFTKDWHDIESAGGHFVSVMEQFDTSIPMGRLMLTLVVGFAELESEMKSERAIPMHAFLKENGKVGPGPRPYGYDRTNSKNGEGACLTVNRKEADLLQTAAKWVLDGKSLSSFIHTYQPNSSVANKKMTYHGLRSSLINPTTAGLRTWDESPDGYKEGNWTPIIEREMWNKVVALITDPARRAHLNSTSKSHLLSGLMVCPECNKNVHARGWVSNTTKQRTKRYACPTCYRSVDMAAADPVAVEMLFDAVPESKWQAWQSAGTGWDIDVIKGYEAKLALIDKQYSDDIIGDDRWMTMTADIQAKIDSANNSEPLDIPMIPHLRNGWDELSLHDKQRVFRQAFASIHILPAKGAERFNVRTRIAMNER

SEQ ID NO: 10855 - protein, 472 aa, Unknown
  Description of Unknown: Integrase B10856 sequence
  IPR011109,IPR038109,PF07508,PS51736, IPR036162,IPR006119,PTHR30461,G3DSA:3.40.50.1390, PS51737,PF00239,SM00857,cd03768, G3DSA:1.10.10.2600,SSF53041
VSGTEVSVPKILRCAIYTRKSGAEKMDRDFGSIESQRALCAAHIFSQSEAGWSLIDKRYDDEGFSGGNLKRPAVKELMSDASSGGIDIIVVYKIDRMSRSLRDFLDMIAVLDANNVAFVSVTQSFSTASPMGRLTLNVLLSFAQFEREVIGERLRDWFAGARERGIWTTRRPFGYQLDKDRRLIVDPAEADLVKHIFQRYAKLRSARLIAAELNRAGLKTYLGNFFSTNQITRVLQNRLFIGERVCRGRVQPGFHEPIITRRLFDKTQELIEHNGRYKKRHCRATRTGMLNGIIFTTNGYKCVHAWVKGRGRVFRYYLSDSDPQVSLRLVAEQIEEHMLSLVWKMTGGEPYRSDDRLGRGEGLIRGIIERIEVGSSEMAVVLKSGARLHGPLIGRAAPRKPKYTLRTPPEWLDDAYQLLDEGLDWSSIARRLGVDVGSFHSIFPRFLAERHLPIASNANRMSGSRSSRGSSS

SEQ ID NO: 10856 - protein, 472 aa, Unknown
  Description of Unknown: Integrase B10857 sequence
  cd00338,PF13408,IPR011109,IPR038109,PF07508, Coil,PS51736,IPR036162,IPR006119,PTHR30461, G3DSA:3.40.50.1390,PS51737,IPR025827,PF00239,SM00857, G3DSA:1.10.10.2600,SSF53041
MIKVALYLRKSRDEENEDKEIVLKRHETQLIDYCKRNNLTIVAVYREIVSGDTIENRPEMQRLLEAVSQKEYDGVVCMEIERLSRGNQIDQVEILETFKASGTKIYTLNKIYDLTNEDIDEEFFEFALFMSRREYKIIKRRMQRGKRQALKDGYFTGSVLPYGYDKARIGRGFVLVPNKDAEIIKETFSRFLSGQKLTNIARWLNTTDLKPHYAKAFTSDMVKKILLNDTYTGKIRSKKDNISYQGKHTPIISEETFSKTQALLNVKNTKVNTFVGLVNPLAGVLRCGVCGKVMQVANSGGRYYFCHTLDCPTTGASIEKVETVLLNELKAELNNFNYFVENYETEEGEDTEKEIKRFRSELAKRQKMATRACELLEEGVYTKEKYLERVTALDKEIESLKMQIEELNNSSRDKTSIKQAIPKLAKVLEIYPELPVEDKNRLIKSICERIDYHKTAKTRRLEDIKLDIYLLI

SEQ ID NO: 10857 - protein, 472 aa, Unknown
  Description of Unknown: Integrase B10858 sequence
  IPR011109,IPR038109,PF07508,PS51736,IPR036162, PTHR30461,IPR006119,G3DSA:3.40.50.1390,PTHR30461:SF3,PS51737, PF00239,SM00857,cd03768,G3DSA:1.10.10.2600,SSF53041
MRANRTIATPSSTIVPKKRCAIYTRKSTDEGLDQEYNSLDAQRDAGLAFVASQRHEGWVVVGDGYDDGGYSGGNLDRPGLKRLMADIDAGEIDIVVVYKIDRLTRALSDFAKLVDVFDRNGVSFVSVTQQFNTTTSMGRLTLNILLSFAQFEREVTGERIRDKIAASKARGMWMGGMPPLGYDVVERKLVVNAAEADLVRGIFCRYAEHGSAAQLVRELAIEGQTTKSWVTQGGLHRPGRPIDQQYLFAMLRNHIYLGEMVHKGESYPGQHQAIVSPELWNAAHAFIERRKQGPRGHRTEHPALLAGLLFAPDGQRMIHHFTKKKNGRLYRYYVPYLHKRRNAGATLQPGTEDIGALPAAEIENAVLEQIHLALRSPEMLVATWRACQRHPAGADLDEAHVVIAMQRIGAVWEQLFPIEQQRITQLLIERIQVHGQGLDILWREDGWIGPGADIARHPLVEEMKESPEESYA

SEQ ID NO: 10858 - protein, 472 aa, Unknown
  Description of Unknown: Integrase B10859 sequence
  cd00338,IPR011109,IPR038109,PF07508, PS51736,G3DSA:3.40.50.1390,PTHR30461,IPR036162, IPR006119,PTHR30461:SF3,PS51737,PF00239, SM00857,G3DSA:1.10.10.2600,SSF53041
VKDKIVKKVEHLPQLTDVKRTDKLIQRVAAYARVSTEKEEQQTSIEAQKDYYSTYIKTHVGWEFVGVYADEGISGCSTKRRVQFNQLMNDCRDGKIDMVLTKSISRFGRNTVDTLNAIRELKSNGIGVYFEKEQIWTLDSKGEFIITLMSSLAQEESRSMSENILWAVRKRYAQGKGSFAYSRVLGFDRGKEKFEIVINPKEAVQVCKIFRMFLQGLTPHTIGIAMTAAGIPSPGGKDKWNSATVRRMLSNEKYKGDMLLQKEFTVDFLSKKKKKNEGELPQYYVSNNHEPIIDPWLFDYVQEQLQKRTRTKEHRYSGIGYLNSKIFCTKCGAAFGPRPWHSTSYNNIVWQCRNRYSDVKCKTVNIYDNLLFYVLHDVARKKIVAKDIRTAIVEFAVDEVSPKKLKAIEQYLTDFETMSPLEMLSDADDLSFVIQRIMVKPDRQLEVKWLDGSMDRYEIPKYTPRRGIEKPV

SEQ ID NO: 10859 - protein, 472 aa, Unknown
  Description of Unknown: Integrase B10860 sequence
  cd00338,IPR011109,IPR038109,PS00397,Coil, PF07508,PS51736,IPR036162,IPR006119,PTHR30461, G3DSA:3.40.50.1390,PTHR30461:SF3,PS51737,PF00239,SM00857, G3DSA:1.10.10.2600,IPR006118,SSF53041
MKTAAAYIRVSTDDQIEYSPASQLEKIREYAKRNDYILPDEYIFVDEGISGRNTAKRAAFNRMIGTAKQKPKPFDAILLWKFSRFARNREDSIVYKSMLRKQCKIDVISISENTGDDKMSVLIEAMIEAMDEYYSINLSEEVKRGMNEKASRGEALTIPSFGYTIRKGVYIPDPDTAPLVRQIFSDFLSGVPVRTIATKLNDSGFRTRRGNPFENRTVKYILQNPVYIGKMRWNPDGKTDYTGAAADTNVIPAHHAPIIDMKTWDETQKKIKGSPRTKYMRSGDPKEPFMLQGLCRCSACGATLTRATSSGVQCYAYAHGKCRHSHSISIKKLNAAVIDALRISGVDGDLKINPISQQKKPETENYDAQIAKEKKKLDRIRDAYESEAYTLSEFKTARQKILDRIAHLEQQQATTPEAVPDVHKLRSRIMSILPSLTSPAVPESTKNQLLKSIIERIVFYRSTCDIEIYFYT

SEQ ID NO: 10860 - protein, 471 aa, Unknown
  Description of Unknown: Integrase B10861 sequence
  IPR038109,PS00397,IPR006119,PS51737,PF00239, cd03768,G3DSA:3.40.50.1390,PTHR30461,IPR025827,SM00857, G3DSA:1.10.10.2600,SSF53041,IPR011109,PF07508,PS51736, IPR006118,PF13408,Coil,IPR036162,PTHR30461:SF3
MISNTVVALYIRVSTQEQASEGYSIDEQRERLVKYAEAQSWSVYRVYSDPGFSGGSLERPGLRSLILDVNAGKVNKVVVYKLDRLSRSQKDTLYLIEDVFLPASVDFVSMTENFDTGTPLGRAMIGILSVFAQLEREQIKERMSLGREGRAKSGLFHGSNRIPIGYRYEDGQLVVDPYEAEIVRRIYREFNSGKTKASIASGFQREGITTHFGKITAGTVHSVVTNRVAIGIIVHNGTEYPGQHEAIIDREEYDRAADRLKRQAATDQNHFNFQKHASAITGLCYCVNCQKKMIIQHKGRRRKDGTIGRALCCPGKTKTGCTTPRYDLGVIERYVLDQIKKLRLDPEYFKETRSNTQTAGDLERIEILEDRIKGNDVKISRLMDLYTIGGIDLASIKDKIETYNLESNTLREEIERIRETLSEEIGDEEIRRLAESLEADAEDPEKARIACKALIDRIDFDGQDITIQWTF

SEQ ID NO: 10861 - protein, 471 aa, Unknown
  Description of Unknown: Integrase B10862 sequence
  IPR038109,PS00397,IPR006119,PS51737,PF00239,G3DSA:3.40.50.1390 ,PTHR30461,IPR025827,SM00857,G3DSA:1.10.10.2600, SSF53041,IPR011109,PF07508,PS51736,IPR006118, cd00338,PF13408,Coil,IPR036162,PTHR30461:SF3
VKNKNVVGLYVRVSTQEQAKEGYSIDEQKERLTKYADARDWIVYRVYADPGFSGAKIERPGLKEMIDDIVSGKLDKIIVYKLDRLSRSQKDTLYLIEDIFLENSVDFVSMTENFDTATPFGRAMIGILSVFAQLEREQIKERMSLGREGRAKSGLFHGSTKVPIGYRYNNGLLIVDPYEARIVRRIFQEYVDGRSIYSIVADLKADGLTSSYGMISRPTIQYILRNPVYTGVIRHVNNIYDGQHEAIITEDLWERASARIESMRDCPNGYNFNKHTSIITGLCYCASCGRKMRFNWGQKRADGHRIRYITCPDKKVSNCPVTPVHAVAVEEYLLNQLKKLTFDPKYFEKIRCKSDPIDRSEEILFFNERIKENKSKISKLMDLYTIGGIDFSIVADKIQLLTREVNTLTREIDQIREETSGVSEEEIKERLYTLDEILEEGDIEKTRNVVMALIDRIEIGEHKTVTIKWSF

SEQ ID NO: 10862 - protein, 471 aa, Unknown
  Description of Unknown: Integrase B10863 sequence
  PF13408,IPR011109,IPR038109,PF07508,Coil, PS51736,G3DSA:3.40.50.1390,IPR006119,IPR036162,PTHR30461, IPR025827,PS51737,PF00239,SM00857,cd03768, G3DSA:1.10.10.2600,SSF53041
LEKEFNSLDAQREAGEAYIASQKHEGWICLPDQYNDGGFSGGNMERPALERLLNDVRDGKVDCVVVYKIDRLSRSLMDFAKIVEVLDQHNASFVSVTQQFNTKDSMGRLTLNILLSFAQFEREIISERIRDKVAASRKKGKWTGGMPTLGYDIDHTTGRLVVNEEEADQVRQLFNLYLELKSLRRVVVEASERGWTTKTWMTKRGTLHQGLSFTNQRLSYLLRNTIYIGKIRHKDQLYEGEHQAIIDEDTWNEVQAQLKLGSQIPDQPRNRYQSLLQGMLHCTACNTSMVHLPVTKKGNKLYRYYVCRNAQANGFDKCPNPTLPADEVERFVLERLVDLGSNEHLLDEVVKQVQILQDERIENLQREARRIQLRIETLQQGDEPEDKRQRRSLEAQLRSLNERVEELKTHSIKPEQCENALGQFETLLANLTVDEKSWLIKLVFERIDFDSESGTLKFHLHDKELLTTSAE

SEQ ID NO: 10863 - protein, 471 aa, Unknown
  Description of Unknown: Integrase B10864 sequence
  cd00338,IPR011109,PF07508,Coil,PS51736, IPR036162,IPR006119,G3DSA:3.40.50.1390,PTHR30461,mobidb-lite, PS51737,PF00239,SM00857,SSF53041
VCASITHVRAVLYARQSLDKAGTGLAVARQLAEDERLCELRGYEVVARESDNDMSGYSGKARPGYERVIALMRSGAVDVVVVWAVDRLTRRLADLIALIDLCEQTGVRVATVSGDLDLSTPSGKLVARLLGSVAQGEVETKSARQQLAERQAAQAGKPRLGTPRPFGWQPDRVALDEAEAAAVADACTVLLCGGTITGVCRDWEARGLRPHQAPFGPLREHPWTTTSVRAILRNPRNAGIAVYKGAEVGRGQWQEIVAEPTWRAVAALLADPGRKPSQGVRSLLGRVALCRCGTYVTGSRGANGQPSYRCHIPARAGREGPHVFTSRAPVDAYVEAATVAWLARPGNAERLAPARGDGAGPLREEAAAIRARLARLGPLFAAGLISEQDMTGGRAAGEARLAQIGARLAEMGRESALAPFAAGRDVRETWAALLPDRRRAVIAAVWEVTLLPSGRGNRVFRTETVRLMPRA

SEQ ID NO: 10864 - protein, 471 aa, Unknown
  Description of Unknown: Integrase B10865 sequence
  PF13408,IPR011109,IPR038109,PF07508, Coil,PS51736,IPR036162,PTHR30461, IPR006119,G3DSA:3.40.50.1390,PTHR30461:SF3,IPR025827, PS51737,PF00239,SM00857,cd03768,G3DSA:1.10.10.2600,SSF53041
MIAIYTRVSTTEQAQEGYSLQEQEVRLKSYCEAMKWNPCQIYTDPGYSGGSMKRPALQQLIRDVKAKKISRVVVYKLDRLSRSQKDTLYLIEEVFLANNCDFVSMTENLDTGSALGKAMIGILAVFAQLERETIKERMVMGKIARAKEGKWCGGSTAPYGYNYTDGQLITDEVEKFHVMEAFNLAERGWSTSKISTTFNRKGYTPKRGVNCWTDITIRRMLNNQVYIGKVNFYGEQYDGQHEPIISNEQFERVQNVLKKRSEHYERFNPDPHRRVSYFGGYIRCARCGAGYQLFTANSKRNGKSYKYKYFVCNSRSKRNPALVRDPSCKNDYWKPELLEETVFGEIRKLTIDQIDEHHLTLRPEDIQKKSIKAEIDQIDRKVQKLLELFLMDGIPKDRVQEQMNALSVQRGHLQEELDSIPETDIDEVKTTIKNIPDILDHGSYEDIRDLISVLIDYISIDGQNLTIYWTF

SEQ ID NO: 10865 - protein, 471 aa, Unknown
  Description of Unknown: Integrase B10866 sequence
  PF13408,IPR011109,IPR038109,PF07508,Coil, PS51736,G3DSA:3.40.50.1390,IPR006119,IPR036162,PTHR30461, PTHR30461:SF3,PS51737,IPR025827,PF00239,SM00857, cd03768,G3DSA:1.10.10.2600,SSF53041
MRKVAIYSRVTTINQAEEGYSIQGQIEALTKYCEAMEWKIYKNYSDAGFSGGKLERPAITELIEDGKNNKFDTILVYKLDRLSRNVKDTLYLVKDVFTANNIHFVSLKENIDTSSAMGNLFLTLLSAIAEFEREQIKERMQFGVMNRAKSGKTTAWKTPPYGYRYNKDEKTLSVNELEAANVRQMFDMIISGCSIMSITNYARDNFVGNTWTHVKVKRILENETYKGLVKYREQTFSGDHQAIIDEKTYNKAQIALAHRTDTKTNTRPFQGKYMLSHIAKCGYCGAPLKVCTGRAKNDGTRRQTYVCVNKTESLARRSVNNYNNQKICNTGRYEKKHIEKYVIDVLYKLQHDKEYLKKIKKDDNIIDITPLKKEIEIIDKKINRLNDLYINDLIDLPKLKKDIEELNHLKDDYNKAIKLNYLDKKNEDSLGMLMDNLDIRKSSYDVQSRIVKQLIDRVEVTMDNIDIIFKF

SEQ ID NO: 10866 - protein, 470 aa, Unknown
  Description of Unknown: Integrase B10867 sequence
  IPR011109,IPR038109,PF07508,PS51736,G3DSA:3.40.50.1390, PTHR30461,IPR006119,IPR036162,PS51737,PF00239, SM00857,cd03768,G3DSA:1.10.10.2600,SSF53041
MKSHRNTPAPPTLAPRKRCAIYTRKSTDEGLDQDYNSLEAQRDAGLAFVSSQRHEGWTAVQDGYDDGGYSGGNLDRPALKRLMADIEDGRVDIVVVYKIDRLTRSLPDFAKLVDVFDRNGVSFVSVTQQFNTTTSMGRLTLNILLSFAQFEREVTGERIRDKIAASKAKGMWMGGMPPLGYDVVERKLVINTPEADLVRDIFRRYAEHGSAAEIVRELAIEGRTTKAWETQGGLFREGRPIDQQYLFKMLRNRIYLGEIQHKGTSYPGQHDAIIDQKLWDAAHAFVERRKHGPREGITQHPALLAGLLHAPDGQLMIHSYTRKKNGRLYRYYVPYLHKRRSAGATLAPGSVDIGSLPAAEIETAVLEQIHKALRAPELMVATWRSCQKHPKGANLEEAQVVVAMQRIGAVWDQLFPKEQQRITRLMIERVQLHERGLDILWREDGWIGLGADIASHPLVEESASTEGAYA

SEQ ID NO: 10867 - protein, 470 aa, Unknown
  Description of Unknown: Integrase B10868 sequence
  IPR011109,IPR038109,PF07508,PS51736, IPR036162,PTHR30461,IPR006119,G3DSA:3.40.50.1390, PTHR30461:SF3,PS51737,PF00239,SM00857, cd03768,G3DSA:1.10.10.2600,SSF53041
MKSHRNTPAPPTLAPRKRCAIYTRKSTDEGLDQDYNSLEAQRDAGLAFVSSQRHEGWTAVQDGYDDGGFSGGNLDRPALKRLMADIEDGRVDIVVVYKIDRLTRSLPDFAKLVDVFDRNGVSFVSVTQQFNTTTSMGRLTLNILLSFAQFEREVTGERIRDKIAASKAKGMWMGGMPPLGYDVVERKLVMNAPEADLVRDIFRRYAEHGSAAEIVRELAIEGRTTKAWQTQGGLFREGRPIDQQYLFKMLRNRIYLGEIQHKGTSYPGQHDAIIDQELWNAAHAFVERRKHGPREGITQHPALLAGLLHAPDGQLMIHSYTRKKNGRLYRYYVPYLHKRRSAGATLVPGTVDIGSLPAAEIETAVLEQIHKALRAPELMVATWRSCQKHPKGANLDEAQVVVAMQRIGAVWDQLFPKEQQRITRLMIERVQLHERGLDILWREDGWIGLGADIANHPLVEESALTEEACA

SEQ ID NO: 10868 - protein, 470 aa, Unknown
  Description of Unknown: Integrase B10869 sequence
  cd00338,PF13408,IPR011109,IPR038109,PF07508, PS51736,G3DSA:3.40.50.1390,IPR036162,PTHR30461,IPR006119, PTHR30461:SF3,IPR025827,PS51737,PF00239,SM00857, G3DSA:1.10.10.2600,SSF53041
LNVVIYTRVSTAEQANDGYSIHEQKERLEMYARAQGWNVIYVYSDPAYSGGSLNRPSMQKLISDASTGAFSKVIVYKLDRLSRSQKDTLYLIEDVFLANNIDLVSMTENFDTGSPFGRAMIGILSVFAQLEREQIKERMNLGKDARAKGGYFHGGGRIPIGYDYIDGELIVNDYEAYQIRLIYDLAESGMPIYSVYKHMRDEGYQTKHGLWAESNVRDVLKNNLYTGMISWKGNIYKGRHKPIISAERYEAMQERLNLRKTQFPKHPFARTSLLGGLIFCGNCGARYFVKQNTAKHPGVTAQKYYTCYSRGKTCKRLIRDPNCKNKSFNTAVLDGIIINEVMKLAADPGALNSFVEDPYQDNTAAINKRMEEIETQIRKLIDLYQVDGIDFEVLNMKVSDLNRERKTLEDGKDQRPAPRVSIPAAKEILSTVPDILSRSDKEELKAAVHALIDGIIIRPDDGVEIHWAFA

SEQ ID NO: 10869 - protein, 470 aa, Unknown
  Description of Unknown: Integrase B10870 sequence
  cd00338,PF13408,PS00397,Coil,PS51736, G3DSA:3.40.50.1390,IPR006119,IPR036162,PTHR30461,PTHR30461:SF3, IPR025827,PF00239,SM00857,IPR006118,SSF53041
MNNVMEEYKKWQRVIRVAFYIRVSTSEQVSKENSLPAQKLALEKYAEENGMKCVGLYADEGKTAAKQIKKRKAIHEMLADIRDGKIDLVIFTRFDRFTRNPAEYYKMMETFDAAGVQWRATAQPELDLNTPMGQTLILFYLGIGQQEIANISERIKATAQVRIQKGSPITGAQSLPFTHTIGLNDHGEKIVIPDPEQLLIFWTYVEHFELYHSKRAAMIHTNETFGISYNYNTYGNAMKNTLIYGHYKGVDDYCLPIASKERWESWKKIGKKNVRKRSSNIEYIFSSLCICAQCGHRMSGSASNPRGKEYYYYRCNWHTTHGACDHSKRINELKIEEYLIEQIKPDIKRYIAEFKIAKKEPIKKASNADKIKKLEKRLQRVNYQYEEDRISQEEYDRKYKALVEEITKAREEQNEPEITQRDLEPLRAFLQLDLNEIYKTLSREEKRALWRSVVSEIYIYPDGRIEPKFF

SEQ ID NO: 10870 - protein, 470 aa, Unknown
  Description of Unknown: Integrase B10871 sequence
  IPR038109,PS00397,IPR006119,PS51737, PF00239,G3DSA:3.40.50.1390,PTHR30461,IPR025827, SM00857,G3DSA:1.10.10.2600,SSF53041,IPR011109, PF07508,PS51736,IPR006118,cd00338,PF13408,Coil,IPR036162
MEKIRTGALYIRVSTADQAELSPDAQKRLLLEYAKKNHIIIGEDFIYEESVSGRHAQKRPRFQEMIAMAKSQAHPIDVILVWKYSRFARNQEESIVYKSMLKRDHVDVISVSEPLIDGPFGSLIERIIEWMDEYYSIRLSGEVLRGMKEKALRNGYQSVPSLGYQAVGKGKPFIINKDEIEIIKFVMDSYDNKNLDPSGIARRCNAMGYRTKRGNLFERRTIERILRNPFYAGTVAWNGVEFEGDHETIISKEQYNNRIKLMDARKKTQSHDVSTCRHWLSGLVKCSTCGASLGHNTAKTPFFQCWKYAKGYHDGSCYISERKLERMVLQYFEDILNGKEFTYKSRADKATINNDELTFLKHELDKIDTKESRVKDAYENEIDSLEEYKENKERLNKQRDEIKDKIEAIKKKTVDKPVPRDEALKEIKNVYEILKNPTASYEVKGNFIRSIVDKIVFDRKKCLLFFDINL

SEQ ID NO: 10871 - protein, 470 aa, Unknown
  Description of Unknown: Integrase B10872 sequence
  cd00338,PF13408,IPR011109,Coil,PS51736, IPR036162,IPR006119,PTHR30461,G3DSA:3.40.50.1390,PTHR30461:SF3, PS51737,IPR025827,PF00239,SM00857,SSF53041
MYKQLERYRQEGKPIRMAKYVRCSSDEQKKNGYTINDQLDLLEEFGQEYELIGAGEYIDEGISATLEINKRKALAQLIKDAKAGKFEIVIFKCIDRFFRNVGEYYECQKQLRKAGVTWISIEESDLDPEDDDAAFKINIYLTMAEYEAKKTSKRIRFNNKMRIKNKQVVTGAQCFHFPWHVTGDKKSRHLERNMDEAEALYDLLDYFERHQSKAGTVAYINMKYNKTLAVNTMDKLLKDTLLYGEYKGVPDYVEPYITKERFDKIQETLKRNARYSEVNDRVFLFSGLLKCPHCGRNLVGNYLKNNFNGTYSYRCNKYRMEKLCIYNQSTSERKIEKQLLDNLETYITNEIIRVESLSEQSAPKTDHSKKIESLKKEMDRLNTMFRKGRIEEEEYDKEYFALEKELKKLDVEEKPAERNLDTLKGLLEMDYRSLYSELDKEHKKAFWRNLIKEFTLDDNKKIVPESIIFF

SEQ ID NO: 10872 - protein, 470 aa, Unknown
  Description of Unknown: Integrase B10873 sequence
  cd00338,PF13408,IPR011109,IPR038109, PF07508,Coil,PS51736,G3DSA:3.40.50.1390, IPR006119,IPR036162,PTHR30461,PTHR30461:SF3, PS51737,IPR025827,PF00239,SM00857,G3DSA:1.10.10.2600,SSF53041
LIPAIEYTRASTDHQEYSVGDQHKFNLDWAKRNKYKIVKTYSDDGISGGTVAKRPGFLQMIEDITTGRLPDIKALLIWDSFRFSRNMVEFLTYKQMIRQHGISVIAVSEPMVQDEDAQLYIDAINGASGELYLRKLSKDSKRGIRAKVVDRKEHLGFAPFGYRMDRNARQLVIVDDEAEWVRYIFQQVIDGVPYLQIAKKLNENGCKTRKGYNWTNTQIRYTLKNRTYCGQLEVNLDGQHGIYDGKHPPIVEKETFDKVQTIMEERAAKRKPYEHSTNEYVHWLSGLLRCPYCGGSFSYQKGYGGRGSRYRCNNTVSGAVCGNLTIPVKTVENLVFEKLKEICDFPEVICNLHLTRPQPKSIIDYEAEIKKLKNQLSRAKKAYIEEIDTLEEYRENKVRLTAAIEKMEARRDSIAQPQFDQTAFQEKCLSALSLLQSDVPMDQKAAASHALIEKITADNVKKEITIYFYA

SEQ ID NO: 10873 - protein, 470 aa, Unknown
  Description of Unknown: Integrase B10874 sequence
  cd00338,PF13408,IPR011109,IPR038109,PF07508, Coil,IPR036162,PTHR30461,IPR006119,G3DSA:3.40.50.1390, PTHR30461:SF3,PS51737,IPR025827,PF00239,SM00857, G3DSA:1.10.10.2600,SSF53041
LKNGFVVVNEYIDRAISGKTDNRPSFQRLIKDSDKGHFDAVIMYTLDRFARNRYDSAIYKAKLKKNGVRVFYAKQPMPDTPEGIILESVLEGYAEYYSENLARSIKRGMKENALHTIAMGSLGLGYKIGEDRKYEIDPVGAKAVRAIFTMYAEGKSKTEIVNWLNEHGFKTSQGNQFNKNSLSRILRNDKYIGVYRYADVVVENAIPPIIDKHLFDKVQALLKHNFASRARNKAKEDYLLSTKLFCGHCGSPMIGESGTSKLGRVYHYYKCSKRKRERDCSKKVEKKDWLEELVVRYTVHHVLTDENIELIATKAMELIEKDLQDTSVLVGLQGMLKDVNKKIKNLMSAIEQGIITSSTKERLEELELERLNIEGQIAREEMKKPLLSKERIVYWLTSFKSGDIQDIEYQRRIIDTLVNSVFVYDDDGNGRRIVLTFNISGNNTLTIECSDIEGIAPPKKGLAFQQVLFP

SEQ ID NO: 10874 - protein, 470 aa, Unknown
  Description of Unknown: Integrase B10875 sequence
  IPR011109,IPR038109,PF07508,PS51736,G3DSA:3.40.50.1390, IPR006119,IPR036162,PTHR30461,PTHR30461:SF3,PS51737, PF00239,SM00857,cd03768,G3DSA:1.10.10.2600,SSF53041
MKRTTKEAPTLTPKKRCAIYTRKSTDEGLDQEYNSLEAQRDSALAFISSQRHEGWIANDDGYDDGGFSGGNTNRPALKRLLADVEDGRIDVVVVYKIDRLSRSLSDFAKMVDLFDARGVTFVSVTQQFNTTTSMGRLTLNILLSFAQFEREVTGERIRDKIAASKAKGMWMGGTPPLGYDVRERKLVVNESEAVLVRDIFARYAETGSAAQLVRELQIEGHTTKVWITQTGKRHDGKVIDQLALFTMLRNRLYLGEMTHKGQAFPGQHEPIVTPELWAAVHAYVDRRKMGPRIQHKKEPALLTGLLYAPDNQRMLPTYTQKKNGKRYRYYVPYLEKRQSAGATYDPTIRNIGPLPALEIEAAVLAQVHKALQQPEMIVGVWQAGMALRERQQMDEPTVLVAMRQMSTVWDNLFPIEQNRIMRLLIERVQLHEDGMDIIWRDDSWQRFCRELERNEFVAEQRAPIDAETVE

SEQ ID NO: 10875 - protein, 470 aa, Unknown
  Description of Unknown: Integrase B10876 sequence
  IPR011109,IPR038109,PF07508,PS51736, G3DSA:3.40.50.1390,PTHR30461,IPR006119,IPR036162, PTHR30461:SF3,PS51737,PF00239,SM00857, cd03768,G3DSA:1.10.10.2600,SSF53041
MSSPRATPQPAVTPKKRCAVYTRKSTDEGLDQEYNSLQAQRDAGLAFITSQRHEGWITVDDGYDDGGYSGGNMERPALRRLMADIEAGRIDTVVVYKIDRLTRSLADFAKLIEVFDRNGVSFVSVTQQFNTTTSMGRLTLNILLSFAQFEREVTGERIRDKIAASKAKGMWMGGVPPLGYDVVERKLVVNEREAALVRDIFRRYGEHGSAARLVRELAIEGHTTKAWVTQTGRQRPGGSIDQQYIFKMLRNRIYLGEISHNGRWHAGQHAPIVTPELWDAAQSFIERRKQAPREHAAQHPALLAGLLFAPDGQRMQHSFVKKKSGRQYRYYVPYLHKRRSAGASLSPSAPDIGHLPAAEIENAVLAQIHAALATPQMLIAVWKSCQQHPAGAALDEAQVVVAMQRIGEVWAQLFPAEQQRITRLLIERVQLHGQGLDIVWREDGWIGFGADIGAHPLVEEAREQTEEALA

SEQ ID NO: 10876 - protein, 470 aa, Unknown
  Description of Unknown: Integrase B10877 sequence
  IPR011109,IPR038109,PF07508,PS51736,IPR036162, IPR006119,PTHR30461,G3DSA:3.40.50.1390,PTHR30461:SF3,PS51737, PF00239,SM00857,cd03768,G3DSA:1.10.10.2600,SSF53041
MSSVRRNQTPAITPKKRCAVYTRKSTDEGLDQEYNSLEAQRDAGLAFIASQRHEGWLAVDDGYDDGGYSGGNMERPGLRRLMIDIEAGKIDTVVVYKIDRLTRSLPDFAKLVDVFDRNGVSFVSVTQQFNTTTSMGRLTLNILLSFAQFEREVTGERIRDKIAASKAKGMWMGGVPPLGYDVVERKLVVNEREAVLVRDIFRRYAEHGSAARLVRELEIEGHTTKAWVTQSGRERLGRSIDQQYLFTLLRNRIYLGEICNHDTWYSAQHDPIISQELWDAAHAFIERRKQAPREHRAKHPALLAGLLFAPDGQRMLHSFVKKKNGRQYRYYVPYLHKRRNAGASLAPHTPDVGHLPAAEIEEAVLAQIHAALSSPQMLIAVWRSCQQHPVGAALDEAQVVVAMQRIGDVWSQLFPAEQQRITRLLIERVQLHGHGLDIVWREDGWIGFGADISTHPLIEESQERVEEVWA

SEQ ID NO: 10877 - protein, 470 aa, Unknown
  Description of Unknown: Integrase B10878 sequence
  cd00338,PF13408,IPR011109,IPR038109, PS00397,Coil,PS51736,G3DSA:3.40.50.1390, IPR006119,IPR036162,PTHR30461,IPR025827, PS51737,PF00239,SM00857,G3DSA:1.10.10.2600,IPR006118,SSF53041
MDKNISLKYKQNKNGIIFVAIYVRVSTEEQVKFGFSIQAQIDALVKYCNEHNYKYEIFIDEGISASTMKRPALQRILSKIEQFDMVLFTKLDRLSRNVLDANTINQILKENKCVMKAIDEDDVDTSTADGTFIFNLKVSLAQREIGKTSERIKFIFESKRQRGEVTSGTRKYGYNIVNKHFEINEEEANNIRKLYKEYINNNGNLKETYNYFVDHFPNKGYDAMSNYLKDSAYIGKYKLYRQNKYLDNYIPAILDLKTWEKVQTLRTRKTIERKHNYIDLFSGLLYCSVCGHRLSKHIDYRVKNPVARYECFSVNKFKVNSTERVCNNNKTIRESKIETFLLNNLNNSIANFVAKVSIEQSSIIKKDNSQQLKRIQTKINKLKDLYLDDLIDKDSYKKDFEKYQQELANLKESEILEVPKRDLSHLNNILNSDYKTIYNNLNTKNKKKFWLSIIDKIYIENGEIQEVTFL

SEQ ID NO: 10878 - protein, 469 aa, Unknown
  Description of Unknown: Integrase B10879 sequence
  IPR011109,IPR038109,PF07508,PS51736,IPR036162, IPR006119,G3DSA:3.40.50.1390,PTHR30461,PTHR30461:SF3,PS51737, PF00239,SM00857,cd03768,G3DSA:1.10.10.2600,SSF53041
MKTPATRSPALTPKKRCAIYTRKSTDEGLDQEYNSLEAQRDSALAFISSQRHEGWIAIDDGYDDGGFSGGNTNRPALKRLLADVEDGRIDVVVVYKIDRLSRSLSDFAKIVDLFDEHGVTFVSVTQQFNTTTSMGRLTLNILLSFAQFEREVTGERIRDKISASKAKGMWMGGTPPLGYDVRDRKLVVNEPEAALVRDIFARYAETGSAAQLVRELQIEGHTTKVWVAQNGRRHEGKIIDQQCIFTMLRNRLYLGEITHKGQSFPGQHEPIVSTELWTAVHAFVDGRKQGPRTRYKKEPALLTGLLYAPDGQRMLPTYTQKKNGKRYRYYVPYLEKRHSAGATYDPTRPNIGPLPALEIETAVLAQVHKALQEPEMIIGVWQAGMALRERQEMDEPTVLVAMRQMSEVWENLFPIEQNRIMRLLIDRVQLHEDGLDIIWQDDSWQRFCRELERHQFVAEQRAPADEETV

SEQ ID NO: 10879 - protein, 469 aa, Unknown
  Description of Unknown: Integrase B10880 sequence
  IPR038109,PS00397,IPR006119,PS51737, PF00239,G3DSA:3.40.50.1390,PTHR30461,IPR025827, SM00857,G3DSA:1.10.10.2600,SSF53041,IPR011109, PS51736,IPR006118,cd00338,PF13408,Coil,IPR036162,PTHR30461:SF3
MSTFPDDATCKSIRAALYVRVSTEEQKVHGLSIESQTEALDEWAKTHSVKVVGHYNDAGISARRRYTKRPELLRLLEDVKAGKIDLIVFTKLDRWFRNIAEYYKVQEILEANHVNWKTIHEDYDTSTASGRLKINIMLSVAQDEADRTSERIKAVFDAKKKNGEPVTGHVPTGYLLDGKKIVFDPEWQEAVTAFFSEYLASGSPSQARKAALARSGKVISYQLATLMLKNQAYSGSFHGVPGMCPQYISEAQFARVQQLRQSNPKAAPTGRTYLFSGLIFCGECGRRLSGACRKVSRNDGSIYEFKYYICQNHYVRSGCPNNSCTRERYIEEELLKLLPAEVDQAIVDTSGARLLSKQGNADLSKMKRRMARLQELYLNELIDLAAYSKEYNEIKGRMQAAEAAKAAESREADLRMLSGLDWAALYSTMNGHEQRELWRSLLSKVFVSKDKAISVELNPDIGGALIHVK

SEQ ID NO: 10880 - protein, 469 aa, Unknown
  Description of Unknown: Integrase B10881 sequence
  PF13408,IPR011109,IPR038109,PF07508,Coil, PS51736,IPR036162,PTHR30461,IPR006119,G3DSA:3.40.50.1390, PTHR30461:SF3,PS51737,IPR025827,PF00239,SM00857, cd03768,G3DSA:1.10.10.2600,SSF53041
MIALYSRVSTQEQAAEGYSIGEQQERLAAFALSFGWKDFRHYTDPGFSGASLDRPAMQEMIRDVKAGKVSRVIVYKLDRLSRSQKDTLFLIEDVFLAHGCEFVSMSESFSTETPVGRATIGLLAVFAQLERETIKERLTVGRIARAKAGLPHVGAEKPCGYAYQDGHLSVIEDEAAQVREIYRLYLSGLSLREIAISMTDRGHLFRGGPWNQKHVKAVLGNVLYTGKVHFAGEVYPGQHEAIIDQETFDRVQDLMATRRRALREKGERTHSGKSLLTGLVYCAKCGCRLTPSVTFKRGRRYEYLKCPARRDSMVARKIGHRCDAKAVRSEKLEEAVLSQIKLLQADPAAMIPKRKEEPDERPGLRAQVARLDSQISRLLDLYADGSFSLDVLTEKTEALRAARASCQAELDAAEKKAASSGADRAQEALRSFPEAIEAMDAPRLKMIIRDLIDRIEYADDDLRIFWKIK

SEQ ID NO: 10881 - protein, 469 aa, Unknown
  Description of Unknown: Integrase B10882 sequence
  PF13408,IPR011109,IPR038109,PF07508,Coil, PS51736,IPR036162,IPR006119,PTHR30461,G3DSA:3.40.50.1390, PTHR30461:SF3,PS51737,IPR025827,PF00239,SM00857, cd03768,G3DSA:1.10.10.2600,SSF53041
MIALYSRVSTQEQAAEGYSIGEQQERLAAFALSFGWKDFRHYTDPGFSGASLDRPAMQEMIRDVQAGKISRVIVYKLDRLSRSQKDTLFLIEDVFLAHGCEFVSMSESFSTETPVGRATIGLLAVFAQLERETIKERLTVGRIARAKAGLPHVGAEKPCGYAYQDGRLSVIEDEAAQVWEIYRLYLSGLSLREIAISMTDRGHLFRGGPWNQKHIKAVLENVLYTGKVHFAGEVYPGQHEAIIDQETFDRVQDLMATRRRALREKGERTHSGKSLLTGLVYCAKCGCRLTPSVTFQRGHRYEYFKCPARRDSMVARKIGHRCDAKAVRSEKLEEAVLSQIKLLQADPAAMIPKKKEEPDERPGLRAQVARLDSQISRLLDLYADGSFSLDVLTEKTEALRAARASCQAELDAAEKKAASPGADRAKEALRSFPEAIEAMDAPRLKMIIRDLIERIEYADDDVRIFWKLK

SEQ ID NO: 10882 - protein, 469 aa, Unknown
  Description of Unknown: Integrase B10883 sequence
  IPR038109,PS00397,IPR006119,PS51737,PF00239,G3DSA:3.40.50.1390 ,PTHR30461,IPR025827,SM00857,G3DSA:1.10.10.2600, SSF53041,IPR011109,PF07508,PS51736,IPR006118, cd00338,PF13408,Coil,IPR036162,PTHR30461:SF3
MNEKTVVGLYIRVSTQEQASEGYSIEEQKERLTKYADAQDWTIYRLYSDPGFSGGSIERPGLKTLIADVVAGKLDKVAVYKLDRMSRSQKDTLYLIEDIFLPNGVDFVSMTENFDTGTPLGRAMIGILSVFAQLEREQIKERMSLGREGRAKSGLWHGSSRIPVGYLYENGQLKIEPFEAEIVRRIYREFNNGRTVAAIVADFRREGITTKYGRIQPSTVRSVIRTKTNIGVVSHNGVEYQGQHDPIISREEYDRANQRLDDQAQTDVNHYNFRKHVSPITGLCYCAVCQSKMMIQYKNSRSKEVNRVITCLHKGATGCNNPRYPLLEVESYVIDQIKKLRLDPEYFKETRSQTQTAGELERIEILEERIKGNDVKVSRLMDLYSIGGIDLSALKDKIEILNLESTTLRSEVEKLRRQLSETLSDQDIQDLVYSLEETVEDPEQARIVVKALVKRIEFQGQDISIYWNF

SEQ ID NO: 10883 - protein, 469 aa, Unknown
  Description of Unknown: Integrase B10884 sequence
  PS00397,IPR038109,IPR006119,PS51737,PF00239, cd03768,G3DSA:3.40.50.1390,PTHR30461,IPR025827,SM00857, G3DSA:1.10.10.2600,SSF53041,IPR011109,PF07508,PS51736, IPR006118,PF13408,Coil,IPR036162,PTHR30461:SF3
LKRAFLYVRVSTQEQAKEGYSIDEQIDRLKNYCKAMHWSIVDTYVDAGFSGAKTDRPALQSMLRDIKDGKGDIVCVYKLDRLSRSQKDTLSLIEDNFIANGVDFVSMTENFDTSTPFGRAMIGILSVFAQLEREQIKERMKMGKMGRSKEGKWKGGLTPVGYEYINGTLVINEYEAMQIREIHELYQKGNGFHEIVRRFDAKGYAHRYGKWTVKRVRDAMLNETYLGKIHHKGELLQGIHEPIIDEKIYKKTLDVYNSHDYKQKGKHLSRVALLGGLIYCSKCGARYGYYNYGGNKYRYYACYSRRRYAQMSKADTCDNHIWKAEELENLIIGEIQKLADDPTCIHGMRTNSESLESQNKTLILEREIEKINSQKSRFMDLYGLGEFTAQELTAKIAPLNERRQALEHEISLIQSDDTALSEDEAVKIVRSFSDVLERGDFNETKILIQSLVEKVEIDGQNVDIFWKFA

SEQ ID NO: 10884 - protein, 469 aa, Unknown
  Description of Unknown: Integrase B10885 sequence
  cd00338,PF13408,IPR011109,PS00397,Coil, PS51736,G3DSA:3.40.50.1390,IPR006119,PTHR30461,IPR036162, PTHR30461:SF3,PS51737,IPR025827,PF00239,SM00857, IPR006118,SSF53041
MLEKILRVALYIRVSTQEQVMHGYSLEAQEAALYDWCKNFKNDRAYKDYEGIEIVDIFKDEGKSAFKPCKKRPEFMRLINDFVIPEKVDLIIFIRLDRWFRRVGEYHEMQKILEDHNVHWKAILEEYETATSNGRFMVNIKISTAENEAENTRNRILDVNRYKRRIGKVMSGNQPFGYTVGIVDGSKRPVIHEIKGKIYRDMISYFFLSGSVGKTADYCNQKYHMNSNYSWYSKVLNNIDTYLGYSEGIGGYRPPLLSLDEAEKLKNLLGNNARRPRSQRIYIFSGLLTCPVCGNRLTSCMSVYTDSNRKKKYYKRYRCQNAKVSHLCSFSTSFSERKIEAALLKGVGSAFADFETACQKNMKKNRDSAEELKKIQGQLDRLNKIFLMGNIQEDEYEAASFSLKKRMESLRLSPSRIDKKTADLLKTGEFIDYYKLLDDEHKQFFWRGIIKSVTLCNDHSNMISSILFL

SEQ ID NO: 10885 - protein, 469 aa, Unknown
  Description of Unknown: Integrase B10886 sequence
  cd00338,IPR011109,PTHR30461:SF21,PF07508,PS51736, G3DSA:3.40.50.1390,IPR006119,PTHR30461,IPR036162,PS51737, PF00239,SM00857,SSF53041
MTPRRKRAAIYVRISRDREGAGLGVERQEAECRDLVAGRGWSVAEVFRDNDLSAYSGKPRPGYRAMLDAIAAGTVDVVVAWHTDRLHRAPAELESYIGACEPRNVATHTVKAGDLDLSTASGRMMARMLGAVARHDVEHNIERITSAKAQAAAAGKYRGGRRPYGYEADGLTVRPPEAAVVVRIADRIIAGASVRSIVAELNTEGATTSTGGPWRTDAVVSVIKRARNAGLIEQRGQVLGPAQWPAILDEDTWRAVLGILGDPARRTNPGGQVRWLLSGIARCGECGAGCHVTNVGSRPSLRGVPSYCCPDKHVVRNAAELDAFVAGLIVARLSQPDAVDLLLGNTTVDTGALHTELTVIRERLDGLAREYAEGTIDARQLAAGSAHLRAREVDVTAAIADASRGSVLSGVVAAPDVAEVWNALPLGRRRAIIEALVTVTVLRAQRGRRPGWRPGESYFDPRAVAIEWQ

SEQ ID NO: 10886 - protein, 469 aa, Unknown
  Description of Unknown: Integrase B10887 sequence
  cd00338,IPR011109,IPR038109,PF07508, Coil,PS51736,G3DSA:3.40.50.1390,IPR036162, IPR006119,PTHR30461,mobidb-lite,PS51737, PF00239,SM00857,G3DSA:1.10.10.2600,SSF53041
MTPNAAIYARQSIDIAEGIDRQLARCRALAAARGWQVAEEYVDNDTSASKDRGAGTAWGRMLAELRPGHVVIAVDLDRLIRRMEDLTVITATGASVLTVDGEVDLTTADGAFRAQMLTALASFEVRRKGERQRRANEHRTAQGRPVPGRRRYGYETDGVTPRPDEAAIVRRVFTHVAEGGTLRSMARALTAEGVSPAPGRSWSARRLGELARNEHYSGRVTHLGVTVQSDVVVPIVPEEQAAEVRAILTDPSRRTSTAGPKPRHLLSGLLKCGICGGNIYHMRGYLCRLDPAHVHIAKHIIEPFVLTHLGDALLAIGPGGVSAPASSGVATLVERHGRNADAVAATLADRDEGLVTPQGARRRLIELREVRESIEADLERLRGERSAAGALGAVAHELLGGVAEMTGAAYADRRDAVLQRLAEMDMERQREVVRALVDVEVHKGRGTGRVLVTHKVAEHLNPDTIDPEW

SEQ ID NO: 10887 - protein, 469 aa, Unknown
  Description of Unknown: Integrase B10888 sequence
  cd00338,PF13408,IPR011109,IPR038109,PF07508, PS51736,G3DSA:3.40.50.1390,IPR006119,PTHR30461,IPR036162, PTHR30461:SF3,PS51737,IPR025827,PF00239,SM00857, G3DSA:1.10.10.2600,SSF53041
MQVEGGTSLPSQLSECRSMAARQGLEVVAEYIDSGESARTDERPQFQQMVADARHGRFGAIITWDNSRFARNREDAVTYKALLRRHGVRLLFVNEPLIEGPVGSLVDSVLEAVAEFYVANLGESTRRGLEETVRQGYFSGGPPLFGYRREVVSASGKRKSRLVPDPVNSRAVRDVYRWYASGMSLRDVARRLNSAGVTPPRAKEWTPAAVQHILFKYRDQYLGTFSFGRKPEAGRPEPTVSIQVEPLVDPALAEAVDAAARGRRNIGKFGSEPRLLTGLAHCGNCGRRLMVGGGPGAGGKRVGYYHCPGKCGQGWIRCETAERFVLDSLSSFLEGEGPEGLVDAMARQYAARLGRVEQDRASVMSAIAELSRRRDNLLFALENGSVAPEDVRDRLLDLRQKIAVQRSTLEKMEYEPRKSIMTADIMRKKIIALLSSGSRRGKRAALNVLLERIDFHDGLPRITFALPEG

SEQ ID NO: 10888 - protein, 469 aa, Unknown
  Description of Unknown: Integrase B10889 sequence
  cd00338,IPR036162,G3DSA:3.40.50.1390,IPR006119,PTHR30461, mobidb-lite,PF00239,SM00857,SSF53041
MNPIYNTLQNMTQQQGNQGMPQQPFIINNQGQYIPVMMMPANQQQIQQNPFMVMNQPQNIMPVPMVQQQQQYQQPQFMNAGQNPFIMLQQQQQQPIIQGNPIGNPIGNPIGNPIGVVGNPIGGGDDNIIANIMGNVALNQQDKPIKPKKDNSFKPSKDNSNVIKSIEPINDNEAHFDATNFPNEKYRTMTLNGEEQEREATDINDYTLETGKIIYKHNNNIPQNIMKGYASIYVRCSNPNGISIDTQMKECLKYAKERDLIIQGIYIDDGVSGRNGKNLKNGEIGFWKEHIENYSNLLIYSVDRLTRHLFSGLQFLNTMQEKNIDVHFVNNKIIYNKSISAMNKSSIQQELQTAEKYSNDTSEKIKGTINRLKNEGKYLPGRIPYGYKRIKINGQLKQVENSIEKETINIIKTQYNKIWNNFNDYSNDIPKKSQYYIFQYLKQWCAQQHIKDRNQNYFTESSIKNIIYK

SEQ ID NO: 10889 - protein, 468 aa, Unknown
  Description of Unknown: Integrase B10890 sequence
  PS51736,IPR036162,IPR006119,G3DSA:3.40.50.1390,PTHR30461, PTHR30461:SF3,PF00239,SM00857,cd03768,SSF53041
VGVVLGAATNCDKAGVILDGGRSAFSKPFATRPGAMLLAGALQQGDTVVVTSLTRLFRRVAEAATIMERWVQIGVSVTFVDYPSLSFDSANGRCLVYCMAAVAQLKSELIAARVREGRARKKGLPAEPNRPAKPAKVLLPAAQQPIAEVIRRMAEKRPSSRSGRVCVYARVSTDEQSVDTQLAILRQAYPGAVEYVDHGVSAWKTSLPDRPEGGRMLRELQPGDTIVVLRPDRVFRSLKDAATQIDAIQKVGAFLHIHEGGIKSDELFGRLLLGMLSAFAQLESEETSRATKHAMAIACGTNDAALQARLPKPLLRDVPPKTKHYVFDDVFDSGERQQMWLTVHLTKANYCSLGVCILDATNRSLYEKGLPPLTSQSMDMRDYRQALREVGTKKAKALIPKIENYARVASPVGSSQNFPKAEKRYEHFMRVFGELPREQRDLRLLTMMQSPKAVAAFADATKRAVETV

SEQ ID NO: 10890 - protein, 468 aa, Unknown
  Description of Unknown: Integrase B10891 sequence
  IPR038109,PS00397,IPR006119,PS51737,PF00239,G3DSA:3.40.50.1390 ,PTHR30461,IPR025827,SM00857,G3DSA:1.10.10.2600, SSF53041,IPR011109,PF07508,PS51736,IPR006118, cd00338,PF13408,IPR036162,PTHR30461:SF3
MLYGKPQNYSWYRARVVLYIRVSTDEQARHGYSLGAQREALREFCDTFQCQIVAEYSDDGVSARKEIRRRPGLLRVLEAVKAGGVDYVLFIKLDRWFRSVREYYRVQDVLEAAGTNWKAILEDYDTSTTNGRLNLNIRLSVAQDESDRTADRIKFVFAERVKNGGAIFGSKSLPYGLEVADHRVQIVESQADAVRGMFDHYEATNSTRETHAWLRDQYGVDLPYNTIRNMLRNSLYCGEYRGNVNYCPAIISREQFQNIQKIVSRQGANRTRQSKYSYVFTGLLRCPVCGCTLKAFPQTDYKFHRVYLRYRCTQHWIDKRCTWKTTPWEPRLEDWLLDHIQPQLDAYIAQFDVQEAQRRRAVVDVGAIQRKLSRLQDLYVDGMIDRAAYDEKYQALIRQQEAAQTAQQGQSAGRDLEPLRQLLAGDFRSIYATLSPQERHTLWASVIDHIVVKDGRYGHFDLDVIFLP

SEQ ID NO: 10891 - protein, 468 aa, Unknown
  Description of Unknown: Integrase B10892 sequence
  cd00338,IPR011109,IPR038109,PF07508,PS00397, PS51736,G3DSA:3.40.50.1390,IPR036162,IPR006119,PTHR30461, PTHR30461:SF3,PS51737,PF00239,SM00857,G3DSA:1.10.10.2600, IPR006118,SSF53041
MLYGKPQNYAWYRARVILYIRVSTDEQARHGYSLGAQREALREFCDTFQCQIVAEYSDDGVSARKEIQRRPGLLRVLEAVKAGGVDYVLFIKLDRWFRSVREYYRVQDVLDAAGTNWKAILEDYDTSTTNGRLNLNIRLSVAQDESDRTADRIKFVFSERVKNGGAIFGSKSLPYGLEVRGHRVQIVEDQAVIVRAFFDHYEAVHSARSTQVWLRDQCGVDLPRNAIGRMLRNGLYCGQYRDNKNYCPAIISPDQFQRVQEILARQASGHTRQSKYSYVFTGLLRCPVCGCTLKAFPQFDHKLNRLYLRYRCTQHWIEKRCSWKTTPWEPRLEGWLLDHIQPQLDAYVAQFDVQEAQRRQAVVDVGAIQRKLSRLQDLYVDGVIDRAAYDEKYHALIQQQDAAEAVRAAQSAGRDLGPLRQLLAGDFRSIYATLSPQERHTLWASVIDRIVVKDGRYGHIDLDVIFLP

SEQ ID NO: 10892 - protein, 468 aa, Unknown
  Description of Unknown: Integrase B10893 sequence
  cd00338,PF13408,IPR011109,IPR038109,PF07508, Coil,PS51736,IPR036162,IPR006119,G3DSA:3.40.50.1390, PTHR30461,PTHR30461:SF3,PS51737,IPR025827,PF00239, SM00857,G3DSA:1.10.10.2600,SSF53041
MRVALYPRVSGHEQEDNYSIPEQIDRMKKYCDARDWMVYKIYTDSGFTGSNLDRPGLQELIKDAESGKIDMVLVYKLDRLSRSQRDTLYLIEDVFEKNGVGFSSMTENFDTSTPFGKAILGVLAVFAQLEREKIKERTMMGKQARAEEGKWHGGSTPPIGYDYIDGELILNEYEAMQIKEAADLFLKHTPVRTIERMMDAKGFKHKYGDWTAKTIRFILSNPLYLGMMKHRDKFYQGTHTPIFTQDEFDAMQEIMDERREKHAPGRREHSTLLGGMLYCKHCGGKYAKLDYNGNYLIYSCYSRSKKIKRMIKDPNCKNKNYRMIELDAAIITEITNLSLDPSYIDEVRENKPINDVSDKIKAINQEIEGITAKISKLMDLYADGEMDMSLISNKVAEHNKTKMRLQKELDSLDVPQTDQEGMTNEQIQNLATLINDKDLSLMDKRNIVQSLIYYIEIDNEEVTIHWKF

SEQ ID NO: 10893 - protein, 468 aa, Unknown
  Description of Unknown: Integrase B10894 sequence
  cd00338,IPR011109,PS00397,PF07508,IPR038109, PS51736,IPR036162,IPR006119,PTHR30461,G3DSA:3.40.50.1390, PTHR30461:SF3,PS51737,PF00239,SM00857,G3DSA:1.10.10.2600, IPR006118,SSF53041
MLYGKPQNYSWYRARVVLYIRVSTDEQARHGYSLGAQREALREFCDTFQCQIVAEYSDDGVSARKEIQRRPGLLRVLEAVKAGGVDYVLFIKLDRWFRSVREYYRVQDVLDAAGTNWKAILEDYDTSTTNGRLNLNIRLSVAQDESDRTADRIKFVFSERVKNGGAIFGSKSLPYGLEVRGHRVQIVEDQAVIVRAFFDHYEAVHSARSTQVWLRDQCGVDLPRNAIGRMLRNGLYCGQYRDNKNYCPAIISPDQFQRVQEILARQASGHTRQSKYSYVFTGLLRCPVCGCTLKAFPQFDHKLNRLYLRYRCTQHWIEKRCSWKTTPWEPRLEGWLLDHIQPQLDAYIAQFDVQEAQRRQAVVDVGAIQRKLSRLQDLYVDGVIDRAAYDEKYRALIQQQDAAEAARAAQRAERDLGPLRQLLAGDFRSIYATLSPQERHTLWASVIDRIVVKDGRYGHFDLDVIFLP

SEQ ID NO: 10894 - protein, 468 aa, Unknown
  Description of Unknown: Integrase B10895 sequence
  PS00397,IPR038109,IPR006119,PS51737,PF00239, cd03768,G3DSA:3.40.50.1390,PTHR30461,IPR025827,SM00857, G3DSA:1.10.10.2600,SSF53041,IPR011109,PF07508,PS51736, IPR006118,PF13408,Coil,IPR036162,PTHR30461:SF3
MRKPKETKATERVVIAKYIRVSTDKQREEGYSVDIQKERLDSYARSLFPESTYDVEYREYVDDGFSGGSLERPQMTQLIEDVKNGVITHVIVMKLDRLSRSQKDTLYLIEDIFLPNNVAFISMGESFNTDTPFGRAVVGILSVFAQLERENIFERTRSGMQKRVELGYWPGGGAIPFGYDYDANQGILIPNGNADTVRTVFELYTRGYSAQYIANLLGLKYDKLVNNILTRKTYTGAIVYNSIEYKGKHQPIISEELYEKVQAMIQDRSSKRFVSATTNLLTGMVYCGRCGAKMRYIKWGKHGRSRLMCYSQEKSKPYLVKDPDCENEKPWADDVEDTVIKLLFERAHVNECNNTNEEQADPVKMLQSQRVSLVNKLKRLYIIYAEGDDAITQVINETKEEVAKIEKRIEGEIAKRATTIIEQDIQEKLSSLEESWQYLDVSEKQNIVRSLINKVTITGHRIHIDFKI

SEQ ID NO: 10895 - protein, 468 aa, Unknown
  Description of Unknown: Integrase B10896 sequence
  cd00338,IPR011109,IPR038109,PF07508,Coil, PS00397,PS51736,IPR036162,IPR006119,PTHR30461, G3DSA:3.40.50.1390,PS51737,PF00239,SM00857,G3DSA:1.10.10.2600, IPR006118,SSF53041
MEKLKAVAYCRVSTIMQEEGRSLEFQIKKCQDYCEFQNYELIEIIQDVESGGNDDREGFLELREKVRAKAFDVLVVFESSRISRVTLTMLNFVLELQKSNIHFVSISQPELNTTTPTGMLFFTIQATLSEYERKQISVRVKSNKWARAKAGIWQGGKLPLGYTKDPEDNNNILIDEENSFIVQNIFEYYIKTQSLAKTAKYFNRHLESIRWILTNPFYIGLFRYGKKENNINTGIVKTNSDYQYFEGVHPPIITEDIFNKVQSIINLKKKNIKSTFKLLFTGMITCTCGGKYFASKNGKKYNYRCSDCGKSISYRKMESSIIKNIFNMSELEDLNNANIKTENYQKEIDTIKKLIEKDKKNREKTLLLFKNEIISIDELKKEIDIIDSGINGKFKEIEKLESVIKYQNNNSEKINNIKILKETLEYMEDEDRENIYEIFKLLIKEIILLNKDEINLKNDNLKLQIFLN

SEQ ID NO: 10896 - protein, 468 aa, Unknown
  Description of Unknown: Integrase B10897 sequence
  cd00338,IPR011109,PS00397,PF07508,IPR038109, PS51736,IPR036162,IPR006119,PTHR30461,G3DSA:3.40.50.1390, PTHR30461:SF3,PS51737,PF00239,SM00857,G3DSA:1.10.10.2600, IPR006118,SSF53041
MLYGKPQNYAWYRARVILYIRVSTDEQARHGYSLGAQREALREFCDTFQCQIVAEYSDDGVSARKEIQRRPGLLRVLEAVKAGGVDYVLFIKLDRWFRSVREYYRVQDVLDAAGTNWKAILEDYDTSTTNGRLNLNIRLSVAQDESDRTADRIKFVFSERVKNGGAIFGSKSLPYGLEVRDHRVQIVEDQAVIVRAFFDHYEAAHSTRSTQVWLRDQYGVDLPRATIGRMLRNGLYCGQYRDNKNYCPAIISPDQFQRVQEILARQASGHTRQSKYSYVFTGLLRCPVCGCTLKAFPQFDYKWNRLYLRYRCTQHWIERRCSWKTTPWEPRLEGWLLDHIQPQLDAYVAQFDVQEAQRRQAVVDVGAIQRKLSRLQDLYVDGVIDRAAYDEKYRALIQQQDAAEAARAAQSAGRDLEPLRQLLAGDFRSIYATLSPQERHTFWASVIDHIVVKDGRYGHYDLDVIFLP

SEQ ID NO: 10897 - protein, 468 aa, Unknown
  Description of Unknown: Integrase B10898 sequence
  cd00338,PF13408,IPR011109,PS00397,IPR038109, PS51736,G3DSA:3.40.50.1390,IPR036162,IPR006119,PTHR30461, PTHR30461:SF3,IPR025827,PS51737,PF00239,SM00857, G3DSA:1.10.10.2600,IPR006118,SSF53041
MTKTVKRAALYIRVSTDEQARYGLSLGEQRRDLEDYARRKGYIVAGIYADEGTSARKSLHRRKELQRLLADIRAGKIDVVVVKDLERWMRSVRDFYKVQDILDEHNVGWECSQDRYNTTTANGKMQLNMRLAIAQDESDRDSERIRYVFEGKRKRKEVLSGAIPRGMSIVDKHIVFNEEADMVRAIFNHVYNGGSVRSCIALAKEEYGVELTYRTIRRSLANRAYIGELHGEPGYIESMIPLDVFNRVQIKLKKYCSSFRNKSTGSRVYLFTGLISCPHCGSTLSGYRGDKKADGTYRTYWYRCGRANGNAGVGCNYTRCLYERKVESFLLDNIQSLLSNHMYQIEQRRIAKQKFRSEMTEENIQAKLARLKDLYVDGLIDKPTYLRDYNKFQQQLLEIASDEVIPLTTIPPEAQSFVSSADFREVYQSLTQENKRDFWASIIKRITYEDTPATHGRGGVYDFHVEFY

SEQ ID NO: 10898 - protein, 467 aa, Unknown
  Description of Unknown: Integrase B10899 sequence
  cd00338,IPR011109,IPR038109,PF07508,PS00397, IPR036162,IPR006119,PTHR30461,G3DSA:3.40.50.1390,PTHR30461:SF3, PS51737,PF00239,SM00857,G3DSA:1.10.10.2600,IPR006118, SSF53041
MKIGAAYIRVSTDEQTELSPSSQLEQIREYAKKNDIIVPDEYIFIEGDGEKGYSGRKASNRPKFQQMIAIAKEKPKPFDIILLWKFSRFTRNMDEATYYKSILRKKCGIDVVSISEPIMQSVYGRLVEMIIEWSDEFYSINLATEVKRGMSAKAKAGEFCSYAPIGYKMVDKKLVIDEEKAPLVKSIFQEYAAGGKARQMAIRLNEQGVRTKFGNPIDNRFITYMVSNPLYKGYIAFSTDGRRKRGETIDTDKVIYQKGIHEPIIDEELWQKCYNRYLLERTKDRRESRKNEYALRTLLKCSNCGATLTHGIGGRLQCSKYNRGVCNVSHSIEVKAAEEAVLKQMRVDAQILAGKPRSVEKPSVDNTQAINAIKKKIARLDDAYLNEVYTSDEYKSMRKTLVSQINELEAAQYIPVNKGITKLDIMNVLKTYDKQSEREKNQSLMKIIEKVIAHKTSEGYNFEIFYK

SEQ ID NO: 10899 - protein, 467 aa, Unknown
  Description of Unknown: Integrase B10900 sequence
  IPR038109,PS00397,IPR006119,PS51737,PF00239,G3DSA:3.40.50.1390 ,PTHR30461,IPR025827,SM00857,G3DSA:1.10.10.2600, SSF53041,IPR011109,PS51736,IPR006118,cd00338, PF13408,Coil,IPR036162,PTHR30461:SF3
MSIIKRAALYIRVSTEEQARHGLSLGEQRRDLEEYAKRNNYAVVGIYADEGTSARKAIHRRKELQRLLDDIRADKIDIVVVKDLERWMRSVRDFYRVQDILDEHNVGWECSQDRYNTTTANGKMQLNMRLAIAQDESDRDSERIRYVFEGKKKRKEVLSWAVPQGMSIVNKHVVFNERADMMRDIFNHVYNGGTVRSCITLAHERYGVKLSYMMVRRSLANRAYIGEMYGEPNYIEPMIPLDVFNKVQARLEKYQKSYRNQTNSDCRVYLFTGLIKCPYCGHALTGYRGDKKADGTYSSFFYRCNVANNNTNHHCNYYRCLYEFKVENFLLENIQKLLSGHLYHVKQHRVKKAKNRSELTAENIEAKLTRLKDLYVDGLIDKATYLEDYKKLQQQLVEITRPEKPLTMITPETQSFISSDDFRELYQSLTRENKKSFWQSIIKNITYEDTPASHGKGGVYDFQVEFY

SEQ ID NO: 10900 - protein, 467 aa, Unknown
  Description of Unknown: Integrase B10901 sequence
  cd00338,PF13408,IPR011109,IPR038109,PF07508, IPR036162,IPR006119,G3DSA:3.40.50.1390,PTHR30461,PTHR30461:SF3, PS51737,IPR025827,PF00239,SM00857,G3DSA:1.10.10.2600, SSF53041
MGLKPAGGWLRVSTTAQDEQLQRADLLRFAADHGLGIAVWYRAHAKSASKGEHDADMSDALEDTRAGRIRVLLATALDRTERRGIEAQFRVIREFREAGGDVWSVLESPVNGKPLEEVGLTLATIADMNRRKAELAAFNTKRGHDAIDANGAFRGRVPFGYEAAGAKYHKQLIPTQIGRDWIPQIFERIIAGWSLGEVCWWLDSLKIRFRKDGTLAPWWPATVAQVIRNPVYVGHYSDGEGRWVHECEGLIDATVFRVANEKLSGRARKPIGPRGRPEYRARLRGALTCPDCGGGMGKNASPNTRTSGGGISKPYYRCRGTGGPMQKGCGNNVSLELVDKAVDRVIRTEFHSPVLLRVLVKGGDHQAEIDQVDLELRQLPARGLGRAAEQAERERLWAEQDRLGGLPVEEDRWEEVPTGEMYDRVWAGLPDAERGAWLVRHGFRVYASKAGVRVTFRERDLRSRFRA

SEQ ID NO: 10901 - protein, 467 aa, Unknown
  Description of Unknown: Integrase B10902 sequence
  PS00397,IPR038109,IPR006119,PS51737,PF00239, cd03768,G3DSA:3.40.50.1390,PTHR30461,IPR025827,SM00857, G3DSA:1.10.10.2600,SSF53041,IPR011109,PF07508,PS51736, IPR006118,PF13408,IPR036162,PTHR30461:SF3
VRRAALYIRVSTLEQAQEGYSVGEQRERLIAYCKAQDWLIADIYVDGGYTGSNLNRPGIQKLMSETEKFDVVLVYKLDRLSRSQRDTLYLIEEIFRPNKVDFVSMQESFDTSSPFGKAMIGLLAVFAQLEREQIKERTWMGRVARAKTGLHHGGGNIPIGYDYEDGKLIVNPYEAEQVRKIYEWYLSGASLKAITDKLQDAGYTNKYSSYNSWSSVRNILENETYIGRLHFGGVVVDHAHEAIITEEQFNAAQILRGKRREQFGSHAFQSKHVLTGLLFCGHCGGRYYLRNTGKYSYYACYSRTKQMKNMIKDPNCQNKIWRAQDLEPIIEEKILALLRNPQIAEELAAGKPKAAAPVSKNTDIERRIREIDRQIGKLMELYQQDDIPPELLGEKINRLYGEKTALENSIAPVKETDAMPLDLVAELITNAAEIWDFADENQKRRILQSLISRIVLTDDQVDIEWAF

SEQ ID NO: 10902 - protein, 405 aa, Unknown
  Description of Unknown: Integrase B10903 sequence
  cd00338,PF13408,IPR011109,IPR038109,PF07508, PS51736,G3DSA:3.40.50.1390,IPR006119,IPR036162,PTHR30461, mobidb-lite,IPR025827,PS51737,PF00239,SM00857, G3DSA:1.10.10.2600,SSF53041
MRIKVIKPTKAVHQQKKKVCAYVRVSTDSLQQEESLENQTTYFKSFITANPEWEFVGIYSDQGISGYKENRPGFQKMIEDARAGNIDLIVVKSISRFARNTETVLKFTRELKSIGVGIFFELQNINTLSGAGELMLTILAAFAQAESEGASANAKMTYKRKFESGIPAHGLESTFGYKANAQGDIVVDEEKAAVVRQMFDLAEQGIWPSKIKQYLNKNGVPGCAGGDWDDTAVFRVLHNVSYKGDLILQKTYRDSRRKQRKNEGQVDQWYIAENHQPIVPPKQWDKVQEILRKRSEHLQKPAPPKPDKPRSSRNTYPLSNLIYCPICGEKLIHKWGKGKNEYWACKTNLKVGKDACKGVWLPAEVANDWGEITEPIVAVQYEDEYGMRRFTAYPKDEYDAFKRED

SEQ ID NO: 10903 - protein, 467 aa, Unknown; identical to SEQ ID NO: 10490
  Description of Unknown: Integrase B10904 sequence
  cd00338,PF13408,IPR011109,IPR038109,PF07508, PS51736,G3DSA:3.40.50.1390,IPR006119,IPR036162,PTHR30461, PTHR30461:SF3,IPR025827,PS51737,PF00239,SM00857, G3DSA:1.10.10.2600,SSF53041

SEQ ID NO: 10904 - protein, 467 aa, Unknown; identical to SEQ ID NO: 10491
  Description of Unknown: Integrase B10905 sequence
  cd00338,PF13408,IPR011109,IPR038109,PF07508, PS51736,IPR036162,IPR006119,PTHR30461,G3DSA:3.40.50.1390, PTHR30461:SF3,PS51737,IPR025827,PF00239,SM00857, G3DSA:1.10.10.2600,SSF53041

SEQ ID NO: 10905 - protein, 467 aa, Unknown
  Description of Unknown: Integrase B10906 sequence
  cd00338,PF13408,IPR011109,IPR038109,PF07508, Coil,PS51736,G3DSA:3.40.50.1390,IPR006119,IPR036162, PTHR30461,PTHR30461:SF3,IPR025827,PS51737,PF00239, SM00857,G3DSA:1.10.10.2600,SSF53041
MDKAVFIYTRVSTREQADEGYSLGEQEERLKKYSEAMGWKVTGIYTDPGYSGSNMERPALQQMLSDISKKHPDIVLVDKLDRLSRSQYDTLYLIKKVFAAAGASFVSRAEAFDTSTAFGRAMLGILSTFAELERERIKERMMEGRQGRAKDGLYMGSQAPLGYDYSPENGLTINESEAGIVRFIFEQAAQRRPFTCIAEDCANMYDVDFFWSLASITRILNSKLYIGQVLFCGKWTQGKHAPIISEETFEKAQEVLSERKENFSKFTGKKTKNLLSGLIYCEYCKTRFHKIQTGKYIYYVCYSRSSVKGSMIVNRDCSAKRLNLRKTDALVLAQIKRIRTDVAFYDSVKQAKGSADQTVESLGKKIASINTRINRLISLYSLEQIDIEQVKAQIDPLTAQKKELQKKLDAAESKKNDYVKREDAVTLSQAVEEAYNSGNINEARALISQLIKYISVNADSISIHWRF

SEQ ID NO: 10906 - protein, 467 aa, Unknown; identical to SEQ ID NO: 10576
  Description of Unknown: Integrase B10907 sequence
  cd00338,PF13408,IPR011109,IPR038109,PF07508, PS51736,G3DSA:3.40.50.1390,IPR006119,IPR036162,PTHR30461, PTHR30461:SF3,IPR025827,PS51737,PF00239,SM00857, G3DSA:1.10.10.2600,SSF53041

SEQ ID NO: 10907 - protein, 467 aa, Unknown
  Description of Unknown: Integrase B10908 sequence
  PS00397,IPR038109,IPR006119,PS51737,PF00239,G3DSA:3.40.50.1390 ,PTHR30461,IPR025827,SM00857,G3DSA:1.10.10.2600, SSF53041,IPR011109,PF07508,PS51736,IPR006118, cd00338,PF13408,Coil,IPR036162,PTHR30461:SF3
MKIAAAYIRVSTDSQTELSPDSQIKLIREYAKSHDMIVPDEYIFRDDGISGRTTAKRPQFNAMIGTAKKKPKPFDVILLWKFSRFARNREDSIVYKSMLKKIGIDVVSVSEPVGDDKMSVLIEAMIEAMDEYYSINLSEEVNRGMLEALSRGKCVNSYPLGYKMIDKQLIINEETAPIIRRIYAEFISGKNMLPIARGLTADGYRTLYGKPFETRTIEYILRNPIYKGYLRYTPGGNGSKQHYHGIEPMIFKGVHDAIIPPDMWDKAAERMESIKKAHQKYRRDTAQKYDLMLRGLLKCSNCGCTLTYTSKGYQCGNYNRGKCSVSHYVSENRINEAVVNAVRTLNINGRINIVPPKEPMIQDNTADLIKREENKLKRIKEAYLNGIDTIEEYKANKQKITADLEKLKAKQKKPEPKPELETRRFDFIRMFDEGTFTPGELNAALKAFIAYIIYDRLNDNITLFLNP

SEQ ID NO: 10908 - protein, 466 aa, Unknown
  Description of Unknown: Integrase B10909 sequence
  PS00397,IPR038109,IPR006119,PS51737,PF00239,G3DSA:3.40.50.1390 ,PTHR30461,IPR025827,SM00857,G3DSA:1.10.10.2600, SSF53041,IPR011109,PS51736,IPR006118,cd00338, PF13408,Coil,IPR036162,PTHR30461:SF3
MNKKILRAGIYIRVSTEEQAKHGYSIDSQRTRLKEWCKEHNYQIIDVYADEGKSARTKLANRKELARLLDDVRNNKIDRIVIWRLDRWFRNVADYYRIQDILDKYNVDWECSDEDFNTSTSNGRLYLNIKLSIAQNESDQTSDRIKFNFDNMVKNKRPISGALPVGYKIEGEKQNKRVVKDPELSQMAIDMFDKFEETLSLHATTQYLIENYPQRPIRYERVKHMIKNSMYHGVYRDVEDYCEPYISKERHQRIIDIIKKNQRVNVPSGFKFKFSGLIWCYDCHLRMAGSSAGRMHADGSRFRFGMYKCNNHYLDSRCTNNHVVNENKLEKWLIDNFLIKLNEYVVSIETLEEKSGNENLQKRISYYKSKMTRLNDLYIDGRISREKYEADYDEAQSKLNALNEDASVSINPDNIKKYKQLIESSTVIDIYNKLDPENKLAFWGEYIDHIEQDPDNPCDNWIVFFK

SEQ ID NO: 10909 - protein, 466 aa, Unknown
  Description of Unknown: Integrase B10910 sequence
  IPR038109,PS00397,IPR006119,PS51737,PF00239, cd03768,G3DSA:3.40.50.1390,PTHR30461,IPR025827,SM00857, G3DSA:1.10.10.2600,SSF53041,IPR011109,PF07508,PS51736, IPR006118,PF13408,Coil,IPR036162,PTHR30461:SF3
MKRAALYIRVSTQEQAQEGYSIGEQKERLIAYCKAHDWLIADVYVDGGYSGSNLDRPGIKKLMDETDKFDVVLVYKLDRLSRSQRDTLYLIEEAFLPHDVDFVSMQESFDTATPFGKAMIGLLAVFAQLEREQIKERTRMGRIARAKSGLYRGGGNVPIGYDRTDGKLTINLYEAEQVRKIYDWYLAGLSIQRIRKLMAEAGYTTRYGNYSSWSTVRSILCNAVYTGRMDFGGITVEHAHEAIITKEQYQAARELQAKRHQHSSNFQTKNLLTGLLFCGHCGGRYYTKASSNRRYYSCYSRTKQMPTMIKDPNCKNKHWRKDNLEAIIDRKVREVLQSPELAAEIAASHQPKPVLSGKNADIEKRIKAIDKQIAKLMELYQLDDIPPNVLGESINKLYTEKTALEAAIVPDEKKTNHISFDLAQELIADAAQVWDFADKAQKRRILESLVSRIILDNDNVTIEWAF

SEQ ID NO: 10910 - protein, 466 aa, Unknown
  Description of Unknown: Integrase B10911 sequence
  cd00338,PF13408,IPR011109,IPR038109,PF07508, Coil,PS51736,G3DSA:3.40.50.1390,IPR006119,IPR036162, PTHR30461,IPR025827,PS51737,PF00239,SM00857, G3DSA:1.10.10.2600,SSF53041
MNVAAYLRMSTDKQDDSIETQLGILMEYASRENLNIVGVYSDEAVSGGKSIVSRSGFKKLLSEQNTKGFTGILLVRLDRLSRNMLDFMQFEQEAAKHKLDIIYATEHYTNDASGWLLKHINALFAHHARTITGERTKEKCRQLAARGQWASGYPPLGFAYDKTTKILSIDQDRAEDVIQVFRTYIACSGNKSATAHKLNQLGVRTQRGGLWRDDGVGTILRNPIYRGRIRYADIDWATDKVPPIIPPDLLVRADILLQNTIGKRIKGTNSTHAYSGLLYCAQCGYSYKIADCRKGHEQYICRGRKEYGVCDAPKITDSWLDQLIPLGVKRALSRQIAILERYKVENDKLAEQDINVRRIANLRAVAKRKQEMYAVGIINDIDELKRELADIDGEIVELSKSDIKSEVFGHEELVYLATHINEYWEKVHPFELHKVLLIISPKIYIHHSPKRVVLDTTFSCGKIEVE

SEQ ID NO: 10911 - protein, 466 aa, Unknown
  Description of Unknown: Integrase B10912 sequence
  PF13408,IPR011109,IPR038109,PF07508,Coil, PS51736,G3DSA:3.40.50.1390,IPR006119,IPR036162,PTHR30461, PTHR30461:SF3,IPR025827,PS51737,PF00239,SM00857, cd03768,G3DSA:1.10.10.2600,SSF53041
MRVALYPRVSGHEQEDNYSIPEQIDRMKKYCASRDWMVYKIYTDSVQSGADMDRPGLQSLIKDCEAGKFDMVLVYKLDRLSRSQKDVLYLVEDVFEKHDVGFTSMTENFDTSSPFGKAVLGVLAVFAQLERDKITERTTMGKKARAAEGKWHGSKWIPIGYNYENGMLIPNEYEKMQILEIADLFLQRTPVRTIANMMTEKGYKHKYGEWDAKAIKRVLSNPVNLGLIKDGEHLHPGLHDAIIDQETYDAIQVIMNERKERYGATARPHKSLLAGFLYCKHCGGRYARQTNSDGRQYYSCYSRNKSQKKMIKDPNCKNKNYRSEELDLAILFELNKLALDPEYVDHVRANKPKNDVNEKIKSITSEIDKIDTQISKMMDLYALGTIDMDVISTKVAELNKTKSALQKELHSLDVPDEDEMSVEEVQSIAAMMADEKLTLPDKRNIIQSLIYYIEIDNDDVMIHWKF

SEQ ID NO: 10912 - protein, 466 aa, Unknown
  Description of Unknown: Integrase B10913 sequence
  PS00397,IPR038109,IPR006119,PS51737,PF00239, cd03768,G3DSA:3.40.50.1390,PTHR30461,IPR025827,SM00857, G3DSA:1.10.10.2600,SSF53041,IPR011109,PF07508,PS51736, IPR006118,PF13408,Coil,IPR036162,PTHR30461:SF3
MRAIIYIRVSTQEQARDGYSIGEQKDRLTKYCEAMNWTVVATYSDPGYSGANTDRPGLMDLIRDVEAGKTDKVVVYKLDRLSRSQKDTLYLIEDVLLKNGVDLVSMSENFDTGSAFGRATIGMLSVFAQLEREQIKERMQLGADARAKDGRYHGGPYAPIGYDYADGELVINPYEAMQVKKIWTYAEDGLPVYRISKLMDAAGYRHKYGTWTDSSIRSVLTTPVYAGRIVWKNETYPGRHEAIIEPDRFDAYDFKRRDTGKYKTVNVFNRTTLLGGLIFCGRCGARYYCKQNTKTRTGGPAQRYYTCYSRGKGSRRLVRDPNCKNKTYNVKTLDKMILDEIRKLSLDPDRIDSSAAAPDDNADIINDRLREIDNQVERLISLYQLDGLPIETLNERIKTLNIEKRTLEEELAAPPELTHEETRVILSTAGDVLDRAEPEELRTIVETLIEAIIIDGEDITIKWRFS

SEQ ID NO: 10913 - protein, 466 aa, Unknown
  Description of Unknown: Integrase B10914 sequence
  PS00397,IPR038109,IPR006119,PS51737,PF00239, cd03768,G3DSA:3.40.50.1390,PTHR30461,IPR025827,SM00857, G3DSA:1.10.10.2600,SSF53041,IPR011109,PF07508,PS51736, IPR006118,PF13408,Coil,IPR036162,PTHR30461:SF3
MKNKTIERVAGYVRVSSDKQAEEGYSIDEQIERLTAYCKAMDWRIVKIYTDAGYSGGNMNRPALTDLIEAAQSRLIDAVVVYKLDRLSRSQRDTLTIIEGFLDNGVDFVSMTENFDTSTPFGKATIGILSVFAQLEREQIKERCSLGRAGRAKEGKYRGGGYVPIGYDYANGSLTVNETEAAQIREIHRLYQQGESFRSIAMIFKERGYTHKYGSWEVYRIARLIKNPLYAGYVTYKGETFKGEHEPIISEECYQHTMSVYNGKDTLKSPHLGRSMLGGLLFCGRCGARYGISRNGGHNSRYQYYCCHSRRKISPHMVKDPNCKNKNWKKNELEKLVLDEIKKLQNEPLKVPDQSDQDDRTAYILAEIEKTDRQKSRLMDLYGAGLFEMDELEAKIRPLNDQKERLAAELERIQAEPTNKTATALVETFADALEQGDTEQVRILVRALIHKIVIDGEDIEIYWTFG

SEQ ID NO: 10914 - protein, 466 aa, Unknown
  Description of Unknown: Integrase B10915 sequence
  cd00338,IPR011109,PF07508,PS51736,IPR036162, PTHR30461,IPR006119,G3DSA:3.40.50.1390,PS51737,PF00239, SM00857,SSF53041
MSSTDKGPTRAALYCRMSVADMGDLEKVERQEEDCRAVCDRMGWIPVETFVDNNKSAWKRNRKRKRWDAMLEGIREGRFDAIVVYHGDRLIRQPHDLEKLLSLADGSGIRLASPTGTRDLDSPDDRFILRIEAAQACRESDNTSRRVRRAKEARRAEGIATRGGTRAFGRNDDGSIFEAEAEAIRDVFARLLSGETVTSLWSDWCTDGVPTVKGGRWLYGSFRQMLARPDLAGLVAYKGKPLGVAKNLKPIVERETWDGVQALLAKSGGEHPGQPRPRKHLLSGIAVCSGCGTGMYPSVTVSGVQRYRCLAPECPRPTSRNMLLLDEYVIAFVLRRLADGRLWARLERRREAVAVGSEDTARELAGLRARREKVVEEFADDDDMDPALLRKMLARLDQRIEAVQLRAGSQRAVSVLDGLRGLSREGWDELPLDRRRAVVRELCTVTVRPSAKGPRFDEKSVDVEDA

SEQ ID NO: 10915 - protein, 466 aa, Unknown
  Description of Unknown: Integrase B10916 sequence
  IPR038109,PS00397,IPR006119,PS51737, PF00239,cd03768,G3DSA:3.40.50.1390,PTHR30461, IPR025827,SM00857,G3DSA:1.10.10.2600,SSF53041,IPR011109 ,PF07508,PS51736,IPR006118,PF13408,Coil,IPR036162,PTHR30461:SF3
MTVALYIRVSTDEQAKDGFSIEHQKQRLAAFCESQGWNSYEFYIDDGYTGTNLNRPQLTRLIRHVRNRSVNIVLVHRLDRLSRKQKDVLYLLEDVFDSNDVAFRSATEPFDTSTPLGKAMLGILAVFAQLERDTIVERATSGKHERIRQGLWYGGPIPYGYDWSTEEQRLVVNPAQARIIQEMYEHALRGQPYTTIAKWASRRSRERLFGHHKTLLYMLTNPLYMGKLNQRGVHINGLHEAIVSEETWQAVQKEIRIRKNGRAIYGKYLLSGILVCGVCGSSMKHIRIQDRRFNPPKIRDYYLCSTKHSGHSCSSRYVPQQELEDRVINTLKDKSVDPDMVIQELSARREDINSVESTIDALNRQLDEVKVKLERWYAAIESGMDLGKVMPRIHELEDEQKAIMLQLDELDGADYEETNTRILDSLHQIGQQWDNMTNEERNAVLHAAVKTITVNSDGTLVFTWDA

SEQ ID NO: 10916 - protein, 466 aa, Unknown
  Description of Unknown: Integrase B10917 sequence
  IPR038109,PS00397,IPR006119,PS51737,PF00239,G3DSA:3.40.50.1390 ,PTHR30461,IPR025827,SM00857,G3DSA:1.10.10.2600, SSF53041,IPR011109,PF07508,PS51736,IPR006118, cd00338,PF13408,Coil,IPR036162,PTHR30461:SF3
MNKIIRVAIYIRVSTDEQAKHGYSIDSQTQRLKSYAKEKGYKIYKIYADEGKSARSNISARKELLNLLNDVRQHKVDRIIFWRLDRWFRNIQDYYKVQEILDKNNVDWECTDEEYNTTTSNGRLYLNIKLSIAQNESDQTGDRIRFNFENMIKNKKAIIGTRNCPIGYKVEGTPKDKHIVKNPDDEDFINDLFSKYIDTMSINATTKFLSEKYPNYHFVYRSIRNILTNPLFYGCYRDVENYCEPYLTKKEWDNIQNILKTKNQKCKTGKVRDYIFTGLLTCPECGRRLGANGSVRTRPNGETYTRANYRCPKHWTDGQCSNKRVLQENLIEEWLLNNYKQLLQEYIYQVDEIKEQIEKKDNSKKIKNLEEKVSRLNELYIDGLIDRKKYDEDRLRYTNEINNLKQTIEDVSNVDIENIKNIINDSTPLEIYKELSIANKRAFWNSFIDRIVFCGNRDYDFIVYLK

SEQ ID NO: 10917 - protein, 466 aa, Unknown
  Description of Unknown: Integrase B10918 sequence
  PS00397,IPR038109,IPR006119,PS51737,PF00239,G3DSA:3.40.50.1390 ,PTHR30461,IPR025827,SM00857,G3DSA:1.10.10.2600, SSF53041,IPR011109,PF07508,PS51736,IPR006118, cd00338,PF13408,Coil,IPR036162,PTHR30461:SF3
MIVAIYARVSTQEQALHGYSIDEQVNRMQKYCESMNWSVYRAYVDAGYTGSNMNRPELRHLIHDVQEKRVEKVLVYKLDRLSRSQKDTLYLIEDVFVANGCGFASMNENFDTGTPLGIAMIGILSVFAQLERSQITERMMLGKSARAKQGKFAGGNHIPIGYDYDPDTGYLKVNEYEAMQVKRIFKEFLSGKPIFTIAKDLNAEGYTHKFGTWSTRTIRNVLESRTYLGELKYQGAWNKSEHAPLITEEEHADALRILRRNKDSHNTASVHSYLGGLLFCSKCGARYSKITANLGKDGKRLCYYKCNSRAKRHPTMIKDPSCSNKIWRMEDLDNLIFEEIKKLALEPTKPTEPEENNNLVVLTTELQKVEKQIDRLIDLYALGSISRSTLDAKIASQNAQKAHLEQELDNLRKSLPKSKEAFKSQINGFSEMLEKGTPEQIRQIITALIRRIELNGDDVTIYWNFK

SEQ ID NO: 10918 - protein, 465 aa, Unknown
  Description of Unknown: Integrase B10919 sequence
  cd00338,PF13408,IPR011109,IPR038109,PF07508, PS51736,G3DSA:3.40.50.1390,PTHR30461,IPR036162,IPR006119, IPR025827,PS51737,PF00239,SM00857,G3DSA:1.10.10.2600, SSF53041
MSERAVLYLRQSVAREDSISLELQEHEGRAYAKRQGYEIVAVEADPGISGRTWNRPAVKRVMELIDSKQAEVIVLWKWSRLSRSRLDWAVAADRVQVAGGRIESATEPLDTTTSTGRLARGMLTEFAAFESERIGDGWKESHARRIRQGLPINGKPRFGYQYARGDWFTIAPLEGAVLAEAFRRYIAGESVYSLVQWMNHGPTRPVGGYGVKGDGLWSDRTLRRVMDSGFAAGFIRNGDELMPGAHEALIDPSEWDAYQEARQRRRVYRRVERSQYLFSGLVRCSCGSAMTAGQFGAQHTAKYRCVAAKEKRTHTGGYVMESTVEANVLAWLTDRELRLSAEIATASKTPRTVKKIESVDIDAKLAVVASRLDSLSERLIDSDIPHDSYVRLRDKYLAEQQALRQARLTVTVQAKVEPIRVIPVLLENWHLGKVEEKREILRALIDHVEVFPGHPRARIVVHPRE

SEQ ID NO: 10919 - protein, 465 aa, Unknown
  Description of Unknown: Integrase B10920 sequence
  PS00397,IPR038109,IPR006119,PS51737,PF00239,G3DSA:3.40.50.1390 ,PTHR30461,IPR025827,SM00857,G3DSA:1.10.10.2600, SSF53041,IPR011109,PS51736,IPR006118,cd00338, PF13408,Coil,IPR036162,PTHR30461:SF3
MAYDYIEEVAAYIRVSTQEQKLHGISLDAQVEKLTTYAQNNNMKIVEWYKDEGVSGRKLIKKRPELQRMIQDAEKRRFKRIIFIKLDRFFRSVAEYHECMKRIDPVVWTTTEEKYDLSTAQGRMLVNMKLTIAEMEADMAGERVNIVNEYKLSTGQPLTGSVPFCYKIAKGEDGRKRIVKDPEMEEITEDILAHFQMHQSIHKTVLYINAKYTLKIMYKTISNLLHNEMLCGEYKGNPNYIAEPYMDRDAFDRMQQMITRNDKVNTRNREYIFGGLVRCPKCGNIMRGTTHHNKRDNGKTYIYKMYRCSRWAVARTCSYNKVVNENTLEKLMLTNIERYFEDEKVKAEEIQDSDAFKIPKKNIEDIHDRIDRLNYSWQTGKIRKVEQYEKDYAELMKQLEQAEAEQAEVVVKDFSKIEAILHTGWRELYNALDDEHKRAFWRSFVDRIEVDWMGKEKEIKRVTFF

SEQ ID NO: 10920 - protein, 465 aa, Unknown
  Description of Unknown: Integrase B10921 sequence
  PS00397,IPR038109,IPR006119,PS51737,PF00239,G3DSA:3.40.50.1390 ,PTHR30461,IPR025827,SM00857,G3DSA:1.10.10.2600, SSF53041,IPR011109,PF07508,PS51736,IPR006118, cd00338,PF13408,IPR036162,PTHR30461:SF3
MKKVVIYIRVSTARQDQEGYSIPMQKERLISYCRAQGWVVSGMYIDPGHSGATLERPGMESLIQGVKAGKYDVVLVYKLDRLSRSQKDTLYLIEDIFMKNDVAFVSMQESFDTSTVFGLAMVGILSVFGQMERSTIVERTLLGRSGRAEDGLWHGGGTEPIAYKYIDGELVVDPVEAQQVRDVYSMYADGYSVTEISRRMEGRTTKHGDWSHTGTVGNVLDNPLYAGYIHFDGVLERGQHEAIVPEELNRKVKSRRKRLRHAEASGDSDYLLTGIVYCDCCNARYFPNKRPNKKVVYSCHSRAKKAKNMVKDPNCKAPHIPMSTLDTMVEEEVLRLIREPELVEDVIKKRAASDGSSDSSRSVEVERLDAEINKLMDLLQYDQLTSVGEIAERIDKAHAERMRIMPKSQADAPRYFDVSGFKTVLRDAAFSWEAANLRGRRSFLFQLIDGVYINAEGELRIEWSL

SEQ ID NO: 10921 - protein, 465 aa, Unknown
  Description of Unknown: Integrase B10922 sequence
  PF13408,IPR011109,IPR038109,PF07508,Coil, PS51736,G3DSA:3.40.50.1390,PTHR30461,IPR036162,IPR006119, PTHR30461:SF3,IPR025827,PS51737,PF00239,SM00857, cd03768,G3DSA:1.10.10.2600,SSF53041
MIALYTRVSTQEQAREGYSIDEQAARLNSYCDAMNWRDVKLYTDPGYSGGSTDRPALQQLIRDVEAGMVSRVVVYKLDRLSRSQLDTLYLIERVFLAHGCEFVSISESFDTGTPFGRAMIGILAVFAQLEREQIKERMTMGREARAKEGKYHGGSSAPTGYDYTDGELVVYPPEAMQVREVFRLYASGLSLRQIAQKFLAAGISHRHGIWSECTISKVLQNPVYIGRIVFSGQTYEGHHEPIIDRALFDAVHDRLSVRSEQARKKQAVSGRNHLLSGLIWCARCGARYGVHKTNYSIYYACYSAMKRNASMIRDPNCKNTYWRETELDALILDQIAKLSTNPSELKKTSSQPPTDERMAMLEASLADVRRQKDRLLDLYVTKTAFSATELQNRVDPLAEREKRLQGEIEALTAYRGMDTKKAAQIVATFADVIARDVYAEKRSLVESLIDRIELDGRSITIRWKF

SEQ ID NO: 10922 - protein, 465 aa, Unknown
  Description of Unknown: Integrase B10923 sequence
  cd00338,PF13408,IPR011109,IPR038109,PF07508, Coil,PS51736,IPR036162,IPR006119,PTHR30461, G3DSA:3.40.50.1390,PTHR30461:SF3,PS51737,IPR025827,PF00239, SM00857,G3DSA:1.10.10.2600,SSF53041
MKGNAGDTIVKKIDLSPELVRVALYIRVSGEEQKIKGLSLEAQQERLEAYARERGWVIVGIYIDAAKTARKNIHKRTDFQRMMDSVKRDEVDILLFCRLDRWFRSVADYYKIMEVLEAHNCDWKTTDEEYDTTTANGRLYINVKLSIAQNEADIDGERIDVVFDSKIAHGTVVSGSAPFGFRVNEEKRLEVVPEDAAIVQDAFNYFETSISQRATVRYIRETYGVNWCDATFRRMLKEKLYTGVYDRGGRFNDHFCPAIISKQQFDRVQALLERNARSVPSGKVYIFTSILTCAECGHKLVGYKSSDYYYYRCNQHFQRGRCSHNHSAREDVVEKWLFEHLAEELERCQLEWEVAAAKKKVSIARTDKAALKRKLTKLKELYVNDLIDIEDYKRDYQIYTAALKQIPEPSIEPPPDFAAVRRLLDNDFKTIYENLTREEKRTLWRSVIKEIRIDNDQNITGVVFG

SEQ ID NO: 10923 - protein, 465 aa, Unknown; identical to SEQ ID NO: 10471
  Description of Unknown: Integrase B10924 sequence
  cd00338,PF13408,IPR011109,IPR038109,PF07508, PS51736,G3DSA:3.40.50.1390,PTHR30461,IPR006119,IPR036162, PTHR30461:SF3,IPR025827,PS51737,PF00239,SM00857, G3DSA:1.10.10.2600,SSF53041

SEQ ID NO: 10924 - protein, 465 aa, Unknown
  Description of Unknown: Integrase B10925 sequence
  IPR038109,PS00397,IPR006119,PS51737,PF00239,G3DSA:3.40.50.1390 ,PTHR30461,IPR025827,SM00857,G3DSA:1.10.10.2600, SSF53041,IPR011109,PF07508,PS51736,IPR006118, cd00338,PF13408,Coil,IPR036162,PTHR30461:SF3
MVKYSISLPENYCKEDIRMKRTAIYARVSTDNQAKEGDSIPAQVTALKAYVDAHKDLRLVGEYIDEGISGRKFQQRDELQRLLDDVRAGKIDLIAFTKLDRWFRSVKHYSATQELLDKYHVDWIAIWESMLGTATPSGRLIVNQMVSIAQYEAENTGSRIRQVFEYKVQQGEVISGHVPRGYVIQNKHLSPGPEADTVVSLFEFFSRNGNLTQAANFFHEKTGAGLSNAAIKAILQNPKYIGEFRGNPNYCPPLISRELFEDVQRKLTNNIKNSAKYDYIFSGLIVCEECGRRFGSYRDKKSRKEGHVIYPAYRCKNHYTGLKTCSNTKVILEKTMEAYLLDNLPELAQKCKIEYSQKQKPAQDIEKQKQAILRRMNRLKELYLNELISLDEYKNDREQYSKQLEELDRAEAPKPRDFSALNKLTGMDLKTVYGTLSNAERRYLWRSVIQEIRIDRERNIAINFL

SEQ ID NO: 10925 - protein, 464 aa, Unknown
  Description of Unknown: Integrase B10926 sequence
  PS00397,IPR038109,IPR006119,PS51737,PF00239, cd03768,G3DSA:3.40.50.1390,PTHR30461,IPR025827,SM00857, G3DSA:1.10.10.2600,SSF53041,IPR011109,PF07508,PS51736, IPR006118,PF13408,IPR036162,PTHR30461:SF3
MKRVAIYVRVSTSKQDEGYSIPLQKERLIAYCKAKGWVVAGLFVDPGHSGSTMDRPGLVNLMDGIAAGKYDVILVYKLDRLSRSQKDTLYLIEDVFMANGVDFVSMQESFDTTTIYGRAMVGILSVFAQMERETIAERTLMGRAGRAEEGLWHGGGTDPIGYDYVDGELVVNAAEAEQVRMVYGFFADGFSVTEISRRMDGYRTKHGDWSHTSTVGNVLDNPLYAGTVHFDGVLSRGRHTAIVPEDVDRRVKARRARQKRAEASGDSAYLLTGLIYCASCGARYFPHKRPNGRVVYSCHSRAKKNKKMIKDPSCMAPHIPVEELDAMVEAKVLHLASDPTQVDEIVKKRAAMAGSSVAGPKSGEFERLTEEINRLMDLLQHDALASVSEVADRIGQAHAERMKVAPEVRVDVPKQYDVNGLRSVLRDVAFGWNDADIRGRRVLLFQLVDSIHINGGDVRIEWSL

SEQ ID NO: 10926 - protein, 464 aa, Unknown
  Description of Unknown: Integrase B10927 sequence
  cd00338,PF13408,IPR011109,IPR038109,PS51736, G3DSA:3.40.50.1390,IPR006119,IPR036162,PTHR30461,PTHR30461:SF3, PS51737,IPR025827,PF00239,SM00857,G3DSA:1.10.10.2600, SSF53041
MNSTYFRPQPELFGLRVVKYIRCSHDGQVLHGDTLEAQDALLDEFIAVNRMVLVDTFIDEALTARKKFTRRKEFVRLLDGVRSRSFDMILFTKLDRWFRNIGDYHKIQEILEANGVQWKAITESYDTTTTNGRLHINIRLSVAQDECDRDSDRIKDVFAYKLKNKTYLSGSLPRGLKLDDEKHVIIDPEWKQFALDMFDHFEQTNSKRGTLLYLKEKYGIYLCYDTISRNLRNSLYKGMYRDDPDFCEPLIEPERFDRIQVLGKRNVRQRYSNRTYIFTGLLICSSCNHYLVGQTTHRTLSDGTEKHYPSYRCNQRYQSHSCDRNHSYREDYVEEYLLQHIRPALSEYVAEYEVTGTNPARKNPAAEAAKIRTKMQKLYELYMDDLIDRDTYKRDYSAFQEKLKELDSIVVAPSRDLADLRKLLEQDYEEIYRTFSPQEKNAFWKSFVQSITVHEDGEMDIVFL

SEQ ID NO: 10927 - protein, 464 aa, Unknown
  Description of Unknown: Integrase B10928 sequence
  cd00338,PF13408,IPR011109,IPR038109,PS51736, G3DSA:3.40.50.1390,IPR036162,IPR006119,PTHR30461,PTHR30461:SF3, IPR025827,PS51737,PF00239,SM00857,G3DSA:1.10.10.2600, SSF53041
MNSTYFRPQPELFGLRVVKYIRCSHDGQVLHGDTLEAQDALLDEFIKVNRMVLIDTFIDEALTARKKFTRRKEFVRLLDGVRAHNFDMILFTKLDRWFRNIGDYHKIQEILEANGVQWKAITESYDTTTTNGRLHINIRLSVAQDECDRDSDRIKDVFAYKLKNKTYLSGSLPRGLKLDDEKHVIIDPEWKQFALDMFDHFEQTNSKRGTLLYLKEKYGIYLCYDTISRNLRNSLYKGMYRDDPDFCEPLIEPERFDRIQVLGKRNVRQRYSNRTYIFTGLLICSSCNHYLVGQTTHRTLSDGTEKHYPSYRCNQRYQSHSCDRNRSYREDYVEEYLLQHIRPALSEYVAEYEVTGTNPARKNPAAEAAKIRTKMQKLYELYMDDLIDRDTYKRDYSAFQEKLKELDSIVVAPSRDLADLKKLLEQDYEEIYRTFSPQEKNAFWKSFVQSITVHEDGEMDIVFL

SEQ ID NO: 10928 - protein, 464 aa, Unknown
  Description of Unknown: Integrase B10929 sequence
  cd00338,IPR011109,IPR038109,PS51736,G3DSA:3.40.50.1390, IPR006119,IPR036162,PTHR30461,PS51737,PF00239, SM00857,G3DSA:1.10.10.2600,SSF53041
LYARVSSDPSGYGVSVSKQDAENREVCARMGWTIVASFCDNDASASRYATKGRPEFEQMRAALGPGRVLVARESSRFQRDLAVYVQLRDLCADRGAKLCYGGRIYDLTRGDDRFATGLDALLAEREADIIQERNLKGAQATLRAGRQHGRVPYGYSLVFNNATGLHDRVLDEKRAPILQDAARRVLAGESLRSIEADLIARGVWKARGQLRKRLLNPTYAGFRTSRGEIVKQGKWPPIFTPEEFQELSALLRSDQHTVSHRGTEPKHLLTGIAVCGVCGEAVIRGKNGSTASAKRRFEPYEIYCCPKRHVGRLIQRVNTFVEEFIIFELSQPGALEKLEQTEEVEEDPGGETAAELEKRLDGFAAEAAAGRISPQMIGKIEADLRAQIAEAELREAGRKRVVSPVLRGVAGPNAREEWEALTVPEKREGIRNFAVVTINPVRSRWGGVGVTVRPIRAGRIDRAV

SEQ ID NO: 10929 - protein, 463 aa, Unknown
  Description of Unknown: Integrase B10930 sequence
  IPR011109,IPR038109,PF07508,Coil, PS00397,PS51736,IPR036162,IPR006119, PTHR30461,G3DSA:3.40.50.1390,PS51737,PF00239, SM00857,cd03768,G3DSA:1.10.10.2600,IPR006118,SSF53041
MKKVAIYVRVSTQEQAENGNSLEFQIEKLKAYCQLHEFKIVGEYVDAGVSGATSERPALNKLKSNIDNIDIVLIYKLDRLSRSIKDTMFLIEDLFKPNNVNLISLSENFDTSQAMGMATIGMLSTFAQLERETIKERMLAGKKQAVKSGKNLNKTPFGYVKKDGKLFKDESTKESVEFIFEKMQQGKSLNDVVNLLEVHGYGNVRNWSFPIVNRLVRNKVYCGHTETMGILVENTHEPYITDEQQQFIIELLRERKNHSSKSNRNKLPALFRGLISCPCCHRKLSPAVKKLASGNSSIYYKCTYCPIEKRVYFSISEKKLEKKLLHFLKFDFNIKIEKSEIERKDYSKLLDNLESKKFKLQKAWLNELLTDEELQKLQNELNAQIKIIEEEQKQYNFMLENEKKQNGISKIVSSFEDIYKKMNVDEKIEFLNTIIKTVETDVKIEKRKVLNKSEINIVNVIFK

SEQ ID NO: 10930 - protein, 463 aa, Unknown
  Description of Unknown: Integrase B10931 sequence
  cd00338,IPR011109,IPR038109,PF07508,Coil, PS51736,G3DSA:3.40.50.1390,IPR006119,IPR036162,PTHR30461, PTHR30461:SF3,PS51737,PF00239,SM00857,G3DSA:1.10.10.2600, SSF53041
MQVESDSPAIHLSRAMDYCRDRGHEVNEIHQLDGVSGCAIWDLPVAQKMRFNIETGKSQGLVFTALDRLGRDTLELLQFERFFRDHGACLISIFDNIDTSTSDGMRYFQGLAAQAEYERRKLSERVTRGILTRQKRGEIFAHKAPFGYVKEQKRLYLHPVEAPIVELIFELFLQSQSTARVAKELNLRGYRTSAGKEFSYMSVSSVLRNPTMKGDHYVNRYLGRHNKKPREQWVKIEVPAIVSEEVWAKANAILKRNHKPHKKAVNAYSGLLRCHCGTVMYFRGRYGGKNKPQYFCRTCANKIQAPDLDQAIASVINSFALDQLPKEATFEISTEFEQKKRLLAGLTASVQKLEREKDKLIELFTAEALTMEEFKAKKEPLAQRLAEVDKERAALEYELNDLRGQQLAERGLKQALKSLPWNEIREQRKNEVLHTFVREITLNQDTIELQLLYVPANLKEKNV

SEQ ID NO: 10931 - protein, 463 aa, Unknown
  Description of Unknown: Integrase B10932 sequence
  PF13408,IPR011109,IPR038109,PF07508,Coil, PS51736,IPR036162,IPR006119,PTHR30461,G3DSA:3.40.50.1390, PTHR30461:SF3,IPR025827,PS51737,PF00239,SM00857, cd03768,G3DSA:1.10.10.2600,SSF53041
MEQATDGYSIGEQKDKLLHYASAQGYAVVDTYSDEGFSGKDLLRPNMERMLNDIQHGKINTVLVYKLDRLSRHVKDVLELVETFDKCNVTLYSLSENFDLASPFGRAALKMMATFAELERETIVERMEMGKIARAKDGKYTCPGTRCPFGYRHDKKNDRLLIEESEAEIIRKIFDLYVNHGYTFRKLYDYCREAYPDVKYFNNQMCCKPIIERPLYAGYFRYRGGELTKGTNFEAIISYELFLQAQAQVDRNRTKRLSDSSPYLLTGLLICGRCGNRYVGKMYERYTKKPDGTHTKHYRYRDYGCAARLKRDKNYHPAKCDNDIYRAEELEKIVEDYVLNLNIDDYNKADFSPGLIDKMMSEIGAIKRSQSKLLDLYLSGDIDKDTFLIRKIEYDSKIAELQNLIEKETESVQSAPTNAEAIKKSIAEYSMLNRRQKRTLLEYLIKNIIVDGSRITVNLRLKK

SEQ ID NO: 10932 - protein, 463 aa, Unknown; identical to SEQ ID NO: 9603
  Description of Unknown: Integrase B10933 sequence
  cd00338,PF13408,IPR011109,IPR038109,PF07508, PS51736,G3DSA:3.40.50.1390,IPR006119,IPR036162,PTHR30461, PTHR30461:SF3,IPR025827,PS51737,PF00239,SM00857, G3DSA:1.10.10.2600,SSF53041

SEQ ID NO: 10933 - protein, 463 aa, Unknown
  Description of Unknown: Integrase B10934 sequence
  IPR038109,PS00397,IPR006119,PS51737,PF00239, cd03768,G3DSA:3.40.50.1390,PTHR30461,IPR025827,SM00857, G3DSA:1.10.10.2600,SSF53041,IPR011109,PF07508,PS51736, IPR006118,PF13408,Coil,IPR036162,PTHR30461:SF3
MQRVAIYARVSTQEQAENGNSLEFQIDKLKAYCQLHEYKIVGEYVDAGVSGAKSERPALNKLKKDIDKIDIVLIYKLDRLSRSIKDTMYLIEDLFKPNNVNLISLSENFDTSQAMGMATIGMLSTFAQLERETIKERMMAGKIQAVKNGKNINKTPFGYIKKDGQLIKDERTKDCVDFIFKKMLEGKSLHETVKLLEMSEYNNLRKWSFVFINRMTKNKVYCGHTESLGEIIKNTHDNYINDKEYKYINELLLERKTHSSKSQRNKLPAIFRGLISCPNCNRKLTPFTRKRKNGDKTMYYRCNNCASEGKKTISITEKVFEKKLLNFLKYDFKIEFKKTKIEKKDYSKILNNLENKKFKLQKAWLNELLTDRELEKLQNEVNEQIKSIKAEEQEYNLMVEDSEKQSNITGIVSNFESLYLTMNVDEKIEFLNTIIKNIVTEETVKKVNIYDKHTINIVDIIFR

SEQ ID NO: 10934 - protein, 463 aa, Unknown
  Description of Unknown: Integrase B10935 sequence
  IPR011109,IPR038109,PF07508,PS51736,G3DSA:3.40.50.1390, IPR006119,PTHR30461,IPR036162,PTHR30461:SF3,PS51737, PF00239,SM00857,cd03768,G3DSA:1.10.10.2600,SSF53041
MSDIASTKARKRCAVYCRVSSDERLDQEFNSIDAQKEAGHAYVASQRSEGWIPVADDYDDPGFSGGNTDRPGLKRLMADIERGQIDIVVVYKIDRLTRSLADFSKMVEVFERHGVSFVSVTQQFNTTTSMGRLMLNVLLSFAQFEREVTGERIRDKIAAAKRKGMWMGGVPPLGYDVDNRLLVINEAEAAVVRRIFEEMLTIGSPTQIAVNLTADGITTKAWTTQEGQTRKGTRIDKKYLHKLLRNRIYLGELSHKGNWYPGAHPPIIDQELWDKVHTVLARDGHARSVETKIRSRTDALLRGLLYAPSGERMYPTYSRKNGRKYHYYVSKSESRFGAPGKSYERLPAPEIEAAVVAQIRTVLTSPESIASVVRHIQQNQKTKGGQIDEATTVMAMGRLNDVWDQLFPVERHRIANLMIERIDLVHVGEVQGIKVKWRELGWDALIGEFARRGIGAELVEVEA

SEQ ID NO: 10935 - protein, 463 aa, Unknown
  Description of Unknown: Integrase B10936 sequence
  PF13408,IPR011109,IPR038109,PF07508, Coil,PS51736,G3DSA:3.40.50.1390,PTHR30461, IPR006119,IPR036162,IPR025827,PS51737, PF00239,SM00857,cd03768,G3DSA:1.10.10.2600,SSF53041
MKTALGYIRVSRDREGDKLSPGLQRQRITDYCSAKGWRLVKVHEDINVPGGSFDRPGWSSLMAEVEPGDIIVCNEFTRIGRHLRETLASIEDLRDRGVEIVSLEGEFDTTTAAGKLQYQILLVLAEFERNRMSERLRQAHDQIAHEGLWKGGGIPPLGYSYTPGTGRLEVESEEADTVRLIYDLRDKGWSIRAIVRHLADQGTPGKKGRMNYTSVRSTLRNPAYVSKRFYQGALLPMNHEPIIPAEQWERVQARNRSSDQKARKYLLSGFLVCGDCGARMVHQSQGPGRRQYYACKRYAEFGTGRRLTVEEHVADQWVIEKFFAHIDPVKLEAAEKKIQGRQPKKFVKVEKLEARLQRSEAALDRLVTDYYDSDTPPIPPEQFRNQITELVRRRDTLVGELQKFKDARLLETPPPIGLVETWPLMTLDERRESLRLFIEKITVMPVRSGKRIDPARLKIKWRF

SEQ ID NO: 10936 - protein, 463 aa, Unknown
  Description of Unknown: Integrase B10937 sequence
  IPR038109,IPR006119,PS51737,PF00239,cd03768,G3DSA:3.40.50.1390, PTHR30461,IPR025827,SM00857,G3DSA:1.10.10.2600, IPR013809,SSF53041,IPR011109,PF07508,PS51736, PF13408,Coil,PS50942,IPR036162,PTHR30461:SF3
MEEGYSIEEQKAKLESYCDIKDWHVYKIYTDGGFSGSTTERPALEQLIKDAQSKLFDTVLVYKLDRLSRSQKDTLYLIEDIFLKNNIEFVSLLENFDTSTPFGRAVIGLLSVFAQLEREQIKERMQLGKLGRAKSGKSMMWAKTSYGYDYDKETGSMTVNEYEALVVKEIYSSYLAGMSITKLRDKINDEYPKKPAWSYRTIRGILANPVYCGLNQFKGQTFQGTHKAIISLEDFEQTQRELAKRQQTAKELLNPRPFQAKYMLSGMAQCGYCHAPLKVILGQKRKDGTRTKRYECYQRHPRSTRGVTVYNDNQKCDSGYYYMDILEHYVLTRIAMLQNDPDKIQELFSDDTSPVIDKQAIQKQIDSLTLKLSKLNDLYLDDRITLDELRTKSADFIKQRNALEEEIKKASNDKQAGQREKIEKLLDASSVLDMSYDNQKVIVRELIDKVQVTSDKIVINWKI

SEQ ID NO: 10937 - protein, 463 aa, Unknown; identical to SEQ ID NO: 10533
  Description of Unknown: Integrase B10938 sequence
  cd00338,PF13408,IPR011109,IPR038109,PF07508, PS51736,G3DSA:3.40.50.1390,PTHR30461,IPR006119,IPR036162, PTHR30461:SF3,PS51737,IPR025827,PF00239,SM00857, G3DSA:1.10.10.2600,SSF53041

SEQ ID NO: 10938 - protein, 463 aa, Unknown
  Description of Unknown: Integrase B10939 sequence
  IPR038109,PS00397,IPR006119,PS51737,PF00239,G3DSA:3.40.50.1390 ,PTHR30461,IPR025827,SM00857,G3DSA:1.10.10.2600, SSF53041,IPR011109,PS51736,IPR006118,cd00338, PF13408,Coil,IPR036162,PTHR30461:SF3
MRRKTTAPVEKILLRVAIYIRVSTDKQVKDGDSMRDQLATGQKYIDSHENMILVDTYIDDGISGQKLKRDDFQRLIDDVRAGRIDLIIFTRLDRWFRNLRHYLNTQDILDKHGVSWTAIEQPYFDTSTPHGRAFVNNSMIWAELEAQNDSDRILGVFDDKVDNGEVLSGSTPLGYKIVNKHLVPDDDAPTAVAIFQYYRKTGNLSMTLRYMESEFGLVRSAASLKNMLTNTKYIGEFRDNKNYCPAIIDRDLFFDVQRLLKINIKSGKKHDYIFSGLVVCDDCDHIMSGCQQRAGGRVRSDGTRIVYKYSVYRCRQGVNLHRCPNRKLVFETTLEKMLLERIRPELENYIAEYEVANLPALRTDAKRRSVEGKMQKLKDLYLNDLITMDEFKLDREKLLMQLEKINAEDSRPVKDLSYLKNFLKMDFESVYDSLSIPERRELWRSIVKEIRVDHDKNIHIIFL

SEQ ID NO: 10939 - protein, 463 aa, Unknown
  Description of Unknown: Integrase B10940 sequence
  IPR038109,PS00397,IPR006119,PS51737,PF00239,G3DSA:3.40.50.1390 ,PTHR30461,IPR025827,SM00857,G3DSA:1.10.10.2600, SSF53041,IPR011109,PS51736,IPR006118,cd00338, PF13408,Coil,IPR036162,PTHR30461:SF3
MRRKTTAPVEKILLRVAIYIRVSTDKQVKDGDSMRDQLATGQKYIDSHENMILVDTYIDDGISGQKLKRDDFQRLIDDVRAGRIGLIIFTRLDRWFRNLRHYLNTQDILDKHGVSWTAIEQPYFDTSTPHGRAFVNNSMIWAELEAQNDSDRILGVFDDKVDNGEVLSGSTPLGYTIVNKHLVPDDDAPTAVAIFQYYRKTGNLSMTLRYMESEFGLVRSAASLKNMLTNTKYIGEFRDNKNYCPAIIDRDLFFDVQRLLKINIKSGKKHDYIFSGLVVCDDCDHIMSGCQQRAGGRVRSDGTRIVYKYSVYRCRQGVNLHRCPNRKLVFETTLEKMLLERIRPELENYIAEYEVANLPALRTDAKRRSVEGKMQKLKDLYLNDLITMDEFKLDREKLLMQLEKINAEDSRPVKDLSYLKNFLKMDFESVYDSLSIPERRELWRSIVKEIRVDHDKNIHIIFL

SEQ ID NO: 10940 - protein, 463 aa, Unknown
  Description of Unknown: Integrase B10941 sequence
  IPR038109,PS00397,IPR006119,PS51737,PF00239,G3DSA:3.40.50.1390 ,PTHR30461,IPR025827,SM00857,G3DSA:1.10.10.2600, SSF53041,IPR011109,PF07508,PS51736,IPR006118, cd00338,PF13408,Coil,IPR036162,PTHR30461:SF3
MVNVALYIRVSTMEQATEGYSIGEQKERLTRYSEAMGWQIYDTYTDPGFSGGSMDRPGLQRLIRDVKAHKVDKVLVYKLDRLSRSQLDTLYLIEKVFLVNNVDFVSMNENFSADTPFGRAALGIMATFAQFEREQIRERLMMGKQARAKTGKFSGGNNIPYGYDYIDHELVPNEKEAEIVRDIFRRYLSGGSVTKIVKDYEKAGIRSRGGKFHDSTIRNVLANRNSVGEVRFQGEWIQGTHPAIVDKDIFEAVQHIMAKKRKEALLHNSRIGKANSYLSGLLFCSRCGARFSKKTYMRTCKGVPYNYARYGCNNRVRDKRRRVCECDNKIWTMTELDDLIFGEIKKLKLDPDAQPAEQAPVKDIYASEIEDIDRRIQRLMDLYESGTIDMQEISERIKNLNSRRQLLETEQETTKDVKVAQRAVQSFSEVLENGTLEQVRILLFDIIRRIDIDGEDVTIQWDF

SEQ ID NO: 10941 - protein, 463 aa, Unknown
  Description of Unknown: Integrase B10942 sequence
  IPR038109,PS00397,IPR006119,PS51737,PF00239,G3DSA:3.40.50.1390 ,PTHR30461,IPR025827,SM00857,G3DSA:1.10.10.2600, SSF53041,IPR011109,PF07508,PS51736,IPR006118, cd00338,PF13408,Coil,IPR036162,PTHR30461:SF3
LKTAVAYIRVSTEMQTEYSPDSQLKLIKDYATKNDMILSEVYSDEGISGRTAEKRPAFNRMISDAKQNKFNVIIIYHTSRFARNHEESIVYRNMLKRDGIDVISITQPSVDYKTDILMNALYAVMDERYSIELSENVKRGLKEKASKGIYFSRSPFGYCRPVKKQPLVEDEAESHLVKWIFNRFEDGLTTYEISRELNAKGYKTRTGLNFYKTGIIEILKNPVYKGFLLYNCDGETFFRKADHKPIIDEEQFDRVQEIIEARAKITPRYARESSACQHWLVGIMRCVVCGSTYVHVKHTRGVNRFRCGRFGMGACKNSRSLGVPDAENIVLNYLENLPIDSCNFVTSAKEAEPLKNKSQESTKQLEKALERAKQAYLRGIDSIDEYETNKENITAEISKLRQTQAIGNTPVIDKLEFMKRIVGLVELVHSDVDTKTKNKAMRRCISKISIDPETKKFTFYFFA

SEQ ID NO: 10942 - protein, 463 aa, Unknown
  Description of Unknown: Integrase B10943 sequence
  cd00338,PF13408,IPR011109,IPR038109,Coil, PS51736,G3DSA:3.40.50.1390,IPR006119,IPR036162,PTHR30461, PTHR30461:SF3,IPR025827,PS51737,PF00239,SM00857, G3DSA:1.10.10.2600,SSF53041
MYMTQSAPELYGVRVVKYIRCSHDDQVLHGDTLEAQNEILDDFIARNHCVLIDTFIDEALTARKKYTNRKEFVRLLDGVRRHDFDVILFTKLDRWFRNIGDYHKIQEVLEANGVQWKAVTESYDTTTTNGRLHINIRLSVAQDECDRDSDRIKDVFAFKLKNKSFVTGSVPRGLMLDAEKHVVPDPEWKQFALDAFDMLEVTGSVRKSLFALQERYSCIYSYSSFIRMLKNPLYKGMYRDDPQFCDPLIDPDRFDHIQTLIKKNVRQRRSGTQFIFSGLLTCDVCGRSIAGYTTGRRRKDGSITRKPRYRCTAWNMNHSCTNNKSWMEEVLEDRVLALVRPSLSAYIADYDVEDGGSRGRNPAADAARIRTKLKKLYDLFMDDLIDRDLYKSEYDQLNAQLQEALTAADHPRKDVSELKKFLSQPWEDVYRDFSVQEKNAFWKSFVDTIRIREDGSIADIIFL

SEQ ID NO: 10943 - protein, 463 aa, Unknown
  Description of Unknown: Integrase B10944 sequence
  cd00338,PF13408,IPR011109,PF07508,Coil, PS51736,G3DSA:3.40.50.1390,IPR006119,IPR036162,PTHR30461, PTHR30461:SF3,IPR025827,PS51737,PF00239,SM00857, SSF53041
VKAALYVRLSSYRGAADPSTSPERQEEIGRNYAAARGWNVSTVIRDLDVSGSSKGERLDRSGLRDVRNLFGQIDVLIVSKVDRLARDTLDFLAFAEECDRNGVALVSVAESLDMTTPGGKFTATILAAFAEMEAKTISERTAAGRAGTISAGRYPGGRVPYGYRTVPHASGAGRGLDVVPEEAAHIRSAAAHVIAGGTLYSAVQLIGAHGSVPRTAPTWTSASLRVVLMNTVLLGYQKEQGRDVLSSDGTPAVYWPPIIDTETHRQLVARLTPTKQRRRARADYLLSGVLTCANCGHVLYATNRSRYATYRCPTETGCVGRVEIQCGLAESEVVGDFLARYGYEEVYYTITETAPEHSHRLAAVESGLRATADELTRPGADMAGLLERLNALRDERELLAAKGPTIVNRRVSAGMTVADLFAELGETPGSVRECRERIAEHLVSAVVSGRAASGNRRIVTVWR

SEQ ID NO: 10944 - protein, 463 aa, Unknown; identical to SEQ ID NO: 10115
  Description of Unknown: Integrase B10945 sequence
  cd00338,PF13408,IPR011109,IPR038109,Coil, PS51736,G3DSA:3.40.50.1390,PTHR30461,IPR006119,IPR036162, PTHR30461:SF3,IPR025827,PS51737,PF00239,SM00857, G3DSA:1.10.10.2600,SSF53041

SEQ ID NO: 10945 - protein, 463 aa, Unknown
  Description of Unknown: Integrase B10946 sequence
  cd00338,IPR011109,PS00397,PF07508,Coil, IPR038109,PS51736,G3DSA:3.40.50.1390,IPR036162,IPR006119, PTHR30461,PTHR30461:SF3,PS51737,PF00239,SM00857, G3DSA:1.10.10.2600,IPR006118,SSF53041
MRVAIYVRVSTDEQAKEGFSIPAQRERLRAFCESQGWEIVQEYIEEGWSAKDLNRPQMQRLLKDIKKGNIDIVLVYRLDRLTRSVLDLYLLLQTFEKYNVAFRSATEVYDTSTAMGRLFITLVAALAQWERENLAERVKFGIEQMIDEGKKPGGHSPYGYKFDKDFHCTIIAEEADIVRMIYRMYCDGYGYRSIADRLNELGVKPRIAKEWNHNSVRDILTNDIYIGTYRWGNKVVLNNHPPIISESLFRKAQKEREKRKVDRTRVGKFLLTGLLYCGNCDGYKMQGSFDKREQKTYYRCLKCNRITNEKNILEPLLDEIQLLITSKEYFMSKFTDQYDHQEMIDVSALTKELEKIKRQKEKWYDLYIDENNPIPKEELFSKINELNKKEEEIYSQLNEIEPEDNEPIEEKYNRLSRMLDFKKQFEQANFFTKKELLLSIFEKVVIYREKGKFKKITLDYTLK

SEQ ID NO: 10946 - protein, 463 aa, Unknown
  Description of Unknown: Integrase B10947 sequence
  cd00338,PF13408,IPR011109,IPR038109,PF07508, Coil,G3DSA:3.40.50.1390,IPR006119,PTHR30461,IPR036162, IPR025827,PS51737,PF00239,SM00857,G3DSA:1.10.10.2600, SSF53041
MQDRVPARLRAVGVIRVSEVGKRDRESESFITAREQREQFTSWCARHAADLVEVVNEIDVSGKLELAKRRGLLRALELIEGGIANVLLFAYFDRSFRNLDVQNSVLARIIEAGGATYACDFGEIRFGTPAERFATTVQGAANQLTSDQAAYKAMNAKRDAVARGVPPFSRLCLGYVRGPDGHVAVDPTLAPLVTKMFNMRADGATLKECQQFLADNGVVRSYSSVKATLASKMVLGELHAGKHVTPNLESHTAIVDRVTWQRVQRAKVPRGRVPLPDGRLLGRMGLLRCGGCGRAMSSGGSRSGGKTYRTYVCGMRADCPRPVSINATLVERLVADECRRYIAGRTQSASLDSKVREAEDRVAHAEAALDGAIGLLAGIERPSARTRLLELQHDLAEAIDALNVVQRQAGPLELVRGDVDWDRLSLDERRGLIRAIFRSITVHPTQAGIPRDASALTFEPFVE

SEQ ID NO: 10947 - protein, 463 aa, Unknown
  Description of Unknown: Integrase B10948 sequence
  cd00338,PF13408,IPR011109,Coil,PS51736, G3DSA:3.40.50.1390,IPR006119,IPR036162,PTHR30461,PTHR30461:SF3, IPR025827,PS51737,PF00239,SM00857,SSF53041
MYMTQSAPELYGVRVVKYIRCSHDDQVLHGDTLEAQNEILDDFIARNHCVLIDTFIDEALTARKKYTNRKEFVRLLDGVRRHDFDVILFTKLDRWFRNIGDYHKIQEVLEANGVQWKAVTESYDTTTTNGRLHINIRLSVAQDECDRDSDRIKDVFAFKLKNKSFVTGSVPRGLMLDAEKHVVPDPEWKQFALDAFDMLEVTGSVRKSLFALQERYSCIYSYSSFIRMLKNPLYKGMYRDDPQFCDPLIGPDRFDHIQTLIKKNVRQRRSGTQFIFSGLLTCDVCGRSIAGYTTGRRRKDGSITRKPRYRCAAWNMNHSCTNNKSWMEEVLEDRVLALVRPSLSAYIADYDVEDGDGHGRNPAADAARIRTKLKKLYDLFMDDLIDRDLYKSEYDQLNAQLQEALTAADHPRKDVSELKKFLSQPWEDVYRDFSVQEKNAFWKSFVDTIRIREDGSIADIIFL

SEQ ID NO: 10948 - protein, 463 aa, Unknown
  Description of Unknown: Integrase B10949 sequence
  PF13408,IPR011109,IPR038109,PF07508, PS51736,G3DSA:3.40.50.1390,PTHR30461,IPR006119, IPR036162,IPR025827,PS51737,PF00239, SM00857,cd03768,G3DSA:1.10.10.2600,SSF53041
MACRSFAEARGYEVVLVSDVDVDVSGGRLARPGLDEVRARWDEFDVLIFFKLDRLSRSLLDFISILEEARGHNVALVSATEPLDMTSPIGEAMVKVLAIFAELERKTIAFRVTGAIAHLRSSGRIAGGPIPYGMRKAPNPAGAGYVLAIDEEKAVYALEMVDRVLAGESYRSICRLMNERGIPTPRGRGDTWRPNTVKAILKNPALWGAIVHQGQIVRGEDGMPILSAAIVSRDTWDSVQTEVERRGKPSERNGSLRQGLLSGLLVCDHCGTRLGMNRGGPKTRERVYTCPTKGHGGKCVGVAITAARVEEYVTARFLEKYGTWSMPLPVFFEEEAEVRTEPEELRAVETAMADLEADRYERGLFGGENGAHRFAEMYQRLELRRDVLLTEVRATPDGDNFEILSTTMGEYWGTAGPEDRRLMEDRRLLLRGLVGSIRVKKGQPGRKGLDPARVIFEKGLAGS

SEQ ID NO: 10949 - protein, 462 aa, Unknown
  Description of Unknown: Integrase B10950 sequence
  cd00338,PF13408,IPR011109,PF07508,PS51736, IPR036162,IPR006119,G3DSA:3.40.50.1390,PTHR30461,IPR025827, PS51737,PF00239,SM00857,SSF53041
LLLDVRTVIYARLSRRSDVNALNLDDQIVRCREYATRQGWTVVAERSDYGESAFERDAIEDRPGFGDVLTLVRDRQVDAVLAWRPDRLFRDPIEQALFFRECQRHGVATVATVAEGQRDPANPGDEMVGTIVAAVARYESNAKRARLLAKHRQLAEAGKVSGGGTRPFGFEDDRVTIRPDEADVIRWAAKEILAGTSLRTVCRMLTDRGVATVTGKPWTSTVLKGTLTRARIAGLREHRGTVTRAVWPAIVTPDDLAQLRATLLDPARATRHGRGRVYLLTGGVAVCGHCGAPLVARPKSGGRPAYHCARGVNFTGCGKISRLAIPVEDEVAARLFAAIDDGTLADAEPEPAPELDGVTLADIEARLTDLSRDHYVLRVISRAEFLAARDPLAAEADRLRARLSTPRGPRHPLHGLREVWPVLSMGERRQVVAEVIDRVVLLPALKGRNRFDPSRIEVVWRV

SEQ ID NO: 10950 - protein, 462 aa, Unknown
  Description of Unknown: Integrase B10951 sequence
  IPR011109,PS00397,IPR038109,PF07508, Coil,PS51736,IPR036162,IPR006119, G3DSA:3.40.50.1390,PTHR30461,PTHR30461:SF3,PS51737, PF00239,SM00857,cd03768,G3DSA:1.10.10.2600,IPR006118,SSF53041
MTVGIYIRVSTEEQAREGFSISAQREKLKAYCISQDWQDYKFYVDEGKSAKDTNRPYLKLMLDHIQQGLINVVLVYRLDRLTRSVKDLYKLLDLFDKNNCIFRSATEVYDTGSATGRLFITLVAAMAQWERENLGERVTMGQVEKARQGQYSAPAPFGFKKQDETLVKDKKQGYILMDMIDKVKKGWSIRQIAKYLDQSYLPIRGYKWHIATILSILHNPALYGALRWKDELNETSHEGYLTKEEFEELQNILYSRQNFRKRQIESAHIFQMKLVCPQCGNRLGCERSVYFRKKDQKNVESLHYRCQSCALNERPSISVSEKKLEKALLLFMKNVKFDLEPVVKEEKNETTEIQNAIVKIERQREKFQKAWASDLMTDEEFTARMSETRKAHENFTKRLSEIQRATPLPIDIKKAKKLVNEFKINWAYLNTEEKREFVQSFIEKIEFTKKDQNPHILNVSFY

SEQ ID NO: 10951 - protein, 462 aa, Unknown
  Description of Unknown: Integrase B10952 sequence
  cd00338,PF13408,IPR011109,IPR038109,PF07508, Coil,PS51736,G3DSA:3.40.50.1390,IPR036162,IPR006119, PTHR30461,PTHR30461:SF3,IPR025827,PS51737,PF00239, SM00857,G3DSA:1.10.10.2600,SSF53041
MARKKKVSPGNRLVAYYRYSGGSQQTEQSIEGQRRDCEAYARQHGLTIVHEYIDRHISGRGVESRLAFQQMIADSSKHLFDLVICWKTDRFARNRYDSAVYKKKLRDNGVRILYAAESSVEGPEGIILEGLMESLAEYYSAELAQKMRRGMRESALKGRAINPSRPLGLTTDEHKRFIIDEKNAPTIRFIFEHYAAGESSASIVDQLNAAGLRTSKGNSFNKCSIPRIIQNEAYHGVYICKAYDVRIDGAIPAIIDDDLWKRAQKMLTLNKQHRAPHSSHADYLLSGKLFCGCCHSLMRGISGHNCRNDVYYYYACGNKADGGTCKKKNIPKDVAENLVVNAICENILRPDTLEDLADAIAAAQQAEVNQPDPERAMLEQNLADVHRKINNIIESIENGTASSRLSARLADLEQQESTLNYQLESLKEVHPPVLDRERILFLLEQFLISPNERTEDYNRRII

SEQ ID NO: 10952 - protein, 462 aa, Unknown
  Description of Unknown: Integrase B10953 sequence
  PS00397,IPR038109,IPR006119,PS51737,PF00239, cd03768,G3DSA:3.40.50.1390,PTHR30461,IPR025827,SM00857, G3DSA:1.10.10.2600,SSF53041,IPR011109,PF07508,PS51736, IPR006118,PF13408,Coil,IPR036162,PTHR30461:SF3
MIACYARVSTTEQAVNGHSIDEQNDRMQKYCDAMGWKPCKLYTDGGYSGASMERPALQKLIKDVKAHKIERVLVYKLDRLSRSQRDTLTLIEDVFLQNNCEFVSMNENFDTATPFGRAMIGILAVFAQLEREQIKERMIMGKEARAKQGKYHGSDRLPIGYDYIDGELVINESEAAQIKQAFDWFVGGMSIPKIVKAFNAAGIEHRYGRWQESVLRHVLTRKTYIGYIYSKGTWYKGTHEPILDDETFNAAQAIIERTHAESIKYNRRYGKASSYLGSLIYCAECGNRFAKMTATRNGNKWVYYTCNTRRSKSLAKGRTCSNPSWKLDELESLVFGEIKKLQFEKVKPTTDKRPQTLSKSLSEVEQKISRLIDLYASGTLSRADLEGKIKALNEKREKLNNELDRLIKERQDQLTQDDIISYAKSFDDVLKRGNYDEIRAVLTALVDRIEIGRDGITIYWNF

SEQ ID NO: 10953 - protein, 462 aa, Unknown
  Description of Unknown: Integrase B10954 sequence
  PS00397,IPR038109,IPR006119,PS51737,PF00239, cd03768,G3DSA:3.40.50.1390,PTHR30461,IPR025827,SM00857, G3DSA:1.10.10.2600,SSF53041,IPR011109,PF07508,PS51736, IPR006118,PF13408,Coil,IPR036162,PTHR30461:SF3
METDLTALYVRVSTYAQAEEGYSVEAQKEKLIQWCKLKDHDNYRIYEDGGWSGSNIDRPALKQLISDCVNHVVTRVVVYKLDRLSRSQRDTLYLFEDVFIANDIEFVSLNESLDTSTPYGMTMVGILSAFAQLERQNIRMRTRMGMHERVKDGYWMGGARTPFGYDYDPAKNILVPNEHADEVREIYDLYLKGYSATKLSQLYHLSGDNHVTAILDRITYTGKISYNGEILQGRHEPIIDEVTWLRVQEERSKRSTKGIQTSQYLLTGFLVCGKCGAKMRYQKWSSGKTRICCYSQIPSSKASLIKDPNCDNAKCYAEDVEPVVLEDLFSITDLITVDMDNADKMNSVTLGRESTVKTLQNRYDVIASKIKRLYNLYAESGNDILLETIKENQESLQKLSEMIENEKASAAALSEIVKRNETVHNLRDKWDAMTMTEKRAALSICIDKIMITNGEIEMFYNI

SEQ ID NO: 10954 - protein, 462 aa, Unknown
  Description of Unknown: Integrase B10955 sequence
  IPR011109,IPR038109,PF07508,PS51736,IPR036162, IPR006119,PTHR30461,G3DSA:3.40.50.1390,PS51737,PF00239, SM00857,cd03768,G3DSA:1.10.10.2600,SSF53041
MSDAAQIASPKARKRCAVYCRVSSDERLDQEFNSIDAQKEAGHAYVASQRAEGWIPVADDYDDPGFSGGNTDRPGLKRLMADIERGQIDIVVVYKIDRLTRSLADFSKMVEVFERHGVSFVSVTQQFNTTTSMGRLMLNVLLSFAQFEREVTGERIRDKIAASKRKGMWMGGVPPLGYDVENRLLVINDAEAAVVRRIFEEMLTIGSPTQIAANLTLDGITTKAWTTQDGQTRAGARIDKKYLHKLLRNRIYLGELSHKGKWYPGAHSAIIDPGLWGRVHEVLARDGHARSVETKIRSRTDALLRGLLYAPSGERMYPTYSRKNGRKYHYYVSKSESRFGARGKSYERLPAPEIESAIVAQIRTVLTSPESVASVVRHIQRNGAQIDEAATVMAMGRLNDIWDQLFPVERHRIANLMIERIDLVHAGEVQGIKVKWREIGWNTLIDEFAPHNIGAEMLEVEA

SEQ ID NO: 10955 - protein, 462 aa, Unknown
  Description of Unknown: Integrase B10956 sequence
  PS00397,IPR038109,IPR006119,PS51737, PF00239,G3DSA:3.40.50.1390,PTHR30461,IPR025827, SM00857,G3DSA:1.10.10.2600,SSF53041,IPR011109,PF07508 ,PS51736,IPR006118,cd00338,PF13408,Coil,IPR036162,PTHR30461:SF3
MKAGLYVRVSTTEQANEGYSIQEQTERLNRYAEAMGWYVYDTYTDPGFSGGSMDRPGLQRLIRDVKARKVDKVLVYKLDRLSRSQLDTLYLIEKVFLANGVDFVSMNENFSADTPFGRAALGIMATFAQFEREQIKERMMMGKQARAKSGKFSGGNNIPYGYDYTDGELIVNEHEAEIVREVFRRYIAGVPTSRISKDLNASGISSRAGKWHDSQIRNIIDNRNSIGMVRFQGDWLHGTHEPILDTETFDAAQLIRRKRQKEALLKNARIGKASSYLSGLVYCARCGARYSKKTYHSTVNGKKYLYSRYGCVNRVRDKARRTCACDNRFWNEKDLDSLVFDEIRKLKLDPNATGRSPEPKADIFAMEMEDIDKRIKRLMDLYEAGTIDLDEISERVKTLNQKRQVLADEQEDAHDRKVAEKAVQSFSEALENGTLEQVRVLLFDLIRRIDIDGDDVSIYWNL

SEQ ID NO: 10956 - protein, 462 aa, Unknown
  Description of Unknown: Integrase B10957 sequence
  cd00338,PF13408,IPR011109,PS00397,Coil, PS51736,IPR036162,IPR006119,PTHR30461,G3DSA:3.40.50.1390, PTHR30461:SF3,PS51737,IPR025827,PF00239,SM00857, IPR006118,SSF53041
MAVKKIRVASYLRVSTEEQKRHGDSLATQRGHIQKYFNENTNAIHVGEYADEGISANKLKKRTELQRLLNDVKNGKIDLIIFTKLDRWFRSVSKYYKIQEVLNENNVSWQAILEDYETLTANGRFKVNIMLAVAEQERDRDSDRIKDVFQYKVSQGQPITGAQPFPFMIKEIDGIKRVVHNPKTEAMTYDWIEHLKTYNSLRGSNVYINEKYDKAFDYTTISNLIKNTMLYGSYRGNDNYCPPYMTKKEFDTLQDALKKNVRVRTTNHIHLFTKMVKCPYCGQNLIGFNSRYISKKTGKTTISYMLRCENRYRPHKKDNPCKYKHSIYEHEIEDYLIQNLNKLIESYISSLDIKEEKKKIVSIDKQKKKLKEEMERLNTMYQKGRITYEKYDTSYEELENKLKALVPVEAQKDVSRLKKILDTNYIENYKKADKADKKAFWNSIIKEIHVNDKKEITNIIFW

SEQ ID NO: 10957 - protein, 461 aa, Unknown
  Description of Unknown: Integrase B10958 sequence
  IPR038109,PS00397,IPR006119,PS51737,PF00239, cd03768,G3DSA:3.40.50.1390,PTHR30461,IPR025827,SM00857, G3DSA:1.10.10.2600,SSF53041,IPR011109,PF07508,PS51736, IPR006118,PF13408,Coil,IPR036162,PTHR30461:SF3
VKPMIAIYVRVSTNEQAENGHSITEQIDRLCKFCDALNLGKPKVYNDSGYSGANTDRPALQLLISDVKAKKINKVIVYKLDRLSRSQKDTLMLIEDIFLSNGCDFVSMSENFDTSTPLGKAMIGVLAVFAQLEREQIKERMSMGREARAKQGKYAGSWRLPLGYDYIDGELVPNDFEKIQIQKIFSDYASGKAPVTIAKELNGKGLTHRYGIWQTEVIRSILRRKTYIGYVAFNGEWYKGTHEPIISEELFDKVQKRLKKVGEDFKEHNRRPGKALSYLGGLVYCKRCGEKYFKYNRRSNQYSYDYYCCFNRYPRDRKGTCKNDNWRMEELDKLIFDEIKKLSFESSTPSILPDNSDTINDRINELNKQIERLMNLYTLDEIPFDVLQKKIHSISEQKGKLEKSLIQEPATITTEEAEEIVTSFDDVLATEDIDTIRTAITSLINRIEIDGENVYIYWNFD

SEQ ID NO: 10958 - protein, 461 aa, Unknown
  Description of Unknown: Integrase B10959 sequence
  cd00338,PF13408,IPR011109,IPR038109,PS00397, PS51736,IPR036162,IPR006119,G3DSA:3.40.50.1390,PTHR30461, PTHR30461:SF3,PS51737,IPR025827,PF00239,SM00857, G3DSA:1.10.10.2600,IPR006118,SSF53041
MEDLYKAPNVLRAALYIRVSSAEQAMHGYSLEAQKEFLEAYAKEKKMRIVGVYADEGKSASKRLYQRKELLRMVEDMEAGLIDVILFKDITRWSRNSSHYHKIQDRIDAAGGYWIAVQQEHLETKTPTGRFQVTVMLGTAQLEAEQTSERIKFVNASRIPKGGVPWGANSCPLGYTVAKIDGMKRVVKDPSKAEIIMAFFNHFLTYSSCRGAIMHLATEYDYRLEEKSARKILSNTLYIGEYKGFSGYCEPYLTTEQFDQIQKIIAKRTYTPNDPKRVYLFSSLLKCAECGRNLAAYHTKNGRTKKVYLYYRCKNYTMYKSCPHSRGIGEIKTEKWLLENIENEMDKYVQSVKIEELGKPKDVEKKRKALEGKLKRNKELYIEGEIDKEEFSNNKEEYIAQLAALPADEKKDTSEIEAFLNSDWRNLYANLEKHEKRAFWRSIVDYIEVDKDLNFIPHFFN

SEQ ID NO: 10959 - protein, 461 aa, Unknown
  Description of Unknown: Integrase B10960 sequence
  cd00338,PF13408,IPR011109,IPR038109,PF07508, Coil,IPR036162,PTHR30461,IPR006119,G3DSA:3.40.50.1390, PTHR30461:SF3,PS51737,IPR025827,PF00239,SM00857, G3DSA:1.10.10.2600,SSF53041
LKNGFTIINEYCDRAISGKTDNRPSFQRLIKDSEKGQFEAVIMYTLDRFARNRYDSAIYKAKLKKNGVRVFYAKQPMPDTPEGIILESVLEGYAEYYSENLSRNIKRGMKENALQCIATGGAGLALGYTVGEDRKYQIDPVGAKIVQEIFQMYADGMSATQIINYCNEKGYKTSRGNAFNKNSLRTLLKNEKYIGTYKFMDVVVPNGMPAIVDKALFEKVQAMLSHNAKARARTKAHEDYLLTTKLFCGHCGSAMVGESGTSKSGKVHHYYKCIDRKRKHQCNKKVEKKDWIEELVVRFTVQHVLTDENIEKIATRAMEVFEKESADTTYLTGLQDQLKEVKKKIKNLMTAIEQGIITSTTKERLEELESEKNHIEGQIAKEEMKKPLLTKERIMFWLLSFKSGDVNDLEYQRRVVDTLVNSVYVYDDGDKGRRIVFTFNISGQNTATISCSDIACSAPPF

SEQ ID NO: 10960 - protein, 461 aa, Unknown
  Description of Unknown: Integrase B10961 sequence
  cd00338,PF13408,IPR011109,PS00397,IPR038109, Coil,PS51736,IPR036162,PTHR30461,IPR006119, G3DSA:3.40.50.1390,IPR025827,PS51737,PF00239,SM00857, G3DSA:1.10.10.2600,IPR006118,SSF53041
LFATSSSHLRKERSEIGKVKTALYIRVSTADQAVHGYSLDAQESLLKEYAASHNMEVASVYADEGKSASKSLEKRTELMRLLEDAKDGKFSVVLFKDITRWSRNAASYYKVQEVLDSCKVGWIAVEQPYLETLSPTGRFQVSIMLGTAQLEAEQTGQRIKFVQDAEIKRGHFPFPQHNAPTGYKTEKREDGNYLVIDEATAPIIRRIYATFKKTFNLQRCVEAVPEQGFSETTVNRILRNPIYKGQFRGVDGYCEAIIPPYEWDALQRPKRAYNGSKHKGEYIFSGIVKCGSCGSTMRGLCPDDKYHMYQCRNGCRVTISQKDLEGKVLDMITPALDTYKVTVRDQRRNNQLIEKERKRLSEKLRRLVDLYTDGMIDRADYDRRRKEIDEKLETLDPAPDLPNITTDFSGMYSKLSPERKNVFWKAFLDHVTVTREKQVNIAFHTAKVLAERMGMIEMQEK

SEQ ID NO: 10961 - protein, 461 aa, Unknown
  Description of Unknown: Integrase B10962 sequence
  cd00338,IPR011109,PF07508,Coil,PS51736, G3DSA:3.40.50.1390,IPR006119,IPR036162,PTHR30461,PS51737, PF00239,SM00857,SSF53041
MSNHTRAILYLRQSTYREESISLEVQEATCRAYAARLGYEVVGVESDPGISGRTWQRRGVQAVMDAVESGRADVVVLWRWSRLSRSRKDWALAADRADLAGARIESATEPNDASAAGRFARGVMTELAAFESERIGEAWKEAHARRTAAGLPANGKPRFGYLYDTANKIHKPDPFTGPVLEHLYRRYVAGDSVYALTRWMNTTGHQPAAGYGVQNGVWSERTLRRMLDTGFGAGIITVRGERRPGAHDPVINEGLWAQYLDARISRARPSGQGRREYTLTGLCWCDCGSRMACEMDGGGRPRLRCRASKSSGAHRGGYANHDLVLAEVLEHVGALGRVGAVGEMVSFAGAPARDFDQESKAASEQLIAATRQHLSGVIPESAYLVVRDELTAQISALEAERIEAAAVASRPKSSVQARTLLEDWQGLAIAQRREALRLLIERVNITPGRPRSKVQVIMRSL

SEQ ID NO: 10962 - protein, 460 aa, Unknown
  Description of Unknown: Integrase B10963 sequence
  cd00338,PF13408,PS00397,PS51736,IPR036162,IPR006119,PTHR30461, G3DSA:3.40.50.1390,PTHR30461:SF3,IPR025827,PF00239,SM00857, IPR006118,SSF53041
MQQEKVLRVALYCRVSTEEQALHGDSLMAQEAELRSYAEAHHMKVVGIYRDEGFSARKSAMSRPKMVELLEDVKAGKLDRIIFTKLDRWFRNVREYHTVQAVLDQYGVTWEATLESYSTASADGRFKVNIMLSVAENESDRTSERIKFVNEAKRRRKEAAFGGPNKPFGYTTKYIDGIRRLVKDPETEAACQEFWDHVRKYNSVRLAGLYVNEKYGLSRRYKSWTDMSRREMYTGTHRGVEDFCPAYISHEDWEYIMQSHIMVKKTQRPERVYLFTGLLRCPGCGSTLKATFKTSPNDRNKEFRSYRCNNGQHNICTYRRTVSEMKTEKYLLENVKSELEAYIVEVEVNANKKKKPSAAMDIVKLNDEMRRLNNIYRAGNMDDDEYSKETAALKAKIDKAKEAEKDERPPDLEVLKQFLASDFESIYQTLSAEDKRRMWRSIISSIEVEGVTIKKINFRA

SEQ ID NO: 10963 - protein, 460 aa, Unknown
  Description of Unknown: Integrase B10964 sequence
  IPR038109,PS00397,IPR006119,PS51737,PF00239,G3DSA:3.40.50.1390 ,PTHR30461,IPR025827,SM00857,G3DSA:1.10.10.2600, SSF53041,IPR011109,PS51736,IPR006118,cd00338, PF13408,Coil,IPR036162,PTHR30461:SF3
MIERCAIYIRVSTAEQSMKGHSLQAQREYLESYAASHGMRVVGIYADEGQTARKELKKRKAIHALLKDVEADKIDVILFWRMDRWFRNVADFYKVQDILDAHGVRWISASESNINMETRDGRLCLNLILTIGQNEVDTTSERIKFTVNNMIQNGRMVWGATNLPFGYAIVEENGCKRMAKDPETACMVEEFYRFFRQTHKKRATVLHMQDTFGINFSYTMLRTMLSSEFYIGKYRSNDNYCPAYLTLDEWKEIQAISENNIKRPRTGRVYFFSGLVHCPVCGTKMAACAGRSIINRKTKEKREYYYYRCNKAVLNKLCSYTSRISQNLIEEYLLNNLDTEYRKYQVRCNKVKETQTHKKKKRSADSVRSEIERLNILFQKGRIEFDYYEEQYRKLEDELKSFDEVIIREKDHSNVIGMLGSDFKEMYSSLSLENRQAFWQQIIKAIYVTKDRNVDYVDFL

SEQ ID NO: 10964 - protein, 460 aa, Unknown
  Description of Unknown: Integrase B10965 sequence
  cd00338,G3DSA:3.40.50.1390,PTHR30461,IPR006119,IPR036162, mobidb-lite,PF00239,SM00857,SSF53041
MNPNYNNLQNMMQQQGIQGIQGIQGIQGIQGIQAMPQQPFIINNQGQYIPVMMMPGNQQQIQQNPFMVINQPQNMMPFPVVQNQHPQFMNVAQNPFIMLQQQQQPIIQGNPNGDNNDAIIANIMGNVALNQQDNPPKPKKDNSFNPSKNNSNVIKSIEPLTDNEAHFDATNFPNEKYKTITLNGKEQELEAKDLNNYTLETGHIIHKHNININQNNMKGNASIYVRCSNPNGISIDTQMTACLNYAKEKDLVLKGVYIDDGVSGRNGKNLKDGEIGFWKEHIDNNSNLLIYSADRLTRHLFSGLLFLNTMQEKDIDVHFVNNKIIYNKSISAMNKSSIQQELQTAEKYSNDTSEKIKGTINRLKNEGKYIAGRVPYGYKRIKVDGQLKQIVNSIEMDTIKLIKSRYNKIWNKFDDYSNDIPKKSQYYIIKYLKQWCDNQHIKDRNQTYFTESRIKTIIYN

SEQ ID NO: 10965 - protein, 460 aa, Unknown
  Description of Unknown: Integrase B10966 sequence
  cd00338,PF13408,IPR011109,IPR038109, PF07508,Coil,G3DSA:3.40.50.1390,PTHR30461, IPR006119,IPR036162,PS51737,IPR025827, PF00239,SM00857,G3DSA:1.10.10.2600,SSF53041
MVSPELQDIAIGDYCDRSGYQLTHRMEGLDESGSRTKSRWWAKLDLAVEMVEAGQVDVIVVWKFSRTARHRLKWAVALDRVEMAGGRLESATEQVDVSTSTGRFTRGMLAELNAFEAERIGEQWKEAHARRVAVGLPSRGGVRFGYQLINGAYQPDETTGPVLAAMYVDYIRGVSAGTVARRLNDAGHLVARTGTPWTSSHVLAVLDSGFGAGRISCGVRRAITWSAGAHLPVIDEATWDAYRSQREDRRGKPSVSTPAYVLSGLMRCGDCGSGMHATALGVRTGYGFICTAWAKTKRGRCVTVTRAKAEHAVRDWLTRFVEEVEVRAGAEATRTAAQLIARSDADDLRRQANRIDERLAKLTLGWTDGIVLDAAYTTARDQLTRQRAELETRARVADRDAQTLAGPALPIVHDLLEQWDIRPVVARRDMLRHLVRQVVVHRPERRGDPVTLSIHGTWEQ

SEQ ID NO: 10966 - protein, 460 aa, Unknown
  Description of Unknown: Integrase B10967 sequence
  cd00338,PF13408,IPR011109,IPR038109,PF07508, Coil,PS51736,G3DSA:3.40.50.1390,IPR006119,IPR036162, PTHR30461,PTHR30461:SF3,IPR025827,PS51737,PF00239, SM00857,G3DSA:1.10.10.2600,SSF53041
MGKNITVIPAKKVQLTVTHQQATKIRVAAYCRVSTDQDEQLSSYENQVSYYRDYILKHEDYELVDIYADEGISATNTKKREAFNRLIQDCRAGKVDRILVKSISRFARNTLDCIKYIRELKELGIGVTFEKENIDSLDSKGEVLLTILSSLAQDESRSISENATWGIRKKFERGEVRVNTTKFMGYDKDENGKLVINPEQAEVVKHIYHQFLKGYSPESIAKELNTNGIKGWSGKANWYPSSILKMLQNEKYKGDALLQKTYTVDFLTKKRTENDGQVNQYYVTNNHEAIIDTEMWDTVQEELARRKDFREKHKLKTYIMQSDDNPFTTKVFCAECGSAFGRKNWTTSRGKRKVWQCNNRYKVKGQIGCQNNHIDEEMLEKAFMKAVELLQEHRADVVVKWQKLEKGTNLLHKHYAKQMYQLLDLEKFDGTIMNKVLDHISISEVGQIIVIFLEGTEVEL

SEQ ID NO: 10967 - protein, 460 aa, Unknown
  Description of Unknown: Integrase B10968 sequence
  cd00338,PF13408,IPR011109,PF07508,PS51736, G3DSA:3.40.50.1390,IPR006119,IPR036162,PTHR30461,PTHR30461:SF3, PS51737,IPR025827,PF00239,SM00857,SSF53041
VVVKAVIYTRVSADRAGGRSVAEQEAECRAACERNNWDVSEVLSDNDIGASRHSRKHRPAYEKLSEILEPGDVLVTWEASRAQRDLAAYVTLRDLCARLGVQWHYSGTTYDLATGDGRFRTGLDALLAENESEKTRERILRAHRANAAAGKAHGKIPYGYRGIRDEKTGVIVERVPDEVEAPIVRELVARVMAGEGLNTIRKDLDRRGIPGPAGGSWNTHSISRMLRSPTMSGKRIYRGATVEGDWEAIISEPDQQALIGILSDPSRRVTRGPEPVHLLTGIAICGKCDAPMMRMKNTRYPSYVCSKHLHVGRNQEKTDLVVEAEVISRLEDPSIRGTVGVLGGDATPHLEEAHKLRLRLDGFTAEAEKGNLTPARLGKIESTLLPQIEEADRKARASMAIPMLAEAVGPDAGLKWKGYSMPYKRDLIRSLVTVTIHPTIGNRRTFDPNLIDVDWHKPFR

SEQ ID NO: 10968 - protein, 437 aa, Unknown; identical to SEQ ID NO: 10051
  Description of Unknown: Integrase B10969 sequence
  cd00338,PF13408,IPR011109,IPR038109,PF07508,PS51736,IPR036162, G3DSA:3.40.50.1390,IPR006119,PTHR30461,mobidb-lite,PS51737, IPR025827,PF00239,SM00857,G3DSA:1.10.10.2600,SSF53041

SEQ ID NO: 10969 - protein, 459 aa, Unknown
  Description of Unknown: Integrase B10970 sequence
  IPR038109,PS00397,IPR006119,PS51737,PF00239, cd03768,G3DSA:3.40.50.1390,PTHR30461,IPR025827,SM00857, G3DSA:1.10.10.2600,SSF53041,IPR011109,PF07508,PS51736, IPR006118,PF13408,Coil,IPR036162,PTHR30461:SF3
MDVKTVAAYVRVSTDLQMEHGYSIGEQTDHLKAYCAAKGWTLAKIYTDGGYSGKNLDRPAMQELIKECKLYDLILVNKLDRLSRSQKDTLYLIEDVFRAQGVQFASISENFDTTTPLGMAMVGILSVFAQLEREQIKERMHMGRVGRAKKGLWRAGSNPPIGYDYTDGHLLIREDEAEQVRLIYRMFLSGESMYSIARFMHDNFKNKYRSWNQTNSVSVVLRNPLYTGKIVFDGETYEGDHDAIIDQETFDKAQERYSQIMRNNPRYRIPFKSKYLLTGILFCGECGARYSVLTSKNPQMKNKRYTYYGCRGNSASNQDKRNKHKCKYYNQEKLDQYIIDQVMQLEFHETRHKPIKVQKRSKERIAIIDKQISNLIDLYSVDGINLEEIKTKITELNAEKDKLKQEEPEVKSNIHSSNDIIRAKDVLQNGSQENKRMIITSLIDRVLLFEDHIEIVWNL

SEQ ID NO: 10970 - protein, 459 aa, Unknown
  Description of Unknown: Integrase B10971 sequence
  cd00338,PF13408,IPR011109,IPR038109,Coil, PS51736,G3DSA:3.40.50.1390,IPR036162,IPR006119,PTHR30461, PTHR30461:SF3,PS51737,IPR025827,PF00239,SM00857, G3DSA:1.10.10.2600,SSF53041
MNQNNNTTSARVLRVACYERVSTEEQTKGLSIDAQTAALESWVHDHGHVMIGHYTDAGVSGGKPIEKRPAMWRLLHDVQAGQVDLILFTKLDRWFRSLKNYYKAQEILDGVHCAWQAIQEDYETLTASGRFKVNIMLSVAENERERTSERIHAVFDYKSARGEYLSGGNAVPLGYTLVDKHLQKDPETAPAVERFFDLILSGHSLSNASSTVCSEYEGMPSYGQWRKIAYNPIYAGIKNGTAGYCPAYITSVQHEILLNQKQTRAPKNPDSVYLFTGILVCPVCGRKMTPVCTSARGERYLYYRCQRAMIDRNCENRRGLREIRLESLLTAYVFDSAQIVADSSKAAKTTAKPAENEHTIDQQMRRLAETYTDGLIDRDTYKSKLAQLTAKREALRKAPRPRSEVPPEIAREIIEDDIRAVYDQLEPREKRRFWHSVLSSVAVQDDQITEIHFIGDVCD

SEQ ID NO: 10971 - protein, 459 aa, Unknown
  Description of Unknown: Integrase B10972 sequence
  cd00338,PF13408,IPR011109,IPR038109,PS00397, Coil,PS51736,IPR036162,PTHR30461,IPR006119, G3DSA:3.40.50.1390,IPR025827,PS51737,PF00239,SM00857, G3DSA:1.10.10.2600,IPR006118,SSF53041
MILWFFITKYTLKGMIIVKKVLKVCGYCRVSTDEQKNYGFSISAQEDKIKNYCKEKNYILTNIYIDEGFSASNINRPSLQELLKNLDDIDAIILTRLDRLSRDVLQARKMVEIFIMNNISLITLEESDIDTTSADGMFTLNLKLSLAERELKKTSERIKSVFEYKIKEGQAITGAQPFGYKVDIVNGKKCVVFDENKEILNEIFNYFGKHHSVRKTMFYINEKYNLDKHYSTYSRTLRNPYYTGSYKGNENYCPAYIDKKTFERNQELIKSNIRVNKNRRHYFFTGLIICPVCGRKLVASPAPKDNHRYRCNSAVFNRCSFDILLAERKTEKVLLNTIENHLENHIINSKQINKVGVKDFSKEINSIKKELENLNYLFKKNRISLKDYDREYDELELELKKLESVVVEEIDLKKFETILNSDWKSIYINLNREKKQIFWRNLIKEIHIIDGRYVFDIKF

SEQ ID NO: 10972 - protein, 459 aa, Unknown
  Description of Unknown: Integrase B10973 sequence
  IPR011109,IPR038109,PF07508,PS51736,IPR036162, G3DSA:3.40.50.1390,IPR006119,PTHR30461,PS51737,PF00239, SM00857,cd03768,G3DSA:1.10.10.2600,SSF53041
MNEIAATRARKRCAVYCRVSSDERLDQEFNSIDAQKEAGHAYIASQRAEGWIPVTDDYDDPGFSGGNTDRPALKRLLADIERGQIDIVVVYKIDRLTRSLADFSKMVEVFERNEVSFVSVTQQFNTTTPMGRLMLNVLLSFAQFEREVTGERIRDKIAAAKRKGMWMGGVPSIGYDVVNRQLVINEAEAAVVRRIFEEMLTIGSPTQIAANLTAEGITTKAWTTQEGQTRSGTRIDKKYLHKLLRNRIYLGELSHKGNWYPGAHPPIIDQALWDKVAAVLAKDGHARSVETKIRSRTGALLRGLLYTPSGERMYPTYSNKKGHKYHYYVSKSESRFGAPGKSYERLPAPEIEAAVVAQIRTVLTSPESIASVVRHIQRNGAQIDEASTVMAMGRLNDVWDHLFPVERHRIANLMIERIDLVHIGEVQGIKVKWRELGWDKLIGEFAPREIGAELMEVEA

SEQ ID NO: 10973 - protein, 459 aa, Unknown
  Description of Unknown: Integrase B10974 sequence
  IPR011109,IPR038109,PS51736,G3DSA:3.40.50.1390, IPR006119,PTHR30461,IPR036162,PS51737, PF00239,SM00857,cd03768,G3DSA:1.10.10.2600, SSF53041
MCALVTFSKENVDIAQNRWGLSFGAMRLGYARCSTDEQEGALQAQILRLEQAGCDTVISELVSGRKNDREGILEAAALVKAGKVKELVVTRVDRLGRDAANTDLLLALCAEKQVEVSALDGGVIETASPQGFLMARLHTSLAEMESRMLSMRIKKAMVVHRQQGRHLRRRKPFGYMGGPNHQLVPDPSNWDHAKRVLRELKERGSFSKVSQTLPEWCPWTPATNSLHSWFCNPVIRGHLGHLRDGGQGWKSYYKQMLYDQHEPLISETEWQALAEILKRARNRFQPKDDSRVAHALTGVLKCANCGHNLRYNTSNGTAWWRCRHRLCKERGGIKEEIAQNVVLDACILSADNLAKMIANPAKEDPVLAAKRKDLADLEELARRWPDAVSTESLRREIADLERCDRSSIDLKQFNIYRRMMKDPQFYRARPDELHPVFRMVLLEVRVAAGGGAVAVPRTV

SEQ ID NO: 10974 - protein, 459 aa, Unknown
  Description of Unknown: Integrase B10975 sequence
  cd00338,PF13408,IPR011109,IPR038109,PF07508, Coil,PS51736,IPR036162,IPR006119,G3DSA:3.40.50.1390, PTHR30461,PTHR30461:SF3,IPR025827,PS51737,PF00239, SM00857,G3DSA:1.10.10.2600,SSF53041
MQTAYVYARFSSDNQREESIDAQLRAINEYCDTNDIRILQVFKDEAFSARTDKRPAFQELFGLIKEKPADLLIVHKLDRFARSRMDAAFYRQKLKEAGMRLVSVLERLDDSPESIIMEGILESMNEYYSANLSRETKKGLRENILNGKRNGGKVPFGYTLVDHHLIPNRDAETVRWIFNLYAEGKGVTEIVRITRSPVHNIRPMLMNEVYLGHLISGENRCEHAHEAIIDEDTFFACQKRMQDKRMNAANRAKVDYMLAGLITCGVCGKRMIGMSSKGKYYYYSCKTAGCRIYRKDDLEERVIKELAKWFTPTDDLKALFFDLVSRRVNSRTESEDAMKAEYILRQRISKMIDSLQYAETQEDTKAIMEKVNELRRQMPKPKPKREVSRDDCDRFIERFCRIEQMDREEQKSLLRKTVDQIAVTPEDIGLFMTVKRGVVVAINKQQDLPPMGYNTGEKR

SEQ ID NO: 10975 - protein, 459 aa, Unknown
  Description of Unknown: Integrase B10976 sequence
  cd00338,Coil,PS51736,G3DSA:3.40.50.1390,IPR006119, IPR036162,PTHR30461,PF00239,SM00857,SSF53041
MNTATIEGLNVIGVARQSSSRDESVSVAEQIERMRAHCEREGANLVEVYVEKDVSGGKPLSKRPGLSQAVADIEARRGEVLMTAYFDRLVRSLKTQAEVLERVEAKNARVMTLDFGQISNGSAVQWLSSTMVGMVSEYYRRSVAERTHDSKQASITKGVPPFPWITPAYQRRADGTLEPHETNADIIREAIRMRLASEPASWTTISRYLADNGIKMAPGSIQAMFESKLMVGEIHFGNFTPNLNAIDEPIMTHAEQRRLLQAKAVRGRYAKSPRLLARLDILHCASCDARLTVDMAKRGSQRTMYAYYRCGNSLCSRRAIVSCDTADELLLDEACRLSAELVGQASDEDEIEAALADRTDAEAALDNAIRTLAGLGGEKATRDVLDELEAARSMAVDRHERLLASTSSRLTVRTTEDRDRLSFDGKRALIKAVIARAVVTPGRGPGRISVEPRGTLLGE

SEQ ID NO: 10976 - protein, 459 aa, Unknown
  Description of Unknown: Integrase B10977 sequence
  cd00338,PF13408,IPR011109,IPR038109, PF07508,Coil,PS51736,G3DSA:3.40.50.1390, PTHR30461,IPR006119,IPR036162,PS51737, IPR025827,PF00239,SM00857,G3DSA:1.10.10.2600,SSF53041
MKRVAVYVRQSEDKTGEGAAVERQERDCRLLAEAKGWEVATVYRDNSISATTGKKRPGFEQLVGDIERGQVDALIVWHLDRLTRSIADLTRVIDAGKARNVNIASVHGVSIDLGDPTGIAVATILAAIAAMEVQHKGNRQRTANRKRATEGNAYWSRRPFGYDRGESGVAVVDAEARLIREGAASILGGATVASVAKRWNEAGAKTTAGGEWGVTQVRRLLINPRMAGRRIYNGEDMGAGEWEAILDEETHRRLEEKLTDPRRRTAPDDLNSKYLLSGICVCSVCGGKMYASPMRTSTKEYMVYRCFGYHITRRMDLVDGVVEDVVVGILSRPDAAGLFSRSDDLRELRARAVELRDRRDALAAMLADGLLSAAAVREQAGKLGAELAAVEGAIGAHETLNPMAAIAGADDVPEQWVALPLENKRQIIRSLMEVTVEKAGKGVRFSPEQVRIEPKGNQP

SEQ ID NO: 10977 - protein, 459 aa, Unknown
  Description of Unknown: Integrase B10978 sequence
  IPR011109,IPR038109,PF07508,PS51736,G3DSA:3.40.50.1390, PTHR30461,IPR006119,IPR036162,PS51737,PF00239, SM00857,cd03768,G3DSA:1.10.10.2600,SSF53041
MSEIAATRARKRCAVYCRVSSDERLDQEFNSIDAQKEAGHAYVASQRSEGWISVADDYDDPGFSGGNTDRPGLKRLMADIERGQIDIVVVYKIDRLTRSLADFSKMVEVFERHEVSFVSVTQQFNTTTSMGRLMLNVLLSFAQFEREVTGERIRDKIAAAKRKGMWMGGVPPLGYDVDNRLLVINEAEAAVVRRIFEEMLTIGSPTQIAVNLTADGITTKAWTTQEGQTRKGTRIDKKYLHKLLRNRIYLGELSHKGNWYPGAHPPIIDQELWDKVHAVLARDGHARSVETKIRSRTDALLRGLLYAPSGERMYPTYSRKNGRKYHYYVSKSESRFGAPGKSYERLPAPEIEAAVVAQIRTVLTSPESIASVVRHIQRNGGQVDEATTVMAMGRLNDVWDQLFPVERHRIANLMIERIDLVHVGEVQGIKVKWRELGWDALIGEFAPRGIGAELVEVEA

SEQ ID NO: 10978 - protein, 459 aa, Unknown
  Description of Unknown: Integrase B10979 sequence
  cd00338,PF13408,IPR011109,IPR038109, PF07508,Coil,PS51736,IPR036162, PTHR30461,IPR006119,G3DSA:3.40.50.1390,PTHR30461:SF3, PS51737,IPR025827,PF00239,SM00857,G3DSA:1.10.10.2600,SSF53041
MIALYTRVSTQEQKEHGHSIDEQQDRMKKYCDAMGWTIFKVYTDAGFSGSNTDRPSLQRLIKDVNAHKIDRVLVYKLDRLSRSQKDTLFLIEDVFLQNGCDFVSMSENFDTSSPFGRAMIGILAVFAQLEREQIKERMTMGREARAKMGKYTGSWRHPIGYDYIDGELVVNEFEKLQIQYIFENYASGKGLAKIAEELNESGMTHKYGNWTENVVRSLLDRKTYIGYIKFGNEWFKGTHEPIISEELFEAVQMVKQSKKDANGHNAFGSPVSYLGGLITCAKCGDRYYKYSLGSKGYRYDWYCCRNRYPKKKHTGNECKNQSYKMQELDDLIFDEIRKLKFEPPRKPRKTSNKAPVLSDRINDLEKQIDRLMELYAVGDMPLDKVEKKLHEVNEQKNKLEAELESVNEHQFTIEDAKRLVENFDDVLEHGTLEDVRSVIRALIDHIEIDGEDIHIHWNF

SEQ ID NO: 10979 - protein, 459 aa, Unknown
  Description of Unknown: Integrase B10980 sequence
  IPR011109,IPR038109,PF07508,Coil,PS51736, G3DSA:3.40.50.1390,PTHR30461,IPR006119,IPR036162,PS51737, PF00239,SM00857,cd03768,G3DSA:1.10.10.2600,SSF53041
MNAATQIASPKPRKRCAVYCRVSSDERLMQEFNSIDAQKESGQAYVASQRSEGWIPVVNDYDDPGFSGGNTERPGLKRLMADIERGLIDVVVVYKIDRLTRSLADFSKMVEVFERQGVSFVSVTQQFNTTTSMGRLMLNVLLSFAQFEREVTGERIRDKIAASKRKGLWMGGVPPLGYDVANRLLVVNETEAELVRRIFGEMLTIGSPTRIAQGLASEGITTKAWTTQDGQVRSGTQMDRKYLYKLLRNRIYLGELSHKGSWFPGAHAPIIDHGLWGQVHEVLARDSHVRSVDTQTRESTEALLRGLLFGPSGDPMYPTYASKNKRKYRYYVSKAEMRFGAAGKTHERIPAAEVEAATVNQVKTVLSSPEAITAVCKSLEQQGVQINEDEIVMALHRLGEAWEQLYPAERIRIVKLMIERVDIVAGGLKVKWYALGWKELIKEFAAKGIGAELVEMEPA

SEQ ID NO: 10980 - protein, 459 aa, Unknown
  Description of Unknown: Integrase B10981 sequence
  IPR011109,IPR038109,PF07508,PS51736, IPR036162,IPR006119,PTHR30461,G3DSA:3.40.50.1390, PTHR30461:SF3,PS51737,PF00239,SM00857, cd03768,G3DSA:1.10.10.2600,SSF53041
MAEIASSRPRKRCAVYCRVSSDERLDQEFNSIDAQKEAGHAFIASQRAEGWIPVVDDYDDPGYSGGNTERPALKRLLADIERGLVDIVVVYKIDRLTRSLADFSKMVEVFERHEVSFVSVTQQFNTTTSMGRLMLNVLLSFAQFEREVTSERIRDKIAAAKKKGLWMGGLPPLGYDVHDRQLVVNPAEAAVVRRIFEEMLTIGSPTQIAARLTVDGITTKAWTTQDGRVRTGARIDKKYLHHVLRNRIYLGEISNRGQWYPGVHEPIIKRELWDQVHVVLARDSHARGVETKIRSRNDALLRGLLYAPSGERMYPTYSRKNGRKYRYYVSKSESRFGAPGKSYERLPASEIEAAVVAQIRTVLTSPESIAAVARHVQRHGAPIDEATVVMAMGRLNDVWDQLFPVEQHRIANLMIERIDLVHTDEMQGIRVKWRELGWDALIGEFAPRSIGAELLEVEA

SEQ ID NO: 10981 - protein, 458 aa, Unknown
  Description of Unknown: Integrase B10982 sequence
  PS00397,IPR038109,IPR006119,PS51737,PF00239, cd03768,G3DSA:3.40.50.1390,PTHR30461,IPR025827,SM00857, G3DSA:1.10.10.2600,SSF53041,IPR011109,PF07508,PS51736, IPR006118,PF13408,Coil,IPR036162,PTHR30461:SF3
MNIAGYARVSSEGQLDGYSIPQQKDIIENYCKIKEWNLVKIYVDGGFTGANTDRPALQDLIEHLDCYDLVLVYKLDRLSRSQRDTLALVDLFAEHEVKFASIQENFDTSTPLGMAMLGILSVFAQLERENIKERMALGRRGRTQKGLWRAGSNVPTGYDYIDGHLMIREDEAVQIRKIFELYLEGWTINRIRHYMHENYTNRYSSWAQASAVSTTLRNPLYIGMLPSKADGVPHKGEHEPIIDKATFDKVQALLAARSEHFDDALKHPFVAKHLLTGFTYCGECGGRVSCVGTHKYSYYGCHKNTADPRTRKKGKCSTPNYNTKILDKLITDEVLKLAYDENAIKALIKPRKEVNHKKAIKALENQKSRLIDLYSVGGIELEELQVRINAISEKLLAFKNDSPQQPELSFEDAKRIFEDAKRIFTDGGNIPQQRVILQSLIKKIVLNGDAVEIYWRFE

SEQ ID NO: 10982 - protein, 458 aa, Unknown
  Description of Unknown: Integrase B10983 sequence
  IPR011109,IPR038109,PF07508,Coil,PS51736, IPR036162,IPR006119,G3DSA:3.40.50.1390,PTHR30461,PTHR30461:SF3, PS51737,PF00239,SM00857,cd03768,G3DSA:1.10.10.2600, SSF53041
MNYERSYLRSCQVSTLEQKEHGYSIEEQERKLKSFCEINDWSVSDVFIDAGFSGAKRDRPELQRMMNDIKRFDLVLVYKLDRLTRNVRDLLDLLEVFEQNNVAFRSATEVYDTSTAMGRLFVTLVGAMAEWERETIRERVMMGKRAAIKQGMILTPPPFYYDRVDNTYIPNDYKKVVLWAYDEVMKGNSSKAIARKLNDSDIPPPNGKRWEDRTITRALRNPITRGHYTWGDVFIENSHEPIITEEMYQQIKERLEERINTKIVSHVSVFRGKFICPRCGGTLTLNTVTRKRKKGYVTYKTYYCNTCKAKKESFGFSENEALRVFRDYLSKLDLEKYEVKTKQKDDVVTIDIDKVMEQRKRYHKLYAKGLMQEEELFELIKETDETIAEYEKQKELVPRKSLDIDKIKKFKNALLESWEIFSLEDKADFIKMAIKSIDIKYVKLKNRHSIKISDIEFY

SEQ ID NO: 10983 - protein, 458 aa, Unknown
  Description of Unknown: Integrase B10984 sequence
  IPR011109,IPR038109,PF07508,Coil,PS51736, G3DSA:3.40.50.1390,PTHR30461,IPR036162,IPR006119,PTHR30461:SF3, PS51737,PF00239,SM00857,cd03768,G3DSA:1.10.10.2600, SSF53041
MNYERSYLRSCQVSTLEQKEHGYSIEEQERKLKSFCEINDWSVSDVFIDAGFSGAKRERPELQRMMNDIKRFDLVLVYKLDRLTRNVRDLLDLLEIFEQNNVAFRSATEVYDTSTAMGRLFVTLVGAMAEWERETIRERVMMGKRAAIKQGMILTPPPFYYDRVDNTYIPNDYKKVVLWAYDEVMKGVSSKGIARKLNDSDIPPPNGKRWEDRTITRALRSPITRGHYTWGDVFIENSHEPIITEEMYQQIKERLEERINTKIVSHVSVFRGKFICPRCGGTLTLNTVTRKRKKGYVTYKTYYCNTCKAKKESFGFSENEALRVFRDYLSELDLDKYKVKTKQNDDVVTIDIDKIMEQRKRYHKLYAKGLMQEEELFELIKETDETIAEYEKQKELVPRKSLDIDKIKKFKNALLESWEIFSLEDKADFIKMAIKSIDIEYVKLKNRHSIEIKDIEFY

SEQ ID NO: 10984 - protein, 458 aa, Unknown
  Description of Unknown: Integrase B10985 sequence
  IPR011109,IPR038109,PF07508,Coil,PS51736, G3DSA:3.40.50.1390,IPR006119,IPR036162,PTHR30461,PTHR30461:SF3, PS51737,PF00239,SM00857,cd03768,G3DSA:1.10.10.2600, SSF53041
MNYERSYLRSCQVSTLEQKEHGYSIEEQERKLKSFCEINDWSVSDVFIDAGFSGAKRERPELKRMMNDIKRFDLVLVYKLDRLTRNVRDLLDLLEIFEQNNVAFRSATEVYDTSTAMGRLFVTLVGAMAEWERETIRERVMMGKRAAIKQGMILTPPPFYYDRVDNTYIPNDYKKVVLWAYDEVMKGNSSKAIARKLNDSDIPPPNGKRWEDRTITRALRSPITRGHYTWGDVFIENSHEPIITEEMYQQIKERLEERINTKIVSHVSVFRGKFICPRCGGTLTLNTTTRKRKKGYVTYKTYYCNTCKGKKESFGFSENEALRVFRDYLSKLDLEKYEVKTKQKDDVVTIDIDKIMEQRKRYHKLYAKGLMQEEELFELIKETDETIAEYEKQKELVPRKTLDIDKIKKFKNVLSKSWNIFSLEDKADFIKMAIKSIDIEYVKLKNRHSIEINDIEFY

SEQ ID NO: 10985 - protein, 457 aa, Unknown
  Description of Unknown: Integrase B10986 sequence
  cd00338,PF13408,IPR011109,IPR038109,PF07508, Coil,PS51736,G3DSA:3.40.50.1390,IPR036162,IPR006119, PTHR30461,PTHR30461:SF3,PS51737,IPR025827,PF00239, SM00857,G3DSA:1.10.10.2600,SSF53041
MKKVALYSRVSTLEQKNEGHSLEAQKNALENYATAMGYTVVGHYSDGGFSGSNLNRPSMNELMLDIENNKIDMVIVYKLDRLSRSQKDTLYLIEDVFLENNVDFMSLQESIDTSTPFGKAMIGILSVFAQLELANITERMKTGRHERVRKGFWNAHVNVPLGYDYKDNMLIQNEYAPLIKEIFDRFINGESAYAIYKDCYSRYPDKIYGNNMITRIIDNKIYTGKVNYNEHWYEGLHEGIVDDETFETAQTIRKSLSDKFKVDRTKRSALLARKIACGKCGESMSMFKHWYSRKGVSAEYGYYRCNSKMNRTKKHKQINCDQKNHRTDSLHEIIIDTINGLDYEEAKRNVIKKSEAPDTTVRLEQLQKQEKKLIDLYQFDSIDKAELEKRLKDINQEKKQLNVVKNSKNETKIIEMLNSVKGKNMYDMTFEEQCALVDTLIDRIIVKDDNVDIHFSF

SEQ ID NO: 10986 - protein, 457 aa, Unknown
  Description of Unknown: Integrase B10987 sequence
  PS00397,IPR038109,IPR006119,PS51737,PF00239,G3DSA:3.40.50.1390 ,PTHR30461,IPR025827,SM00857,G3DSA:1.10.10.2600, SSF53041,IPR011109,PF07508,PS51736,IPR006118, cd00338,PF13408,Coil,IPR036162,PTHR30461:SF3
MNVGIYARVSTQEQAAEGYSIQEQEERLVKYCDALGWNIYNRYIDAGFSGASLDRPAMKRLISDVKDGKIKKVIVYKLDRLSRSQLDTLYLIEKVFIANGADFVSMTENFDTSTAFGKAMVGTLAVFAQLEREQIKERMSLGKEARVKSGYFIGAAQVPLGYDYVPEDKMLVPSDEAVQVRRVFELFTSGKTIAAIEKLFADEGLRHKYGTWNRTTIRNVLMNPVYIGKVKYKDKYYEGRHEKIVPLELFNSAQEQIARNRQLHASGRTSGRHTTICGGLLYCAQCGHKYAKAKKQKWSYYTCSARLKGKRDCRNKLWRTDKLDSLVLNEVKKLLVDTEWKPVKPLARRSPEAVKKQIARIDSQVEKLVELYSIDSAPLDSIERKMQELNGQRKRLEAELVGLTEQPRETEAEVRKKFKTFAEVLEAATFEQTRDIVTALIDKIYIDGDDVSIHWKY

SEQ ID NO: 10987 - protein, 457 aa, Unknown
  Description of Unknown: Integrase B10988 sequence
  cd00338,PF13408,IPR011109,IPR038109,PS51736, IPR036162,G3DSA:3.40.50.1390,PTHR30461,IPR006119,PTHR30461:SF3, PS51737,IPR025827,PF00239,SM00857,G3DSA:1.10.10.2600, SSF53041
MECVAYMRVSTEKQAEDGNGLESQKRDIDNYCNKNGYIISDYYIDDGYTGANMDRPELQRLISDCVAKRIKCVVAFKLDRLSRSMVDGIYIIERVFQANNILFKCVHDSISYDSPMEQAYTQMMAVFAQLDKNTMMLRMRGGMLERVKQGYWMGGGNTPYCYKYDKEKGILVPILKRKEQANQALDLFIDGYSDVAIKKMLNFTHEHTVKMVLTSPVNIGMIPYKGNLYKGLHEPIFDKNRFQLAQEARKNRRKKKTVSLNKEPNLLTGLCYCGVCGCKMRYQKWGSESDAPKKIYCCSRNKDLFYLPNYNKDCDNSIEWATDIEKQVEAEIIKISLNLSSQKPIAKQSKIDIIQSQIKKEKYRRKRLFNLYADGNDDVLNIIKQSDDTISSLKEQLEIELLSKEANKKKSIAYENIKKIADVWDSIDKRNKNMILKTIIDKIIIVNGDIEIQLKNF

SEQ ID NO: 10988 - protein, 457 aa, Unknown
  Description of Unknown: Integrase B10989 sequence
  PS51736,G3DSA:3.40.50.1390,PTHR30461,IPR006119,IPR036162, PTHR30461:SF3,PF00239,SM00857,cd03768,SSF53041
MTRVFGYVRVSHQKSADSGLSVESQTKAIQGYADRLPFEWKWGPGKIYVDLAESAYKIPFCFRTQGKQLREELKSGDHVIMYSIDRGFRSVADFSNTIAYWLKEGVSVHLVTENLNLGTATGKLMANVLASFAQFKSDIQSERTRDAMSAMSGKINGKYRERHSWQPAPVSVYKEKDPKPSQGTTKGRVYTYARVSHVLSAASGLSIEAQTKMTNKYAESLVKSGLDRGEDFTDEVVSAFNVPLVQRPGGKALNDSLGRGDHVVVARLDRGWRSIRDLLDTLDSWRERGISCHFADTMLNTNSQAGDVFFKMMALFAEWESELISRKMKEVLAELRSQGRPVNQEKPYWTKVVRRNGKKWLVPCPVQVGMIKRIVHLRKEGMSAQKISDLLENESAAQDSRRPIPRGGIQILGPGLAGKVKLRHREWGPRRILKASEKWPQLRSLLEEWGEDPQSLE

SEQ ID NO: 10989 - protein, 457 aa, Unknown
  Description of Unknown: Integrase B10990 sequence
  PS00397,IPR038109,IPR006119,PS51737, PF00239,cd03768,G3DSA:3.40.50.1390,PTHR30461, IPR025827,SM00857,G3DSA:1.10.10.2600,SSF53041,IPR011109 ,PF07508,PS51736,IPR006118,PF13408,Coil,IPR036162,PTHR30461:SF3
MIALYIRVSTAVQFEKGNSVPEQKKRLKAYCDARGWNQYDFFIDPGHSGSNMERPGLQKLIRNVKNYSLVLVYKLDRLSRNQRDILYLIEDVFNKNGVEFNSITENFDTSTPVGKLMLSMMGAFAELERQQINERMMMGRIASAEKGNWRGGSGVPFGYRYIPRSKGGSGSLTIDDFEASMVRKAFDLFELGYSFGGIRTELNNCGMSTSSAYVIHQMLMNPIYIGMIRYAGETYQGHHEPIIAPAQFERVQTLLNQKEPPKRKEKHLLTGFLNCSCGSRVCFHSTKQPNGKKYDYYECYTRNCHKTMAKAKKCSNKIWRAADLEEVVWNVLEELDYDEVSVPVDHSEEEKALKKELKKIDGQIERLIELYSLEGIPQELLSKQMNELNQKKDTIRRKIDALMEEPVLLSKEEVLQKKKSLASIKRSDLATQRAFLSSMIESITLFPGHDLEFHWKF

SEQ ID NO: 10990 - protein, 457 aa, Unknown
  Description of Unknown: Integrase B10991 sequence
  cd00338,PF13408,IPR011109,IPR038109,Coil, PS51736,IPR036162,PTHR30461,IPR006119,G3DSA:3.40.50.1390, PTHR30461:SF3,PS51737,IPR025827,PF00239,SM00857, G3DSA:1.10.10.2600,SSF53041
MTILRAGLYERVSTDEQALRGYSIETQIDNLTEYCNDNGIKIVDHYTDEGHSGAKPPMKRPALHRLLEDVKAGKLDIILFTKLDRWFRSVPEYHKVQEILDKHKVAWKAIHEEYDTTTASGKLAINVYMSISQNESDKGSERVKAVLQHKRRNREASFGGPHKPMGYKKVRDAEGRLRLVKDPEDQEMTQEFWDILVKYNNLNQAIRHMNETHGVTKSQKTWMRIARNPFYCGMSQDMEVDDFCEPYVSKEDFAFIQETAQRRRQDTRAKRVYLFAGLIRCPECGHVLCGNYSKKKYLGVEYYYHGYRCRFKHTTCSHNHTLSEKKIEKYLLTNMEKLMRDEITAVELEKAKPKKKPKNNVPALKERLRRLNVAYLAGNISDEDYLRDDAEIKAMIAKAEKEAPPPEKDITPLIELLNTDFKELYGKMNQEEKRRFWRAIIKEIEIEGLKVTGVKFF

SEQ ID NO: 10991 - protein, 456 aa, Unknown
  Description of Unknown: Integrase B10992 sequence
  IPR011109,IPR038109,PF07508,PS51736,IPR036162, IPR006119,PTHR30461,G3DSA:3.40.50.1390,PS51737,PF00239, SM00857,cd03768,G3DSA:1.10.10.2600,SSF53041
MSEVLKRRMRCAVYTRKSSEEGLDQEYNSIDAQRDAGHAYIASQRAEGWIAVADDYDDPAFSGGNMERPALKRLMADIEAGKIDVIVIYKIDRLTRCLADFSKMVEVFERQGVSFVSVTQQFNTTTSMGRLMLNVLLSFAQFEREVTGERIRDKIAASKRKGMWMGGIPPIGYDVANRRLIPNEAEAKTIAHIFQRFVELGSTTKLVKELRLDGVTSKAWTTQDGRVREGKPIDKGLIYKVLNNRTYLGELRHKELWYQAEHPPIITKSIWDDAHAILSTNGRVRAGTTRAATQYLLKGIVFGSDGRAMSPFQTAKQNGRRYRYYVPQRDIKEHAGASGLPRMPAAELESAVLEQLRGHLRSPDVVRDVLPQALKYEPTLDEAVVTVAMKRLDDVWDQLFPAEQMRIVRLLVRQVNVSPNNMSMDLHPTGIQRLLLELHHKKLRTTETELEAEAMA

SEQ ID NO: 10992 - protein, 456 aa, Unknown
  Description of Unknown: Integrase B10993 sequence
  cd00338,PF13408,IPR011109,IPR038109, PS51736,IPR036162,IPR006119,PTHR30461, G3DSA:3.40.50.1390,mobidb-lite,IPR025827,PS51737, PF00239,SM00857,G3DSA:1.10.10.2600,SSF53041
MNTKTIPKRTGMQNAKRRVVIYVRISKDRIDQTSTETQEAEAIQYANSRGWEVVTVCSDQGKSAYKRNVKRPAFDRAMRMIETKQAEVFLVWKLDRFYRGLDEFNGAWARIRNGGGELASVTEPAYDTTSDDPMVKWAIMGFAAMAEIESRNRSHRSKSNHHKRFADGAIPNGPRPFGYDKKGKGELVLNKAEAAFIRNAAQRVLNGESLRSILRTTNMVGSTGKPLTPRGLSFALTCPRNAGFRRHTETGNLMPGNWTPVLDRETWEALLAKFDDPSRRTGPSNQISHILSGIMTCGKCTGPMGSRTWKGDGYRYQCRTCGQSMDEAKANEVVKAKVLELCPPDRWDSLRTQGRGFDPAVIENIEKKLAAVDKQFENDKIDIDRWMNLNAKFNDQLAAAKSTEVPDLPAIENLADEWDSLALDDVRKVIAFVTESVTLHTVKGGSTNPFMRIEVA

SEQ ID NO: 10993 - protein, 456 aa, Unknown
  Description of Unknown: Integrase B10994 sequence
  IPR038109,PS00397,IPR006119,PS51737,PF00239,G3DSA:3.40.50.1390 ,PTHR30461,IPR025827,SM00857,G3DSA:1.10.10.2600, SSF53041,IPR011109,PS51736,IPR006118,cd00338, PF13408,Coil,IPR036162,PTHR30461:SF3
MKYVACYCRVSTDEQAKFGFSIQAQKDALEKYCKENGYKYEFYIDEGISASSMKKRKALNEMLSKCNVFDMILFTKLDRLSRNVLDANNINKLLIDNKCTMKAIDEDDVDTSTADGTFIFNLKVSLAQREIGKTSERIKFVFKNKREKGEITSGTKKYGYDIVNKKYQINQSEAQNIINLYNYFIKVNGNTQETYKYFIQHFKNKGYDAMSNYLRETSYIGKYKLYRKNIYIDNYIPRIMNDDLFYTVQNLLKKREKTSIRTSNPSLFSGLIFCNICNTRMCKKQDNRSTKKLIRYCCDNASRRKVSSMEYKCSNHKLIREEYVEKYLLDNIASIAKKYINTNAVSSNQIIKKNNSKEIKQVENKILKLKDLYLDDLINKKTYKTDYETLNRKLNELKNEEIIAPQKDFSKLKEIINLDIYKIYGVLSDEEKRTFWLRIIDKIYIENGEIKEVTFL

SEQ ID NO: 10994 - protein, 456 aa, Unknown
  Description of Unknown: Integrase B10995 sequence
  IPR038109,PS00397,IPR006119,PS51737,PF00239,G3DSA:3.40.50.1390 ,PTHR30461,IPR025827,SM00857,G3DSA:1.10.10.2600, SSF53041,IPR011109,PS51736,IPR006118,cd00338, PF13408,Coil,IPR036162,PTHR30461:SF3
MKYVACYCRVSTDEQAKFGFSIQAQKDALEKYCKENGYKYEFYIDEGISASSMKKRKALNEMLSKCNVFDMILFTKLDRLSRNVLDANNINKLLIDNKCTMKAIDEDDVDTSTADGTFIFNLKVSLAQREIGKTSERIKFVFKNKREKGEITSGTKKYGYDIVNKKYQINQSEAQNIINLYNYFIKVNGNTQETYKYFIQHFKNKGYDAMSNYLRETSYIGKYKLYRKNIYIDNYIPRIMNDDLFYTVQNLLKKREKTSIRTSNPSLFSGLIFCNICNTRMCKKQDNRSTKKLIRYCCDNASRRKVGSMEYKCSNHKLIREEYVEKYLLDNIASIAKKYINTNAVSSNQIIKKNNSKEIKQVENKILKLKDLYLDDLINKKTYKTDYETLNRKLNELKNEEIIAPQKDFSKLKEIINLDIYKIYGVLSDEEKRTFWLRIIDKIYIENGEIKEVTFL

SEQ ID NO: 10995 - protein, 456 aa, Unknown; identical to SEQ ID NO: 10746
  Description of Unknown: Integrase B10996 sequence
  IPR011109,IPR038109,PF07508,PS51736,IPR036162, IPR006119,G3DSA:3.40.50.1390,PTHR30461,PTHR30461:SF3,PS51737, PF00239,SM00857,cd03768,G3DSA:1.10.10.2600,SSF53041

SEQ ID NO: 10996 - protein, 456 aa, Unknown
  Description of Unknown: Integrase B10997 sequence
  cd00338,PF13408,IPR011109,IPR038109, PF07508,PTHR30461:SF21,Coil,PS51736, IPR036162,IPR006119,PTHR30461,G3DSA:3.40.50.1390, IPR025827,PS51737,PF00239,SM00857,G3DSA:1.10.10.2600,SSF53041
VISPVRVVIYLRISLDAVGLGLAVERQREECMRLIRERGWQFVREYADNSISASKRTTLRPAYEQMVSDFEAGEFDAIVCYDLDRLTRQPRQLEDWCEAAEEKGLKLVTANGEADLSNYNGRTFARIKASIARGEMEAKSARQKAAHVQRAAMGKPWANRRPFGFLGGGSEHHPEEAPILAGIYNDILMGAGQTTICSTLNQSGVTTTQGNQWRQSSLRQLLLNPRNAGLRARHGVIVGQGLWQPIVTEDVWRAACNIVTSHPLVGHRGSLHLLSGLLTCGLCGSSMTTGYTSRKVRMYRCTECKRIGRNADNVDEWIAAVVTARLNRPDADRLLVDNNAPNVTGLQDEVRRLEAVLEENTKMRGSGDMSVAEWKTAKVRTSELIEATRAKITKNTSAAILEPLVNAPDAAIVWQTQPVDRRRAVIGTLARIVVNPTRKGAKFNPDDIDVQWRIDA

SEQ ID NO: 10997 - protein, 456 aa, Unknown; identical to SEQ ID NO: 10996
  Description of Unknown: Integrase B10998 sequence
  cd00338,PF13408,IPR011109,IPR038109,PF07508, PTHR30461:SF21,Coil,PS51736,IPR036162,IPR006119, PTHR30461,G3DSA:3.40.50.1390,IPR025827,PS51737,PF00239, SM00857,G3DSA:1.10.10.2600,SSF53041

SEQ ID NO: 10998 - protein, 456 aa, Unknown
  Description of Unknown: Integrase B10999 sequence
  PS00397,IPR038109,IPR006119,PS51737,PF00239,G3DSA:3.40.50.1390 ,PTHR30461,IPR025827,SM00857,G3DSA:1.10.10.2600, SSF53041,IPR011109,PF07508,PS51736,IPR006118, cd00338,PF13408,IPR036162,PTHR30461:SF3
MKEIKRVALYIRVSTEHQVKEGDSLEAQENALLEYCNKYNYIVVDKYIDGGESGQKIKRTNLQRMLDDVKQDKIDLILMTKLDRWFRNIGDFYKVIEIIKKHKTDWKTIWEDYDTTTASGEFWLNMSLSMGQLEAKRTSERINSVFDYKYNVQKTVCTGQPPYGYKISEDKKLVIDEKEAQNIVKLFEYYAKTNNLNETANWFKENCENKSTCVIKKYLRNPAYIGKFVRTKTKETIDDYCPAIISEELWNNVQRLIKINVKKQIPDPNRKKHNSEPYIFSGLLICKECGHTLNGKTNSNSKHYYNCRYHYFKKCDNKKCINERWLEQHLLNEIIPILKNRKLQIVNINDNQQEIVDNSQQLKTKLKKLTNLYLENMVDLDYYKEEYLLINSQLEKIKCQKDNQNKLDYSYIDNFLNSNFLDIYSNLDNLEKRRLWSSIIDNVEILDYDNIKINVY

SEQ ID NO: 10999 - protein, 455 aa, Unknown
  Description of Unknown: Integrase B11000 sequence
  cd00338,IPR011109,PS51736,IPR036162,IPR006119, PTHR30461,G3DSA:3.40.50.1390,PTHR30461:SF3,PS51737,PF00239, SM00857,SSF53041
VRVLGRIRLSRLTEESTSAARQRELIEQWSTLNGHEVIGWAEDLDVSGSVDPFDTPALGPWLRERHHEWDILCAWKLDRIGRRAIPLNKLFGWVIDHDKTLVCVSDNIDLSTWVGRLVANVIAGVAEGELESIRERTKASRKKLLESGRWPGGQIPFGFTPVQLPDGGWKLALHPEQSKVLRSIYDDVIAGKSVDACADKHGMRASGLWKILASKYLMGYATLNGQTVRDKQGMPVLYGEPLLTSSEWDSLQAALEARKVGPRTRDTAPMSGVIKCYDCGGNLYHRVYRKTYGKKLYRYYHCPDGHCAQVDADMVEEQLEKVFLDAVGGKHIPERVFIPASSHTEELEDAKRAVTEITALLGSMSSATVKTSLIEQMNALDTRIGALEKLPCREAGWELKETDVTYREAWVDADQENRRQLLLKSGIHYRIKRIPDTQVIMSDIYIPDEILELLS

SEQ ID NO: 11000 - protein, 455 aa, Unknown
  Description of Unknown: Integrase B11001 sequence
  IPR038109,PS00397,IPR006119,PS51737, PF00239,G3DSA:3.40.50.1390,PTHR30461,IPR025827, SM00857,G3DSA:1.10.10.2600,SSF53041,IPR011109, PS51736,IPR006118,cd00338,PF13408,Coil,IPR036162,PTHR30461:SF3
MKTVACYCRVSTEEQVKYGFSIQAQKDALTNYCKENDYKYDVYIDEGISASSMKKRKALQEMLEKSVAYDMILFTKLDRLSRNVLDANNINKILQDNHCTMKAIDEDDVDTSTADGMFMFNLKVSLAQREIGKTSERIRFVFKNKREKGEVTSGTPKYGYKIKDKKFVIDSEEAENIRNLYKYFISVNGDHKKTYSYFVKHFPGKGKDALFNYLRETAYIGKYKLYRKNVYLDNYIPPIMDKELFNEVQNLLPRVEKVLKKENIPSIFAGMLYCYYCKSRLVRKVDYRSKNKIINYFCDKQYKYKVGINEKQCQNSKVISDKSVEEYLINNLKYLCKPYISKSIIKTKPKPQKNNIKINSLKNKLSKLKDLYLDDLISKEDYKQDYIKINKEILKLEEEQKEKPQKDFTYLNELINKDIPDIYNTFNIDEKRKFWLKIIDKIYIKEGKIKEVTFL

SEQ ID NO: 11001 - protein, 455 aa, Unknown
  Description of Unknown: Integrase B11002 sequence
  cd00338,PF13408,IPR011109,PS00397,PF07508, IPR038109,PS51736,IPR036162,PTHR30461,IPR006119, G3DSA:3.40.50.1390,PS51737,IPR025827,PF00239,SM00857, G3DSA:1.10.10.2600,IPR006118,SSF53041
MKAATYLRVSSEEQAQQGFSLPAQLHQLKDFCEKHKMEIHDTYIDEGFSAKYEDERKRPQFERMLKDAEKKLFSVIVVHKYDRFARNVELSRRVKRQLKVGGVTVISISEPIEDSPVGFLQEGLLELLAEYYVRNLSQEVKKGMRERVSQGLSNGSVPYGYKTINGNMIINEEQSIIVKKIFEMYNEGTGTARISKWLRENRIPSAIPGCVWNHHAVLYILKNVKYIGYISHAGEIYKGKHEPLIDKEIFDIANKNLISRIIAREPMGKNESRFMLLGLMRCGICGRKMGIHEARRYSHKRGNFSYIYYVCSGSRIHENHAKCSHKDFHPVDEVETKVMNKLKNILASNEPIFQMAVNMDYIAKNQTTKLESEINRAKAAYLSGVFTLEEYTKVKSDCGNKLSEIKPDICKDIKQDIRNALQEIEAEELPAKKSAKLKRYIRVIKVYPDKIDIDF

SEQ ID NO: 11002 - protein, 455 aa, Unknown
  Description of Unknown: Integrase B11003 sequence
  IPR038109,PS00397,IPR006119,PS51737,PF00239, cd03768,G3DSA:3.40.50.1390,PTHR30461,IPR025827,SM00857, G3DSA:1.10.10.2600,SSF53041,IPR011109,PF07508,PS51736, IPR006118,PF13408,Coil,IPR036162,PTHR30461:SF3
MKVALYIRVSTAVQFEKGNSVPEQKRRLQAYCESRDWNDYDFFIDPGHSGSNMERPALQKLLRNISRYDLVLVYKLDRLSRNQRDILYLIEDVFLKNNVDFNSITENFDTTTPVGKLMLSIMGAFAELERQQINERMTMGRLAAAEKGKWRGGSGVPTGYRYSPKSKGGSGRLEIDEASAPFVKIMFSLADKGHTMNHICEEVGRMGFPLSGAYVVKTILTNPIYIGMQRYGGKVYPSNHEPLIDKELFDRVQEFVQTREKPSMKSKHLLTGFLYCSCGSRVCYHGIKKNGRRYDYYECYTRMSHGRMKKAEKCPNKIWRMKDLEDAVWNVLEELEYEEIQTFEPDRLAPAQNELKKTERQMEKLMDLYLLDDMPQDVLSKRMEALNQKKEELLEQIDVLSSLPKKTTASDFQKMKGKLAKMKQSDLMTQREFLSSMIERITLLPDHDLEIQWKF

SEQ ID NO: 11003 - protein, 455 aa, Unknown
  Description of Unknown: Integrase B11004 sequence
  PS00397,IPR038109,IPR006119,PS51737,PF00239, cd03768,G3DSA:3.40.50.1390,PTHR30461,IPR025827,SM00857, G3DSA:1.10.10.2600,SSF53041,IPR011109,PF07508,PS51736, IPR006118,PF13408,Coil,IPR036162,PTHR30461:SF3
MRVFLYIRVSTSEQAKEGYSIGEQEQRLRAYCKAKGWKIAKVFTDGGYSGGNTSRPALTELLSAVQKHQADAILVYKLDRLSRSQKDTLTLIDTFLQNNCDFISMTENFDTSSPFGRATIGMLSVFAQLEREQIKERMSMGKEGRAKEGKYHGGGISPIGYEYKDGHLVVNEFEAMQVREMHRLFQSGMPFRIIARTLESKGSRYYEARSVKRTLKNPLYIGKIKHNDTLYPGEHEPIIDEETYNKTMELLNALPTGTKPSKTYLGGLIVCAHCGAKYTVNTVHDTRYNRKYKYYACHSRRKTNKSLIKNPNCQNKIYKVEELDEIIFNEIRKLSIEKNFRSVIKKSDSDNSVILNREIAKLENQKSRLMDLYSIGTFTIEDIQKKIIPIQEQIDKLSEQINIPSIPEQTAHELIQSFDDVLKNGNHDEIKMVIDSLIDKIEIDGEDIAIYWAFV

SEQ ID NO: 11004 - protein, 454 aa, Unknown; identical to SEQ ID NO: 9791
  Description of Unknown: Integrase B11005 sequence
  cd00338,PF13408,IPR011109,IPR038109,PF07508, PS51736,G3DSA:3.40.50.1390,PTHR30461,IPR006119,IPR036162, IPR025827,PS51737,PF00239,SM00857,G3DSA:1.10.10.2600, SSF53041

SEQ ID NO: 11005 - protein, 454 aa, Unknown
  Description of Unknown: Integrase B11006 sequence
  IPR038109,PS00397,IPR006119,PS51737,PF00239,G3DSA:3.40.50.1390 ,PTHR30461,IPR025827,SM00857,G3DSA:1.10.10.2600, SSF53041,IPR011109,PS51736,IPR006118,cd00338, PF13408,Coil,IPR036162,PTHR30461:SF3
MECVAYLRVSTEKQAEEGNGLDSQKRDIENYCRKNQLIISDWYEDDGFTGSNMNRPALQRLINDCSKKKLKCVVAFKLDRLSRSMVDGIYLIERVFIPNGVDFRCVHDSVSYDSPMEQAYTQMMAVFAQLDKNTMLLRMRGGMLERVKQGYWMGGGNTPYCYKYSKEDGILVPIPERKEMALRAMNLYISGYSDVRIQKLIGFKSEFVTRQVLTSPVNIGMIPYKGKLYKGRHEPIFDIKVFELAQELRKTRKQSKSFCVNHENQLLTGLCYCGVCGCKMRYQKWTHGKHKIYCYSRDNGMSYLPNYNPNCSNSLEWAEDIEKQVEDEILKISLNLSSHKPKERESCLDILSKQLQKEKTKLKRLYTLYAEGNDTVLEMIKETESGIDELKLKIQNEMKNPDNSQKKEFVYDNIKKLADVWEHIDKQNKNRILKTIISKIIIVNGNIEIQLKKF

SEQ ID NO: 11006 - protein, 454 aa, Unknown
  Description of Unknown: Integrase B11007 sequence
  PF13408,IPR011109,IPR038109,PF07508,PS51736, IPR036162,IPR006119,G3DSA:3.40.50.1390,PTHR30461,PTHR30461:SF3, IPR025827,PS51737,PF00239,SM00857,cd03768, G3DSA:1.10.10.2600,SSF53041
VQTAIYARVSTASDDQANALDQQLTRLRLRAEQLGDPVVEFVDVMSGSRDDRPQLARLMEAIQAGQIKAVICTRLDRMSRSTVHGGKLLRQFSQPNWPNLICLDQPIDLSTPGGRFFASVLMGLAQMESENIGERVHHGQMHARSKMKPQAGKPPFGYRYTEGKENYAIDPVDGPKARQAIEWFLEHGSVRGLLRWSIEELGVPWKSYEGVRRWIQSPVLTGARCYGSQHTFIDDEGKKRRIMNQPGVYDEVIPGAHPPLMSEEELARIRGVLKCSGTVSLRPLRKRLSRVLTGLVYCGHCGRRMTHHFPGRVTYHYMRCGHPLCPAPRLNSIHEEVVEAAVLEELRRSRRVLATHAVAEELERQQLLDPEVMRLQQQLQQWRGLNDPDLDEVIAKKERELQERLNAAELHPSCGFTVEQAVAALEDERTWHDLTETREKLRLLFSQWVEQVVV

SEQ ID NO: 11007 - protein, 454 aa, Unknown
  Description of Unknown: Integrase B11008 sequence
  PS00397,IPR038109,IPR006119,PS51737,PF00239,G3DSA:3.40.50.1390 ,PTHR30461,IPR025827,SM00857,G3DSA:1.10.10.2600, SSF53041,IPR011109,PS51736,IPR006118,cd00338, PF13408,Coil,IPR036162,PTHR30461:SF3
MECVAYLRVSTEKQVEEGNGLDSQKRDIENYCRKNQLIISDWYEDDGFTGSNMNRPELQRLINDCSKKKLKCVVAFKLDRLSRSMVDGIYLIERVFIPNGVDFRCVHDSVSYDSPMEQAYTQMMAVFAQLDKNTMLLRMRGGMLERVKQGYWMGGGNTPYCYRYSKEDGILVPIPERKEMALRAMNLYISGYSDVRIQKLIGFKSEFVTRQVLTSPVNIGMIPYKGKLYKGRHEPIFDIKVFELAQELRKTRKQSKSFCVNHENQLLTGLCYCGVCGCKMRYQKWTHGKHKIYCYSRDNGMSYLPNYNPNCNNSLEWAEDIEKQVEDEILKISLNLSSHKPKERESCLDILSKQLQKEKTKLKRLYTLYAEGNDTVLEMIKETESGIDELKIKIQNEMKNPDNSQKKEFVYDNIKKLADVWEHIDKQNKNRILKTIISKIIIVNGNIEIQLKKF

SEQ ID NO: 11008 - protein, 454 aa, Unknown
  Description of Unknown: Integrase B11009 sequence
  IPR038109,PS00397,IPR006119,PS51737,PF00239,G3DSA:3.40.50.1390 ,PTHR30461,IPR025827,SM00857,G3DSA:1.10.10.2600, SSF53041,IPR011109,PS51736,IPR006118,cd00338, PF13408,Coil,IPR036162,PTHR30461:SF3
MKCAIYIRVSSQEQTMHGYSLEAQEKLLRDYAEQNSMEVYDLYADRGKSANKALHRRTELLRMVKDAEDGKFQVVVFKDITRWSRNSSHYWMIQDRLDKCGVSWIAVEQPYLETRTPTGRFQVTVMLGTAQLESENTSQRIRFVQEHRAAQGGVLSGNVPLGYKIEQINGMKRLVIDPEKRDMVNDLFRYYTRYRNQAATIDYIREKYGVRIWASRMNALLKNPIYKGEYRSNPKYCEPYLTASEWSMVQSYWQVRQPSKHNDLYIFRSLIRCPECGHVLTANYRHNTVYYRCCYSAVQHRCGYRKQHRQDAIEADLLEQISFALDNTEIFDADVHDEQDDIAPKIEKLNRKLSNLKDLYIDGDIDKASYTVRKDALKAEISRLEAQQSKSSVPSISMLETPWKALYEQKNNAGKAEWWRFVLERIDISDDGYIPTYRNYSENQQQNIGVLKLH

SEQ ID NO: 11009 - protein, 454 aa, Unknown
  Description of Unknown: Integrase B11010 sequence
  PS00397,IPR038109,IPR006119,PS51737,PF00239,G3DSA:3.40.50.1390 ,PTHR30461,IPR025827,SM00857,G3DSA:1.10.10.2600, SSF53041,IPR011109,PS51736,IPR006118,cd00338, PF13408,Coil,IPR036162,PTHR30461:SF3
MKKVACYARVSTDEQARFGFSIDAQRTALEKYCKENKFNYDFYIDEGISASSINRPALQELLKYIKNYNMIIFTKLDRLSRNVLDANKLNELFQKNNVTIKAIDEDDIDTSTADGMFIFNLKLSLAQREIEKTSERINFVFADKRAKGEITSGARKFGYNIVNKHFEVNEKEAQMIKDLFDYYISVNGSHTKTFEYFQPLFHKSISMMKRYLKDTAYIGKYKLAEKDIYIDNYIPAILDEDTFYKAQKLNKRIEYKSFDDVVSLFGGLCYCNRCKYRMTKIIDRRINPARVYYKCYRYRQYLTGTTQRGCINSNTISQIELEDYLINNLSELIVNYNVKIESKNKNNSKDNTEKINKIQNKIDKLRNLYLEDLISKDDYAMEYNKYITLLNELKTEDYINISKKTTRKNLDKLSKMNFKKFYSKLNQEQKKAFWFSIIDKIYIENHKVTKIEFA

SEQ ID NO: 11010 - protein, 453 aa, Unknown
  Description of Unknown: Integrase B11011 sequence
  cd00338,IPR011109,PS00397,IPR038109,Coil, PS51736,G3DSA:3.40.50.1390,IPR036162,IPR006119,PTHR30461, PS51737,PF00239,SM00857,G3DSA:1.10.10.2600,IPR006118, SSF53041
MECVAYIRVSTERQVEEGYGLESQKRDIEEYCKKNEMLITDWYIDAGLSGMDMTKRVELQRLISDISKINDIVVYKLDRLARDSVDALYMIEKLFTPKGVRVNSVHDFARYETPQDKFQTHIMAAVAEYDRNTMLLRMRGGMLERVKNGYWMGGGNTPYCYRYDKNLGYLVPIPERAEQANRAMDLFIGGMSDVKIQRLLGYKSEFVVRNILTGVVNIGYIPYKGGTYKGLHEPIFEHDKFYLAQELRKSRRKQHVYNFTEPHLLTGLCYCKTCGCKMRYQKITGMGIHKIYCCSHDKYLDYLPNYNADCDNPGAWASDIEIAFEHEILGISINLSQYKPKAKETKLQILTNQLEKQKSKLKRLYTLYAEGNDMVLDMIKTLETEIRETTEKISAERKNGQHEQKKEFVYENIKKLADIWDGISKSQKNSILKTIIDKVIVGKDDIEIQLKNF

SEQ ID NO: 11011 - protein, 453 aa, Unknown
  Description of Unknown: Integrase B11012 sequence
  cd00338,IPR011109,IPR038109,Coil,IPR036162, IPR006119,G3DSA:3.40.50.1390,PTHR30461,PTHR30461:SF3,PS51737, PF00239,SM00857,G3DSA:1.10.10.2600,SSF53041
MRVLGRIRLSRLTDESTSAARQRELIEQWAQSHDHEVIGWAEDLDVSGSVDPFDTPALGPWLTQEKLPEWDILCAWKLDRIGRRAIPLNKMFGWIMEHNKVLVCVSDSIDLSTWVGRLVASVIAGVAEGELEAIRERTRASRKKLLETGRWPGGPVPFGLQPVELPTGGWRLELHPDEAPVLRQIVTEVCAGNAIDAVAENHQMLPTTLWKMLTAKYLLGHATYEGQTVRDSQGQPVLNAEPVLTTDEWNKLQQAVEQRRRGPHRTRDTSPLLGVVKCYKCGENLFHKIYHRDYGKRLYRYYHCRVAGHCAQVDADMIEAELEEAFLESVGDETVKEKVFIPAEDHHNELEDAKRAVDEITSMWVTVTSTAVKQRLMEQIEALDARISRLEQMPTRIAGYNFTDTGITFKSKWETSTPEERRQLMLKAGITYSVSREPGTQMFTARFYRPDEM

SEQ ID NO: 11012 - protein, 453 aa, Unknown
  Description of Unknown: Integrase B11013 sequence
  cd00338,PF13408,IPR038109,Coil, PS51736,IPR036162,IPR006119,PTHR30461, G3DSA:3.40.50.1390,PTHR30461:SF3,IPR025827,PF00239, SM00857,G3DSA:1.10.10.2600,SSF53041
MECVAYMRVSTEKQAVEGNGLDSQKRDIENYCRKNELIISDWYIDDGYTGTNMDRPELQRLVNDCSRKRVSCVVAFKLDRLSRNMIDGIYLIEKVFQKYNVMFKCVHDSVSYNSPMEQAYTQMMAVFAQLDKNTMMLRMRGGMLERVKQGYWFGGGNLPYCYSYSKEQGILIPIPERAEQARKALELFISGYSDAKIKEICGFKSEIVTRSILTSVVNVGMIPYKGKVYRGRHEAVFDKDRFELALELRRSRRSAKVSCITEPNLLTGLCYCGICGCKMRYQKWGSKKHKIYCCSRNKSLSYLPNYNASCNNSLEWADEIEKQVEEEILKISLDLSSYKPKEKATKLEIMQSQLEKEQTKLKRLYNLYADGNDTVLEMIKELESQIKETKLNIAAESKNAINTQKKEFVYENIKKLADIWDKVDKKQKNMILKTIIDRIVIVNGNIEIQLKNF

SEQ ID NO: 11013 - protein, 453 aa, Unknown
  Description of Unknown: Integrase B11014 sequence
  cd00338,IPR011109,PS00397,IPR038109,Coil, PS51736,IPR036162,PTHR30461,IPR006119,G3DSA:3.40.50.1390, PS51737,PF00239,SM00857,G3DSA:1.10.10.2600,IPR006118, SSF53041
MECVAYIRVSTERQVEEGYGLESQKRDIEEYCKKNEMLITDWYIDAGLSGMDMSKRVELQRLISDISKINNIVVYKLDRLARDSVDALYMIEKLFTPKGVRVNSVHDFARYETPQDKFQTHIMAAVAEYDRNTMLLRMRGGMLERVKNGYWMGGGNTPYCYRYDKNLGYLVPIPERAEQANRAMDLFIDGMSDVKIQRLLGYKSEFVVRNILTGVVNIGYIPYKGGTYKGLHEPIYEHDKFYLAQELRKSRRKQHVYSFTEPHLLTGLCYCKTCGCKMRYQKITGMGIHKIYCCSHDKYLDYLPNYNADCDNPGAWASDIEKAFEHEILDISINLSQYKPKAKETKLQILTNQLEKQKSKLKRLYTLYAEGNDMVLDMIKTLEAEIKETTEKISAERKNGQHEQKKEFVYENIKKLADIWDGISKSQKNSILKTIIDKVIVGKDDIEIQLKNF

SEQ ID NO: 11014 - protein, 453 aa, Unknown
  Description of Unknown: Integrase B11015 sequence
  cd00338,PF13408,IPR038109,Coil,PS51736, G3DSA:3.40.50.1390,IPR006119,IPR036162,PTHR30461,PTHR30461:SF3, IPR025827,PF00239,SM00857,G3DSA:1.10.10.2600,SSF53041
MECVAYMRVSTEKQAEEGNGLESQRRDIENYCRKNELVITDWYIDDGYTGANMDRPELQRLVSDCDRKRVGYVVAFKLDRISRSMVDGIYLIERVFLKNNVEFKCVHDSISYDNPMEQAYTQMMAVFAQLDKNTMLLRMRGGMLERVKQGYWMGGGNLPYCYTYSKDTGTLIPISERKEQANKAMDLFLQGYSDVKIRDMLGFKSEFVVKQVLTSPVNIGMIPYKGNIYQGLHEPIFNKEVFEKAQQFRAIRKNKRASCHNIQTNLLTGLCYCGICGCAMRYQKWTHGKHKIYCCSRNKDLHYLPNHNPNCNNTLEWASDIEKAVEDEILLISANISDYKPRVKESKLEILQGQLEKEQTKRKRLYNLYAEGNDDVIGMIKEIEKVIENIREQIKEESAIETNKTRQNVFKNIKNLADIWEDIDKKQKNMLLKSIIEKIIISNGNIEIKLKDF

SEQ ID NO: 11015 - protein, 453 aa, Unknown
  Description of Unknown: Integrase B11016 sequence
  cd00338,PF13408,PS00397,Coil, PS51736,G3DSA:3.40.50.1390,PTHR30461,IPR006119, IPR036162,PTHR30461:SF3,IPR025827,PF00239, SM00857,IPR006118,SSF53041
MSIIRVACYIRVSTQEQKLHGISLDAQREKLKEYAEKHGFIIIEWYEDEGVSGRKLIKRRPALQRMLNDAKAGKFDRIIFIKLDRFFRSVAEYHECMKYIDPVIWTATEEKYDLSTANGRAFVNMKLTIAELEADQTGERIDLVNEYKVKTGQALTGAQSQGIGYTVKKDSEGIKRVVKDKKYEAFVTDFINHFLTYQNKKQAFDYATDKHNVKTYYNSMSKLLTDTKIYGHYRGNDKYCEPYISKESFEQIQQILSKNIKSTPSKNVYLFTGLIPCPLCGNNLTSTFNGSKKPIISYRCNTYSVQKHCTFKYRPNEKKIETLLLENLNKYMTSYIETSKIEDARIQDTHASDKIVDIKAEMERTTKAYRKGRITEAEYDKEYEELETKLKELESHLEPILERDLTVYEELLKSNWQDLYYALTRENKRAFWRKYLKAIKVNKDGTFQQPIFF

SEQ ID NO: 11016 - protein, 453 aa, Unknown
  Description of Unknown: Integrase B11017 sequence
  cd00338,PF13408,IPR011109,PS00397,IPR038109, Coil,PS51736,IPR036162,PTHR30461,IPR006119, G3DSA:3.40.50.1390,PS51737,IPR025827,PF00239,SM00857, G3DSA:1.10.10.2600,IPR006118,SSF53041
MECVAYIRVSTEKQVEEGYGLESQQRDIKEYCQKNNMIISHWYIDAGLTGMEMSKRVALQELISDLKKIDKVVIYKLDRLARDSVDALNMIEKIFVPRNVEVLSVHDFAKYKTPQDKFQTQIMAAVAEYDRNTMLLRMRGGMLERIKEGYWPGGGNTPYCYSYSKETGTLVPIPERKKQANEAIDLFLQGYSDNKIRDMLGFKSEMVVRSLLISPVNIGYIPYKGKIYKGKHEPIFEIDKFNLAQEVRKNRRKKKTTCINKEPNLLTGLCYCGVCGCSMRYQKWTHGKHKIYCCSRDKSMSYLPNYNANCDNTLEWAVDIEKQVEEEIIKISLNLSSEKPVAKQSKIEILQSQIKKEENRRKRFFNLYADGNDDVLLSIKEINNTIKSLKEQLETERSNTDLNRKKSVTYKNIKKIADVWDSIDKKDKNIILKSIIDKIVIVNGNIEIQLKNF

SEQ ID NO: 11017 - protein, 453 aa, Unknown
  Description of Unknown: Integrase B11018 sequence
  PF13408,Coil,PS51736,IPR036162,IPR006119, G3DSA:3.40.50.1390,PTHR30461,PTHR30461:SF3,IPR025827,PF00239, SM00857,cd03768,SSF53041
MAGANEGNVAGLIVWRLDRWTRSLRDLIDSIAALEASGAAFVSVTESIDTSGPMGRFVLHLLGALAQLERETISQRVKLGIHRRMAEGTYIGGRMPAGLQVGKDRKIVANGTTSKAIAACWGMARNGGSLLDCARHLTKAKVPGSWTKTRIASLLRCQKYRGILVSAVEQDQAIAALGFVPSPGNRVAGRIRSTQQQPSNRVWRLHGVAVCFRCGASLAGSHSTGNGGPIAYLRCTGRMRGNKCDAPNLPAEAYENLIVQELAKELSDGPKLIRRIQATAAAAEKQAAPAAADRKLAQGELDRTQAVLDRALNLALEGGPTARAVTAKIGELQQQVEAIQNRIAVADGAMAAMNVSRLDTDVMVQAIETHAKGLPSLPWEDQAKAIKELVHVIRLDVDRFEVEISPPGAQQKMVRKGVPGKLSEPNTLRTIWTHAVTIERKKGWRGKWMVQSA

SEQ ID NO: 11018 - protein, 452 aa, Unknown; identical to SEQ ID NO: 9560
  Description of Unknown: Integrase B11019 sequence
  cd00338,PF13408,IPR011109,IPR038109, PF07508,PS51736,G3DSA:3.40.50.1390,IPR036162, IPR006119,PTHR30461,PTHR30461:SF3,IPR025827, PS51737,PF00239,SM00857,G3DSA:1.10.10.2600,SSF53041

SEQ ID NO: 11019 - protein, 452 aa, Unknown; identical to SEQ ID NO: 10198
  Description of Unknown: Integrase B11020 sequence
  cd00338,PF13408,IPR011109,IPR038109,PF07508, Coil,PS51736,G3DSA:3.40.50.1390,IPR006119,IPR036162, PTHR30461,PTHR30461:SF3,PS51737,IPR025827,PF00239, SM00857,G3DSA:1.10.10.2600,SSF53041

SEQ ID NO: 11020 - protein, 452 aa, Unknown
  Description of Unknown: Integrase B11021 sequence
  PS00397,IPR038109,IPR006119,PS51737,PF00239, cd03768,G3DSA:3.40.50.1390,PTHR30461,IPR025827,SM00857, G3DSA:1.10.10.2600,SSF53041,IPR011109,PF07508,PS51736, IPR006118,PF13408,Coil,IPR036162,PTHR30461:SF3
MKAAIYIRVSTQEQIENYSIQAQTEKLTALCRSKDWDVYDIFIDGGYSGSNMNRPALNEMLSKLHEIDAVVVYRLDRLSRSQRDTITLIEEYFLKNNVEFVSLSETLDTSSPFGRAMIGILSVFAQLERETIRDRMVMGKIKRIEAGLPLTTAKGRTFGYDVIDTKLYINEEEAKQLQMIYDIFEEEKSITSLQKRLKKLGFKVKSYSSYNNWLTNDLYCGYVSYADKVHTKGVHEPIISEEQFYRVQEIFSRMGKNPNMNRDSASLLNNLVVCSKCGLGFVHRRKDTVSRGKKYHYRYYSCKTYKHTHELEKCGNKIWRADKLEELIIDRVNNYSFASRNVDKEDELDNLNEKLKTEHTKKKRLFDLYISGSYEVSELDAMMADIDAQINYYEAQIEANEELKKNKKIQENLADLATVDFDSLEFREKQLYLKSLINKIYIDGEQVTIEWL

SEQ ID NO: 11021 - protein, 451 aa, Unknown
  Description of Unknown: Integrase B11022 sequence
  IPR011109,IPR038109,PF07508,PS51736,G3DSA:3.40.50.1390, PTHR30461,IPR036162,IPR006119,PS51737,PF00239, SM00857,cd03768,G3DSA:1.10.10.2600,SSF53041
MSETLKRRMRCAVYTRKSSEEGLDQEYNSIDAQRDAGHAYIASQRAEGWIPVADDYDDPAFSGGNMDRPGLKRLMADIEAGKIDVVVIYKIDRLTRSLADFSKMVEVFERHGVSFVSVTQQFNTTTSMGRLMLNILLSFAQFEREVTGERIRDKIAASKRKGMWMGGIPPLGYDVENRRLVPNPIEAKLVRQIFKRFVELGSGTLLFKELQLEGLKSKAWTTQDGRTREGKPIDKGLIYKLLNNRTYLGELRHKEQWYQGEHLPIVDVELWDQVHAILESNGRVRGNATRAKVPYLLKGIVFGNDGRAMSPFHTTKKNGRRYRYYVPQRENKEHAGASGLPRLPAAELESAVLDQLRVLLRSPALLSEVLPRAIELDPGLDEAKVTVAMTRLDVIWDQLFPAEQARIVKLLVEKVIVSPNDLEVRLRANGIERVVLELQPASANQSEEVAA

SEQ ID NO: 11022 - protein, 451 aa, Unknown
  Description of Unknown: Integrase B11023 sequence
  IPR038109,PS00397,IPR006119,PS51737, PF00239,G3DSA:3.40.50.1390,PTHR30461,IPR025827, SM00857,G3DSA:1.10.10.2600,SSF53041,IPR011109, PS51736,IPR006118,cd00338,PF13408,Coil,IPR036162,PTHR30461:SF3
MSIKRVAMYIRVSSDKQAQEGDSIPAQRDALQKYIADHGDMVSAGEYLDDGISGTKYSQRDELQRLLDDVTAGKIDLILFVKLDRFFRSIRWYTKTQEILDKHNVGWVAIWEPIYDTTTPQGRLIVNQMMSIAQFEAEQTGQRIRQVNAYKVTQGEVLSGTPPHGYRIVDKHLVPNETAENVVTVFQTFERTSSISKTLRETAGLKDVPRTHHNMKRMLKNEVYIGMYRGNENFCQPLIDRRLWDHVQTLLSRNIKQSQKHTYLFSGLVRCAECGCSMVAYTSRIKSRKYVTIHKRYRCYKRYLCKPAACQNQKTLGENNLEKYLVDNIGELVGKVFIDYEERKKKADGKAAKIAALEEKIERLKTLYVEGLIDIEEYKHDKALYLWRIADLSADVDKPPRIDQNTLKRLNGADFRDVYESLSREERRRFWRGIIKEIRFGLDKRIEVDFL

SEQ ID NO: 11023 - protein, 437 aa, Unknown
  Description of Unknown: Integrase B11024 sequence
  cd00338,PF13408,IPR011109,IPR038109,PF07508, Coil,PS51736,G3DSA:3.40.50.1390,IPR006119,PTHR30461, IPR036162,PTHR30461:SF3,PS51737,IPR025827,PF00239, SM00857,G3DSA:1.10.10.2600,SSF53041
MITDAKNGKINMIITKSVSRFARNTVDSITTIRKLKEIGVGVIFEKENINTLDSTGELLLTIMSSLAQEESRSISENVTWGIRKRMSDGKYSLGYSRFLGFEKGKDGKPIINKEEAEIVKRIYREYLEGKSTHQIVSELEADKIPTPAKKVDKDGNLMCNWRPSTIISILANEKYKGDALLQKTYVTDFLSHKAKKNNGELSQYYIKDSHEAIIPPEEWEMVQVETARRNKPSYKHSGATVFSSKVVCGDCGAYYGLKVWHSTDKYRKTIYQCNHKFKRTEKCSTPNLSEERIKQAFIDSLSQLDRAQVLEDCNLAIETLRNDDTSEVRVRRLNAEIEVVVELVKKNPNMEQVEIDAYVTKYEDLVKKLNAEEHRLESKCAAIKRVEVFAANLKNLEPIIAEFSPRLWNLLLEKAIVGRDDTIKFVYYSGIENTVKI

SEQ ID NO: 11024 - protein, 451 aa, Unknown
  Description of Unknown: Integrase B11025 sequence
  IPR038109,PS00397,IPR006119,PS51737,PF00239,G3DSA:3.40.50.1390 ,PTHR30461,IPR025827,SM00857,G3DSA:1.10.10.2600, SSF53041,IPR011109,PF07508,PS51736,IPR006118, cd00338,PF13408,Coil,IPR036162,PTHR30461:SF3
MSIKRVAMYIRVSSDKQAQEGDSIPAQRDALQKYIADHGDMVSAGEYLDDGISGTKYSQRDELQRLLDDVTAGKIDLILFVKLDRFFRSIRWYTKTQEILDKHNVGWVAIWEPIYDTTTPQGRLIVNQMMSIAQFEAEQTGQRIRQVNAYKVTQGEVLSGTPPHGYRIVNKHLVPNETAENVVTVFKTFERTSSISKTLRETAELKDVPRTHHNMKRMLKNEVYIGMYRGNENFCPPLIDRRLWDHVQTLLSRNIKQSQKHTYLFSGLVRCAECGCSMVAYTSRIKSRQYVTIHKRYRCYGRYMCKPAACQNQKTLGENNLEKYLVDNIGELVGKVFIDYEERKKKADGKAAKIAALEEKIERLKTLYVEGLIDIEEYKHDKALYLGRIADLSAEVDKPPRIDQNTLKRLNGADFRDVYESLSREERRRFWRGIIKEIRFGLDKRIEVDFL

SEQ ID NO: 11025 - protein, 451 aa, Unknown
  Description of Unknown: Integrase B11026 sequence
  cd00338,PF13408,IPR011109,IPR038109,PF07508, Coil,PS51736,IPR036162,IPR006119,PTHR30461, G3DSA:3.40.50.1390,PTHR30461:SF3,PS51737,IPR025827,PF00239, SM00857,G3DSA:1.10.10.2600,SSF53041
MKKLNVGYMRVSTEAQTEKYGLDVQEDKINELAKKRGVKIARWYVDGGYSGSNIQRPNIQKLLEDAEAGEIQAVYIYKLDRMSRDVVDTLTLVSKLLPKYNVEVVSATEDLRNETPMDRVMLGVNAVMGQYEREVIYMRTRAGMVERVKRGLWMGGGTIPYGYRYDRNDGILHIIPEESEKVKAIFQMFRDGYSCDRIQKILGMHSEKLVSNIIRRITYVGKIQYKGRVYQGLHEPIIDEKLFYEVQEEIKKRSTNAYVSNKHMLTGLCYCGKCGTKMRMQKWGKYTKIVCYSQYKEKEHISKTGNPCKNKKVRADVVEKEVEDCFKRFIVNVEEKENESESTKKMIEREISLSESKLKRLYTLYAIGNSGTDTLFGVIQAEEKTLKNLQEELKAEDIKEKAGRGEKIEKIKEMSNVWDTLTDSEKNKVLKECVEKVVIAGDDIDIHFSIY

SEQ ID NO: 11026 - protein, 451 aa, Unknown
  Description of Unknown: Integrase B11027 sequence
  cd00338,PF13408,IPR011109,IPR038109,PF07508, Coil,PS51736,G3DSA:3.40.50.1390,IPR006119,IPR036162, PTHR30461,PTHR30461:SF3,IPR025827,PS51737,PF00239, SM00857,G3DSA:1.10.10.2600,SSF53041
MKKLNVGYMRVSTEAQTEKYGLDVQEDKINELAKKRGVKIARWYVDGGYSGSNIQRPNIQKLLEDAEAGEIQAVYIYKLDRMSRDVVDTLTLVSKLLPKYNVEVVSATEDLRNETPMDRVMLGVNAVMGQYEREVIYMRTRAGMVERVKRGLWMGGGTIPYGYRYDRNDGILHIIPEEAEKVKAIFQMFRDGYSCDRIQKILGMHSEKLVSNIIRRITYVGKIQYKGRVYQGLHEPIIDEKLFCEVQEEIKKRSTNAYVSNKHMLTGLCYCGKCGTKMRMQKWGKYTKIVCYSQYKEKEHISKTGNPCKNKKVRADVVEKEVEDCFKQFIVNVEEKENESESTRKMIEKEISLSESKLKRLYTLYANGNSGTDTLFGVIQAEEKTLKNLREELKAEDIREKAGRGEKIEKIKEMSNVWDTLTDSEKNKVLKECVEKVVITGDDIDIHFSIY

SEQ ID NO: 11027 - protein, 451 aa, Unknown
  Description of Unknown: Integrase B11028 sequence
  IPR011109,IPR038109,PF07508,Coil,PS51736, G3DSA:3.40.50.1390,IPR006119,IPR036162,PTHR30461,PTHR30461:SF3, PS51737,PF00239,SM00857,cd03768,G3DSA:1.10.10.2600, SSF53041
MSEVLKRRMRCAVYTRKSTDEGLDQEYNSIDAQRDAGHAYIASQRAEGWIPVADDYDDPAFSGGNMERPALRRLMADIEAGKIDVVVIYKIDRLTRSLADFSKMVEVFERYGVSFVSVTQQFNTTTSMGRLMLNILLSFAQFEREVTGERIRDKIAASKRKGMWMGGVPPLGYDVENRRLVPNEREAKLIRHIFQRFVELGSGTMLFKELKLDGVTSKAWTTQDGKTRDGKPIDKGLIYKLINNRTYLGELRHKEQWYPAQHPPIIDHELWDKVHAILATNGRVRGNATRATVPYLLKGIVFGNDGRALSPFHTTKKNGRRYRYYVPQRENKEHAGASGLPRLPAAELESAVLDQLRAVLRSPDLLGDVLPRAIKLDPGLDEAKVTVAMTRLDTIWDQLFPAEQTRIVKLLVEKVIVSPNDLEVRLRANGIERLVLELQPAGAAQPEEALA

SEQ ID NO: 11028 - protein, 451 aa, Unknown
  Description of Unknown: Integrase B11029 sequence
  cd00338,PF13408,IPR011109,IPR038109,PF07508, Coil,PS51736,IPR036162,IPR006119,G3DSA:3.40.50.1390, PTHR30461,PS51737,IPR025827,PF00239,SM00857, G3DSA:1.10.10.2600,SSF53041
MAKQRAVAYCRVSSKSKAQMHSLGYQTDYWQRAMAESSEYEFVGIYADSGISGRSMRKRPQLLRLLEDAKEKRFDVVFTKSVARFARNTEELLSMVRELRDEGIKVIFEKEKIDTFNPNSEVFLTIAASVAENDLKIYSQNQTWAMREKYKNGYISVGAKILGYRMRKEDNTLIVEPSEAEVVKRIFYMYIHGKGILAIAKQLTAEKVGLNYGNKGKWSRGAIHYILNNEKYIGCALMQKYYNEDGICRKNRGEVKQYYMENTHEAIISVEDFQKVQELMRERACECEIGVARKNYEFTGKIRCGCCGGNYIRKVQNCGKPYEVIVWVCSRKDTFGSENCYGTRIKDTVLKEKFVECYNEFTAIKGEGDSLLALNQQLAWLLEQERELNALKVNRMIEIADYNAEWKAVKAQIDDINKQIEKQSIQKLTKTDLVPITEYDESKVKTFLDYA

SEQ ID NO: 11029 - protein, 451 aa, Unknown
  Description of Unknown: Integrase B11030 sequence
  IPR011109,IPR038109,PF07508,PS51736,G3DSA:3.40.50.1390, PTHR30461,IPR006119,IPR036162,PS51737,PF00239, SM00857,cd03768,G3DSA:1.10.10.2600,SSF53041
MSEVLKRRMRCAVYTRKSSEEGLDQEYNSIDAQRDAGHSYIASQRAEGWIPVADDYDDPAFSGGNMVRPGLKRLMSDIEAGKVDIVVVYKIDRLTRSLADFSKMVEVFERYGVSFVSVTQQFNTTTSMGRLMLNVLLSFAQFEREVTGERIRDKIAASKRKGMWMGGVPPLGYDVDNRRLVPNEREAKLVRHIFSRFVELGSGTLLIKELRLDGATSKAWTTQDGKVREGKPIDKSLIYKLLNNRTYLGELRHKEQWYQAEHPPIIDSKVWGDVHAILATNGRVRGNATRATVPYLLKGIVFGNDGRALSPWHTTKKNGRRYRYYIPQRDAKEFAGASGLPRLPAAELESAVLDQLRAILRAPDLLGDIVAKAVKFDSTLDEAKIAVAMTRLDVIWDQLFPAEQSRIVRLLVEKVIVSPNDIELRLRANGIERLVLELRPTQVDATEEAMA

SEQ ID NO: 11030 - protein, 451 aa, Unknown
  Description of Unknown: Integrase B11031 sequence
  cd00338,PF13408,IPR011109,PF07508, Coil,PS51736,G3DSA:3.40.50.1390,IPR036162, PTHR30461,IPR006119,mobidb-lite,PS51737, IPR025827,PF00239,SM00857,SSF53041
MTKEGVGYLRISDDREGLERGIERQRADITARAKRERVRIIRWYEDNDRGASRYSRKPRKDYLQMLADVKAGVAGAFIYSYSNSRLTRRNRELEDLLDLHEQTGVQVRTIVSGDDNLSTADGRMVARLKVTMDAAEAERISERVRRQTRERADAGRPHGGRRPYGYPDGRRLDPVEHGVITEVAGRVLNGETLMAVARDLNRRGVATVTGNPWSANVVRQMLTSPRIAGFTGRGGEPVARGAWEPAIGELMWRELRAMLLDPARATPRAGRRSLLVGLALCGECGRPMTSFITHRRHYYVCRGCRLWRAQLAVDRYVEGVMVVFLEHALETEPEDEPRVNAQERKVEQLRRRIAATTAQFTNDDAMTPGQLRELMRSLNAKLAAEEAKLLPPRRRRLQAGLAGPDAAERWELLSLDQKRANIDDLLEIRLLRARSGQRRFDEGTVELRRKG

SEQ ID NO: 11031 - protein, 450 aa, Unknown
  Description of Unknown: Integrase B11032 sequence
  cd00338,PF13408,IPR011109,IPR038109,PF07508, PS51736,G3DSA:3.40.50.1390,IPR036162,IPR006119,PTHR30461, PTHR30461:SF3,IPR025827,PS51737,PF00239,SM00857, G3DSA:1.10.10.2600,SSF53041
MSPDFKTITPRRTPTSRIRVAAYCRVSTMSEAQAGSLAAQVSAYSKLICSNPAWQFAGIYTDQGISGTASNRPGFADMMDHARAGDFQILLVKSISRLAHNTVDLLSCVRELATLGVAVRFERENIDTSSAEGELMLTLLASFAQEESRSISENVTWGHRRRFAEGKVMVPYASLLGYKKGDDGGLAVDEDQARIVRRIYREYLAGHSPKTIAAHLTKDGIPTPLGKKTWSVSTINSILRNEKYKGDALLQKTFTVDFLTKTTKRNEGEIPQYYVTGNHEAIIAPTVWDQVQHELARRSGSSRSFSHPFASKIECGCCAGWYGPKTWHAGSRYERRIWRCNRKYDPAGDQPCETKHVTEEELIAAFEQATSQLAPPPSPEVLEAALDQLGDLHALEAKLAQAITARDAVVDEINALIRSAAKTDFDPDAFETDHATIHPDGTIAIAFNDG

SEQ ID NO: 11032 - protein, 450 aa, Unknown
  Description of Unknown: Integrase B11033 sequence
  IPR011109,IPR038109,PF07508,PS51736,G3DSA:3.40.50.1390, IPR036162,IPR006119,PTHR30461,PTHR30461:SF3,PS51737, PF00239,SM00857,cd03768,G3DSA:1.10.10.2600,SSF53041
MKRKPAAEAAMPATVRKIRAAVYTRKSSEEGLDMEFNSLDAQREACEAYITSQRSEGWVLVPDRYDDGGVSGGTLDRPALRRLLADIERGRLDVIVCYKLDRLSRALMDFAKLVEVFDANNVTFVSITQSFNTTTSMGRLTLNILLSFAQFERELIGERIRDKVAASRARGIWMGGFVPLGYDAKDRKLLVNDAEAALVRRIFGGFVETESGTKLVQALRVEGATTKRGRAFTKSDVYWVLSNRTYLGEAMHKGKSHPGEHAAIVPQAMWDAAHALLTISPRTRANRTRCQTPSLLRGLIFGSDGRAMSPTHARGRRGQQYRYYVSQSVLKGSAADGPAIARISAAEIEGAVIAQVRGLLRQPEVVLGAWRAARASAPDMTEDEARLALERLDPLWEELFPAEQARIIRLLVDRVDVGEGGAGVRLKLEGLASLARDLAMPTAEAPRAAA

SEQ ID NO: 11033 - protein, 450 aa, Unknown
  Description of Unknown: Integrase B11034 sequence
  PS00397,IPR038109,IPR006119,PS51737, PF00239,cd03768,G3DSA:3.40.50.1390,PTHR30461, IPR025827,SM00857,G3DSA:1.10.10.2600,SSF53041,IPR011109 ,PF07508,PS51736,IPR006118,PF13408,Coil,IPR036162,PTHR30461:SF3
MQIAAYIRVSTDKQADKGYSLAEQEERIRAYCKSKDWELVKIYSDGGFTGSNMERPALQELIKEISAYDIVLVNKLDRLSRSQKDTLHLIQDVFAPHGCSFVSMQESFDTTTPIGIAMVGILSAFAQLERSQIKERMKMGKEGRKKKGLWHGGVNIPTGYDYKDGLLLKNEESEQVKIIFQMYLDGVSIRDITRFLQSHYSTRYTSWNYVGTVRRILGNPVYIGMVGEYKGQHEPIIDLDTFEKVQVLLDERKKGGKAPTGKHLLTGMIYCGYCGNRVRSCSSVTKKAKYGYYRCGKADSGQLNKIDKRCELTPKRESEIDEIVMSEILKLDFESIEINENTVSELPDNSLEIEKIDKQINRLIDLYAICGDNVEELAKKLKGLKARKKALEKVSLKPKRATKRHIMDTLKVAQETFENGSIEDKRKIVDALVARIDLFNDTVKITWKFS

SEQ ID NO: 11034 - protein, 450 aa, Unknown
  Description of Unknown: Integrase B11035 sequence
  cd00338,PF13408,IPR011109,IPR038109,PF07508, Coil,PS51736,G3DSA:3.40.50.1390,IPR006119,IPR036162, PTHR30461,PTHR30461:SF3,IPR025827,PS51737,PF00239, SM00857,G3DSA:1.10.10.2600,SSF53041
MKRVALYMRVSSETQVKEGDSIPAQRDALTKYAKEKGYIIAGEYLDDGVSGTKYSQRDELQRMLSDVQAGKIDMIIFTKLDRFFRSVRHYTATQAILDKCGVGWLAIWETIYDTTTPQGRLIVNQMMSVAQFEAENTGQRVRQIQAYKLSKKEVISGTTTAGYMIVDKHLVPDENAPYVRRAFEMYSAVGSINEVMREYGGRYGMPTSKPAFRRMLKSPLYKGEHYSGVKDFCPAIVSADLWDDVQRKLTINIKCNQKQVYLFSGLIRCAECGRVFGSNTRRRKRGNCITVTHQYRCTGYYARFPRQCTNPKVVAESMMERYLIEHIQPMIKDKILEYEIAEKEIPSRIPDMIARTEKKLDRLKVLYIDGLIDLNAYKADRAALQDELIDLQSKAQKRHTADSTALKRLLSPDVWELYSTFTREEKRRFWRGIISRIEFDSDRSIKVIFL

SEQ ID NO: 11035 - protein, 450 aa, Unknown
  Description of Unknown: Integrase B11036 sequence
  cd00338,PF13408,IPR011109,IPR038109,Coil, PS51736,IPR036162,PTHR30461,G3DSA:3.40.50.1390,IPR006119, IPR025827,PS51737,PF00239,SM00857,G3DSA:1.10.10.2600, SSF53041
LKKVLRIGGYVRVSHEEQKKFGYSIKAQIQEIENWCNENEHKLVNMYIDEGYSASNMKRPQLQQMLNDLPKLDAIVFTRLDRLSRNVFEANKMLDLFKRNNTDMIGISEDYTDTTTSNGMLMFNLKLTLAQHELLRGSERIKAVFEYKVREGEPVTGKLPYGYKIINENGKKKIVKDEATEPIVNDLFEHFATYHSIRSTCFYINNKHGISKDYRTYSRILKRELYTGKYKTNPNYAPAYITEEQYLLNQEYIKANNKVRKNKNIYLFSNMMKCPKCGLSFVGKYHDGCKRYFSYTCSNRKRRNGCSYNKNITEIKLEKFLLDNVEELHKQHRAYVKTNVEKLPEPEKENVKKRIKEIKIELENLTYAFRKNRITAKVYDLEYTELETELNKLQASLNANSSLHIAPDFFNSNWKELYNNLEKDKKRALWQSLIKEIKFDEDRNFTIIFR

SEQ ID NO: 11036 - protein, 450 aa, Unknown
  Description of Unknown: Integrase B11037 sequence
  IPR038109,PS00397,IPR006119,PS51737,PF00239,G3DSA:3.40.50.1390 ,PTHR30461,IPR025827,SM00857,G3DSA:1.10.10.2600, SSF53041,IPR011109,PF07508,PS51736,IPR006118, cd00338,PF13408,Coil,IPR036162,PTHR30461:SF3
MIRAALYARVSTDRQAKEGDSIPAQMSALRKYAAEHDDVTIAGEYIDDGVSGRKIDRDELQRLLDDVRSGKIDVIIFTKLDRWFRSIRHYINTQELLDRHKVGWLAIWEPIYDTTTPAGRLIVNQMLSIAQFEAENTGARIRQVMDYKAQRGEAVSGKVPYGYKIADKRLVIVPERAEIVKAIFEVYAKTGSIADATREAERHGLTRTALSIKKMLQQEKYAGIYTTNAGVVVNDYCPQIVPDDIYTAAQNQLRAGSRSDAKTIYIFSGLLVCAECGRRFRGGRSHAKTPTYKCPIHDMYKRCPNANAIREKDIEKFLLDSIRETANKADIRLVETPKANKRKDTRQSEKERLKRRLERLKDLYLSELMTLDEYKQEKEKIVSSLEAIEETQPDDPGEKQPGAQFLAYFTANGWEKTYHVLTPQEKRLLWRSIVREITISKDRILTVEYL

SEQ ID NO: 11037 - protein, 450 aa, Unknown
  Description of Unknown: Integrase B11038 sequence
  IPR011109,IPR038109,PF07508,PS51736,G3DSA:3.40.50.1390, IPR036162,IPR006119,PTHR30461,PTHR30461:SF3,PS51737, PF00239,SM00857,cd03768,G3DSA:1.10.10.2600,SSF53041
MKRKPAAETAMPATVRKIRAAVYTRKSSEEGLDMEFNSLDAQREACEAYITSQRSEGWVLVRDRYDDGGVSGGTLERPALRRLLADIERGLIDVVVVYKIDRLSRALMDFAKLVEVFDANSVTFVSVTQSFNTTTSMGRLTLNILLSFAQFEREVIGERIRDKVAASRARGIWMGGFLPLGYDAKDRKLLVNEAEAALVRRIFEGFVETESGTKLVQALRAEGATTKRGRAFTKSDVYRVLSNRTYLGEAMHKGRSHPGEHAAIVPQPMWDAAHALLAISPKTRANRTRCQTPSLLRGLIFGSDGRAMSPTHARGRRGQQYRYYVSQSVLKGSAVDGPAIARISAAEIEGAVIAQVRGLLRQPEVVLGAWRAARASAPDMTEDEARLALERLDPLWEELFPAEQARIIRLLVDRVDIGSGGADVRLKLEGLASLARDLAAPPAEAARAAA

SEQ ID NO: 11038 - protein, 449 aa, Unknown
  Description of Unknown: Integrase B11039 sequence
  cd00338,IPR011109,IPR038109,PF07508, Coil,PS51736,IPR036162,PTHR30461, IPR006119,G3DSA:3.40.50.1390,mobidb-lite,PS51737, PF00239,SM00857,G3DSA:1.10.10.2600,SSF53041
VHRRCGLYARQSKGDLDGIDRQLPRLKALATARGWTVIDQYLDDDVTASKPRGDETGWKRMLDDATAGLIDTVIAVDIDRLLRSTRDLNTLIDHGLMAVTVDGEIDLSTADGEFRATMLAGVARFEVRRKGERQSRAQQQRAEKGRPAKGIRATGYTLQGEVVEAEAEVVRRIFDRFTAGDTLRGIAADLERDGIRTRRGGGWSPSTVSSILRNARYAGRSVYKGADVGAAIWPPLVSPAQFSAVAARLDDPRRKTRGEDTARRHFGSGLYYCTCGLRVRSSSGMRNGAHRYTCRQGCFYRSGRPVDEFVLALIREWLGQPDLRDLLAQPVDQPRLKELTAERKDLGNQRLRAEADYDDDLIDGRRYRTKIDKINARLAAIRAEEAKIVGRVGADSVFLHEDPVAAFDASPLAIQRRVADTLMTITLHRGAHGRRAFDPESVRVDWRAD

SEQ ID NO: 11039 - protein, 449 aa, Unknown
  Description of Unknown: Integrase B11040 sequence
  cd00338,PF13408,IPR011109,IPR038109,Coil, PS51736,G3DSA:3.40.50.1390,IPR006119,IPR036162,PTHR30461, PTHR30461:SF3,PS51737,IPR025827,PF00239,SM00857, G3DSA:1.10.10.2600,SSF53041
MKKTLRIGGYPRVSKDEQKKFGFSIQAQVDKIENWCNENKYHLVDMYTDEGYTAGNMKRPGLLRMLDDLDKLDVIVFTRLDRFSRNVLEANKMLEMLREHNVNLISIEEDDIDTTTADGMFIFQLKVSLAERELKKGSERIKSVFEYKIKQGQPITGTQPFGYKIFKKDKDKYVGKDEEVSHIIEDMFIHFQTYHSVRATMQYINDKYNLSKCYRSYYDMFKNTYYTGSYKGNDNYCPPYITMQQFIRNQVIIKNNIRERKNKHVHLFTGLIKCPICGCSFIAQGTKKGGKMYYSYRCNGAYMNTMKKCKLRKSISELIVEKFLLENIEVLANDYILKVSEVKPVKKNGKEKRIKEITNELDRLSYSFHKNRISVEKYDEEYERLEKELKHLLLNVEEKKDLQPLKDFLNSNWRNVYNELTKENKRALWRNLIKKINIDEDFNMSIDFL

SEQ ID NO: 11040 - protein, 449 aa, Unknown
  Description of Unknown: Integrase B11041 sequence
  IPR011109,IPR038109,PF07508,PS51736,G3DSA:3.40.50.1390, IPR006119,IPR036162,PTHR30461,PTHR30461:SF3,PS51737, PF00239,SM00857,cd03768,G3DSA:1.10.10.2600,SSF53041
MSNEQKRLICAIYTRKSTEEGLDQNFNSLDAQRDSCENYVASHKPEGWVMSRTRYDDGGYSGGNIERPGLKQLLDDVRSGLVDIIVVYKIDRLSRSLADFAKLVEIFDEHKVTFVAVTQAFNTTNSMGRLTLNILLSFAQFERELAGERVRDKIAASRQRGIWMGGMPPLGYDVVDRKLVPNPKEADLVRELFARFAALPSMAYLVRELRAKGVKSKSWTTVKGHERHGKLIDKGYIYKIFKNPVYIGLVAYKGNRYPGQHSAIVDQSLWDSVQAALSTGNQNVKGGSAARETKAPTILRGLLFSEEGRAFTPGWTSKGAKQYRYYINTNSIKLGKDSCEVQRIPAGEIEGVVVEKIRSFLRSPEVLSQAVKEITITRPDISEEESITALQNIEQVWDHLFPAEQARIIQVLIERITIRKDGISIKWHAKGMPKLLRESITQTQYREAA

SEQ ID NO: 11041 - protein, 448 aa, Unknown
  Description of Unknown: Integrase B11042 sequence
  IPR038109,PS00397,IPR006119,PS51737, PF00239,G3DSA:3.40.50.1390,PTHR30461,IPR025827, SM00857,G3DSA:1.10.10.2600,SSF53041,IPR011109, PS51736,IPR006118,cd00338,PF13408,Coil,IPR036162,PTHR30461:SF3
MTRTAIYLRVSSDRQAREGDSIPAQREALRTYIDERPDLAFVGEYLDDGISGTKADRDELQRLLEDVEQGRIDLILFVKLDRWFRSVRHYTATQEILDRHGVGWTAIWEPIYDTTTPAGRLIVNQMMSIAQFEAENTGQRIRQVQAYKISQGEVISGSTPPGYSIEGKRLVPNEDAQNVLEAFRTYDRTGSLNGTMTRCAGLHGLPRSKPTFKRMLSNPIYIGRHPRNDHFCEAIIPEDLFERVQRGLRMNVKISQKNVYIFSGLLRCAECGAALGGNTRRRQRGNGKLEIIHQYRCAKHYQRKPAQCGNAKVLLESVLEDYLLTNIRQAIGDRILEYEIQAAPVRDRSARIAEWQGKLKRLKELYVDDLITIEEYKADRETYLQQIAELEAEAQAPAEADLAALRELLSTDFEEIYYTLNKAEKRRFWRSVLTEIRFHSDRTIDLYF

SEQ ID NO: 11042 - protein, 448 aa, Unknown
  Description of Unknown: Integrase B11043 sequence
  cd00338,PF13408,IPR011109,IPR038109,Coil, PS51736,G3DSA:3.40.50.1390,PTHR30461,IPR036162,IPR006119, PTHR30461:SF3,IPR025827,PS51737,PF00239,SM00857, G3DSA:1.10.10.2600,SSF53041
MKRAAIYMRVSTEKQVKEGDSIPAQREALHKYIDSRPDLICVGEFLDDGISGTKYDRDELQKMLSEVEDGKIDLIVVTKMDRLHRSLKNFLDMQDILDKHHCNWLAIWEPMYDTSTPQGRMIINTMMNLAQFEAENTGQRIRQVQSYKVTQGNVISGSCPPGYSIENKRLVPNQDAPKVKELFEHYSISGSLAATMKLVSDDPHFPHSPCAFKHMLKNETYIGKKRDNPDFCEPIISQELFDDVQRKLSINIKKDQKYAYIFSGLLRCKECGKSMAAFRYYKKRPTKTYRVPGYRCATRYNRGIHDCNNTKVITESVLEKYLLENVRAQIKDMILEYEIEEKPVKDNSNRIASLEKKKDRLKDLYINGLIELDEYKSDREQIESELAALTAYKPRTGPDMDSLKDLLSTDFEALYGTFSAEERRFFWRSIIKEIRFDKDRNYDIIFLA

SEQ ID NO: 11043 - protein, 448 aa, Unknown
  Description of Unknown: Integrase B11044 sequence
  cd00338,PF13408,IPR011109,IPR038109,Coil, PS51736,G3DSA:3.40.50.1390,PTHR30461,IPR006119,IPR036162, IPR025827,PS51737,PF00239,SM00857,G3DSA:1.10.10.2600, SSF53041
MPIIRAALYMRVSTDKQVKEGDSIAAQQSALQKYAKEKGYVIVGEYIDDGISGTKADRDEYQKMLSDVQERKIDLLICTKLDRIHRGLKNFLLMQEIFDKYGVNWIAIWEPIYDTSTPQGRLIINQMMSIAQFEAENTSQRIKQVFQYKAEKGEALSGNVPLGYKIQDKHLVPDENAEYILQAFVYFAQTSSIFGTMNHFSHLGIFPKTRGSFKWLLKNEKYKGCYKGKSGYCPAIVPKELFDDVQNKLLKDVRKSQKHTYIFSSLVVCKECGCKMTGQLHYSYKGSKPQKVYICKSHYNMRPRTCSNAKKLNQNVLERYLLENIKPLLEMKVDAVRKEKETDNSARIAYLEKKIKKLKELYINDLIDLKEYKEDKESALAEINALQAHRTVDTKPYEDFIKLNIGEQYKTFTDAEKRIFWRALIDKIVFDTDRNLSVLFLEHYGGSK

SEQ ID NO: 11044 - protein, 448 aa, Unknown
  Description of Unknown: Integrase B11045 sequence
  PS00397,IPR038109,IPR006119,PS51737,PF00239,G3DSA:3.40.50.1390 ,PTHR30461,IPR025827,SM00857,G3DSA:1.10.10.2600, SSF53041,IPR011109,PS51736,IPR006118,cd00338, PF13408,Coil,IPR036162,PTHR30461:SF3
MKRTAIYCRVSTSRQEKEGDSIPAQLDALREYIRQRDDLIPAGEYVDAGISGTKEQRDELQRMLDDVRAGKIDLIIVTKLDRLHRSLRNFLNMQSVLEKNHCEWLAIWEPIYNSSTAQGRMIINTFVNLAEFEAANTSSRIRQVFEYKAQQGEILSGKVLFGYQITDKHLTIDPAAAPVVRALFDEYAKNNSLSDAVRLAGELGRVTDIRSMKRLLKNRKYIGEYRGNPNYCPPIIERAVFDAVQIGLARNIKQSQKRTYIFSGLLVCAECGRKMAGTNHATRRNGKEYPLTLYRCNGHYSPMVHCSQSRTISESTIENAVLKAVKAEVDKITIEQSKPRQTGAQRAKPAKEKAIMRKLERLKAAYLNGAIPLDEYKMDRERLTEELTALKASEPRKTASAVRLDKVFASDFETVYTALNASERRRLWRSVIKEIRMDAGKNLDIIFL

SEQ ID NO: 11045 - protein, 448 aa, Unknown
  Description of Unknown: Integrase B11046 sequence
  cd00338,PF13408,IPR011109,IPR038109,Coil, PS51736,IPR036162,PTHR30461,IPR006119,G3DSA:3.40.50.1390, PTHR30461:SF3,PS51737,IPR025827,PF00239,SM00857, G3DSA:1.10.10.2600,SSF53041
MKRAAIYMRVSTQIQAQEGDSIPAQREALHKYIDSRPDLVCVGEYLDDGISGTKYDREELQRMISDVKAGKIDLICVTKMDRLHRSLKNFLDMQDILDKHHCNWLAIWEPMYDTSTPQGRMIINTMMNLAQFEAENTGQRIRQVQAYKVTQGNVISGSCPPGYSIENKRLVPNQDAPKVKELFEQYSICGSLAATMKLVSDDPHFPHSPCAFKHMLQNATYIGRKRDNPDFCKPIISQELFEDVQRKLSINIKKDQKYAYIFSGLLRCKECGKSMAAFRYYKKRPTKTYRVPGYRCATRYNRGAHSCVNSKVITESVLEKYLLENVRAQIKDMILEYEIEEKPVKDNSNRIASLEKKKDRLKDLYINGLIELDEYKSDREQIESELAALTAYKPRTGPDIDSLKDLLATDFEALYGTFSAEERRFFWRSIIKEIRFDKDRNYDIIFLA

SEQ ID NO: 11046 - protein, 448 aa, Unknown
  Description of Unknown: Integrase B11047 sequence
  PS00397,IPR038109,IPR006119,PS51737,PF00239, cd03768,G3DSA:3.40.50.1390,PTHR30461,IPR025827,SM00857, G3DSA:1.10.10.2600,SSF53041,IPR011109,PF07508,PS51736, IPR006118,PF13408,Coil,IPR036162,PTHR30461:SF3
MRAALYLRVSTQEQTENYSIEAQRERLEAYCKSKGWTVYNVYVDGGYSGANINRPALQQMLADLPNIDVVLVYRLDRLSRSQRDTLTLIEDYFLKANVDFVSITETLDTSTPFGKAMIGILSVFAQLERETITERMRLGQIKRAEEGLAAMGGDYDPAGYARQDGKLIIKPDEAEHIRTAYNLYEQLLSITKVQRELKRLGYPVWRFRRYRDILSNRLYCGYVSYAGQHYRGQHEPIISEEQFERVQALLSRHRGHNAHKAKQSLFSGLIRCGWCGETYVSYHTSKSKYGVYRYYICRAKRFPSEYDRKCTNRTWNVKKLEEIVQHELASITLDKEMSERKSKRIDYNKLIKNVDVKIERILSLYADGGIDRTALDRQIEKLNREKNQLLHDQINQGVVEKKRITKEELEKYRVDLTRSDFETKQAIVEKLIKSITINDKSVSIEWLF

SEQ ID NO: 11047 - protein, 447 aa, Unknown
  Description of Unknown: Integrase B11048 sequence
  IPR011109,IPR038109,PF07508,PS51736,IPR036162, IPR006119,PTHR30461,G3DSA:3.40.50.1390,PS51737,PF00239, SM00857,cd03768,G3DSA:1.10.10.2600,SSF53041
MSMLTPKRCAVYCRVSSDERLDQSFNSIDAQRESGLSYVLSQRNEGWVPVQDTYEDPGYSGGNMERPGLKRLMADIKAGKVDMVVVYKIDRLSRSLADFAKMVEVFDKHQISFSSVTQQINSATSTGRLMLNMLLSFAQFEREVTGERIRDKIAASKRKGLWMGGVVPLGYRVEDRQLLVDPQESETVNWIFDTYVSTGYTTLMVHQMKEQNRLTKSGRNFCKQSLHKVLKNRVYLGMISHKGQFYAGAHQPLIDQAKWDCVQEMMARTSEAKNQATWAMKARTEFLLRGLIYSPGGDLYLPMATQKKSGKVYRYYVHNKKMHEGASQSIIPNQPAEPIEQEVTKQVLDFLRSGTMLNQYWHRIESINPGIPEPQAVVLILQRTAKIWDNYFDQVKSHIIRSLVERITLHGDDTVEVSWRTDNWIPLLETMKPKTMGAELLEMEMPA

SEQ ID NO: 11048 - protein, 447 aa, Unknown
  Description of Unknown: Integrase B11049 sequence
  IPR038109,PS00397,IPR006119,PS51737, PF00239,G3DSA:3.40.50.1390,PTHR30461,IPR025827, SM00857,G3DSA:1.10.10.2600,SSF53041,IPR011109, PS51736,IPR006118,cd00338,PF13408,Coil,IPR036162,PTHR30461:SF3
MSITNVAIYVRVSTDRQAKKGDSIDEQLSTCKAYIASKENMVLAGTYIDDGISGRKIKRGDFEQLLDDVRLGRVNLIIFTKLDRWFRSLRHYLNTQAVLEANHCDWLAVDQPYFDTTTPHGRAFVAQSMTFAELEAENDSVRIRDVFDYKYRQGEVLAGKAPLGFSIENKHLVPNQDAEKVLHIFQFYAACNSLNQTITHLESDMGIVMTQSNLKTAILKNKKYIGVFRDNDHYCPAIIPLDLFERVQELLAINVKISQKYNYIFSGLLRCAHCGHSFSGATRKIKKKTGGFYKYPLYKCHGAYPSKRCSNRKVVFESCIERYLIANIKPLLQEHIAEYEITSAKVIDYDSRRAALLKKIDKLKDLYVNDIITMDELKRDKEKYIKELENLPRNQEQKDLAPIRKLLKMDLDSIYQTLEPAERRQLWRSVIKEIQIDDHKNLKVIFL

SEQ ID NO: 11049 - protein, 447 aa, Unknown; identical to SEQ ID NO: 10108
  Description of Unknown: Integrase B11050 sequence
  cd00338,PF13408,IPR011109,IPR038109,PF07508, PS51736,G3DSA:3.40.50.1390,IPR006119,PTHR30461,IPR036162, mobidb-lite,PTHR30461:SF3,IPR025827,PS51737,PF00239, SM00857,G3DSA:1.10.10.2600,SSF53041

SEQ ID NO: 11050 - protein, 447 aa, Unknown
  Description of Unknown: Integrase B11051 sequence
  cd00338,PF13408,IPR011109,IPR038109,Coil, PS51736,IPR036162,IPR006119,PTHR30461,G3DSA:3.40.50.1390, PTHR30461:SF3,IPR025827,PS51737,PF00239,SM00857, G3DSA:1.10.10.2600,SSF53041
MQKLRVVGYARVSHDEQKKYGYSIKTQIERIEKWCIQENHTLVRMYVDEGYSASTMKRPQMQELLQNLKDIDAIVFTRLDRFSRNVLEANQVLQTFAKYNVSIIATDEDVSTTDADGLFNFQLRVSLAERELKKGSERIKAVFGYKIKQAQAITGALPLGYKIEVINNEKKVVKNEDEIEIVNAIFDYFITHQSIRKTMQYIQKEYGYIRCQNVFRNMLKNELYTGSYRGNKAYTEPYITLDQYNRIQELLKANIKQTKTARAYLFSGLIKCNECGYSLAGSCTYDKHVDKEYYYYRCSNCYSNNRCTNKKFFSERRIEKYLIENVEELIKRHLFNVKNINSNKKNIDKTKKRKKEINEELENLNYMFLKKRISKSEYDKFYTELEKELAQLKPAKKENTEALQKFLDSNWSNFYSVIDRDSKRTLWRNLIQEIQIDNSYNITIIFL

SEQ ID NO: 11051 - protein, 447 aa, Unknown
  Description of Unknown: Integrase B11052 sequence
  IPR011109,IPR038109,PF07508,PS51736,IPR036162, PTHR30461,IPR006119,G3DSA:3.40.50.1390,PTHR30461:SF3,PS51737, PF00239,SM00857,cd03768,G3DSA:1.10.10.2600,SSF53041
MSMLTPKRCAVYCRVSSDERLDQSFNSIDAQRESGLSYVLSQRNEGWVPVQDTYEDPGYSGGNMERPGLKRLMADIKAGKVDMVVVYKIDRLSRSLADFAKMVEVFDKHQVSFSSVTQQINSATSTGRLMLNMLLSFAQFEREVTGERIRDKIAASKRKGLWMGGVVPLGYRVEDRQLLIDPQESETVNWIFDAYVSTGSTTLMIQQMKEQNRLTKSGRHFCKQSLHKVLKNRVYLGMISHKGQFYAGAHQPLIDQAKWDCVQEMMARTSEAKNQATWAMKARTEFLLRGLIYSSGGDLYLPMATQKKSGKVYRYYVHNKKMHEGASQSSIPNQPAEPLEQEVTKQVLDFLRSGTMLTQYWQRIQSINPGIPEPQAVVLILQRTAKIWDNYFDQVKSHIIRSLVERVTLHEDDTVEVSWRTDNWIPLLETMKPRTTGAEMLELEMPA

SEQ ID NO: 11052 - protein, 447 aa, Unknown
  Description of Unknown: Integrase B11053 sequence
  PS00397,IPR038109,IPR006119,PS51737, PF00239,G3DSA:3.40.50.1390,PTHR30461,IPR025827, SM00857,G3DSA:1.10.10.2600,SSF53041,IPR011109, PS51736,IPR006118,cd00338,PF13408,Coil,IPR036162,PTHR30461:SF3
MKKALKIGGYVRVSTDEQKKYGYSVRAQIEKINNWCEENGHILIDMFNDEGYTAGNMKRPALLNMLDRLKEFDVIVFTRLDRFSRNVLEANKMLEMLRAHGVNLISIEEDDIDTTTADGMFIFQLKVSLAERELKKTSERIKSVFEYKIKQGQAVTGSLPFGYKIIEKDGKKYVGIDEKLEHIVIEIFAHFLTYHSARATMQHINEKYGLTRCYTTYHKMLKNPFYSGYFKGVSDYCPAYISPAQFEHNQRLLENNIRQRKTKHIYLFSGIIKCPVCGYSMVGTATTKKGKTYYSYRCNNKYMNKACNVKGSISEMIIEDFIIKNANTLAQKHIAKVTEVKPAKKDNAEKRIKEIKEEIDNLNYMFKKRRISAAEYDRDFEALEKELKKLTLKVGKKEDINAVKEFLNSDWELIYNNLEKANKRALWRNLIKEVILDSEFNISLDFI

SEQ ID NO: 11053 - protein, 446 aa, Unknown
  Description of Unknown: Integrase B11054 sequence
  cd00338,PF13408,Coil,PS51736,IPR036162,IPR006119 ,PTHR30461,G3DSA:3.40.50.1390,mobidb-lite,PTHR30461:SF3, IPR025827,PF00239,SM00857,SSF53041
MNIAIYPRKSKKDDNSESMEQQIDDCRKYINKTYPDANIIVYSGDYAITGHSTAKRKDFQRMMDDVRAGRINAVVIMRYDRIARNMRDFCNLYHDMESAGCNLISVSQQIDTSTPYGKNFMYQMANMAELEWAVISERYKDTAAYKIREGKAYTGRVPIGFKIEKIDGVKKVVHDNEEQTRAIFDYLLATKSKRGTVLWVRENLISDFTRHKLDSMINSDLYIGKVRENENFCEPYFTKEQMEEIRSVNQIKYAPSGHIYLFSGLFRCPICGRKMASFYSIDRKTKKHRQYQRCWFGGNEKLHKTKLVSEAKTEKYLLENLDAALKNLEFDVKKEAGKPKQNLNKKLNDAIGERDRLNYLFEKGRIDIPEYEKKYSVLSEKINSITEELSNNKVVRIEEFKKQIPEDWKELYEQLDQKGKQEFWHRIIKEIYLNEAFEITGFIFYI

SEQ ID NO: 11054 - protein, 446 aa, Unknown
  Description of Unknown: Integrase B11055 sequence
  IPR011109,PF07508,Coil,PS51736,IPR036162,IPR006119,G3DSA:3.40.50 .1390,PTHR30461,mobidb-lite,PTHR30461:SF3,PS51737,PF00239, SM00857,cd03768,SSF53041
MKIGYTRVSTREQAQDSSALDQQTHRIKSAGATIIFCDVESGKSFARKEFKKMMALCGQGRVSELIITRIDRLGRSVIGIHQTIEALQKLNIKINVLDSPVNPSSAYGWYSINQMAGLAELESRMLSERINNGMEYFRLMKKASPRPPFGYTRVNEKYEPDLEKWAIAQQAIKFFLNGGTLRSLGQYLLETHGIKLSVSGLRYWLLNPCLRGHTVYGSRGNIDNPEKWTIHQNTHEPLISNLEYHKILRILETNKSKHCYGNGKKDTESYPLSGQIICADCGYKCFIKKRGSKTRVRCKQHDMSGDLFCKNKFTTYLDNIIYNVDSVLHQRYLDIISFTESEITSSDDNPLIVDQERQLRSLRQLPKSPIIDGAIASTLLEIQRLKSLETVKQEISQELEKILVNSFSDLDFWRSIPWRDKSEIYKELIKSVSVSNGEVIEIELFI

SEQ ID NO: 11055 - protein, 446 aa, Unknown
  Description of Unknown: Integrase B11056 sequence
  cd00338,PF13408,Coil,PS51736,IPR036162,PTHR30461 ,IPR006119,G3DSA:3.40.50.1390,mobidb-lite,PTHR30461:SF3, IPR025827,PF00239,SM00857,SSF53041
MNIAIYPRKSKKDDNSESMEQQIDDCRKYINKTYHNANIIVYSGDYAITGHSTAKRKDFQRMMDDVRAGRINAVVIMRYDRIARNMRDFCNLYHDMESAGCNLISVSQQIDTSTPYGKNFMYQMANMAELEWAVISERYKDTAAYKIREGKAYTGRVPIGFKIEKIDGVKKVVHDNEEQTRAIFDYLLATKSKRGTVLWVRENFIPDFTRHKLDTMIKSDLYIGKVRENENFCEPYFTKEKMEEIRSVNQIKYAPSGHIYLFSGLFRCPICGRKMASFYSIDRKTKKHRQYQRCWFGGNEKLHKTKLVSEAKTEKYLLENLDAALKNLEFDVKKEAGKPKRNLNKKLNDAIGERERLNYLFEKGRIDIPEYEKKYSVLSEKINSITEELSNNKVVRIEEFKKQIPEDWKELYEQLDQKGKQEFWHRIIKEIYLNEAFEITGFIFYI

SEQ ID NO: 11056 - protein, 446 aa, Unknown
  Description of Unknown: Integrase B11057 sequence
  cd00338,PF13408,IPR011109,IPR038109, Coil,PS51736,IPR036162,IPR006119, PTHR30461,G3DSA:3.40.50.1390,IPR025827,PS51737, PF00239,SM00857,G3DSA:1.10.10.2600,SSF53041
MPDKRLPEGKRNCAIYTRVSHEDQVKHGLSLSAQLETLQGYAKANKLHVVDVYTDEGISARKPYKKRPEFMRMLADVEAGRVDLVLIIKLDRFFRNVGDFYEVQRILDAHGVAWIATEEEYDTTTANGRLYLNIRLSMAQDEADRDSERIHFVFDGKKQRGEVLTGGTPMGYKILDKRLAVDEPAAENVKALYQHYIDCRSIGGVTRWAREALGLSLNPCTVRKMLRNRVYIGERHGVKDFCPAIIPREQFARVQELLISRSQRNSSTEARRVYLFSGLCRCAECGAAMHTNFIKDHKYYRCRQHENYRNCPNTRQINERTIEQWLLTNLTTEMEKYNADLRARSAGRVLVDTTKIKRKMEKLKDLYLDDMIDHAIYERDFIALRQQLADAEKANAELPPEVDIPAAKELLTLYPQLPEPAKKAFWSRVLRRIEIDAAHNIHIFPA

SEQ ID NO: 11057 - protein, 446 aa, Unknown
  Description of Unknown: Integrase B11058 sequence
  cd00338,PF13408,IPR011109,PS00397,IPR038109, PS51736,G3DSA:3.40.50.1390,IPR006119,IPR036162,PTHR30461, PTHR30461:SF3,IPR025827,PS51737,PF00239,SM00857, G3DSA:1.10.10.2600,IPR006118,SSF53041
LRVALYCRVSTDEQARHGQSIEAQLFHLREWAAKNGHTVVGEYVDAGISGKKPPAKRPELARFFQSLRDGVKVDLLAFCKLDRFFRSVKLYYQAVDVLDKYNVAWQAIHEDYETLTAGGRMKVNIMLSVAENEADRTAERIKVVFERKIANGECVNPHGLPIGYSYDRASKRIVANADADIVRAAFEHYAKTGSVRDTLYYIGDKYGKHLIYKSLALLLHNRLYIGEYRDNLDYCEPIVDKSLFDRVQICLESRSIRHNPTARVYFFSGLIYCGVCGRRMVGVYHNNNGNSTDYNGYRCQRAYQSHLCAHRKFYSERKIEAYLLEHIKQEAGSVSAKTEISRAKKKKKAPNMAEIKGRLSRLKDLYVDGLIDKDEYLRDREKLTELLDCVDAKSDQQKKRIEKVREIFLGCLEEEYSALGRAEKRDFWRAILTRIEITDGDIRFYF

SEQ ID NO: 11058 - protein, 446 aa, Unknown
  Description of Unknown: Integrase B11059 sequence
  PS00397,IPR038109,IPR006119,PS51737,PF00239,G3DSA:3.40.50.1390 ,PTHR30461,IPR025827,SM00857,G3DSA:1.10.10.2600, SSF53041,IPR011109,PF07508,PS51736,IPR006118, cd00338,PF13408,Coil,IPR036162,PTHR30461:SF3
MKRTAIYLRVSTDKQAQEGDSIPAQRDALHKFIDSHDDMIFVEEYMDDGVSGTKSDRDELQRMLQDAKDGKIDQILVTKLDRLYRNIRHYLNMQELLDKYRVNWMAIWEPIYDTSTPQGRLIINQMMSIAQFEAENTGQRIRQVNAYKIANGEVVFGNTPPGLSIQDKHLVPNKDAEIVRQMFEHYAFGGNLWQTMTAFSHYGIFPNDKAAFKRVLKNEKYIGKYRDNPTFCTPIIDKDLFDDVQRKLDMNVKVSQKRVYIFSGMIHCAECGTRYSGLFQGKKNGIIYSAKLYRCCRHYRAIQTCGNTKILNEKRLEEYLVSNIKPLLSEYVISAEKSDAPQKDNSDRIAYLNKKLSKLKELFVNDLLTLDEYKRDKEEIETELTALEEDKKKADEHDLSVCKKFLDMDIDAIYAELSLEEKRVFWRSIIKEIWVDAQKNIRVVFL

SEQ ID NO: 11059 - protein, 446 aa, Unknown
  Description of Unknown: Integrase B11060 sequence
  cd00338,PF13408,Coil,PS51736,IPR036162,G3DSA:3.40.50.1390 ,IPR006119,PTHR30461,mobidb-lite,PTHR30461:SF3, IPR025827,PF00239,SM00857,SSF53041
MNIAIYPRKSKKDDNSESMEQQIDDCRKYINKTYPDANIIVYSGDYAITGHSTAKRKDFQRMMDDVRAGRINAVVIMRYDRIARNMRDFCNLYHDMESAGCNLISVSQQIDTSTPYGKNFMYQMANMAELEWAVISERYKDTAAYKIREGKAYTGRVPIGFKIEKIDGVKKVVHDNDEQTRAIFDYLLATKSKRGTVLWVRENFIPDFTRHKLDTMIKSDLYIGKVRENDHFCEPYFTKDQMEEIRSINQIKYAPSGHIYLFSGLFRCPICGRKMSSFYSIDRKTKKHRQYQRCWFGGNEKLHKTKLVSEAKTEKYLLENLDAALKNLEFDVKKEAGKPKRNLNKKLNDAIAERDRLNYLFEKGRIDIPEYEKKYSVLSEKINSITEELSNNKVVRIEEFKKQIPEDWKELYEQLDQKGKQEFWHRIIKEIYLNEAFEITGFIFYI

SEQ ID NO: 11060 - protein, 446 aa, Unknown
  Description of Unknown: Integrase B11061 sequence
  PS00397,IPR038109,IPR006119,PS51737, PF00239,G3DSA:3.40.50.1390,PTHR30461,IPR025827, SM00857,G3DSA:1.10.10.2600,SSF53041,IPR011109, PS51736,IPR006118,cd00338,PF13408,Coil,IPR036162,PTHR30461:SF3
VKRAALYIRVSTEEQARHGLSLEDQKNNLTQFSKSHGMKIAGIYEDAGISARKPYKKRPALLRLLEDCKAGKIDLILFIKLDRWFRNVGNYYAVQEILDQYNVSWQATQEDYETTTASGRLKVNIMLSVAQDEADRTSERIKFVFEGKRARLEPLTGNIPFGYKIEGKSFKKDESKEALVNDFFKKYLASGSISKTSEFIREKYGVLMRYHLIDKMLRSTTYYGKYYNMDGMCPAYITKEDHEQIQAMRRKVVRKAKNNRTYLFSGLVVCPECGNRMGARINTKQTYVFYNCNGHYTKQNGCQNRVNLGERKIEEYLLATVANKFHEYKANFSALKNAEINKRSRAEISAAKSKLNKLKDLYLNDIITLEELKTDRESLLAKISDLEKAALPEQKQDFESIDRVLIENWKESYDGLNREEKREFWRIIIKEIKIYPDRHIEYSLNV

SEQ ID NO: 11061 - protein, 446 aa, Unknown
  Description of Unknown: Integrase B11062 sequence
  IPR038109,PS00397,IPR006119,PS51737,PF00239, cd03768,G3DSA:3.40.50.1390,PTHR30461,IPR025827,SM00857, G3DSA:1.10.10.2600,SSF53041,IPR011109,PF07508,PS51736, IPR006118,PF13408,Coil,IPR036162,PTHR30461:SF3
MNVFGYCRVSTTMQAEEGYSLEEQKSRIESYCKGMGWNLLKVYVDAGESGAKADRPALQEMIRNIKMVDKVVVYKLDRLSRSQKDTLYLIEDVFLKNKVEFVSMTESLDTATPFGKAMLGTLAVFAQLERETIKERMALGRVARAKSGKYSGNPRTVVGYDYVDGELVVNESERPQIERLFDLILQGKSFSETARILNAEGYTHKYGEWKRGLVRNVVVNPIYTGKVSFEGVLYDGNHQAIIPESKFEQANSLTDDRKSRLNLPVKTGRANSYLGGLLVCAHCGQRYYRHKGVRGQPQYICYTRMFNSQHEDKCFNKRWSMKELDDLILGQVKLLSLDPPKPKKKKEVNKQAEMDKLDEQMNRLLDLFALGTVPMETLQKKMDAINQKKLDLQKKEKAQPDLQPMLRSFEDVLANGTLEDIRAILFAIIDYIELDNQEVSIHWKFF

SEQ ID NO: 11062 - protein, 446 aa, Unknown
  Description of Unknown: Integrase B11063 sequence
  cd00338,PF13408,IPR011109,PS00397,IPR038109, PS51736,IPR036162,IPR006119,PTHR30461,G3DSA:3.40.50.1390, PTHR30461:SF3,PS51737,IPR025827,PF00239,SM00857, G3DSA:1.10.10.2600,IPR006118,SSF53041
VRCALYIRVSSDEQKRNGFSLPEQRHALMQYAKEKGYTIVDLYADEGVSSSKNPQRRHEFQRMLSDVKKGKIDIIVFLKLDRWYRNVGDYYLTQAILDQYGVKWECVVEKYDTTTRTGKLGLNIKLTVAEDESANASERVKFVQAGKVRNREPITGNQPFGYKIETIDGVKRIVKDPETQAECEDMFETFFATGSGGATSKYINAKYGRSLAENAIPRRLKNPFYTGEYRGVPDYCPAYITKEQHARILAIFAKRTRSTKRKKVYLFAGLIKCPVCGRTMVSCTMNKKTLGYRCRHHYMNKCTFVHTITEERIESFLLENIGSMLEQYLISYKEQNKAKKKPDPRKLEDRLSRLNNIYMMGNISDSEYTKKANEITAQIAAIKCANSNDLPIPEESIKLLSDKRFATLYADLPRESRKALWMSLIDSIEVEGLYPKQVFFIGQERL

SEQ ID NO: 11063 - protein, 446 aa, Unknown; identical to SEQ ID NO: 10057
  Description of Unknown: Integrase B11064 sequence
  cd00338,PF13408,IPR011109,IPR038109,PF07508, PS51736,IPR036162,PTHR30461,IPR006119,G3DSA:3.40.50.1390, PS51737,IPR025827,PF00239,SM00857,G3DSA:1.10.10.2600, SSF53041

SEQ ID NO: 11064 - protein, 446 aa, Unknown
  Description of Unknown: Integrase B11065 sequence
  IPR038109,PS00397,IPR006119,PS51737,PF00239,G3DSA:3.40.50.1390 ,PTHR30461,IPR025827,SM00857,G3DSA:1.10.10.2600, SSF53041,IPR011109,PS51736,IPR006118,cd00338, PF13408,Coil,IPR036162,PTHR30461:SF3
MKKSLRVAGYARVSTDEQKKFGYSISAQTDEIQRWCNENGHDLLHIYIDEGYSASTSKRPNLQKLMNSLQDIDAIAFTRLDRLSRSVLDANKMLELLHQNNVAMISINEDDINTSTANGLFMFNLKVNLAEHELKKGSERIKAVFEYKIAQGQPITGKLPFGYKIITSDGVKKVVKDEATEKIVDDIFASFLLYQSVHHVVDLVNNKYGMCKPYHFFTRILKSEFYAGIYRGNPNYAEPYITIETRNAVLTALEANIRKGLNRHVYLFTGLIRCPECRSKLTGTSYPKNTDRYYYYRCNIAHSRHVCDHRKTYAEAHLEQYLIANVSSLLGNHIATVQNVTPATIDTTEAEIQNLQAEMERLNIIFMKKRMSVSVYDKMYAELENKITMLKQKMPKKDNTDALKKLLNSGWENVYHGMTRENKRTLWRNLIQEIHITDNGYEIIFL

SEQ ID NO: 11065 - protein, 446 aa, Unknown
  Description of Unknown: Integrase B11066 sequence
  cd00338,IPR011109,IPR038109,PF07508,Coil, PS51736,IPR036162,PTHR30461,IPR006119,G3DSA:3.40.50.1390, PTHR30461:SF3,PS51737,PF00239,SM00857,G3DSA:1.10.10.2600, SSF53041
MKNAVIYARYSAGPRQTDQSIEGQIADCRKYAEAHDLNVVDVYADRHISGKSTEGRDEFLRMIKDAKKGMFQAVIVWKVDRFGRDKTDIAIYKRELRRSGVTLHYAAESVPEGPEGIILESLLEGLAEYYSADLRQKVNRGMTESLKKGQYPGRLPYGYTKDKDKKPIIDEEKAAVVREVFALHIDGKSIAEIERILANKGIYQKNGSIYRILTNEHYTGKFEMMGIDVDAEPIISAETWAKSQEVFGTKKRSSAKMEYLLSGKCTCGVCGGRIQGSYGTSKTGDKHTYYICPNKCIKPLSAPKYEKMVLAETRENILTDEMIEQIVDRIMEIQNDDLPHAEIKRISAQISDYQKRLDNLYSAIENGLNFENVKDRLDDYTEKISTLSIELEKLKAKKPIIPRDILQKWLEVFRDGDIESDAFAKRIINTFISGIVIYDDHSVIAY

SEQ ID NO: 11066 - protein, 446 aa, Unknown; identical to SEQ ID NO: 10167
  Description of Unknown: Integrase B11067 sequence
  cd00338,PF13408,IPR011109,IPR038109,PF07508, PS51736,IPR036162,IPR006119,PTHR30461,G3DSA:3.40.50.1390, PTHR30461:SF3,IPR025827,PS51737,PF00239,SM00857, G3DSA:1.10.10.2600,SSF53041

SEQ ID NO: 11067 - protein, 446 aa, Unknown; identical to SEQ ID NO: 10045
  Description of Unknown: Integrase B11068 sequence
  cd00338,PF13408,IPR011109,IPR038109,PF07508, PS51736,G3DSA:3.40.50.1390,IPR036162,IPR006119,PTHR30461, mobidb-lite,PTHR30461:SF3,PS51737,IPR025827,PF00239, SM00857,G3DSA:1.10.10.2600,SSF53041

SEQ ID NO: 11068 - protein, 445 aa, Unknown
  Description of Unknown: Integrase B11069 sequence
  cd00338,PF13408,IPR011109,PS00397,IPR038109, Coil,PS51736,G3DSA:3.40.50.1390,IPR006119,PTHR30461, IPR036162,IPR025827,PS51737,PF00239,SM00857, G3DSA:1.10.10.2600,IPR006118,SSF53041
MKRAALYVRVSTQEQKNSGLSVDSQIDALEKYCEKQGYTVAGIYNDAGISARKKYTKRPALLQLLEDCRKHEIDIILFTRLDRWFRAVAGYYEVQSVLDACKVPWRAIWEDYETETSQGIFKVNIMLSVAQAEADRDSEKIRSVMEFKRQNKEYIGGKVPVGYRVEGKKIVKDENMREIIEDMFEHYFQTFSKWGTADYILSKYPDFIRTRNRIVKIMSSPAYHGEMYGVKNYCEPYITEEQAQRIKEVSSQKSWVDCKRRIYIFSGLIRCPICGYKFSGCTMVKKEKRYKVYRCPRSAAKKHKTYTRSEPKLETYMLNHIEEKIQSDVLRAEGRVKAAGSDVGKRKKKLSSELGRINKMFEKGRITEEYYDERYEAISKELKELSQTAATEELETKKKIQSRFPDGWKDMYMQLDEQGKQVFWKSIVKEIKISPNEFVEDIIFF

SEQ ID NO: 11069 - protein, 445 aa, Unknown
  Description of Unknown: Integrase B11070 sequence
  cd00338,PF13408,IPR011109,PS00397,PF07508, IPR038109,PS51736,G3DSA:3.40.50.1390,IPR006119,IPR036162, PTHR30461,PS51737,IPR025827,PF00239,SM00857, G3DSA:1.10.10.2600,IPR006118,SSF53041
LHQKVKRAAGYIRVSTVEQSLKGLSIETQIAEIKAYAEYHGMRLEEIYVDRGITARKSLEKRLDFMRMMRDVEAGKIDHIIVLRLDRFFRNVYDYHKMMNEYLNPNNCDWSAVKEQYTTTTTNGRLMINLRLAIAEQECDTDSDRIKDVLSHRASQGFAVTGSLPIGLKIVDHRVVPDEETKHIVKALFDKMQLTSSLRKSMLEVNEEYGTRLAYGVASNMIRNPIYCGIYRDNQKYCEPIITKEQFDKVQHLLKMNVRTGKRKHTYIFSGLIVCDHCNNRMPGNHTVVSSGEYDYYRCNKAKFNLCDNSLQVNELTLEKYMVDNVKGFLEEHLTKVKNMAQKKRPLIKSNRKKIENKLSRLNELYVDGIIDREKYKQDYADLQSQIIDEPEEEKIDLTAAQNFLSIDLKSVYETLSKVEKRALWRSIIKEIRIFNKEVVGVNFL

SEQ ID NO: 11070 - protein, 445 aa, Unknown
  Description of Unknown: Integrase B11071 sequence
  cd00338,IPR011109,IPR038109,PS00397,Coil, PS51736,G3DSA:3.40.50.1390,IPR006119,PTHR30461,IPR036162, PS51737,PF00239,SM00857,G3DSA:1.10.10.2600,IPR006118, SSF53041
MKRAALYVRVSTQEQKNSGLSVDSQIDALEKYCEEQGYTVAGIYNDAGISARKKYTKRPALLQLLEDCKKHEIDIILFTRLDRWFRAVAGYYEVQNVLDACKVPWRAIWEDYETETSQGIFKVNIMLSVAQAEADRDSEKIRSVMEFKRNNKEYIGGKVPVGYRIEGKKIVKDEKTRGIIEDMFEHYFQTFSKAGTADYILNKYPDFARTRTRLVKIMSSPAYRGEMYGVKNYCEPYITEEQAQKINEVSSQKTWTDCRRRIYIFSGLMKCPICGCRLSGCAIGKKGKKYKVYHCPHSVAQKHKTYTRSEKKLETYMLNHIEEKIQLDVLRAEGRVKAGGNDAEKRKKKLSSELGRINKMFEKGRITEEYYDERYEAISKELKELSQTAATEELETKKKIQSRFPDGWKDMYMQLGEQDKQVFWKSIVKEIKISPDTYVEDIIFF

SEQ ID NO: 11071 - protein, 445 aa, Unknown
  Description of Unknown: Integrase B11072 sequence
  cd00338,PF13408,IPR011109,IPR038109,PS00397, Coil,PS51736,G3DSA:3.40.50.1390,IPR036162,IPR006119, PTHR30461,PS51737,IPR025827,PF00239,SM00857, G3DSA:1.10.10.2600,IPR006118,SSF53041
MKRAALYVRVSTQEQKNSGLSVDSQIDALEKYCEEQGYTVAGIYNDAGISARKKYTKRPALLQLLEDCKKHEIDIILFTRLDRWFRAVAGYYEVQSVLDACKVPWRAIWEDYETETSQGIFKVNIMLSVAQAEADRDSEKIRSVMEFKRQNKEYIGGKVPVGYRVEGKRIVKDEKMRAIIEDMFEHYFQTFSKMETADYILSKYPDFIRTRTRIVKIMSSPAYHGEMYGVKNYCEPYITEEQAQRIKEVSSQKSWIDCKRRIYIFSGLIRCPICGYRFSGRTMAKEEKRYKVYQCPRSAAKKHKTYTRSEPKLETYMLKHIEEKIQLDVLKAEGRVKAAGNDVGKKKKKLSSELGRINKMFEKGRITEEYYDERYEAISKELKELSQTAATEELETKKKIQSRFPDGWKDMYMQLDEQGKQVFWKSIVKEIKISPNEFVEDIIFF

SEQ ID NO: 11072 - protein, 445 aa, Unknown; identical to SEQ ID NO: 10170
  Description of Unknown: Integrase B11073 sequence
  cd00338,PF13408,IPR011109,IPR038109,PF07508, PS51736,G3DSA:3.40.50.1390,IPR006119,IPR036162,PTHR30461, mobidb-lite,PTHR30461:SF3,IPR025827,PS51737,PF00239, SM00857,G3DSA:1.10.10.2600,SSF53041

SEQ ID NO: 11073 - protein, 445 aa, Unknown
  Description of Unknown: Integrase B11074 sequence
  PF13408,IPR011109,IPR038109,PF07508,PS51736, IPR036162,IPR006119,G3DSA:3.40.50.1390,PTHR30461,PTHR30461:SF3, IPR025827,PS51737,PF00239,SM00857,cd03768, G3DSA:1.10.10.2600,SSF53041
VPLQKERLIAYCKAKGWVVAGIFIDPGHSGSSLDRPGITELMAGVEAGKFDVVLVYKLDRLSRSQKDTLYLIEDVFMANNTDFVSMQESFDTGTIYGRAMVGVLSVFSQMERETITERTLMGRAGRAEEGLWHGGGTDPIGYDYIDGELVVNPGEAQQVREVYSLYSAGHSLSEITRRMVGCKTKHGDWSHTSTVGNILDNPLYAGTVHFDGVRKKGQHEAIVSADIDRRVKARRARLHHAESSGESSHLLTGMIFCACCGARYFAHKRPNGSLVYSCHSRAKKNKKMVKDPGCMAPHIPVAKLDDIVVSRMLRLAEDPAQVNEIIEKRAAQKDDSNAGRESAEKIRRLDAEISRLMDLLQHDQMASVGEIAEAIQKAHTERSRLLPRGEEKKPRLFDAAGFKTLLCDAAFSWQEAELRGRRAFLLQLIDGVHIDMEDVRIDWSF

SEQ ID NO: 11074 - protein, 444 aa, Unknown
  Description of Unknown: Integrase B11075 sequence
  IPR038109,PS00397,IPR006119,PS51737,PF00239,G3DSA:3.40.50.1390 ,PTHR30461,IPR025827,SM00857,G3DSA:1.10.10.2600, SSF53041,IPR011109,PS51736,IPR006118,cd00338, PF13408,Coil,IPR036162,PTHR30461:SF3
MKRVAIYIRVSTSLQAQEGDSIPAQRDALRKYIDSHDDMIFCGEYLDDGISGTKSDRDELQRMLTDVKDGKIDQILVTKLDRLYRNIRHYLNMQELLDRHNVNWLAIWEPIYDTSTPQGRLIINQMMSIAQFEAENTGQRIRQVQAYKVSRGEVISGSTPPGYSIKDKRLVKNQDAETVKQMFEYFSFCGNISQTMGKFDHFGIFPQSKAAFKRILTNTKYAGLFRDNPNFCDPIISRELFDDVQRKLTINIKCSQKRTYLFTSLIRCPECGRIMSSLHRSNKSNRQVSQNMYRCKRHYGSKVKLCGYSKIVNEKKLEEFLLRNIQDLMEDYVISLDTISAPQKDNSARISYLNKKISKLKELYVNDLISIDEYKHDKEEIQAELEKLQITEQVPDTAPYRQFINADIGEIYSDLTDEEKRSFWRSIIKEIHLDQNKNFKVVFL

SEQ ID NO: 11075 - protein, 444 aa, Unknown
  Description of Unknown: Integrase B11076 sequence
  cd00338,PF13408,IPR011109,IPR038109,PF07508, Coil,PS51736,IPR036162,IPR006119,G3DSA:3.40.50.1390, PTHR30461,mobidb-lite,IPR025827,PS51737,PF00239, SM00857,G3DSA:1.10.10.2600,SSF53041
MSKNDTKIKRVRHRSTLPRKKKVAAYARVSTGKEAMLHSLSAQVSYYSNLIQNKRGWLYMGVYVDEAMTGTSKERPSFLKMMNDARAGKLDMIITKSISRFARNTVTLLETIRELKALNVDVYFEEQRIHSLSADGELVLTFLASYAQEESRSASENLKWSIRNRFKKGLAWNTYVYGYQFSNGTFIKIPKEAEIVRHIFASYLDGKGTPAIAKDLNKRGILTKLNKPWRHGAIAKVMRNYLYTGNMLLQTTYKDNHLTKRKVINNGVLPKYHVENSHEPIIDIDTFNKVQHLIAEKQKNTKVRTARDEKTLYRGMLVCDKCGKDYNRRITKNKAYWICSTYNFYGKESCPSKQIPEDILNEIVKSTLNLSSLNYETVNERLTNIIVQDKQVKLSLKTGQEVTVPWAYQSRSASWTPEMREKARQKAMKGRNKNEKDNSNTTNN

SEQ ID NO: 11076 - protein, 444 aa, Unknown
  Description of Unknown: Integrase B11077 sequence
  cd00338,PF13408,IPR011109,IPR038109,PF07508, PS51736,G3DSA:3.40.50.1390,PTHR30461,IPR006119,IPR036162, mobidb-lite,IPR025827,PS51737,PF00239,SM00857, G3DSA:1.10.10.2600,SSF53041
MSKNDTKIKRVRHRSTLPRKKKVAAYARVSTGKEAMLHSLSAQVSYYSNLIQNKRGWLYMGVYVDEAMTGTSKERPSFLKMMNDARAGKLDMIITKSISRFARNTVTLLETIRELKALNVDVYFEEQRIHSLSADGELVLTFLASYAQEESRSASENLKWSIRNRFKMGLAWNTYVYGYQFSNGTFIKIPKEAEIVRHIFASYLDGKGTPAIAKDLNKRGILTKLNKPWRHGAIAKVMRNYLYTGNMLLQTTYKDNHLTKRKVINNGVLPKYHVENSHEPIIDIDTFNKVQHLIAEKQKNTKVRTARDEKTLYRGMLVCDKCGKDYNRRITKNKAYWICSTYNFYGKESCPSKQIPEDILNEIVKSTLNLSSLNYETVNERLTNIIVQDKQVKLSLKTGQEITVPWAYQSRSASWTPEMREKARQKAMKGRNKNEKDNSNTTNN

SEQ ID NO: 11077 - protein, 444 aa, Unknown
  Description of Unknown: Integrase B11078 sequence
  cd00338,PF13408,IPR011109,IPR038109,PF07508, PS51736,IPR036162,IPR006119,PTHR30461,G3DSA:3.40.50.1390, mobidb-lite,IPR025827,PS51737,PF00239,SM00857, G3DSA:1.10.10.2600,SSF53041
MSKNDTKIKRVRHRSTLPRKKKVAAYARVSTGKEAMLHSLSAQVSYYSNLIQNKRGWLYMGVYVDEAMTGTSKERPSFLKMMNDARAGKLDMIITKSISRFARNTVTLLETIRELKALNVDVYFEEQRIHSLSADGELVLTFLASYAQEESRSASENLKWSIRNRFKKGLAWNTYVYGYEYENGTFKVIKEEAEIVKEIFASYLDGKGTPAIAKELNKRGILTKLNKPWRHGAIAKVLRNYLYTGNMLLQTTYKDNHLTKRKVINNGVLPKYHVENSHEPIIDIDTFNKVQHLIAEKQKNTKVRTARDEKTLYRGMLVCDKCGKDYNRRITKNKAYWICSTYNFYGKESCPSKQIPEDILNEIVKSTLNLSSLNYETVNERLTNIIVQDKQVKLSLKTGQEVTVPWAYQSRSASWTPEMREKARQKAMKGRNKNEKDNSNTTNN

SEQ ID NO: 11078 - protein, 444 aa, Unknown
  Description of Unknown: Integrase B11079 sequence
  cd00338,PF13408,IPR011109,IPR038109,PF07508, PS51736,IPR036162,IPR006119,PTHR30461,G3DSA:3.40.50.1390, mobidb-lite,IPR025827,PS51737,PF00239,SM00857, G3DSA:1.10.10.2600,SSF53041
MSKNDTKIKRVRHRSTLPRKKKVAAYARVSTGKEAMLHSLSAQVSYYSNLIQNKRGWLYMGVYVDEAMTGTSKERPSFLKMMNDARAGKLDMIITKSISRFARNTVTLLETIRELKALNVDVYFEEQRIHSLSADGELVLTFLASYAQEESRSASENLKWSIRNRFKKGLAWNTYVYGYQFSNGTFIKIPKEAEIVRHIFASYLDGKGTPAIAKDLNKRGILTKLNKPWRHGAIAKVLRNYLYTGNMLLQTTYKDNHLTKRKVINNGVLPKYHVENSHEPIIDIDTFNKVQHLIAEKQKNTKVRTARDEKTLYRGMLVCDKCGKDYNRRITKNKAYWICSTYNFYGKESCPSKQIPEDILNEIVKSTLNLSSLNYETVNERLTNIIVQDKQVKLSLKTGQEITVPWAYQSRSASWTPEMREKARQKAMKGRNKNEKDNSNTTNN

SEQ ID NO: 11079 - protein, 444 aa, Unknown
  Description of Unknown: Integrase B11080 sequence
  cd00338,PF13408,IPR011109,IPR038109,PF07508, PS51736,IPR036162,IPR006119,PTHR30461,G3DSA:3.40.50.1390, mobidb-lite,IPR025827,PS51737,PF00239,SM00857, G3DSA:1.10.10.2600,SSF53041
MSKNDTKIKRVRHRSTLPRKKKVAAYARVSTGKEAMLHSLSAQVSYYSNLIQNKRGWLYMGVYVDEAMTGTSKERPSFLKMMNDARAGKLDMIITKSISRFARNTVTLLETIRELKALNVDVYFEEQRIHSLSADGELVLTFLASYAQEESRSASENLKWSIRNRFKKGLAWNTYVYGYEYENGTFKVIKEEAEIVKEIFASYLGGEGTLAIAKKLNERGVLTKLNNKWRHNSIQIILRNYLYTGNSLLQTTYKDNHLTKRKVINNGVLPKYHVENSHEPIIDIDTFNKVQHLIAEKQKNTKVRTARDEKTLYRGMLVCDKCGKNYNRRITKNKAYWICSTYNFYGKESCPSKQIPEDILNEIVKSTLNLSSLNYETVNERLTNIIVQDKQVKLSLKTGQEITVPWAYQSRSASWTPEMREKARQKAMKGRNKNEKDNSNTTNN

SEQ ID NO: 11080 - protein, 444 aa, Unknown
  Description of Unknown: Integrase B11081 sequence
  cd00338,PF13408,IPR011109,IPR038109,PF07508, PS51736,G3DSA:3.40.50.1390,IPR006119,PTHR30461,IPR036162, mobidb-lite,IPR025827,PS51737,PF00239,SM00857, G3DSA:1.10.10.2600,SSF53041
MSKNDTKIKRVRHRSTLPRKKKVAAYARVSTGKEAMLHSLSAQVSYYSNLIQNKRGWLYMGVYVDEAMTGTSKERPSFLKMMNDARAGKLDMIITKSISRFARNTVTLLETIRELKALNVDVYFEEQRIHSLSADGELVLTFLASYAQEESRSASENLKWSIRNRFKMGLAWNTYVYGYQFSNGTFIKIPKEAEIVRHIFASYLDGKGTPAIAKDLNKRGILTKLNKPWRHGAIAKVLRNYLYTGNMLLQTTYKDNHLTKRKVINNGVLPKYHVENSHEPIIDIDTFNKVQHLIAEKQKNTKVRTARDEKTLYRGMLVCDKCGKDYNRRITKNKAYWICSTYNFYGKESCPSKQIPEDILNEIVKSTLNLSSLNYETVNERLTNIIVQDKQVKLSLKTGQEVTVPWAYQSRSASWTPEMREKARQKAMKGRNKNEKDNSNTTNN

SEQ ID NO: 11081 - protein, 444 aa, Unknown; identical to SEQ ID NO: 10095
  Description of Unknown: Integrase B11082 sequence
  cd00338,PF13408,IPR011109,IPR038109,PF07508, PS51736,G3DSA:3.40.50.1390,IPR006119,PTHR30461,IPR036162, mobidb-lite,IPR025827,PS51737,PF00239,SM00857, G3DSA:1.10.10.2600,SSF53041

SEQ ID NO: 11082 - protein, 444 aa, Unknown
  Description of Unknown: Integrase B11083 sequence
  IPR011109,PS00397,PS51736,G3DSA:3.40.50.1390,PTHR30461, IPR006119,IPR036162,PS51737,PF00239,SM00857, cd03768,IPR006118,SSF53041
LEIIGYARVSTDEQEEALSAQVSRLHEAGCSHVIQELVSGGRNDRPGILELIDQIKRGRVGKLLITRVDRLGRDAQFTDTLLAMCAEQKVEVKALDGGLIEAASPSGFVMSRILTTMAEHERRMLSMRIKSQFKVYRSQGRALRRRMTFGYCYNDHHGLRPHPENWDKALHVLELLREKVSFTQVSTTLAKERSVWTPAPSSLQYWLVNPIIRGHLPHLYDKKSGKGWKATWAEINYDQHEALISEADWQELKIALQKRSRSFVNNPNAELPGAIGAPKHALTGSLSCMNCGHNLRRHTSASVAWWSCRHRNCFDRGKVKEQIALQWAADEAIKAARKMAEAAAAPVSLNPVMSLKIADLEATRTLAERNPALLPAVELLEKEIASLQSKPVSSPNIEAYVELIRQPEFFLGATPAEQRALLAGLLQTIRVDREGQYLSVPRMF

SEQ ID NO: 11083 - protein, 443 aa, Unknown
  Description of Unknown: Integrase B11084 sequence
  cd00338,IPR011109,PTHR30461:SF21,PF07508, Coil,PS51736,G3DSA:3.40.50.1390,PTHR30461, IPR006119,IPR036162,PS51737,PF00239, SM00857,SSF53041
MRSLLYKRISEDQTGEEVGIDRQDGACRKLSKKLGATVAESFSDNDISAYSGKPRPGFEALLVAMASGHYDVLVCWHIDRLYRSMRDLERIIDAAEKGNIRIATVNSGDLDLSTSAGRMIARILGSVARQESEHHAERRKEANLARALTGEWRREGSRPFGYTNLGVPLEPEASMIRTAAVEILGGKSLHAVAREWNATGITTVRGVAWTNLHVRRVLTNPRIAALRVHQGTVVGVGTWLPILDEAIWRGLTAFLSDPSRKNSVAFERRYLGSGVYLCGHRTPEADPEDLDSICGRRLYADHPHGKDRSMSYCCRPVAHLGRNGTELDRFVETIALHHLSANAIGTGLRQAENQVDVADLLAQREALQATKDQLATLLRKGILDMAGVERESAILTSQIADLNAQMATAAQGSPLALLLEEGEDPEALADEEKLTERWGKASP

SEQ ID NO: 11084 - protein, 443 aa, Unknown
  Description of Unknown: Integrase B11085 sequence
  PS00397,IPR038109,IPR006119,PS51737,PF00239,G3DSA:3.40.50.1390 ,PTHR30461,IPR025827,SM00857,G3DSA:1.10.10.2600, SSF53041,IPR011109,PS51736,IPR006118,cd00338, PF13408,Coil,IPR036162,PTHR30461:SF3
MKRAAIYARVSSDRQAKEGDSIPAQLEALRKYAKKNKYKIIGEYIDDGISGTKKDRDELQKLLDAVEADKVDIIIFVKLDRWFRSVRHYINTQALLDAHKVDWLAIWEPVYDTTTPAGRLIVNQMMSIAQFEAENTGQRIRQVQAYKVSKKEVISGTVTPGYKIQGKHLVIDPDKADAVRLAFDTFNKTGSYSETIRATYGMGLPVTGNGMKNLLRREIYIGRAHDLDDFAPALIDKDTFDSVQKQIKMQRRPSKTKYDYLFSGLLKCAECGAVMASYSRKRKGRNRALMYRCPKHYQRTFKTCDNSKIVSEAVLERYLTAQFPTLIIDQIETLEAMQTPNTALQRQRIEKKIDRLKELFINDLISIEEYKEDKENLLAELEAIPEQPDTTAIDSLKSLVGLNLDEVYLDLTKPEKRLFWRSVIKEIRFNKSRNFLLISCSAN

SEQ ID NO: 11085 - protein, 443 aa, Unknown
  Description of Unknown: Integrase B11086 sequence
  PS00397,IPR038109,IPR006119,PS51737,PF00239,G3DSA:3.40.50.1390 ,PTHR30461,IPR025827,SM00857,G3DSA:1.10.10.2600, SSF53041,IPR011109,PS51736,IPR006118,cd00338, PF13408,Coil,IPR036162,PTHR30461:SF3
VNVALYIRVSTEEQAQHGLSVEAQTAALEKWAKEHGCTVAGKYVDAGISARKSAAKRPGLQRLLDDVRHGKIDTVLITKLDRWFRNVAEYYKVQEVLEAHGVAWRAIHEDYETQTSSGRLKINIMLSVAQDEADRTSERIRAVFERKKERGEVVSGNVPLGYRLSGKTVALDPETKPAVEAFFHEFLASGSVVCAQRAAAELGLRISRNTAYFMLHNRSYTGFFNGVDGLIPAYLSVADFETIRKGFKTPSKRTKESDAPALFSSLIYCSECGHRYIASYSHTKSRGLERWYQCGARRQGTCSNKAMLREADVERELLRQMDGLLDCRAFGSAQDRAAASEKLAEANALETRIRKLRELYLADLIPLEDYRQEYKSATAQLAALRETLPRASRSLKLAKEMEATGGWRETYDRTDPPGRRSFWRSFVAKITADPAKKLNVELT

SEQ ID NO: 11086 - protein, 443 aa, Unknown
  Description of Unknown: Integrase B11087 sequence
  cd00338,PF13408,IPR011109,IPR038109,Coil, PS51736,G3DSA:3.40.50.1390,IPR006119,IPR036162,PTHR30461, PTHR30461:SF3,IPR025827,PS51737,PF00239,SM00857, G3DSA:1.10.10.2600,SSF53041
MDYSIRVACYERVSTEEQSKHGLSIDAQIAALGRWVSDQHHILVGHYTDAGVSGGKPIDKRPAMWRLLQDIQAGLIDLVIFTKLDRWFRSLKNYYKAQEILDSSHCAWQAIDEDYETLTASGRFKVNIMLSVAENERERTSERIKAVFDYKRAQGRFLTGGRTIPYGYKVQDGQLVIDEATAPIVRDIFHHVLSGMSYKGVFSAIRAAHPEFQHSYSAFRALVMRPCYVGIRNGIPGSCPAYITMDQRNQLLTITGTRSPRRPDQVYLFTGMMRCPECGGKLSAGRTDGYVYYYCRKHRVDKKCPCTISLREDRIERALTASLFQPGQIVVDSVKAAQNAEKHVQTASEIERKMKRLAETYTDGLIDRDTYKSKLAALTEQLETAREAPSRPSEPVSERVREFLRGDVQAVYDRLEKQEKRAFWLKVVHAVTMDADFSILSLY

SEQ ID NO: 11087 - protein, 443 aa, Unknown
  Description of Unknown: Integrase B11088 sequence
  IPR038109,PS00397,IPR006119,PS51737,PF00239,G3DSA:3.40.50.1390 ,PTHR30461,IPR025827,SM00857,G3DSA:1.10.10.2600, SSF53041,IPR011109,PS51736,IPR006118,cd00338, PF13408,Coil,IPR036162,PTHR30461:SF3
MKHAAIYARVSSDRQAREGDSIPAQLDALRKYATENNYAIVGEYVDDGISGTRSDRDELQRLLDDIDNIDIIIFCKLDRWFRSIRHYINTQEILDKHGVGWKAIWESYDTTTPQGRLIVNQMMSFAQFEAENTGQRIRQVFAYKASKGEVLTGVTPAGYRIQDKHLVPSEVAESVRTAFREYSRTGNMNATLRACSVLPGLPRTNASFKRMLQNPVYTGKRHGHDDYCEPLVDQATFDHVQHLLSRNIKISQKETYIFSGLIRCTECGTLLGARTRRCNHGKRVAFHTYCCRKHYGMKPPVCPNTKIITETVFEEELISRLRPLINGEVLRYEVEAAPIRDNKTKISAVEKKLTRLKDLYLNELITLEEYRHDREELEEQLRDLREKEIPRTRDLSALKDLLKTDIEELYWEMSLEEKRRFWRAIIKEIRWNINREFEVIFLT

SEQ ID NO: 11088 - protein, 443 aa, Unknown
  Description of Unknown: Integrase B11089 sequence
  cd00338,PF13408,IPR011109,IPR038109,PF07508, Coil,G3DSA:3.40.50.1390,IPR006119,PTHR30461,IPR036162, PS51737,IPR025827,PF00239,SM00857,G3DSA:1.10.10.2600, SSF53041
MSQLATKATPAAFLGRVSTQNQAKLDKQGLPEQRRAAQAYAEANDFEIVATFEDVISGASEARPAFYEMLSRSYEFKAVIVSHTDRLARDLELGLRHMRLIREAGLELHSAARGLVEKGIVSGVDMLLGEHEKERIKERTQNGLIAEARDGKLPNGLHLFGYHNVPGQNRGVINPDAAAVVRRVFDLGAQGLSYRAIARVMMATRALTPLGKESWYQHTVRRMICNTAYKGEFVWTHKRGGRFVLPVPAIVSAEEWAKAQRHKRGPPVQVPLPLSGRLRCGRCGAAMGVRKVDRGGKHVYLYYRCGSAGTPSGACGVGLVRRDKLEPKAEILLRDTLQHPDLLRDLTRPDTERDQHEQRRLDDLGERAERVKEMRLDGLYSREEARIKVAEIDAERRALTQQDDTEFPLEEFALAAREMPFAELLELTQPTFYVQGDVLTLEF

SEQ ID NO: 11089 - protein, 443 aa, Unknown
  Description of Unknown: Integrase B11090 sequence
  IPR011109,IPR038109,PF07508,PS51736,G3DSA:3.40.50.1390, IPR006119,IPR036162,PTHR30461,PS51737,PF00239, SM00857,cd03768,G3DSA:1.10.10.2600,SSF53041
MRCAIYTRKSSDERLNAEYNSLDNQRAYCSAYIMSQAGDGWEESPKTYDDGGFSGGNLKRPGLTALRADLAAGKIDIVVVYKIDRLSRSLRDFANLIAEFDQHGVTFVSVTQSFNTASAMGKLTLNILLSFAQFERELTGERLKDWFAGARARGMWVHGKPPYGYRAVDLRLEIDESEAACVRYAFAHYSQYGSAKILASVLHQRGWLNNYQRPWRKRTLTDMLQNPVYIGKLRHHGKLLPGTHEPIVTMSAWRKVQDAIAASARRRKPLSRPPVLGLLKGLIVDANGAPMIHVPVHHRNGKIYRYYIPSDKRYGVGACSMHRFQAGPLENCVLSLLERLTGRPQVYPDMYVACGQIRKIVRQVRVWPDRMSVTMVTGAMLEAEHAGRMQITHKPRTPPEWLPRAVELMEQGATPHKTARDMGISIGSFYRILHRWGMAQYVK

SEQ ID NO: 11090 - protein, 442 aa, Unknown
  Description of Unknown: Integrase B11091 sequence
  cd00338,PF13408,IPR011109,IPR038109, PF07508,Coil,PS51736,G3DSA:3.40.50.1390, PTHR30461,IPR006119,IPR036162,PS51737, IPR025827,PF00239,SM00857,G3DSA:1.10.10.2600,SSF53041
MIEDAKNGKIDMILVKSISRYARNQIDSITIMRELREKGVKIYFEKEKIDSSDPKADFTLSVLSAVAEEESRNISTNIRWSNQKKMQRGEFKVNISQMLGLERDKEGKITIEPIGAQIIQGIYRDFLNGMTFKDIALELNARGIKTKTDKPYQGITIKRILENEKYCGDAIYMKTYSQDFLANKRVKNTGQAPQYYVQNNHPAIISKEKFEMVQTEINRRNNLRSDSKSGKGKYVSKYAFSGLVICGTCGSKFRRFSYEQNGKRFDKWICINHQTNKESNCKMKAIYERDLENAFMNGLNKIINTNYTTKLERDIDKTIKGNQETQKIETLNKTLKELQDIAYNIAKEFKDNEIDITTYTIKINETMKDIDSITTELNKIKNKTAIESLHKHTMEQIRKFINKSLTEFDKDIFRALVDEVIIINQVQARFILKTGMEFIENL

SEQ ID NO: 11091 - protein, 442 aa, Unknown
  Description of Unknown: Integrase B11092 sequence
  PS00397,IPR038109,IPR006119,PS51737,PF00239,G3DSA:3.40.50.1390 ,PTHR30461,IPR025827,SM00857,G3DSA:1.10.10.2600, SSF53041,IPR011109,PS51736,IPR006118,cd00338, PF13408,Coil,IPR036162,PTHR30461:SF3
MKSAALYLRVSSDKQAKEGDSIPAQREALREYAKSHHMRIYREYVDDGVSGTKADRDELTKLLDDVRAGHVDIILVTKLDRLYRSIKHYLNMMDVLDRYNVGWLAVWEPIYDTTTPQGRLIVNQMMSIAQFEAENTGQRVRAVLDYKINHGEVASGSVPFGYVIRDKRLVPGPHADDAREIFRHYALHGNLHKTARLSASVGGPVSTSGIKSMLRNEKYVGVARDNPQFCEAIIDKPLFDDVQRKLSMNVKISQKHTYIFSGLVKCAECGASMGVNRRKRKRGNCITIEIGYRCPVYYQRGDRRCNNAKVLNENVLERHLLAVLRPELEKHISNYEIREKPHRDAERAKKAIEGKLSRLKDLYVDGLIDMAEYRADRERLESELSAITDAPQKDLTELKHLLTLPIREIYETFSREEKRFFWRSVIKEIRFGVDKHIDIIFV

SEQ ID NO: 11092 - protein, 442 aa, Unknown
  Description of Unknown: Integrase B11093 sequence
  IPR038109,PS00397,IPR006119,PS51737,PF00239, cd03768,G3DSA:3.40.50.1390,PTHR30461,IPR025827,SM00857, G3DSA:1.10.10.2600,SSF53041,IPR011109,PF07508,PS51736, IPR006118,PF13408,Coil,IPR036162,PTHR30461:SF3
MIALYVRVSTHEQAENGYSIDEQIDRLVAYCNALGYDSYKVYKDPGFSGATTDRPALQNLINDVKLHHVHKVLVYKLDRLSRSQVDTLNLIENVFLKNDCDFNSISENFDTATPFGRAMIGILAVFAQLEREQIKERLSMGKIARAKKGLYKGGGLAPIGYDFIDSRLIVNESEREQVQLIYDMFESGGTYRGIVKFMNDNGYRHKYGQWHRNTLTNVLQNPIYTGTMIYNGETYEGIHEPIINQRQFDNVQAIIKRRKGQRQDNRASLLGNILVCGRCGAKLHAHRYSVGYDYYWCDNKRQCHNRSYRIDKLDTIILDEIRKLKIDPDFKPSLKSNHTDTKRINEQIARIDSKIARMIDLYGLENVPIDILENKLNELNEQKRNLIDQLNRVPDKLDFEQVNNLLIDFQTLVDTAEMKPIVNLLIDRIVLEDDTIKIEWNF

SEQ ID NO: 11093 - protein, 442 aa, Unknown
  Description of Unknown: Integrase B11094 sequence
  cd00338,PF13408,IPR011109,IPR038109,PF07508, PS51736,G3DSA:3.40.50.1390,IPR006119,PTHR30461,IPR036162, PTHR30461:SF3,PS51737,IPR025827,PF00239,SM00857, G3DSA:1.10.10.2600,SSF53041
MAAYCRVSTDQLEQLSSYEAQVAYYTAYITNHPDYEFGGIYADEGISGTNTKKREQFNKMIEDCRAGKIDMIITKSISRFARNTLDTLNYVRQLKELGIGVIFEKENINTLDSKGEVLLTILSSLAQDESRSISENSTWGIRRRFEQGKLHINHTKFLGYDKDEEGNLVINEKQAKIVRRIYKDYLDGKGPNRIARELEEEGVPNWNGKPKWYESSIRKILSNEKYKGDALLQKTYTIDFLTKKRAVNNGEVPMYYVEESHPAIIDKEMWEAVQLEMERRRAFAEKYNISKLDYATVENPFAGRVICGHCGSAFGRKVWNSTDERLRRVVWRCNNKYKVKGKKSCENKHIDDKVLYQAFVNTFNVMVDNKDYFIEMWKDKLNSENVLVRYRTKQFMGILADAEIVEDFDVDMYFRLVEKMTVFEGEKIIVSLLDGTEIEVVI

SEQ ID NO: 11094 - protein, 442 aa, Unknown
  Description of Unknown: Integrase B11095 sequence
  IPR038109,PS00397,IPR006119,PS51737,PF00239,G3DSA:3.40.50.1390 ,PTHR30461,IPR025827,SM00857,G3DSA:1.10.10.2600, SSF53041,IPR011109,PS51736,IPR006118,cd00338, PF13408,Coil,IPR036162,PTHR30461:SF3
MIAALYIRVSTTDQAQHGYSLEAQESLLRSYAAQNGMVVYDLYADKGKSANKALSKRTELNRMLHDAELKKFDCILFKDITRWSRNSAQYYAVQDKLDRYGVYWLAVEQPYLETKTPTGRFQVTVMLGTAQLESENTSQRIKFVMANRVANGGAISGTHDLPLGYMTVNTEQGKRVVKDPSVQDAVSDMFDYYRRTQNQLATIRYMKDQYGITIWQASFSKIMSNTMYYGEYRGNPDYCEPYLTKAEWLDLKRRKPIYRTQKHNSEYLFRGLLRCPVCGRNMVGRTNSYIYYVCPYHLSYHACEYSVWHRQDRIEAFLLERIKPELDAYREKPQMKPPKKDKCEKQQKSLQAKLERLKNLYIDGDISKDAYEKRRDAIRAELGKLESDHAELDYDKLNAILNSGWRSLYDRIDPEDRAHFWRTILHHIEIKPDGTYKPLFNG

SEQ ID NO: 11095 - protein, 442 aa, Unknown
  Description of Unknown: Integrase B11096 sequence
  IPR011109,IPR038109,PF07508,PS51736,IPR036162, IPR006119,PTHR30461,G3DSA:3.40.50.1390,PTHR30461:SF3,PS51737, PF00239,SM00857,cd03768,G3DSA:1.10.10.2600,SSF53041
MMDINTRQNRRLRCAIYTRKSSEEGLDMEFNSLDAQREACEAYIASQKSEGWVATRERYDDGGFSGGTLERPGLKQLLADIDDGLIDVVVVYKIDRLSRSLMDFSKLVEVFDRNGVTFVSVTQSFNTTTSMGRLTLNILLSFAQFEREVIGERIRDKVAASRKRGIWMGGYVPLGYDVQDRKLLVNDVEAASVRRIFERFVELGSATVLARELRREGFRNKQGTLIDKGYLYRLLNNRVYRGEAVHKGKAYPGEHDAIIDEDLWDRAHSILQESPRKRANNSRSRTPALLKGLIFSDTGAAMTPTSTKKGAKLYRYYVSMDVIRNRETGEETAPMRLAAGMVEDAVVTEVRRILQTPEVVTQVIAALKTEKGAVSEADAIAALHDFTALWAQLFPAEQARIIQLLIRRVTVTAAGLEVDIRREGIAGVIREMVAPHNLEAAE

SEQ ID NO: 11096 - protein, 442 aa, Unknown
  Description of Unknown: Integrase B11097 sequence
  cd00338,PF13408,IPR011109,IPR038109, PF07508,PS51736,IPR036162,IPR006119, PTHR30461,G3DSA:3.40.50.1390,PTHR30461:SF3,PS51737, IPR025827,PF00239,SM00857,G3DSA:1.10.10.2600,SSF53041
VKKVTKIKAKQAPAAEKAKLRVAAYCRVSTDTDAQLESLEAQKQHYESYIACRDDWTFAGLYYDEGITGTKKDKRPELMRMIRDCEAGKIDFVITKSISRFSRNTTDCLEMVRKLLALNIPIYFEKENLNTGSMESELFLAILSSMAEGESVSISENSKWSIQKRFKNGTFKISYPPYGYDWDGEQMVVNPEQAENVRWIFDQVLAGRGTQDIAKDLNAKGICTKKGNRWTAHTVRTLIVNEKYTGDVIFQKTYTDSQFNRHVNYGERDQYALTDHHEAIVSREVFAAAGEVIRQHSKEKGIVKGCGKYLNRYCFSGKIICSECGDVFKRRTHYCSEYKYIVWTCSTHLDDKSKCSMKFIHDDALKAAFVTMINKLIFARKLILKPYVQALRKGNNDDSLHRIQELQTLLMENSQQKERLTGFMAQGYIDQILYNEEMNTLL

SEQ ID NO: 11097 - protein, 442 aa, Unknown
  Description of Unknown: Integrase B11098 sequence
  cd00338,PF13408,IPR011109,IPR038109,PF07508, Coil,PS51736,G3DSA:3.40.50.1390,IPR006119,IPR036162, PTHR30461,PS51737,IPR025827,PF00239,SM00857, G3DSA:1.10.10.2600,SSF53041
MIEDAKNGKIDMILVKSISRYARNQIDSITIMRELREKGVKIYFEKEKIDSSDPKADFTLSVLSAVAEEESRNISTNIRWSNQKKMQRGEFKVNISQMLGLERDKEGKITIEPIGAQIIQGIYRDFLNGMTFKDIALELNARGIKTKTDKPYQGITIKRILENEKYCGDAIYMKTYSQDFLANKRVKNTGQAPQYYVQNNHPAIISKEKFEMVQTEINRRNNLRSDSKSGKGKYVSKYAFSGLVICGTCGSKFRRFSYEQNGKRFDKWICINHQTNKESNCKMKAIYERDLENAFMNGLNKIINTNYTTKLERDIDKTLKGNQEAQKIETLNKTLKELQDIAYNIAKEFKDNEIDITTYTIKINETMKDIDSITTELNKIKNKTAIESLHKHTMEQIRKFINKSLTEFDKDIFRALVDEVIIINQVQARFILKTGMEFIENL

SEQ ID NO: 11098 - protein, 441 aa, Unknown
  Description of Unknown: Integrase B11099 sequence
  IPR011109,IPR038109,PF07508,PS51736,G3DSA:3.40.50.1390, IPR006119,IPR036162,PTHR30461,PTHR30461:SF3,PS51737, PF00239,SM00857,cd03768,G3DSA:1.10.10.2600,SSF53041
MEGMVNPKRRLRCAIYARKSSEEGLDMEFNSLDAQRESCEAYVASQRSEGWATIRERYDDGGFSGGTLDRPGLKRLLADIEDGLIDVVVVYKIDRLSRSLMDFSKLVEVFDRNEVTFVSVTQSFNTTTSMGRLTLNILLSFAQFEREVIGERIRDKVAASRKRGIWMGGYVPFGYDVQDRKLVANAAEAAAVRRIFERFIELGSATTLARELRAQGFRNKQGTLVDKGYLYRLLNNRVYRGEAVHKGKAYPGEHAAIIDAELWNHVHAILQESPRKRANNSRMQTPALLKGLIFSETGAAMTPTATRKGTKLYRYYVSMDVIRNREGGESEVPSRLPAGMVEDAVVTEVRRIVQTPEVVTKVLAALQQDGPQVREAEVIAALNDFGALWNQLFPAEQARIIQLLVRRVTVTADGLAVDVRADGIGGVIREMIAPARMEAAE

SEQ ID NO: 11099 - protein, 441 aa, Unknown
  Description of Unknown: Integrase B11100 sequence
  cd00338,PF13408,IPR011109,IPR038109, PF07508,PS51736,IPR036162,IPR006119, PTHR30461,G3DSA:3.40.50.1390,PTHR30461:SF3,IPR025827, PS51737,PF00239,SM00857,G3DSA:1.10.10.2600,SSF53041
MPVFVSTDEQAIHGLSIDSQLADLREYCKANGHIIVGEYVDGGISGKKPPNKRPALSRFFADLESGLSVDALLFTKLDRFFRSVKLYYQAVDVLEKYKVAWQAIQEDYETLTASGRMKVNIMLSVAENEADRTGERVRTVFNRKIQQGEWLAPQGLCIGYDLIGKHLVPNHDAPAIKAAYEYYLQNHSVLATADYLREEYGVDCMTTPLRRILKNRLYLGEYRGNTDFCEPIVPVELFDAVQQEMKRRSVRSNQSGRVYLFAGLLRCASCGCTLGGMTSKRGNHEYHNYRCNNAVLNHRCSNHTFISEKKVEEFVLDNIAPTLDALIAKTKAEFKPKQPKRKPPDTAKVQAKLDRLKDLYVDGLIDKQQYLADRQKILDTLSQPDSEPITPDYEALRQLIRQDFRSRYALLNASEQRAILRTLIDHIDIDESRNMRLFFKA

SEQ ID NO: 11100 - protein, 441 aa, Unknown
  Description of Unknown: Integrase B11101 sequence
  cd00338,PF13408,IPR011109,Coil,PS51736, G3DSA:3.40.50.1390,IPR006119,PTHR30461,IPR036162,IPR025827, PS51737,PF00239,SM00857,SSF53041
LNVLRAALYPRVSTEEQAKFGLSIHDQQNDLEEYAKANGMIVVGIYPDAGFSARKKIEKRPAMMELLAAVQRDEIDIILVTKLDRWFRNIGEYYKVQEILEAHNVCWKTIYEDYDTSSAAGRLKINIMLAVAQDEADRTGERIKKVLDAKKSRNEVCTGHLPKGYKIDGKFAVIDREAEPDVKTFFSVFLETGSIHNAISAVPNLKLQYRTASKMLDNRGYVGEWHGLSIPPYLTAEEFDRVQTLRRRLQRKVAQNRTYIFSGLLVCGDCGRRIGGRPRKLVNGESYVYSCDGAYQYKGCPNHANIMEATIEQYLLETIDAKIEIFANTKDEPKQNSKEIEEKAKSLRKKLAKLSDLYLDDLIAKDEYAKRYADLTAQLESAESLLRKPPAKSAKDLSEAFFSGWQDIYKELSRENKKVFWKLKLKEIRLYQDRRIDFDFL

SEQ ID NO: 11101 - protein, 441 aa, Unknown
  Description of Unknown: Integrase B11102 sequence
  cd00338,PF13408,IPR011109,Coil, PS51736,G3DSA:3.40.50.1390,IPR036162,IPR006119, PTHR30461,PS51737,IPR025827,PF00239, SM00857,SSF53041
LNVLRAALYPRVSTEEQAKFGLSIHDQQNDLEEYAKANGMKVVGIYPDAGFSARKKIEKRPAMMELLAAVQRNEIDIILVTKLDRWFRNIGEYYKMQDILEAHNVCWKTIYEDYDTSTAAGRLKINIMLAVAQDEADRTGERIKKVLDAKKSRNEVCTGHLPKGYKIDGKFAVIHREAEPDIKTFFSVFLETGSIHNAISAVPNLKLQYRTASKMLDNRGYVGEWHGLTIPPYLTAEEFARIQTLRRRLQRKVAQNRTYIFSGLLVCGDCGRRIGGRPRKLVNGESYVYSCDGAYQYKGCPNHANIMEATIEQYLLETIDAKIEIFANTKDEPKQDSKEIEEKAKSLQKKLAKLSDLYLDDLISKSEYAKRYADLTAQLESAEALLRKPPAKSAKDLSEAFFSGWQDIYKELSRENKKVFWKLKLKEIRLYQDRRIDFDFL

SEQ ID NO: 11102 - protein, 441 aa, Unknown
  Description of Unknown: Integrase B11103 sequence
  IPR011109,Coil,PS51736,G3DSA:3.40.50.1390,IPR006119, IPR036162,PTHR30461,PS51737,PF00239,SM00857, cd03768,SSF53041
MAPLVVGYARVSKEEQADALPAQVSRLEAAGCDRVISDLESGRSNDRDGLLEVMALVRAGEVREVVVDRLDRLGRDATFADALLAECSAHGVTVRALVGGTVETATPQGFLMARLQTSLAEMESRMLSLRIRRQFTVYRAEGRHLRRRKPFGYRSGPDHRLAPDPEQWPQALRIIDELRKVGSFSGVSTKMPEWCSWTPAATNLQGWFCNPVIRGHIGHHYDKRSGKGWGQRWGEIRYDQHPALISEADWRDLADMLRRPRNRFAHGASTETRHGLTGLLRCASCGYLLRRNSSAGVIWWRCRHRLCNERGAIKEAEVLPVVVRACIAEAYRLAQAATAPEGPDPAIAGMVDELELMERMAARNPDNRAMAAAVQEQRQKIETLKRKDRQSVDVAAFEVMQHPMFFTDATPEEQRALFGAVLRSVSIARRGLVAGIQVRTT

SEQ ID NO: 11103 - protein, 441 aa, Unknown
  Description of Unknown: Integrase B11104 sequence
  IPR038109,PS00397,IPR006119,PS51737, PF00239,G3DSA:3.40.50.1390,PTHR30461,IPR025827, SM00857,G3DSA:1.10.10.2600,SSF53041,IPR011109,PF07508 ,PS51736,IPR006118,cd00338,PF13408,Coil,IPR036162,PTHR30461:SF3
MRVGIYARVSTDIQAKEGDSIQAQLSALREYAKKNGYEVVGEYIDDGISGTLLNERDELQRMLDDVRDGKIDLLIFTKLDRYFRNLKHYLNTQEVLDKYNVPWIAIWENYETRTPQGRLMVNQMLSFAQFEAEQTGQRINQVFSFKKLHKEVLSGKIPYGFKIQDKHLVIDPEKADIVRRVFQTYISTGGVSETLRRTEGLGLPRTQRAIKLLLQNRKYIGECYGIENYHEAIIDKDTFNLVQDMLKRNVRQTKFRTYIFSGLCTCSDCGRRLIGTTDKIKPKNERYKVYRCMGHYRAIKDCINSKSLNEKKLEKYLVENLKELAFGDISVKDKRKATNFEKKIASTEKKISRLKELYLNELITLDDYKHDLAAYKADIDGFKAEARKYKGTDKKALNDLVGRNLADWYWTLTEDERRVIWRSVIDQIYFDNDKNIKIVFR

SEQ ID NO: 11104 - protein, 441 aa, Unknown
  Description of Unknown: Integrase B11105 sequence
  cd00338,PF13408,IPR011109,IPR038109,PF07508, PS51736,G3DSA:3.40.50.1390,IPR036162,PTHR30461,IPR006119, PTHR30461:SF3,PS51737,IPR025827,PF00239,SM00857, G3DSA:1.10.10.2600,SSF53041
MSAFVSTDEQAVHGLSVDAQLADLREYCQAHGHIIVGECVDGGISGKKPPNKRPALSRFFADLESGLSVDALLFTKLDRFFRSVKLYYQAVDVLEKHKVAWQAIQEDYETLTASGRMKVNIMLSVAENEADRTGERVRAVFNRKIQQGEWLAPQGLCIGYDLIDKHLVPNHDAPAIKAAYEYYLQNHSVLATADYLREEYGVDCLTTPLRRILKNQLYLGEYRGNTDFCEPIVPVELFDAVQQEMKRRSVRNNQSGRVYLFAGLLRCASCGCTLGGMTSKRVKHEYKNYRCNNAVLNHRCRNHTFVSENKVEQFVLDNIVPTLDALIAQTEADYKPKQTKRKPLDTAKVQAKLDRLKDLYVDGLIDKQQYLVDRQRILESLQQPDSEPPQPDYTQLRQLIGQDFQSRYDALNAAEKRAFLRTLIDHIDIDESRNMRLFFKA

SEQ ID NO: 11105 - protein, 441 aa, Unknown
  Description of Unknown: Integrase B11106 sequence
  cd00338,PF13408,IPR011109,Coil,PS51736, IPR036162,IPR006119,G3DSA:3.40.50.1390,PTHR30461,PS51737, IPR025827,PF00239,SM00857,SSF53041
LNVLRAALYPRVSTEEQAKFGLSIHDQQNDLEEYAKANGMKVVGIYPDAGFSARKKIEKRPAMMELLAAVQRDEIDIILVTKLDRWFRNIGEYYKVQEILEAHNVCWKTIYEDYDTSTAAGRLKINIMLAVAQDEADRTGERIKKVLDAKKSRNEVCTGHLPKGYKIDGKFAVIDREAEPDVKTFFSVFLETGSIHNAISAVPNLKLQYRTASKMLDNRGYVGEWHGLSIPPYLTAEEFDRIQTLRRRLQRKVAQNRTYIFSGLLVCGDCGRRIGGRPRKLVNGESYVYSCDGAYQYKGCPNHANIMEATIEQYLLETIDAKIEIFANTKDEPKQNSKEIEEKAKSLQKKLAKLSDLYLDDLIAKDEYAKRYADLTAQLESAESLLRKPPAKSAKDLSEAFFFGWQDIYKELSRENKKVFWKLKLKEIRLYQDRRIDFDFL

SEQ ID NO: 11106 - protein, 441 aa, Unknown
  Description of Unknown: Integrase B11107 sequence
  cd05922,IPR011109,IPR038109,PF07508, PS51736,G3DSA:3.40.50.1390,IPR006119,IPR036162, PTHR30461,PTHR30461:SF3,PS51737,PF00239, SM00857,cd03768,G3DSA:1.10.10.2600,SSF53041
MRDGTAPVRRLRCAIYTRKSSEEGLDMEFNSLDAQRESCEAYIASQRAEGWVCMRERYDDGGYSGGTLDRPGLKMLLEDIEAGLVDVIVVYKIDRLSRSLMDFAKLVEAFDRNNVTFVSVTQAFNTTTSMGRLTLNILLSFAQFEREVTGERIRDKFAASRAKGMWMGGFVPMGYDVIDRKLVINDAEATTVQRLFKRFVTLGSATLLTRELVANGAMTKRGKPIDKGFLYKLFRNRLYLGEAVHKGTSYPGEHQGIIDQQLWDQVHAILQESPRQRAANTRAQVPALLKGLIFTDRGIAMTPTFTKKGSRHYRYYTSMDAIRNRACEGREAFVRLNAGVVEGAVVQQIRKLVRTPEIAAKVAVVLQDCDSVSNDNDVVSALSDFDSLWASLFPAEQARIARLLIDRVIVSQQGLTVDLRTDGLSSVVRDMLAPRPKEKVA

SEQ ID NO: 11107 - protein, 441 aa, Unknown
  Description of Unknown: Integrase B11108 sequence
  IPR011109,IPR038109,PF07508,PS51736,G3DSA:3.40.50.1390, IPR006119,IPR036162,PTHR30461,PTHR30461:SF3,PS51737, PF00239,SM00857,cd03768,G3DSA:1.10.10.2600,SSF53041
MTKPPEKSKVVRKLRCAVYTRKSSEEGLEQEFNSLHAQREACEAYIVSQRSEGWVLVRDQYDDGGISGGTLERPGLKRLVEDIEDGLVDVVVVYKIDRLSRSLADFAKLVEVFDRNGVTFVSVTQSFNTTTSMGRLTLNILLSFAQFEREVTAERIRDKVAASRKKGMWMGGVPPYGYRVENRKLLVNEDAAADVRWIFCRFLEIGSCTELARDVGTRGIRTPRGNRIDKKYIYRMLRNRAYIGEAVHKGDSYPGEQDAIIDREMWDKVHTILQESPRKRAARTRADMPALLKGLLFGPDGAAFSPTHTRKGSKLYRYYVSQTVLKHGAGSCPVGRVPAGEIEAAVVDQLRAVFHQPEIVAGTLKAARAYVDDIAEAEARAALRQLDPLWDELFPAEQARIVALLVERVDIATDGLNVRLRVDGLMGLAREVLAGGIGEAA

SEQ ID NO: 11108 - protein, 441 aa, Unknown; identical to SEQ ID NO: 10042
  Description of Unknown: Integrase B11109 sequence
  cd00338,PF13408,IPR011109,IPR038109, PF07508,PS51736,IPR036162,IPR006119, G3DSA:3.40.50.1390,PTHR30461,PTHR30461:SF3,IPR025827, PS51737,PF00239,SM00857,G3DSA:1.10.10.2600,SSF53041

SEQ ID NO: 11109 - protein, 441 aa, Unknown
  Description of Unknown: Integrase B11110 sequence
  cd00338,PF13408,IPR011109,IPR038109,PF07508, PS51736,G3DSA:3.40.50.1390,IPR006119,IPR036162,PTHR30461, mobidb-lite,PTHR30461:SF3,IPR025827,PS51737,PF00239, SM00857,G3DSA:1.10.10.2600,SSF53041
MRKEEKMERIIHKVETSPGKLPARLRVVAYCRVSTEKETMQKSLSAQISHYSGIIQKNPTWQYAGVYADEGITGTKDNRAEFQRLLADARAGKVDIILTKSISRFGRNTLNLLKTVRELKDLGVDIWFERENIKTKSAEGELLLTVLASFAQAESEAVSENCKWRIRQRLSKGELVSLRHIYGYVIEKDNIKINTKQAKIVNRIFNEYVNGMGCKEIASFLNSKKVKSLNGGKWTADRIAKMLRNEKYIGDAMLQKKYVKDHLTKKDAINHGELPRYYVTHNHPPIISKELFTLANQKMDGNAAKSKGKSKRTHPPLSGMLFCEACGAAYTRKTTHHKAAWVCSTYKNKGKDACLSKRIPEDILLHLCTKVIKENAFDDIRFRDKVERITAAEDILTFHFRGNRKVNITWSNTSRKEVWTESMKDSAKERSLKQWQHRKSK

SEQ ID NO: 11110 - protein, 440 aa, Unknown
  Description of Unknown: Integrase B11111 sequence
  cd00338,IPR011109,PS00397,IPR038109,PF07508, Coil,PS51736,IPR036162,IPR006119,PTHR30461, G3DSA:3.40.50.1390,PS51737,PF00239,SM00857,G3DSA:1.10.10.2600, IPR006118,SSF53041
MRIAGYLRVSTLKQAEDGVSIEMQKRIIINHCEMLEIISDESEIKWYIDDGWSAKSLERPAMRSLIGDIKTRQMDLIIAYDMSRISRDIMDMMSLLKMLDKYGVSLKCLYDNPSFETASERFMTTIKMATHQYERERTSERTRDAIINIAESGRYPFSGMKHYGYMKDDDGRMVLNPEEASLVLEIFQMACEGCRMREIVRMANIRQDKEIFTMGRIRRIIKNRKYTGTISVYGKDYDGLIPAIITEEIQKKAESNLVTHSHKSDRYIFTSVLICRRCGSTLLCKSAYGKMKKMYLYYFCPTCKKRIRQSDVEDELSEFKVDNATKDFKNRYNALRDIETLLLSRRSKLNDKFLEGAVSVENMQIMLTAIENELRDARRKRSAIQSLDAVRVFSDFEDAEQKKAFVEMHIRRIVIDIQEKKVLTIEFKESETSAEKNKKI

SEQ ID NO: 11111 - protein, 440 aa, Unknown; identical to SEQ ID NO: 9754
  Description of Unknown: Integrase B11112 sequence
  cd00338,PF13408,IPR011109,IPR038109,PF07508, PS51736,IPR036162,IPR006119,G3DSA:3.40.50.1390,PTHR30461, mobidb-lite,PTHR30461:SF3,PS51737,IPR025827,PF00239, SM00857,G3DSA:1.10.10.2600,SSF53041

SEQ ID NO: 11112 - protein, 440 aa, Unknown
  Description of Unknown: Integrase B11113 sequence
  cd00338,PF13408,IPR011109,IPR038109,Coil, PS51736,IPR036162,IPR006119,G3DSA:3.40.50.1390,PTHR30461, IPR025827,PS51737,PF00239,SM00857,G3DSA:1.10.10.2600, SSF53041
MSVVLRAALYPRVSTEEQKKFGLSIHDQQNDLEEYAKAHNMKVVGVFQDAGFSARKKIEKRPAMLQLLEAVKHDEVDIILVTKLDRWFRNIGEYYKVQEILEAHNVSWKTIYEDYDTSTAAGRLKINIMLAVAQDEADRASERIKRVLDAKKERNEVCTGHLPKGYKIEGKFAVIDKETEPVIRRYFSTFLETGSITKAMDAAPELNLKYQTASQMLDNPGYMGDWHGIKLPPYLTPQEFQRVQDLRTRITRKSPYNRTYIFSGLIVCGECGRRMTGHPSPRPSGACSYSYYCQGSAQRKGCNNGNFTVEWKIEDYLLSTIDEQIQVKLQAKPRQEPKANQDVQLKALQKKLSKLSELYIDDMISKADYSKKYAELTSQMDEITQVKSQSRAPEEIATLFSAGWQEIYKQLNKENKQAFWKLKIKEIRLYKDRRIEFDFL

SEQ ID NO: 11113 - protein, 440 aa, Unknown
  Description of Unknown: Integrase B11114 sequence
  cd00338,Coil,PS51736,G3DSA:3.40.50.1390,PTHR30461, IPR006119,IPR036162,PTHR30461:SF3,PF00239,SM00857, SSF53041
MINCAIYPRKSKANDNSQSMEQQIADCTEYIRRNYTEYSITVYDGDYALTGHSTAKRKDFQRMMDDVRAKKIQLVVIMRYDRIARNMRDFCNLYHDMEVNGCNLVSVSQQIDTGTPYGKNFMYQMASMAELEWAIISERYKDTAKYKREHGYAYTGRVPYGYMIEKQADGHKRVVKDPDHDAMKVFDFYQKYKNKAKTVEYVRENFKSNFTYDMLRNMLETDMYTGKVSGNDHFCEPYLTDEEWDKIKNIKIQKITPSNKTYLFSRLVQCPICGNTMQSTFTGSRQLQYYRCGYVAHRKVHDGLLVPETALETALLSQISSFLKEKTVSAKIIDSPPKKQFESQIEALKKQCERLNYMFEKGRIDVDEYERKFDNIQKQIANLKPQKAVDYRKIKSNLCAGWQETYAALDSAHKKIFWNNLIEKIIINQDKQIIDIIFNT

SEQ ID NO: 11114 - protein, 440 aa, Unknown
  Description of Unknown: Integrase B11115 sequence
  IPR038109,PS00397,IPR006119,PS51737, PF00239,G3DSA:3.40.50.1390,PTHR30461,IPR025827, SM00857,G3DSA:1.10.10.2600,SSF53041,IPR011109, PS51736,IPR006118,cd00338,PF13408,Coil,IPR036162,PTHR30461:SF3
MNVILYVRVSTEEQSRSGLSLETQEKALKEYCERNNHTIIDIYRDAGFSARKPYNKRPEMMRLISDLKERKPQKILFTKLDRWFRNIKEYYKVQEILDAHDVAWSAIWENYNTDTASGRLHVNIMLSVAQDESDRTSERIKSIHHAAIMRGQPISGIQPIGFKVDVIDGKKRVVHDPEQSAMLIELIEQFELHQSLHVVTRYINTKYNRASAPANYKKILTNPMLYGKYKGNDNYTEPYITKERFDDLQQIIQRNIRVSDKRRTYLFSGLIRCPVCDCALGGCYDGARMYYRCRKRYNATCQSKHNVSELRVERYLLDNIRDLFDGYLLRWTVKHNRRKKEDPERYKKQLERLNDVYIDGNITKEQYRQRTKALKDKIAELNRSDHGSLQLSKLKNLLTSDFERDYNLLNREHKRSFWRQIIKQIVVDLDGHPVDVIFLD

SEQ ID NO: 11115 - protein, 440 aa, Unknown
  Description of Unknown: Integrase B11116 sequence
  IPR011109,IPR038109,PF07508,PS51736,G3DSA:3.40.50.1390, IPR036162,PTHR30461,IPR006119,PTHR30461:SF3,PS51737, PF00239,SM00857,cd03768,G3DSA:1.10.10.2600,SSF53041
MKDVSTKPARRLRCAIYTRKSSEEGLEQEFNSLHAQREACDAYIASQKSEGWALVRDQYDDGGISGGTLERPALKQLLADIEDGLVDVVVVYKIDRLSRALMDFSKLVEVFDRNGVTFVSVTQSFNTTTSMGRLTLNILLSFAQFEREVTAERIRDKVKASRMKGMWMGGNVPLGYDVRDRKLVVNTEEAAKVGEIFTRFVEVGSATILARELRSEGTLNKRGKLIDKGYLYRLLNNRVYRGLAVHKGKAYPGEHTAIIDERLWDQVHDIFGESPRKRANNSRSQTPALLKGLIFTATGAAMTPSSTKKGARRYRYYVSMDLLKNRETPDDGIPRRLPADIAEGAVITEIRRVLRTPETTAQVIAKLDRDDIPEADAIAALQQFPQLWDQLFPAEQARIIQLLVRRVTVTAEGLVIDMRTDGIAGVMRDLMVPRRLEAAE

SEQ ID NO: 11116 - protein, 440 aa, Unknown
  Description of Unknown: Integrase B11117 sequence
  PS00397,IPR038109,IPR006119,PS51737, PF00239,G3DSA:3.40.50.1390,PTHR30461,IPR025827, SM00857,G3DSA:1.10.10.2600,SSF53041,IPR011109, PF07508,PS51736,IPR006118,cd00338,PF13408,IPR036162,PTHR30461:SF3
MRVALYARVSTEEQARHGISIDAQVDAMHRWAGEQGHTIIGDYIDNGISARKSPSKRPALQELLQDIPEKKIELIAFCKLDRWTRNVKGYYQVQEVLDKYKVAWAAIQEDYETITASGRFKVNIMLSVAENEADRTSERIKAVYNHKVALGQPINGNVPLGLKIDDKRMIPDKFASAVVAAYQCYADTGSRNTVQRVLDGYGKHLSLQSISRLLRNKLYIGEYRDNKSYCEPIISRELFDRVQRDLQMHSVKHTPSGRVYLFSSLIFCGVCGRKMAAIFANHSTVYYRCVCGNKNYKDCPNSNYIREDILEGSIVSQLAELVKGKSQVVRQARTTPSNKAAIERKLKRLQDLYIDGDITKEQYAARRDELSALIVPKKDDKPKIILGDRFEEDYMRLTRQQKAVFFRRVIDRIVVSENSEIDVYFADVYTSGNATDVDLS

SEQ ID NO: 11117 - protein, 439 aa, Unknown
  Description of Unknown: Integrase B11118 sequence
  cd00338,PF13408,IPR011109,IPR038109,PS00397, PS51736,IPR036162,PTHR30461,IPR006119,G3DSA:3.40.50.1390, PTHR30461:SF3,IPR025827,PS51737,PF00239,SM00857, G3DSA:1.10.10.2600,IPR006118,SSF53041
MRAVGYIRVSTTEQKLHGYSLDAQRELLQKYADEHDMKLVGIYADEGKSASKRLQRRTEILRLLDDAEKGLFDTILFKDLTRWSRNPSQFYAVQDRLDACGVSWIAVEQQNLETVTASGRLIVGIQISVAAHESAQTSERIKFVNQSRVQKKYPLCGDRWLPLGYKVGMIDGQKRVVKDEQTQDAVDAIFDTYESTQCINQTLKAASEMGVHTWDKSLRKMFRNPIYKGEYHDVQEYCEPYLTPERWERIRSISEQHHYTAPKRKDGYTFSSLVRCASCGGTMTGMSYTANGKQYAYYQCKRYTVGTCTHKQMIREDVIEQYLIESVDDVLSKFTAEVKSKAKKKKNPAPIRARLNRLKELYIDGDISKDEYTKRKEEYENELRETPPAAEALKNAFPDGWRKFYDAAPKTAKNAAWRSVVSKILVDEQNNISVEFLTF

SEQ ID NO: 11118 - protein, 439 aa, Unknown; identical to SEQ ID NO: 10134
  Description of Unknown: Integrase B11119 sequence
  cd00338,PF13408,IPR011109,IPR038109,PF07508, PS51736,IPR036162,IPR006119,PTHR30461,G3DSA:3.40.50.1390, mobidb-lite,PTHR30461:SF3,PS51737,IPR025827,PF00239, SM00857,G3DSA:1.10.10.2600,SSF53041

SEQ ID NO: 11119 - protein, 439 aa, Unknown; identical to SEQ ID NO: 10086
  Description of Unknown: Integrase B11120 sequence
  cd00338,PF13408,IPR011109,IPR038109,PF07508, PS51736,IPR036162,PTHR30461,G3DSA:3.40.50.1390,IPR006119, mobidb-lite,PTHR30461:SF3,IPR025827,PS51737,PF00239, SM00857,G3DSA:1.10.10.2600,SSF53041

SEQ ID NO: 11120 - protein, 439 aa, Unknown; identical to SEQ ID NO: 9977
  Description of Unknown: Integrase B11121 sequence
  cd00338,PF13408,IPR011109,IPR038109,PF07508, PS51736,G3DSA:3.40.50.1390,IPR006119,PTHR30461,IPR036162, mobidb-lite,PTHR30461:SF3,IPR025827,PS51737,PF00239, SM00857,G3DSA:1.10.10.2600,SSF53041

SEQ ID NO: 11121 - protein, 439 aa, Unknown
  Description of Unknown: Integrase B11122 sequence
  IPR011109,PS51736,G3DSA:3.40.50.1390,PTHR30461,IPR006119, IPR036162,PS51737,PF00239,SM00857,cd03768, SSF53041
MAVIGYARVSKDDQAGSLPAQVSRLQAAGCARVITDIETGRSTDRDGLLEVMAMVQAGQVSELLVTRVDRLGRDAAYTDALLAQCEQQGVAVRALDGGAIETATPQGFLMARLQTGLAEMESRMLSLRLRRQFAVYRAEGRHLRRRKPFGYQAGPGHRLQPHPEQWPQALRVLRDLKRLGSFATVTRSMPEWCDWTPAATNLQAWFVNPVIRGHIGHQLDRKSGKGWGQRWGEILYDQHPALISEQDWRELADLLRRPTNRFKNTTTTEVAHALTGLLRCRSCGHLLRRNTSNGVAWWRCRHRLCAGRGGAREDRILPVVIDACVAEAGRLAQLLAEPQAQEPAVAAMADELELMERMAARNPENRAMAAAVAEQRQRIEALRRVERSAVDPAAYRAMQDPRFFTSGSPQDQRTVMQAVLRSVTVGERGDPIEPLPRSC

SEQ ID NO: 11122 - protein, 439 aa, Unknown
  Description of Unknown: Integrase B11123 sequence
  IPR038109,PS00397,IPR006119,PS51737, PF00239,G3DSA:3.40.50.1390,PTHR30461,IPR025827, SM00857,G3DSA:1.10.10.2600,SSF53041,IPR011109,PF07508 ,PS51736,IPR006118,cd00338,PF13408,Coil,IPR036162,PTHR30461:SF3
MIRAAIYARVSTDQQANEGDSIPAQIDALTRYVNDHDDMILAGEYIDGGVSGTKADREELTRLTADIVAGKIDRVLVTKLDRLYRSIRHYVNTMEVWEAHGVGWTAIWEPMYDTTTPQGRLVVNQMMSIAQFEAENTSQRIKAVMEYKVSQGEAVTGKVPIGYRIQGKHLVIDQEEADKARQIFDSFAVSGSIGEAARMAAALGHPFHRKTIKNMLTNRKYIGEHRGNPNYCPPIIDRDLFEDVQRKLTMAVRYDAKHVSIFTGLIKCGACGRRLGVLHDKQHLSPRYRCQGHFQPPKNCPNPHSISETTIEKHLINEVQKVAREVKAEQIEEQKKVVDHTAQIAAIDRRISRLKDLYLAEMITLEEYKKDKEEMEQQKAALSVPDVPKNDSKVLDDILAINDLKGLILGLTPAERRYLWRGMVKEIVFFPDRHLELHF

SEQ ID NO: 11123 - protein, 439 aa, Unknown
  Description of Unknown: Integrase B11124 sequence
  cd00338,PF13408,IPR011109,IPR038109,PS51736, IPR036162,PTHR30461,IPR006119,G3DSA:3.40.50.1390,PTHR30461:SF3, PS51737,IPR025827,PF00239,SM00857,G3DSA:1.10.10.2600, SSF53041
VVIFGYEGSTLCPGLVSSEEQSKHGLSIETQLDNLREWSSNNKHTIVAEYVDAGISGKKPYTKRPALSQFIDDLEAGMKVDALAFTKLDRFFRSVKLYYQAVDILDKFKVPWFAIQEDYETVTASGRFKTNIMLAVAENEADRTGERIKVVLDHKFAKGEWSGKPPRGYSVVNKKLEPNKESPIIEGAFNACLLSGSVVEARKHLVSNGINVTYNTAYRIVTNPIYIGSHNGNPNFCKPTVSKDVFDEIQSFLGKRSVRTNATGRIYIFSGLVQCADCGWVMTGHCNTTYSPGKQYRYRCNNHFNNRICQNGHYVIEYDLEELLLTKVEAEMQSSVANSETKPKKKASKTVDNSKKIERLTELYIEGHISKEEYQKRREALIVPKQTTTSSKNRIIALSGLNFRESYQSFTRQQKRAFWKSVVDKIVTDGENFNVIFRS

SEQ ID NO: 11124 - protein, 438 aa, Unknown; identical to SEQ ID NO: 9988
  Description of Unknown: Integrase B11125 sequence
  cd00338,PF13408,IPR011109,IPR038109,PF07508, PS51736,IPR036162,IPR006119,PTHR30461,G3DSA:3.40.50.1390, IPR025827,PS51737,PF00239,SM00857,G3DSA:1.10.10.2600, SSF53041

SEQ ID NO: 11125 - protein, 438 aa, Unknown
  Description of Unknown: Integrase B11126 sequence
  PS00397,IPR038109,IPR006119,PS51737,PF00239,G3DSA:3.40.50.1390 ,PTHR30461,IPR025827,SM00857,G3DSA:1.10.10.2600, SSF53041,IPR011109,PF07508,PS51736,IPR006118, cd00338,PF13408,Coil,IPR036162,PTHR30461:SF3
MNVALYARVSTEEQARHGISIEAQTAALHKWADENDHVIVGEYIDNGVSARKSPSKRPALQALLHDIPGKQIELIAFTKLDRWTRNVKGYYQVQEAIDAHRVAWAAIQEDYETITASGRFKVNIMLSVAENEADRTSERIKAVFEHKVELGESLGGRTPFGFMVENKRLIPDPATAEIARAMFDRYIATASYYDTARYLHDQTGAMWEYHYLRRCLKNTLYIGKYRDNDNYCEPIISLDTFNTAQELMKQRSIRHNPTTRVYLFSGLVRCECCDHAMVGFSLPKPSGQDYYYRCHQAAIYHRCEHTHAIREERLERWMLENVALELDEWSAQYKLTPKRKAPDNAKIKRKIERLKTLYLDELITLEQYKADRAELEAQLGSTSEPPDLSGLKKQFEGDFQSIYKSLTREQRRSFWHSVIERIDLDAENNPHIVFRSGI

SEQ ID NO: 11126 - protein, 438 aa, Unknown; identical to SEQ ID NO: 10055
  Description of Unknown: Integrase B11127 sequence
  cd00338,PF13408,IPR011109,IPR038109,PF07508, PS51736,IPR036162,IPR006119,G3DSA:3.40.50.1390,PTHR30461, PTHR30461:SF3,PS51737,IPR025827,PF00239,SM00857, G3DSA:1.10.10.2600,SSF53041

SEQ ID NO: 11127 - protein, 438 aa, Unknown
  Description of Unknown: Integrase B11128 sequence
  PS00397,IPR038109,IPR006119,PS51737,PF00239,G3DSA:3.40.50.1390 ,PTHR30461,IPR025827,SM00857,G3DSA:1.10.10.2600, SSF53041,IPR011109,PF07508,PS51736,IPR006118, cd00338,PF13408,Coil,IPR036162,PTHR30461:SF3
MERAALYIRVSSEEQAIHGLSIEAQREKLDQWARGRVKIVDHYVDAGISARKPATKRPELQRLLNDVRAGRVDVILFTKLDRWFRNIAEYYKVQEVLEKHHVNWRTIQEDYDTSTASGRLKINIMLSVAQDEADRTGERIKAVFESKLMRNEPISGKVPLGYKIENKRLVIEPEKADIVRDIFRYYISTRSIRETRKYILNRWGISYCHTSIRSMLQNERYIGRAHDSDTFCPSIVPKDDFLLANKILSTRAERYVQSRSNRVYLFTGLVFCAECGNRLSAHVVGQKYIYYRCTRYEKTHICSHKKRTSELVLEDWLVKNLLAQFAAYNVSISADEKPDTKIDTSKIRRKMEKLKDLYLNDLIERDVYERDYSALKESLLEAERVKPKKKPVDLSAVADALKMYDGLSRTGKKEFWSRTVSKIVITNEDDFFVYPTSP

SEQ ID NO: 11128 - protein, 438 aa, Unknown
  Description of Unknown: Integrase B11129 sequence
  cd00338,PF13408,IPR011109,IPR038109,PF07508, PS51736,IPR036162,IPR006119,PTHR30461,G3DSA:3.40.50.1390, PTHR30461:SF3,IPR025827,PS51737,PF00239,SM00857, G3DSA:1.10.10.2600,SSF53041
VSTDQEEQLLSYENQVNYYTNYISENPLYEYAGTYADEGISGTNTKKRDEFNRMIADCRAGKIDMIITKSISRFARNTLDCLNYVRELKDLGIGIIFEKENINTLDAKGEVLLTILSSLAQDESRSISENCTWGIRRRFETGKHKMSTKRFLGYDTDETGKLVINRTQEPIVIRLYQEFLDGKTTDYIKRIFEREGVKNWDGGTKWQSTTLMSMLENEKYKGDALLQKSYTVDFLTKKRTQNKGEIQMFYVEDDHDAIISKRIWECVQLEIKRRKKYLEEHGTNSYSHRPESNPFASKIICGDCNKVFARKGWRSSTGVDRKVWQCSERYKVKGVMGCANRHVEEETLIKAYLMAWNALVENREDFMEQWTEQLQSENLLEGYRAEKFIEYTDGAEPLTEMDTDFMLKTLDHIKVFEDGTLLVVFLDGTEIECKNEEE

SEQ ID NO: 11129 - protein, 438 aa, Unknown
  Description of Unknown: Integrase B11130 sequence
  cd00338,PF13408,IPR011109,IPR038109,PF07508, PS51736,G3DSA:3.40.50.1390,IPR036162,IPR006119,PTHR30461, PTHR30461:SF3,IPR025827,PS51737,PF00239,SM00857, G3DSA:1.10.10.2600,SSF53041
MERTVQLVRPTLPKAAQIKRVCAYARVSSGKDEMLHSLSAQVSYYQRLIQSRAAWKFCGVYADEAETGTKDSREQFQEMLAECRKGNIDLIITKSITRFARNTVTLLQAVRELKDMGIEIYFEEQNIFTLSTEGEVMLTILASYAQEESRSASENQLWRVKRNFEEGKVWGMQIYGYKAVDCQLQIIPEEAEVVKRIFAEFLAGKGRESILRGLNRDGIKPRRAEKWQRTSVYNILRNYAYTGNLILQKTYRENFMTKKSIVNDGRKPKYHCQETHEPIISMETYQQAQAEIERRNANLPKKAPYMMYLFTSLIRCPYCGVNYRRCKGYSSWLWRCNTFVVHGKQSCPQSKQIREDTMVSVTEEVLGITGLNYKNIHDAIDFIDAFEGNRLVFHLKNGEVVERVWKDRSRAESWTPEMKLKAKIKEAERQEELKRRVQ

SEQ ID NO: 11130 - protein, 438 aa, Unknown
  Description of Unknown: Integrase B11131 sequence
  cd00338,PF13408,IPR011109,IPR038109,PF07508, PS51736,G3DSA:3.40.50.1390,IPR036162,IPR006119,PTHR30461, mobidb-lite,IPR025827,PS51737,PF00239,SM00857, G3DSA:1.10.10.2600,SSF53041
MASVKQVLPAKAPELKTVRVAAYARVSTGKDAMLQSLSAQVSYFSAYIQHHPGWAFAGVYADEAVTGTQDDRPEFQRLLRDCREGKIDLIVTKAISRFARNTVTLLKTTRELKELGVGVFFQKEGLYSNRGQGEMILTLLAAVAQEESRAVSENCKWRIRSRFKKGELVNFHFMYGYRMHRGKVTIAPEEAAVVAWIFDAYLDGLGCEAIAAALRQQDTPTLKGGAWTANRVMRMLKNEKYAGNALLQKRYVTDHITKKQVRNQGQLPRYYAECTHPGIVTPETFEKAQQLIERNRLKNNIAFKPPISQPLSGKVLCRNCGKPFSRVMRGGQPKWQCATYLRKGRDACPARQVPEQVLLAFICDSLGWQRFDAQAFQARVAAIQVTSPSTLQLVLADGQVFETAWQNRSRSESWTAEMKQEARERNLRKGNTPCKQPA

SEQ ID NO: 11131 - protein, 438 aa, Unknown; identical to SEQ ID NO: 9701
  Description of Unknown: Integrase B11132 sequence
  IPR038109,IPR006119,PS51737,PF00239,G3DSA:3.40.50.1390, PTHR30461,IPR025827,SM00857,G3DSA:1.10.10.2600,SSF53041, IPR011109,PF07508,PS51736,mobidb-lite,cd00338, PF13408,Coil,IPR036162,PTHR30461:SF3

SEQ ID NO: 11132 - protein, 438 aa, Unknown
  Description of Unknown: Integrase B11133 sequence
  IPR011109,PS51736,IPR036162,IPR006119,PTHR30461, G3DSA:3.40.50.1390,PS51737,PF00239,SM00857,cd03768, SSF53041
MSNTLLPQIVGYARVSTKNGEQLSALEIQKSRLKTAGVQKIFTDVESGRSNGRQAFNELLQLIDKRAVKEIVVTRFDRLGRDAAFVDAALVLASKKSVQIRTIDTGVVDTESPTGFLMSRISTSLAEMESKMLSMRVKKAIDQRWKDGKIPRGKIPWGYHRVKYADKDRLELHPTEGERARKFLEVLKENGYRLHRTLKEFEDTPLTRVSSVKKWLYNPVLRGGIGFVKIGGYQYKKVIWGLHEPLIRHEDWFTIKRIMEFNTKAWGASTKVQPKLLTGLAVCSCCGNRLAYLPRKKETHAYALRCNFLKCDLYQKRVKATMIVEAINKALAKRSKELATLTESEPVEVTKLRNEIDNLTKLDDPDLKEVIDRKKEKLTGLLLTDSPLLKERASLMGEPGFWKHAVNLPDNRLREIYLEFVLKAVANPTEVTQVELRI

SEQ ID NO: 11133 - protein, 438 aa, Unknown
  Description of Unknown: Integrase B11134 sequence
  IPR011109,IPR038109,Coil,PS51736, IPR036162,IPR006119,G3DSA:3.40.50.1390,PTHR30461, PS51737,PF00239,SM00857,cd03768, G3DSA:1.10.10.2600,SSF53041
MSNKTFPDVVGYARVSTEQNEQLSALETQKSRLKAAGVEKIYTDVESGRSNEREAFNELLQLIDKKRVREIVVTRYDRLGRNAAFVDAALVLASKKSVVIRTIDTGVVDTDTPQGFLMSRISTSLAEMESKMLSLRVKKAFEQKWKDGKIPRGKIPWGYHRVKYVDNDRLELHPTEGDKARQFLALLRQNGYRFSKAIIESKDVPLRKTSSVKKWLCNPILRGGIGFERVKDYQYKKVIWELHEPLIRHEDWFAIQRIMEFNRNTWGASSKVQPKLLTGLAICSGCTNRLAYLPRKKETHAFALRCNTLKCDFYNKRVKASMMVEAINKALAKRAKELANRTEEEPVEVMKLRSEVDLLIKMNDPDLEEAIKKKQEKITGLLLTDSPILKERAQILGAPGFWKHAESLPDNRLREIYLEFVLKVTANPTEVVGVDLRI

SEQ ID NO: 11134 - protein, 438 aa, Unknown
  Description of Unknown: Integrase B11135 sequence
  IPR011109,Coil,PS51736,IPR036162,PTHR30461, IPR006119,G3DSA:3.40.50.1390,PS51737,PF00239,SM00857, cd03768,SSF53041
MSNTLIPQIVGYARVSTASGEQISSLETQKSRLKTAGVQKIFTDVESGRSNDRQAFNELLQLIDKKAVKEIVVTRFDRLGRDAAFVDAALVLASKKNVQIRTIDTGVVDTESPTGFLMSRISTSLAEMESKMLSMRVKKAIDQRWKDGKIPRGKIPWGYHRVKYADKDRLELHPTEGERARKFLEVLKENGYRLHRTLKEFEDTPLSRVSSVKKWLYNPVLRGGIGFVKIGGYQYKKVLWGLHEPLIRHEDWFAVKRIMEFNTKAWGSSSKVQPKLLTGLAVCSCCENRLAYLPRKKETHAYALRCNFLKCDLYQKRVKAAMIVEAINKALAKRSKELASLTESEPVEVTKLRNEIDNLSKLDDSDLKEVIERKKEKLTGLLLTESPILKERAELMAEPGFWQHAVSLPDTRLREIYLEFVLKAVANPTEVTQVDLRI

SEQ ID NO: 11135 - protein, 437 aa, Unknown; identical to SEQ ID NO: 10051
  Description of Unknown: Integrase B11136 sequence
  cd00338,PF13408,IPR011109,IPR038109,PF07508,PS51736,IPR036162, G3DSA:3.40.50.1390,IPR006119,PTHR30461,mobidb-lite,PS51737, IPR025827,PF00239,SM00857,G3DSA:1.10.10.2600,SSF53041

SEQ ID NO: 11136 - protein, 437 aa, Unknown; identical to SEQ ID NO: 10067
  Description of Unknown: Integrase B11137 sequence
  cd00338,PF13408,IPR011109,IPR038109,PF07508, PS51736,IPR036162,IPR006119,PTHR30461,G3DSA:3.40.50.1390, PTHR30461:SF3,PS51737,IPR025827,PF00239,SM00857, G3DSA:1.10.10.2600,SSF53041

SEQ ID NO: 11137 - protein, 437 aa, Unknown; identical to SEQ ID NO: 10072
  Description of Unknown: Integrase B11138 sequence
  cd00338,PF13408,IPR011109,IPR038109,PF07508, PS51736,G3DSA:3.40.50.1390,IPR006119,IPR036162,PTHR30461, PTHR30461:SF3,PS51737,IPR025827,PF00239,SM00857, G3DSA:1.10.10.2600,SSF53041

SEQ ID NO: 11138 - protein, 437 aa, Unknown; identical to SEQ ID NO: 10141
  Description of Unknown: Integrase B11139 sequence
  cd00338,IPR011109,IPR038109,PF07508,PS51736, IPR036162,IPR006119,G3DSA:3.40.50.1390,PTHR30461,mobidb-lite, PS51737,PF00239,SM00857,G3DSA:1.10.10.2600,SSF53041

SEQ ID NO: 11139 - protein, 437 aa, Unknown; identical to SEQ ID NO: 11023
  Description of Unknown: Integrase B11140 sequence
  cd00338,PF13408,IPR011109,IPR038109, PF07508,Coil,PS51736,G3DSA:3.40.50.1390, IPR006119,PTHR30461,IPR036162,PTHR30461:SF3, PS51737,IPR025827,PF00239,SM00857,G3DSA:1.10.10.2600,SSF53041

SEQ ID NO: 11140 - protein, 437 aa, Unknown
  Description of Unknown: Integrase B11141 sequence
  cd00338,PF13408,IPR011109,IPR038109,PF07508, PS51736,IPR036162,PTHR30461,IPR006119,G3DSA:3.40.50.1390, mobidb-lite,IPR025827,PS51737,PF00239,SM00857, G3DSA:1.10.10.2600,SSF53041
MKKTIRVIEPTIPLLKKKKRVAAYARVSSGKDTMLMSLSAQVSYYSELIQRNSEWEYAGVYADEATTGTKEDRTNFQKLLKACRNGEIDIILTKSISRFARNTVTLLEAVRELKKYGVDVYFERENIHSLSGDGELMLTILASFAQEESLSASENQKWRIKKNFEEGKPWTYGMLGYRYNGEYYEVIPEEAEVVRKIFAYYLEGLGYNAICKRLDAEGVVTRNNNKWSQNSVSKILKNYTYTGNLLLQKTFRENHITKKTRVNRGELPKYHAEDTHEAIIDIDTFMAVQNEIARRLKEFEHKSQVQKTYPFTHKMVCDCCGAYYRRKITKSRIVWICATFNQKGKALCQQSKQLPEETLIALCNDVLGLVEFNEQIFINKVSQIRILDNNRVQFLLSDSKTEERTWKDRTRSESWTDEMKETARQRTLQRYAPKEVE

SEQ ID NO: 11141 - protein, 437 aa, Unknown
  Description of Unknown: Integrase B11142 sequence
  cd00338,PF13408,IPR011109,PS00397,IPR038109, PS51736,G3DSA:3.40.50.1390,IPR036162,IPR006119,PTHR30461, PTHR30461:SF3,IPR025827,PS51737,PF00239,SM00857, G3DSA:1.10.10.2600,IPR006118,SSF53041
MRAAAYIRVSTAEQKLHGFSLDAQRELLQKYADEHDMKLVGVYADEGKSASKQLHRRTEILRLLEDAESGKFDVILFKDLTRWSRNPSQFYAVQDRLDKCGVSWIAVEQPNLETVTASGRLIVGIHISVAAHESAQTSDRIKFVNASRVMKKLPLYGYKALPLGYTTGVIDGEKRVIIDESQREAVNAIFDAYERTQSIKAAKAAGLEHGVNAWDKSLRSMFRNPIYKGEYHDVQDYCEPYLTPERWERIKALVDQHHYTPPVNKYGYAFSSLVKCKECGSSMVGKTIKRKYRYYRCNRSQEGMCTHNRLINEKEIEEKLLASVDDVLSQFTVEKRPKRQKQKNFAPIRAKLNRLKELYIEGDISKEDYTKRKEALEAELNAPIARSETFKNAFPDGWRKYYDEAPNTAKNAAWRSVVRQITVDAENHIEVEFIPFG

SEQ ID NO: 11142 - protein, 437 aa, Unknown; identical to SEQ ID NO: 10091
  Description of Unknown: Integrase B11143 sequence
  cd00338,PF13408,IPR011109,IPR038109,PF07508, PS51736,G3DSA:3.40.50.1390,IPR036162,IPR006119,PTHR30461, PTHR30461:SF3,IPR025827,PS51737,PF00239,SM00857, G3DSA:1.10.10.2600,SSF53041

SEQ ID NO: 11143 - protein, 437 aa, Unknown
  Description of Unknown: Integrase B11144 sequence
  cd00338,PF13408,IPR011109,IPR038109,PF07508, PS51736,G3DSA:3.40.50.1390,IPR006119,IPR036162,PTHR30461, PTHR30461:SF3,PS51737,IPR025827,PF00239,SM00857, G3DSA:1.10.10.2600,SSF53041
MKEKKITKIEALSKLPKKTRVAAYARVSNGKDAMLHSLSAQINYYKKMIQDNNDWQFAGVYADEALTGTKDSREEFQQLLEDSKAGKIDMIITKSISRFARNTMILLETVRELDKLNVDVFFEEQNIHSISSEGEMVLTLLASVAQEESRSVSENMKWRIKKEFQQGEIWGGRSPLGYNLKNKTFRVIPKEAELVQLIYKLYIDGNGAETICQILDEKGIKPKESKKWGPSSIIKILSNRNYTGDLLLQKTYLNNHLSKKQVINKGELDRYLVKGNHEAIISNELFDKVQKIKHQRAIKNKSNLPKKKTILHGLIQCGNCSSTYTPKKMRQKDIWICSKSASKGQDVCDSKLVPHNIIVEASKRVLDMDQYSEMIFNSKVTKIIVQANKQLDFHMRDGAVVSYRWQHKSRSKSWTPEMKEQARLRALKQHHGGRENG

SEQ ID NO: 11144 - protein, 437 aa, Unknown
  Description of Unknown: Integrase B11145 sequence
  Coil,PS51736,IPR036162,IPR006119,G3DSA:3.40.50.1390, PTHR30461,PF00239,SM00857,cd03768,SSF53041
MALRLGYARCSTDEQADALAAQVARLEGAGCDRVIQELESGRNNDRPGLLEAMALVARGQVGELLITRADRLGRDAAFADQMIAACALAGTTITALDGGQIEAATPQGFLAARLQTTMAEVESRMLSQRIRRQFEVYRNQGRHLRRRKPFGYRAGSDHRLEPHPEQWPQALRVIAELRRLRSFSAVAQQLPTWCEWTPASSNVQAWFCSPVIRGHIAHNWDRSSGKGWNQRWGQILHDQHPALIGETEWQELADSIRRTRNSFAGGPTVDARHGLTGLLLCDGCGHRLRRNSAAGVAWWRCRHRLCQARGGIKEAVVLPVVVAACLEAADALAAAASAPADDDPVLIMKRRDLEQLQALAARNPALDGAVAALRQEVEGMARRVRFDPDPRIRQMLSMPGFFKGATAEEQRAIFGAALSAVRVGPGGQPLRALQRTM

SEQ ID NO: 11145 - protein, 437 aa, Unknown
  Description of Unknown: Integrase B11146 sequence
  IPR038109,PS00397,IPR006119,PS51737,PF00239, G3DSA:3.40.50.1390,PTHR30461,IPR025827,SM00857, G3DSA:1.10.10.2600,SSF53041,IPR011109,PS51736, IPR006118,cd00338,PF13408,Coil,IPR036162,PTHR30461:SF3
MKRAAIYVRVSTAEQRDKGLSVDSQIEALKAFCEDKGYSVAGIYNDAGISARKRYTKRPALLQLCDDCRCGKVDIILFTKLDRWFRSVADYYEVQTVLDQAKVPWRAIWEDYETETSAGQFKVNIMLSIAQAEADRTSERVKAVNNYRRAQGLCTYGAAPTGYVSRKGRLLIDEEKQEAVQAFFDCYLKTLCLADAIRTIHSYGVNISRDTAYKILKNPTYYGDAHGHKCAAYITKEQHDYIQNAIARRTRTPKTKDTVYLFSGLCKCKSCGYNIGGGMRSAYSGKELRKYKYYRCPHGAKLTCANTRTVSERNLEKYLLDNLDSILANFRSKAVLDAKGRNTHAKEIKALESKIKRIGDRYENDEITKDEYTKKVNDIRKQIQALDIPQKPIKEIEMPDDWKTLYSQLDDNHKKQFWNRIIDHMEFTSLDDIEVFI

SEQ ID NO: 11146 - protein, 436 aa, Unknown
  Description of Unknown: Integrase B11147 sequence
  cd00338,IPR011109,Coil,PS51736,IPR036162, PTHR30461,IPR006119,G3DSA:3.40.50.1390,PS51737,PF00239, SM00857,SSF53041
VIYTRISKDHDGSSTSPQAQFEECQGLAASMGWDCEHVSDIDTSAWSRNVKRPGFRRVVAGIKEGVVEGLIVHHLDRLLRQSRELEELIDAIESQTRGRFPIYSVHGELDLSTADGRFTARILTSVAQKESDDKSRRLKLVLAKNAREGKPHGGRRPFGWNDDRTTLHPSESQALQGVIQDLLEGQSLVSCARRLNMRTTTLRQILVNPRIAGLRAHHGQVVSEGRWEPLVSAETFRLLTELLERSAHQNHTTALQHPLIGLMYCERCGGRMGSRRHSTGRKYRCRKDLGGCGVGIDANGAEAAIFVAAEGLLEHVVVVLDEPVADLEGELTVAEARLEQLSRDYYVEHAITELEFRAARQPLDDRVQELRRQVDRVPAQLTHTASDVFSELNDHERADVLRSFIHRIWVSPGVAGRRFDATRLSIELLRGVEVRE

SEQ ID NO: 11147 - protein, 436 aa, Unknown
  Description of Unknown: Integrase B11148 sequence
  cd00338,PF13408,PS00397,Coil, PS51736,G3DSA:3.40.50.1390,IPR036162,IPR006119, PTHR30461,IPR025827,PF00239,SM00857, IPR006118,SSF53041
MIALYARVSTEEQAVHGLSIDAQLAALKEAYPNGVEYVDLGISARKPISKRPELQRLLRDVEQGRIELIVFTKLDRWTRNIREYYKAQDILDAHNVAWKALHEDYETQTAAGRLKVNIMLAVAQDEADRTSERIKTVFERKRQQGIVPTGKVPLGVKLVDGHYAPSDEADKVVDLFNTYINTRSAQETARRFGLTMQGVSYMLQNRTYLEAGVIDEQTFQLAANIKQTRGQRRGRTDRVYLFSGIIVCPHCGNKLSSAYNNGYNAYRCCRKHDHLCEGFYINEKKLERYCLDQLMPTVKDYNLKIREAQKKAPDIKAMKAKRDRMTDLYLDGLMDKAKYAEEYKALTRAIEEAENTPHPLNTTEIKAVLEAYRGLSQTAKKAFWSRVLVRIVPRPEEGIFDLVYTNGNITSDILPFVYNEHKLETVIQTTNKGQKT

SEQ ID NO: 11148 - protein, 436 aa, Unknown; identical to SEQ ID NO: 10169
  Description of Unknown: Integrase B11149 sequence
  cd00338,IPR011109,IPR038109,PF07508,Coil, PS51736,IPR036162,IPR006119,G3DSA:3.40.50.1390,PTHR30461, mobidb-lite,PS51737,PF00239,SM00857,G3DSA:1.10.10.2600, SSF53041

SEQ ID NO: 11149 - protein, 436 aa, Unknown
  Description of Unknown: Integrase B11150 sequence
  cd00338,PF13408,IPR011109,IPR038109,PF07508, PS51736,IPR036162,PTHR30461,IPR006119,G3DSA:3.40.50.1390, PTHR30461:SF3,IPR025827,PS51737,PF00239,SM00857, G3DSA:1.10.10.2600,SSF53041
VERIVRKIKPRASIPSKQKRVAAYARVSSGKEAMLHSLSAQVSYYSNYIQQHSDWEYAGVYADEALTGTKNSRPDFQRLLNDCRAGLIDMIITKSISRFARNTVTMLETLRELRQLEVDVYFEEENMHSIGGDGEFMLTILASYAQAESLSVSENCKWRIRKRFQAGEIVNLRFMYGYNIKKGEITVDHKEAEIVRMIFADYLSGMGCDRIAGKLNRLGLRTVRNNPWSGKRVADIIKNEKYAGNALLQRKYVTDHLSKKLVINKGKLPKYYAEGTHEPIIDLPTFQKAQEIMALRRENRNVKQNPANRYPFSSLIHCPRCGKNYRRVTYKGHAAWNCPTFIHSGKEACPAKQIPEPILVSLTAEVLGLEQFDEVVFRSQVKQMQVPETNKVIYIFQDGREVETIWQNRSRKFSWTEEAKLEARDRALAYQKGVKI

SEQ ID NO: 11150 - protein, 436 aa, Unknown
  Description of Unknown: Integrase B11151 sequence
  cd00338,PF13408,IPR011109,IPR038109,PF07508, PS51736,IPR036162,PTHR30461,IPR006119,G3DSA:3.40.50.1390, PTHR30461:SF3,IPR025827,PS51737,PF00239,SM00857, G3DSA:1.10.10.2600,SSF53041
VERIIRKIKPQASMASKRKRVAAYARVSSDKEAMLHSLSAQVSYYSDYIQQHSEWEYAGVYADEALTGTRDSRPDFQRMLNDCRDGLIDMVITKSISRFARNTVTMLETLRELRQLDVDVYFEKENIHSISGEGEFMLTILASYAQAESLSVSENCKWRIRKRFQAGEIVNLRFMYGYNIKKGEITIDHKEAEIVRMIFADYISGIGCDRIASKLNQLGLRTVLNNSWNGKRVADIIKNEKYTGNALLQRKYVTDHLSKKLVMNKGKLPKYYAEGTHEPIIDLPTFQKAQNIMAERREKRNVKQNPANSYPFSGLILCSRCGKNYRRVTYKGHTAWNCPTFIHSGKDACPAKQIPEPILISLTAEVLGLEEFDEVIFRSQIKQMQVPEANKVVYIFQDDREVETVWQNRSRKFSWTEKAKLKARERALAHQKGVKL

SEQ ID NO: 11151 - protein, 435 aa, Unknown
  Description of Unknown: Integrase B11152 sequence
  IPR011109,Coil,PS51736,G3DSA:3.40.50.1390,PTHR30461, IPR036162,IPR006119,PS51737,PF00239,SM00857, cd03768,SSF53041
MATLGYARVSKDEQSDSLPAQVSRLHAAGCSRVITDIESGRNSDRDGLLEVMAAVRAGQVTELLVTRVDRLGRDAAYTDALLAQCEAKGVAVRALDGGTIETATPQGFLMARLQTGLAEMESRMLSLRLKRQFTVYRAEGRHLRRRKPFGYQAGANHKLEPHPDQWPQALRVIEELRKAGSFTAVANALPSWCEWTPAPTSLQSWFCNPVIRGHIAHLLDKDSGKGWSRRWGEIHYDQHPALISEADWQELADVLRRPRNRFQNTEAKHGMTGLLRCAGCGHLLRRNSSNGVVWWRCRHRLCKDRGSCREDRILPVVIDACVAQAQKLAAELAAPRDQDPAVAAMVQELEQMERMAARNPGNRAMAAAVAEQQQQIERLKRSEQPVLDPAVHQALQDPHFFAGATPEEQRVMFQAVLRSVTVNRGGSQIQAQPRS

SEQ ID NO: 11152 - protein, 435 aa, Unknown
  Description of Unknown: Integrase B11153 sequence
  cd00338,PF13408,IPR011109,IPR038109, PF07508,PS51736,IPR036162,IPR006119, G3DSA:3.40.50.1390,PTHR30461,PS51737,IPR025827, PF00239,SM00857,G3DSA:1.10.10.2600,SSF53041
MRVALYERVSTEEQAKHGISVEAQSAALHKWAALNGNEIVGEYVDNGVSARKMPSKRPALQRLLNDIAANKTALIAFTKLDRWTRNVKGYYQVQDILDKHKVAWIAIQEDYETITASGRFKVNIMLSVAENEADRTSERIKAVFEHKIEKGEIAGGKPSFGYMVENKRLVPNPDTANIAREMFRHYLDTASYYDTARYLHSVTGMKWQYHYIRRCLSNPIYIGKYRSNANYCEPIVDAATFNAAQELMKSRSVRHNPTNRVYIFSGLVRCSCCGLAMVGFTLPKPNGDDYYYRCHEAMIYRRCEHTHSIREERLERWMLDNVAEKLDNYITEYNFTAKQRPHDNAKIKRKIEKLKELFLNDLITIEQYKADRAELESQIVEETAPKDFTELQSRFSKDFRSVYNTFSREQRQMFWRGTVDTIELDADNTPLIIFR

SEQ ID NO: 11153 - protein, 435 aa, Unknown
  Description of Unknown: Integrase B11154 sequence
  cd00338,PF13408,IPR011109,IPR038109,Coil, PS51736,IPR036162,IPR006119,PTHR30461,G3DSA:3.40.50.1390, PTHR30461:SF3,IPR025827,PS51737,PF00239,SM00857, G3DSA:1.10.10.2600,SSF53041
VFSASTAEQKKHGLSVDSQISALKDFCAAGGYFIAGVYSDAGISARKRYTRRPALLQLLTDCREKKIDVILFTKLDRWFRSVGDYYEVQRQLDAAGVPWRAIWEDYETETSAGVLKVNIMLSVAQSEADRTSERIRDVMQYKRARGDYVGKAPLGYVKQGGALIKNPETAPAVEALFSTFLRTLNTAEAIRAAAALGLHTNRETINKLFLNPAYAGSAAGGYTCPAYITPEQFDFIKDIRRRRTRTAKHTSAVYIFSGLCRCGICGRPMAGKTRHRQHVDGSPHVAAYYQCSAYSGSVRYHRAFSINGDKIEAQLLDTVDDALKSVRIAVKARNASANKDTAEKQKAALRLKLKRVQAVYMDGGLSDAEYTARRDAISAELAAIRTEPEKVPEALPDNWRETYDGLDPEHRRRFWQTVLRAITVNADRSISLTFC

SEQ ID NO: 11154 - protein, 435 aa, Unknown
  Description of Unknown: Integrase B11155 sequence
  IPR038109,IPR006119,PS51737,PF00239,G3DSA:3.40.50.1390, PTHR30461,IPR025827,PF09851,SM00857,G3DSA:1.10.10.2600, SSF53041,IPR011109,PS51736,IPR018649,cd00338, PF13408,Coil,IPR036162,PTHR30461:SF3
MPNASVFIRSCLASSDEQAKHGLSLGDQLTDLRAWAETNGHSVIAEYVDAGVSGKRPYPKRPALSRFMEDLESGLKVDALCFTRLDRFFRSVKLYYQAVDVMDRHKVSWTAILEDYETISSTGKFKMHLMLAIAEHESSRTGERLRTTLSHKFARGEWSGKPPRGYSVVDKHLTPNKDAPIIAEAFRVCHRSCSVVAAQSYLHEHGIKVVYNTAYRLLTNPIYTGRHDGVEGFCERLVDDDTFSDIQAMLGKRSDRTNDTGRVYLFSGLLVCSECGRKLVGQYNPTYSPEKQWRYRCAGCYRDHLCSNNKYLIESEIEDYLLAKVCKEIEKMSAQVEYSAPAPKPIDNTAKLERLKELYIEGEISREEYQKRKDALTTLPVIKQSTPRIKEIALSGDDLRESYQSFTRQERRAVWKSVIDKIDVDRDRLTVVFRT

SEQ ID NO: 11155 - protein, 435 aa, Unknown; identical to SEQ ID NO: 10058
  Description of Unknown: Integrase B11156 sequence
  cd00338,PF13408,IPR011109,IPR038109,PF07508, PS51736,G3DSA:3.40.50.1390,IPR006119,PTHR30461,IPR036162, mobidb-lite,PTHR30461:SF3,IPR025827,PS51737,PF00239, SM00857,G3DSA:1.10.10.2600,SSF53041

SEQ ID NO: 11156 - protein, 435 aa, Unknown
  Description of Unknown: Integrase B11157 sequence
  cd00338,PF13408,IPR011109,IPR038109,PF07508, PS51736,G3DSA:3.40.50.1390,PTHR30461,IPR006119,IPR036162, PS51737,IPR025827,PF00239,SM00857,G3DSA:1.10.10.2600, SSF53041
MTRRGLRPVPDVPLRAVAYVRVSKERDDMVSPELQVQAITDHCARRGYVLVETLTDLDLTGRFWRRRQVERAVQMIEGGEADALVVWKISRVARNRLDWNVAVDRVESVGGVLESATEPLDSATSTGRFTRGMLAEMAAFESERIGEQWKEAQARRLRLGLPHTPTARFGYRYDRATGYAPDPDTAPVLVEMYRSYVAGTGTMPLVRSLNARLVPTLGGGPWTISTLLRVLDAGFGAGLLRVRGQHVRGAHEPVIDDRTWQAYRDRRVAQRLLPARVRNPRHVLTGMLRCGECGGAMSAYSKPARDGAPQILFRCTVWQASRSCRGTWIAAHRAEAAVLEWLRRLTSDLDEAAAAAVARRGVVTRARTDVARLHREVGRLDEALARLTIDLASGLVPAGAYRDARDELTARRGEVESAALRAKAETAGSTRPPAT

SEQ ID NO: 11157 - protein, 432 aa, Unknown
  Description of Unknown: Integrase B11158 sequence
  cd00338,PF13408,IPR011109,IPR038109,PF07508, PS51736,IPR036162,IPR006119,PTHR30461,G3DSA:3.40.50.1390, IPR025827,PS51737,PF00239,SM00857,G3DSA:1.10.10.2600, SSF53041
MEKEVKSMQIKVMEPKKKAGGGKLRVGAYGRVSTDSRKQEDSLENQIAYYERTIQARPDYQFVKVYMDQGISGTSENRPGFQEMLEDARNKKLDLILIKSISRFARNTVTVLKFARELKEYGVGIFFEEQNINTISGEGELMLTVLASFAQEESRSISENNKWSIQKKFQRGEVMITTERFMGYDKDENGNLTVNKKEAAIVHRIFDLYLDGKGAFSIAKLLNEDGIPTITGVKWHDSTIKGMLVNEKYKGDLLLQKYYTPEDKKNRTVRNDGYVDSYYIKKNHEAIVSEAEWDRVQEIMQQHRDAKGMKAGDTKKYQNRYPLSGLLICPYCKRTLRRSHVYGGKVQWICSTYIQKGKTACTGIRVDDTEVASRNILEPTIVEEDYYNGEKHYLYTSAKDYKEREWKASIKETESSSILPRVNRPRRAAIKL

SEQ ID NO: 11158 - protein, 435 aa, Unknown
  Description of Unknown: Integrase B11159 sequence
  cd00338,PF13408,IPR011109,Coil,PS51736, IPR036162,IPR006119,G3DSA:3.40.50.1390,PTHR30461,PTHR30461:SF3, IPR025827,PS51737,PF00239,SM00857,SSF53041
TQEQKLHGISLDAQREKLTEYAKTHDLKIVEWYADEGISGKKPIAKRPALQQMIADAEHGKFQHIIFIKLDRFFRSVAEYHECMKRLGDVTWDATEEKYDISTANGRAFVNMKLTIAELEADQTGERIKLVNDYKVKTGQPLHGSMPWSHKIINTEDGKRIIADPDTKEDCIRVLDYFLHTGSMRATLRYADQYHSFYDLVGLKRWLMNPMLYGSYRGNDAYCEPIISKEKFDKIQAQIKTYTPNRKNIYLFSGLIPCPVCGKSMTGYTAVQKHKGKEYRYKKYKCDQYHRKVGCTYKKHYSENLVEKCLLEQFDNFIEEETTPKLRLKKRKGRDEKVIKAEMDRLNYMFQKNRISVGDYDDRYSALQKELSNLPNEEEDLKKLKEVQALIDQGWKTAYVELDDEHKRQVWHSVVRALHIRKDGRTYTLTGVELL

SEQ ID NO: 11159 - protein, 435 aa, Unknown
  Description of Unknown: Integrase B11160 sequence
  cd00338,PF13408,IPR011109,IPR038109, PF07508,Coil,PS51736,G3DSA:3.40.50.1390, IPR006119,IPR036162,PTHR30461,PTHR30461:SF3, PS51737,IPR025827,PF00239,SM00857,G3DSA:1.10.10.2600,SSF53041
MAAYCRVSTDQDEQLSSYENQVRYYQDYIRQNPLYQLVDIYADEGISGTNTKKRTGFNRLIADCRKGKVDRIIVKSISRFSRNTLDCLKYVRELKELGIGVTFEKENIDSLDAKGEVLLTILSSLAQDESRSISENATWGIRKKFERGEVRVNTTKFVGYDKGENGNLIINEEQAKIVRRIFRYFLQGETPESIARTLKEEGVPGWNGKVNWYPTTIQRMLQNEKYMGDALLQKTYTVDFLTKKRSENQGQVNQYYIKGNHEAIIDKEEWELVQLEIERRNQFRQDNHINFYIIQCEQNPFTCKVFCEECGGLFGRKNWTTSRGKRPVWQCNNRYKVKGIQGCTNRHIDEETLQQAFFRAVEVLRENKENLQEKWTNFSEEQKLEKYHAAQLKELLDSEQEAFDGRKMCQVLEKIMLGEDGSITVKFLEGTEVNL

SEQ ID NO: 11160 - protein, 434 aa, Unknown
  Description of Unknown: Integrase B11161 sequence
  cd00338,PF13408,IPR011109,IPR038109,PF07508, PS51736,G3DSA:3.40.50.1390,IPR036162,IPR006119,PTHR30461, PTHR30461:SF3,PS51737,IPR025827,PF00239,SM00857, G3DSA:1.10.10.2600,SSF53041
MERVIERVAFDTLSIARLKKVAAYTRVSSGKDAMLHSLAAQISYYNSFIQSNPEWSFAGIYTDEAISGTKVNREGFQRMIDDCRKGKIDMIVTKSISRFARNTLTLLQTVRELKELGVDVFFEEQNIHTMSGAGELLLTILASFAQEESLSVSQNQKWRVKQNFEKGLPWNCTMLGYRCKNGEFEIEPKEAETVRFIFTSFLDGMGLEAIAQTLNLQGAKTRHEKPWGKSSVRCILQNLSYTGNLMLQTTYIENHITKKKVYNNGEKQQYYVENSHPAIVSQEEFDLVQAELIRRADKHSPKGRKKNLYTFSGLLVCGNCGDTYRRKVTSKRVVYICNTYNTKGKSICASKAIPEETLKTLTLDILGIDFFDEEYIKAQIKQIKIENNYKVVFFLKNGDAVTKTWVPISRKDSWTPEMKERARQAELMRKGAHR

SEQ ID NO: 11161 - protein, 434 aa, Unknown; identical to SEQ ID NO: 10714
  Description of Unknown: Integrase B11162 sequence
  cd00338,PF13408,IPR011109,IPR038109,PF07508, PS51736,IPR036162,IPR006119,PTHR30461,G3DSA:3.40.50.1390, mobidb-lite,PS51737,IPR025827,PF00239,SM00857, G3DSA:1.10.10.2600,SSF53041

SEQ ID NO: 11162 - protein, 434 aa, Unknown
  Description of Unknown: Integrase B11163 sequence
  PF13408,PS51736,IPR036162,PTHR30461,IPR006119, G3DSA:3.40.50.1390,IPR025827,PF00239,SM00857,cd03768, SSF53041
MKLGYARVSKEEQADSLPAQVGRLRGAGCDAVVEELESGRNDDRPGLAEVVAEVRAGRVSELVITRADRLGRNAAFADELLALCALRGVTVTALDGGTIESATPQGFLQARLLTTMAEVESRMLSLRLRRQFEQYRSQGRHLRRRKPFGYQGGADHKLEPHSEHWPQALKVLRRLREIGSFTGTANDLPGWCAWTPAPSSLQAWFVNPVIRGHIGHMLEKGSGKGWGQRWGEIRYDQHPALIGEADWQDLAQFLRRPANRFQGHANEVRHGLAGLLRCASCGHTLRRNNSGGTAWWRCRHRLCEEKAGIREETALAQVVAACIAAADRLAAVAAAPTDEDPAVAAKRRDLEQLEGLARRNPALASACAALRTEIESLSHRPRVSPDLLAVAERIGDPAFFTGASAPEQRALFGAVLDSLQVGRSGEVHAQPRSW

SEQ ID NO: 11163 - protein, 434 aa, Unknown; identical to SEQ ID NO: 10020
  Description of Unknown: Integrase B11164 sequence
  cd00338,PF13408,IPR011109,IPR038109, PF07508,PS51736,G3DSA:3.40.50.1390,PTHR30461, IPR036162,IPR006119,PTHR30461:SF3,IPR025827, PS51737,PF00239,SM00857,G3DSA:1.10.10.2600,SSF53041

SEQ ID NO: 11164 - protein, 434 aa, Unknown
  Description of Unknown: Integrase B11165 sequence
  IPR011109,PS51736,IPR036162,IPR006119,G3DSA:3.40.50.1390, PTHR30461,PS51737,PF00239,SM00857,cd03768, SSF53041
MRLGYARCSTDEQADALAAQVSRLQAAGCDQIIQELQSGRDDDRPGLAEVVALVRSNRVTELLITRADRLGRHAAFADELLALCSLQHVTVTALDGGTIDAASPTGFLQARLLTTMAEVESRMLSQRIRKQFEVYRAQGRHLRRRKPFGYQAGADHRLEPDPANWHQALNVIKALRRLRSFSAVARELPQWCSWTPTGGNLQNWFCNPVIRGHLPHLRDLSTGKGWKQRWGQILYDQHSALISEADWHELAQLLQRTENRFGGPGMPAQHGLSGLLRCATCGHCLRRNGSGGFTWWRCRHHLCASRGGIREDRVLPVVVQACIDAADRLAIVAAAPPDVDPAVAAKRQDLEQLEALAARNPALSSACDALRHEIEMMCRRPAITPDIAAVLERFNSADIFLSATAEEQRAVFGAVLQTVEVGRTGEVRALPRAF

SEQ ID NO: 11165 - protein, 433 aa, Unknown; identical to SEQ ID NO: 10207
  Description of Unknown: Integrase B11166 sequence
  cd00338,PF13408,IPR011109,IPR038109,PF07508,Coil,PS51736, G3DSA:3.40.50.1390,IPR006119,IPR036162,PTHR30461,PTHR30461:SF3 ,PS51737,IPR025827,PF00239,SM00857,G3DSA:1.10.10.2600,SSF53041

SEQ ID NO: 11166 - protein, 433 aa, Unknown; identical to SEQ ID NO: 9952
  Description of Unknown: Integrase B11167 sequence
  cd00338,PF13408,IPR011109,IPR038109,PF07508, PS51736,G3DSA:3.40.50.1390,PTHR30461,IPR036162,IPR006119, PTHR30461:SF3,PS51737,IPR025827,PF00239,SM00857, G3DSA:1.10.10.2600,SSF53041

SEQ ID NO: 11167 - protein, 433 aa, Unknown
  Description of Unknown: Integrase B11168 sequence
  cd00338,IPR011109,IPR038109,PF07508,Coil, PS51736,IPR036162,PTHR30461,IPR006119,PTHR30461:SF3, PS51737,PF00239,G3DSA:1.10.10.2600,SSF53041
EMQKLLKAVSKRQYKAVLVVEIERLARGNTSDQGQVADAFVYSGTLIITPAKVFDPASEADQEYFEFGLFMSRREYKTIRRRLQAGKLAAIQEGQWIANWTPYGYKAVRNGKKDKHLEIVPEEAEVVKTIYSLHQGGMTPHTIARQLTEQGIKPPRNAEQWHKSTINRILQNPVYIGKIRWANATTVRQLADDGRTIKRRIKSANPIIVDGKHQPIITEAEFNLNQGAFFASSPVPEGRDMVNPLSGLLRCSRCHRAIVYVSPSKKQPRARYSHKNALQCQQHSADAEQVLKSVIQGLQNTLKNVEVKAAQQEQDNTADKLKALTAQLNREQAKLRRIYESYESGVYTPDEFLSRRQQAQSAISKCQSAIDQLQSITPKVNRDEQIKKLHDVIAMLGDNSIPARERNRFAKSIIKAIWYNNDGDNLTLEIETL

SEQ ID NO: 11168 - protein, 433 aa, Unknown; identical to SEQ ID NO: 10074
  Description of Unknown: Integrase B11169 sequence
  cd00338,PF13408,IPR011109,IPR038109, PF07508,PS51736,G3DSA:3.40.50.1390,IPR006119, PTHR30461,IPR036162,IPR025827,PS51737, PF00239,SM00857,G3DSA:1.10.10.2600,SSF53041

SEQ ID NO: 11169 - protein, 433 aa, Unknown
  Description of Unknown: Integrase B11170 sequence
  PF13408,IPR011109,IPR038109,PF07508,PS51736, G3DSA:3.40.50.1390,IPR006119,IPR036162,PTHR30461,PTHR30461:SF3, PS51737,IPR025827,PF00239,SM00857,cd03768, G3DSA:1.10.10.2600,SSF53041
MRNSKHIPAPVPLRRCAVYVRKSTNMGMEQNYTSIDAQIDSCIQYVENHAADGWVLAQTATCGIYQDVAISGATMERPGVQALLADIRAKRVDVVVCYKLDRISRSIRDFANLMFELEEMGVSLVLVTQNFDSGTPMGRLCLHFLSSFAEFERCMIRDRIKDKAAARAAQGLWIGGRPPFGYRLGEQRMLVTEPAEAEVVRRIYEGVLAHTDLCELALRLNQENAPRPRLRKGVEDNAWSSTRIRQLVERPLYSGVIVLRENEYPGQHEALVSRKDWEAAQRALAELLAARKPRESHPELVYPLRGILVCPLCGLPMKPTYAKTRGQIHRYYECPNHINRDKGCPTRNLPAEVIEMAVASNLASLASNPAMMRVLQERLPQLAHRDISEALANVEQLVEYIPDDALATLFQALYKEVSYNAAAQELNIVKYSA

SEQ ID NO: 11170 - protein, 433 aa, Unknown; identical to SEQ ID NO: 10145
  Description of Unknown: Integrase B11171 sequence
  cd00338,PF13408,IPR011109,IPR038109,PF07508, PS51736,G3DSA:3.40.50.1390,IPR036162,IPR006119,PTHR30461, mobidb-lite,PTHR30461:SF3,IPR025827,PS51737,PF00239, SM00857,G3DSA:1.10.10.2600,SSF53041

SEQ ID NO: 11171 - protein, 433 aa, Unknown
  Description of Unknown: Integrase B11172 sequence
  PS51736,G3DSA:3.40.50.1390,IPR006119,IPR036162,PTHR30461, PF00239,SM00857,cd03768,SSF53041
MAKPIRIGYIRVSTDTDEQLSALQHQRARISGVVDLIIEDVESGLSNCRSGFNELLHLIDIKKCSEVVCTRIDRLGRDASAIDAFLAVAAKRGVVITCLDGGTVDSQTPQGFLMSRIATSMAEVESRMLSMRIKAGYEQGRKLNKPLRGRIAWGYKLKEDKSALIPHPVEFQKAQLFIKLLKECNWRTIKAIREWEKMDHGRLPLSCMSAVRDWLSNPVLRGGIGYHRQRDRTYKTIVWNTHEALLSPSDFLLFEHQRKINKLCWGSAATHPPRLLTGLCICAECGKHMSIVGRQGAGKDRVICKQILCNSRYKSTHDTVVIAAIAEALCSRASQLADYVVEENPQAEVLRAEIAKLKAMNDEDLIPAIEAKEQRLQAVLQKGSEPDPELLNAFADPLVWTQLDQQELRELYLHLVERVVIERREVVNVVLRL

SEQ ID NO: 11172 - protein, 432 aa, Unknown; identical to SEQ ID NO: 10069
  Description of Unknown: Integrase B11173 sequence
  cd00338,PF13408,IPR011109,IPR038109,PF07508,PS51736, IPR036162,IPR006119,G3DSA:3.40.50.1390,PTHR30461, mobidb-lite,IPR025827,PS51737,PF00239, SM00857,G3DSA:1.10.10.2600,SSF53041

SEQ ID NO: 11173 - protein, 432 aa, Unknown
  Description of Unknown: Integrase B11174 sequence
  PS00397,IPR038109,IPR006119,PS51737,PF00239,G3DSA:3.40.50.1390 ,PTHR30461,IPR025827,SM00857,G3DSA:1.10.10.2600, SSF53041,IPR011109,PF07508,PS51736,IPR006118, cd00338,PF13408,IPR036162,PTHR30461:SF3
MRVALYARVSTEEQTHGLSIDTQLDNLRQWAKDNGHTVVDEYVDLGVSARKAPSKRPELQRLLTDLARVELIVFTKLDRWTRNVKGYYDVQEQLDKHKVAWTAIQEDYETLTSSGRFKVNIMLSVAENEADRTSERIKVVLDRKIQRGEYIGNRVPYGYSVIDKHLVPNDDADIVRAAYEFYRRTGSIYQVKNYLHEHGHPCVYVTVCRILRNPMYAGRYRDNEHYCEPIIQPEVFDEVQAMLEKRSYRQNKSKRVYLFSGMIRCAYCGKIQVGAWSGQTRETYRYRCNYHYLNGRCPNAIQLKESVVETFLLDNVAAELKKLTAELETPKKKKRSPDKAAIMAKVERLQELYVDGMIDREKFRADREKLLAQIQEPPPAKDLTTARQIVLAADFRERYNELSREDKRTLWRSVVDHITADDLGHIEVYFYP

SEQ ID NO: 11174 - protein, 432 aa, Unknown
  Description of Unknown: Integrase B11175 sequence
  cd00338,PF13408,IPR011109,Coil,PS51736, G3DSA:3.40.50.1390,IPR006119,IPR036162,PTHR30461,IPR025827, PS51737,PF00239,SM00857,SSF53041
MRVALYSRVSTQEQAEHGLSIDAQIAVLDEWSKENNHIVVDHYTDLGISARSPASKRPELQRMLRDVEDGKIDLIIFAKLDRFFRNVKEYYKVEDVLERCGVAWKAISEDYETQTASGRFKVNLMLAVAQDEADRTGERIKAVFKRKREKGLAISGSAPYGVTINNGIYCPGEDADKARQLFNEYLNLRSVSQLVKTTTFSYHGLRRILSNHHYVDAGVVDQDTFDRVQSILEERSQRHVRSDRVYLFSGLVVCPYCGRKLSSCTVNGYKYYRCQKHLEGHCEGKYVSEGKVEKYLLHRIMPSVEGYNLRIQKERVKDVDVGKLQKKLDKLADLYLSDLITKEKYEKEYKATQTAIVEAEREKAPIDPESIKPVLDAYKSLSDEGKRIFWSRVVRTIKPTEKGFDIELNYTYRNKTSDILQYVQTNIFQNQS

SEQ ID NO: 11175 - protein, 432 aa, Unknown
  Description of Unknown: Integrase B11176 sequence
  PS00397,IPR038109,IPR006119,PS51737, PF00239,G3DSA:3.40.50.1390,PTHR30461,IPR025827, SM00857,G3DSA:1.10.10.2600,SSF53041,IPR011109, PS51736,IPR006118,cd00338,PF13408,Coil,IPR036162,PTHR30461:SF3
MRAALYIRVSSEEQARHGLSLQEQRDALMRYAKANKMLVVGIYEDAGISARKPYKQRPALLRLLDDCKAGKVDTILFIKLDRWFRNVAGYYDVQTLLDKYGVTWQATEEEYETRTASGRLKVNIMLSVAQDEADRTSERIKFINDGKRAKGQPAGSKAPLGYIVKDRQYQIDNGTVDAARDMFAAYIKLQSVLGVKKYMLETWGIDRAYTKYVNYFRNRLYIGEVYGIENSCPALISKQDFDIVNDILRQRSQRCAGVETDRVYLFSGLLHCKECGKTMQSETAKQIYTYYRCRTRMLDNSACQHKKRIREDALEDYLLHELEGIAERNNRYYKKAEKKPTQSADAIRKKMSKLKTLYLNDLIELDEYKREYASLKKTLETVEEKPKTNLDALRNGLAEYDTYSREEKKEFWTRFIRRIDADDDGAFFVTPR

SEQ ID NO: 11176 - protein, 432 aa, Unknown
  Description of Unknown: Integrase B11177 sequence
  cd00338,IPR011109,PS00397,IPR038109,Coil, PF07508,PS51736,IPR036162,IPR006119,G3DSA:3.40.50.1390, PTHR30461,PTHR30461:SF3,PS51737,PF00239,SM00857, G3DSA:1.10.10.2600,IPR006118,SSF53041
MRIAGYLRVSTQKQADFGVSIEMQREIIIKHAQTFDIIEDRGDIVFYEDEGYSAKSLERPAMKRLIEDIKNNDIEVLFVYDQARISRDIWDIKKVLELLNKYNVVLKCLYDDASIETANDRFRTYMGSLHNQYERERVCERTNDALASIPERGGNPIGGKPAFGYVRDDSKNFIIDEEQAKIVRNVFALACQHKSMDEIAIYLRVAVPDRKWKSATIKHMVENKKYAGILEYKGKEYRDIIPAIVSEEVFKRASIYYRHKSAKASVKYYYDELVYCTKCKMKMTGRSSYGKTKQIYYYYYCRNCKGTFSQLLLNRVVAGEIYADGYIEHVDGVYEELFSAKRKYQKRISRLDERYIAETISEEEYLALKLPLMKKLEEVKMWIEEENIDDVAFSSLNTDKERHDYAQSRIKCIEVDNEARKVSKIVYLSRYK

SEQ ID NO: 11177 - protein, 432 aa, Unknown; identical to SEQ ID NO: 11157
  Description of Unknown: Integrase B11178 sequence
  cd00338,PF13408,IPR011109,IPR038109,PF07508, PS51736,IPR036162,IPR006119,PTHR30461,G3DSA:3.40.50.1390, IPR025827,PS51737,PF00239,SM00857,G3DSA:1.10.10.2600, SSF53041

SEQ ID NO: 11178 - protein, 431 aa, Unknown
  Description of Unknown: Integrase B11179 sequence
  cd00338,IPR038109,PS00397,Coil,PS51736, G3DSA:3.40.50.1390,IPR006119,IPR036162,PTHR30461,PTHR30461:SF3, PF00239,SM00857,G3DSA:1.10.10.2600,IPR006118,SSF53041
MKYVACYCRVSTEEQKKFGFSIQAQKDALEKYCKENGYKYEFYIDEGISASSMKKRKALNEMLNKVSVFDMILFTKLDRLSRNVLDANNINKLLIDNKCTMKAIDEDDIDTSTADGTFIFNLKVSLAQREIGKTSERIRFVFNNKREKGEITSGTKKYGYDIVDKRFSINSLEAENIINLYKYFVNVNGNMKKTYEYFIQHFDGKGYDALVNYLSDTAYIGKYKLYRKDVYLENYIPAIVTTELWNAVQKLRTRKTIMKKNNVDDLFSGLIFCNSCKCRLCKKVDNRSKNNLIRYICDNNYRYIPGTTKKRCPASNIIKEEFIETYLLKNLENEFNKYKSVINFQTAKNVKKTNTALIKKLENKLLKLKDLYLDDLIDKDTYSKDYKKYSDDLKKLKSGPIEKPQRDFSHVEEILNSDYINIYNNLTRENK

SEQ ID NO: 11179 - protein, 431 aa, Unknown
  Description of Unknown: Integrase B11180 sequence
  PS51736,IPR036162,IPR006119,PTHR30461, G3DSA:3.40.50.1390,PF00239,SM00857,cd03768, SSF53041
MGPSVRLGYLRVSTDNEEQLAALENQRSRILGAGVDRIIEDVESGLSQDRPGYLELLHLIDTRQISEVVCTRIDRLGRDAAATDALIAVAAKRGVTITALDGGTVDSSTPQGFLLSRIATSIAEMESRMLSLRVRAGYREGRKRSRPLRGKVAWGYRLKADRSALEPHPVEHARAAAFLELCKTCNWRMNTALDRWHAAGGGPIPLASCRSVKAWLLNPVLRGGLGYLKHTDNTYEEVVWETHPPLLSHSDFLIMERQLEDNRRRWGHSAKVIPRLLTGLCVCAGCRRKMTYAGTRTIPSLLCKSRECPQRYKSTHEHVIRDAINTELSSRNQALATRITAPDPKILALQVEIAELEAKGDPDLAPAVELKRQRLKARAQRLGPERALLQAFADPLIWSQLDASELRKLYLALVEQVVVDSQAVASVVLRL

SEQ ID NO: 11180 - protein, 431 aa, Unknown
  Description of Unknown: Integrase B11181 sequence
  cd00338,PF13408,IPR038109,Coil,PS51736, IPR036162,IPR006119,G3DSA:3.40.50.1390,PTHR30461,IPR025827, PF00239,SM00857,G3DSA:1.10.10.2600,SSF53041
QKRDIENYCRKNELVITDWYIDDGYTGTNMDRPELQRLVNDCGRKRIGCVVAFKLDRLSRNMIDGIYLIEKVFQKYNVVFKCVHDSVSYDSPMEQAYTQMMAVFAQLDKNTMMLRMRGGMLERVKQGYWMGGGNLPYCYSYSKEQGILMPIPERKEQANKALDLFISGYSDEKIYKTLGYTSEMVVRSILTGIVNVGMIPYKGNVYQGKHEPIFDKARFELAQELRKSRRKTKATCLTKEPNLLTGLCYCGVCGCAMRYQKWGSDKHKIYCMSRNKSMSYLPNHNPDCNNSLEWADDIEKQVEEEMLKISLDLSSYKPKEKATKLEIMQSQLEKEQIKLKRLYSLYADGNDTVLEMIKELEKQIKDMKDNITAESKNAVNVQKKEFVYENIKKLADIWDNIDKKQKNMILKTIIDKIVIVNGNIEIQLKNF

SEQ ID NO: 11181 - protein, 431 aa, Unknown
  Description of Unknown: Integrase B11182 sequence
  cd00338,PF13408,IPR011109,IPR038109, PF07508,PS51736,G3DSA:3.40.50.1390,IPR006119, IPR036162,PTHR30461,PTHR30461:SF3,PS51737, IPR025827,PF00239,SM00857,G3DSA:1.10.10.2600,SSF53041
MQERTIMKIDALPQLERKTRVCAYARVSSGKDAMLHSLSAQVSYYNNLIQNTEGWHFVGIYADEAISGTKETREEFNRMIEDCRAGKIDLIITKAISRLARNTVTLLATIRELNSLGVDVYFEEQGIHSISGEGEMILTLLASVAQEEARSVSENMKWRIKKNFEEGIPWGALLYGYDVIDSKYYVNEKEAEVVRMIFNLYLEGLGKEGIAKKLNSLGLKTRNGYAWSDSSVRQILSNYDYTGNLILQKTYRLDYISKKTVVNHGEVPRYHVEESHEPIITMEIWNKVQEEVKRRNDHIKRKEHPYQSPYKGLIKCGCCGKNYLRKETPYRTMWTCATYQKKGKDGCPSKRIDEEILLATIEELQKTTNFDKTKIKAIIINNDMSLYILNKDGTEVRGTWSIHSRSDSWTPEMKAKAKERELERMRQLWQK

SEQ ID NO: 11182 - protein, 431 aa, Unknown; identical to SEQ ID NO: 10121
  Description of Unknown: Integrase B11183 sequence
  cd00338,PF13408,IPR011109,IPR038109,PF07508, PS51736,G3DSA:3.40.50.1390,PTHR30461,IPR006119,IPR036162, IPR025827,PS51737,PF00239,SM00857,G3DSA:1.10.10.2600, SSF53041

SEQ ID NO: 11183 - protein, 413 aa, Unknown
  Description of Unknown: Integrase B11184 sequence
  cd00338,PF13408,IPR011109,IPR038109,PF07508, PS51736,IPR036162,IPR006119,G3DSA:3.40.50.1390,PTHR30461, PS51737,IPR025827,PF00239,SM00857,G3DSA:1.10.10.2600, SSF53041
MNIRKIEAKNNKRKKRICAYVRVSTTNGSQLDSLENQKVYFEKLYAEHDDVEFLGVFCDKGISGSKYDRPDFQTMLDACRKGQIDVIHTKSISRFARDLINVLEISRELKTLGIDIFFEEQNIHTLSNEGEVILTVLASLAEEELQSMSGNQRWSFCRKFQKGELLINAKRFLGYDLNEKGELVINKAEAQIVRTIFYSYLEGMGTHRIAKKLNEGKVPTVAGKKWYDSTIRNILKNEKYKGSLLLQKYFHDGVNGPKKLNQGQVEQYYIEDNHEGIVSKEIWERVQVKMKSRSRIQGTNKTYKFSRMLKCQYCGSTLKRQVSYKKRIVWCCSKYIKEGKNSCKGMRVPERDIEDWKLSSPVIVLERIEDGEKHYGYTGQKATANGHISNSEKDQSSRLLSSVYRPRRTAIKL

SEQ ID NO: 11184 - protein, 413 aa, Unknown
  Description of Unknown: Integrase B11185 sequence
  cd00338,PF13408,IPR011109,IPR038109,PF07508, PS51736,IPR036162,IPR006119,PTHR30461,G3DSA:3.40.50.1390, PS51737,IPR025827,PF00239,SM00857,G3DSA:1.10.10.2600, SSF53041
MNIRKIEAKNNKRKKRICAYVRVSTTNGSQLDSLENQKLYFEKLYAERDDVEFLGVFCDKGISGSKYDRPDFQTMLDACRKGQIDVIHTKSISRFARDLINVLEISRELKTLGIDIFFEEQNIHTLSNEGEVVLTVLASLAEEELQSMSGNQRWSFRRKFQKGELLINAKRFLGYDLNEKGELVINKAEAQIVRTIFYSYLEGMGTHRIAKKLNEGKVPTVAGKKWYDSTIRNILKNEKYKGSLLLQKYFHDGVNGPKKLNQGQVEQYYIEDNHEGIVSKEIWERVQVKMKSRSRIQGTNKTYKFSRMLKCQYCGSTLKRQVSYKKRIVWCCSKYIKEGKNSCKGMRVPERDIEDWKLSSPVIVLERIEDGEKHYGYTGQKATANGHISNSEKDQSSRLLSSVYRPRRTAIKL

SEQ ID NO: 11185 - protein, 430 aa, Unknown
  Description of Unknown: Integrase B11186 sequence
  cd00338,IPR011109,PS00397,Coil,PS51736, G3DSA:3.40.50.1390,IPR036162,IPR006119,PTHR30461,PTHR30461:SF3, PS51737,PF00239,SM00857,IPR006118,SSF53041
MTTKVERCAIYIRVSTTEQMMHGKSLEAQKEYLTNYAREHNMAVVGIYADEGKTARKELKKRKAIHSLLQDVESGKIDVIIFWRIDRWFRNLSDFYKVQDILDNHNVRWISTSEPGINMETRDGRLQLNVVLSIGQNEVDTTSERIKFVNEASIRSGKLIFGDVNMGYGYKSGIVDGQKRMIKDPDREHVVDAFYKYFFKHQNKCATLRYIQETFDPDFSFGIMRTLLSSEFYKGTYRGFPYCPAYLTEDEWNKLQKIQKRNVKATPSGRIYLFAGMIRCPVCGQLLCGTGCSSIINRKTGAKRTYCYYRCNRAMIDHICSYRHRLSQNLVENYLLDNLENEYKNYKVKCEKIEKEKEKQKKKQSPEKLRKELDRLNFLFQKGRIDWDYYNEEYGRVESELNDLQSVLPEPAPNYSYLEELLDTDFRTMY

SEQ ID NO: 11186 - protein, 430 aa, Unknown
  Description of Unknown: Integrase B11187 sequence
  cd00338,PF13408,IPR011109,IPR038109, PF07508,PS51736,G3DSA:3.40.50.1390,IPR006119, IPR036162,PTHR30461,PS51737,IPR025827, PF00239,SM00857,G3DSA:1.10.10.2600,SSF53041
LERKVHRVQQRPSKPKLLKVVAYARVSSGKDAMLHSLAAQIDYFQNLIRQHPGWEFCGVFADEAKTGTKDERPEYQKMLEKCRNREVDLVITKSISRFARNTVTLLETVRELKSLGIDVWFEKENLHSTSGDGELMLSILASFAQEESKSVSDNMKWRIRNDFQQGKIGSITIFGYRRNADGVLEIEESEAKIVQMIFADYCSGMGQCAIAKKINAMGISTRQGNFWTGQRVKEILVNEKYVGNMLLQKYYRQDPIGKRKMKNQGELPKYFVEQSHEAIISAELFEKVQNLVKKQTKQFSHPGATNRYPLSGMVQCAACGKSYQRKIYKQGAVWMCATYLRQGKSHCPTAKQISERILYEKICSALQIKEFDVEIVKSKIENILVSPNWLTFLFKDNTEKAISWKNYSRSESWTPEMRQAAAERSRKCQK

SEQ ID NO: 11187 - protein, 429 aa, Unknown
  Description of Unknown: Integrase B11188 sequence
  cd00338,PS51736,IPR036162,IPR006119,PTHR30461, G3DSA:3.40.50.1390,PF00239,SM00857,SSF53041
MLLRVGYCRVSTASAEQQQALPVQRARIELESPDLILSDVESGLNPDRPGYLELRRLVEAGQVAEVLATEFSRLGRDATESDAFVRLCDAQGVICRTIAEGQLTMATPEGLLLTRLRGSLNEGESMRLSRRIHRGLEQGRRLGKPMRKPAWPYRLSPDRLSLEPDPEQWPIALAFVEHLRAHGWRTMRALDSFPHQIPLGSCRAVRAWLLNPTTRGGLGYRQGANHTYAEVIWGRHPAVVSHADFDAYQAASAQNRRHWGSNAKREQRALTGLCRCSECAWRMKYISGRTVASLRCAGPSCPHHYAGIREAVLVEWLINQLAAHAGTWLAQKVSQRHDPMVAELQRQVEALGRLSDPDLADAIAQKQTRIVQLQQQGPSVDPELVERISRPQWWQAAPPEALATVLHATVKEVLIDMSQRAPIAVEFRF

SEQ ID NO: 11188 - protein, 429 aa, Unknown; identical to SEQ ID NO: 9549
  Description of Unknown: Integrase B11189 sequence
  cd00338,PF13408,IPR011109,IPR038109, PF07508,PS51736,G3DSA:3.40.50.1390,PTHR30461, IPR036162,IPR006119,IPR025827,PS51737, PF00239,SM00857,G3DSA:1.10.10.2600,SSF53041

SEQ ID NO: 11189 - protein, 428 aa, Unknown
  Description of Unknown: Integrase B11190 sequence
  cd00338,IPR011109,IPR038109,PF07508,PS51736, G3DSA:3.40.50.1390,IPR006119,PTHR30461,IPR036162,PTHR30461:SF3, PS51737,PF00239,SM00857,G3DSA:1.10.10.2600,SSF53041
VNTTTVRRCVLYARISLSKEESVSVERQLTSARKYAEGRGWQVIGEFIDDGVSATANRPEDRKGWTALLAADGFDAVVIWKVDRLARRVLDFLHVDDVLQRRGAGLVAVEDPIDMTTPMGRAFATILAVFGEMEAAAIGARVRAARAHLLAEGRFVGGGIPYGYLSALNPDGPGRVLVKDPERVGWLAEAIAMALRGVTVNAIASWLTAQAAPLPRGRTRKTGSVAWSNQTVNHLLRNPILAGMTPRNPGRGRNTRDVDPFAVVRDDNGDPVVNETLALISTEEFTALQNLLDSRTSPQSVKRRDREKTSPLLSRVAHCDDCNVYMCRGTNQKRPVLYCPRCRQTLARTPFDPYLIRRLLRERGREPYGAATVRECWKALGTNDEARREILLSQLDSLRIRRGVVGRYFDKDRVLLRWRTAEPSQEAA

SEQ ID NO: 11190 - protein, 428 aa, Unknown
  Description of Unknown: Integrase B11191 sequence
  cd00338,PF13408,IPR011109,IPR038109, PF07508,Coil,PS51736,IPR036162, IPR006119,PTHR30461,G3DSA:3.40.50.1390,PTHR30461:SF3, PS51737,IPR025827,PF00239,SM00857,G3DSA:1.10.10.2600,SSF53041
MQKKRGVLYVRVSTTKFEQESSLEIQEQALTQICESKNIEIVNTYSDKASGTRIRKRKGMIALLHDAGIDFKARNDKNTDDFIVNELRKPKFDYIICKDVFRFGRNSGEAMEVINTLRNRGIYVYFVNSATDTFDENYEFTLSLLFNIAQNESHNTSQRIKFSKRHLAEQGKYSPARLPYGYKRVINADGETQIVIDEEQAEIVRYIYERYKVDGGHVISQELNLKGIPTQQGHKWTNDKIHRIISNEAYFGSPIVQKWKKNNIKDIYFHKADEEQHIQLHNVIPAIVTEDQFKELQILKKQRTNPATSKGQRITKDDIFYGKIFCAKCGARFVRHIGDGKKITYMCQTRRKYGSNECDCKGIAYNTLVNAITQCTVDDSIGKVRDIICSKLLDQINIAKTEIEAIENEFDNKLIALESKISMIVDKF

SEQ ID NO: 11191 - protein, 413 aa, Unknown
  Description of Unknown: Integrase B11192 sequence
  cd00338,PF13408,IPR011109,IPR038109,PF07508, PS51736,G3DSA:3.40.50.1390,IPR006119,IPR036162,PTHR30461, mobidb-lite,PS51737,IPR025827,PF00239,SM00857, G3DSA:1.10.10.2600,SSF53041
MNIRKIEAKNNKRKKRICAYVRVSTTNGSQLDSLENQKVYFEKLYAERDDVEFLGVFCDKGISGSKYDRPDFQTMLGACRKGQIDVIHTKSISRFARDLINVLEISRELKTLGIDIFFEEQNIHTLSNEGEVVLTVLASLAEEELQSMSGNQRWSFRRKFQKGELLINAKRFLGYDLNEKGELVINKAEAQIVRTIFYSYLEGMGTHRIAKKLNEGKVSTVTGKKWYDSTIRNILKNEKYKGSLLLQKYFHDGVNGPKKLNQGQVEQYYIEDNHEGIVSKEIWEKVQVKMKSRSRIQGTNKTYKFSRMLKCQYCGSTLKRQVSYKKKIVWCCSKYIKEGKNSCKGMRVPERDIEDWKLSSPVIVLERIEDGEKHYSYTGQKGTSNSHISNSEKNQSSRLLSSVYRSRRAAIKL

SEQ ID NO: 11192 - protein, 428 aa, Unknown; identical to SEQ ID NO: 9583
  Description of Unknown: Integrase B11193 sequence
  cd00338,PF13408,IPR011109,IPR038109,PF07508, PS51736,G3DSA:3.40.50.1390,IPR006119,PTHR30461,IPR036162, PTHR30461:SF3,IPR025827,PS51737,PF00239,SM00857, G3DSA:1.10.10.2600,SSF53041

SEQ ID NO: 11193 - protein, 428 aa, Unknown
  Description of Unknown: Integrase B11194 sequence
  cd00338,PF13408,PS00397,PS51736,IPR036162, IPR006119,PTHR30461,G3DSA:3.40.50.1390,IPR025827,PF00239, SM00857,IPR006118,SSF53041
MRVALYCRVSTEEQAMHGLSIDAQKAALDEWAANHTYKIIDHYIDLGISARKPISKRPELQRLLRDVEMGRIDLIAFTKLDRWTRNIREYYKCQDVLEANNVTWTAITERYGTSTANERLLTNLVLSISQDEADRTSERIKAVFEDKRRRGLVPAGKVPLGIKLVDGHYAPSDDAPKVVELFDTYINTRSIKETARRFGLTTQGISYMLRNKTYLDTGLIDEQTFNLANNIKQTRGQRATRTNRVYIFSGLVVCPYCGRKLSSANNNGYNAYRCCRKDEALCEGYYINEKKLERYCLSQLMPSVKEYNLAIKKKKQKAPDISALKAKRDKLTDLYMENLISKEKYAEDYKALCNAIIEAESSPRPVSTEEIKTVLSAYDGLSDAGKKAFWSRVLTKIVPRPETGDFTLLYTNGNISCDILRYVHNGIN

SEQ ID NO: 11194 - protein, 428 aa, Unknown; identical to SEQ ID NO: 10083
  Description of Unknown: Integrase B11195 sequence
  cd00338,PF13408,IPR011109,IPR038109, PF07508,PS51736,IPR036162,PTHR30461, G3DSA:3.40.50.1390,IPR006119,mobidb-lite,PTHR30461:SF3, IPR025827,PS51737,PF00239,SM00857,G3DSA:1.10.10.2600,SSF53041

SEQ ID NO: 11195 - protein, 428 aa, Unknown
  Description of Unknown: Integrase B11196 sequence
  IPR011109,PS51736,G3DSA:3.40.50.1390,IPR036162,IPR006119, PTHR30461,PS51737,PF00239,SM00857,cd03768, SSF53041
MKIGYLRVSTDTEAQRSALENQRQRIVSAGVDRIIEDQESGLSQSRPGYMEILELVSRKAISEIVVTRIDRLGRDAAATDALIAACALRGVAIRCLDGGTVESETPGGFLLSRITTSLAEVESRMLSLRIVSGYNAARKAGKPVRGRAPWGYRVSEDRARFEPDPTQFPQALEFIQLLKDCDMRMTRALEKWQKTHETLPFACNTSVKGWLENPVIRGGVGWLKGKTRTFSQVIWDQHQPLISHADFAIMERQFEQNRKSWGSTARLPPMLLTGLCVCGTCKMRLTYQRRRTYPSLLCKHIKCVNRYKGIRETKVVEAINSALSKRNTELANIVKKEDSPAVLKLRKEIAQLEALNDPDFAGALEIKRARLAETQVINNAPDPKALEAFADPTIWAQLNRDELRELYLELLEQCVLEPSGEITVVLRL

SEQ ID NO: 11196 - protein, 428 aa, Unknown
  Description of Unknown: Integrase B11197 sequence
  cd00338,PF13408,PS00397,PS51736,G3DSA:3.40.50.1390,PTHR30461 ,IPR036162,IPR006119,IPR025827,PF00239,SM00857,IPR006118 ,SSF53041
MRVALYCRVSTEEQALHGLSIDAQKAALDEWAANQSYSVVDHYIDLGISARKPITKRPELQRLLRDVELGKVDLIAFTKLDRWTRNIREYYKAQDILDKHGVAWKAIHEDYETQTAGGRLKVNIMLAVAQDEADRTSERIKTVFERKRQQGIVPTGKVPLGVQIVDGHYAPSDEADKVVDIFNTYINTRSAQETARRFGLTMQGISYMLRNRTYLDAGVISEEVFNLAQNIKQTRAQRRGRTDRVYLFSGIIVCPHCGNKLSSAYNNGYNAYRCCRRHDGLCDGFYVNEKKLEKYCLAQLMPSVKEYNLIVKKQKKKAPDIASLKQRRDKLTDLYMDNLISKEKYAEDFKAITDEIMVAENTPRPVNTEEIKTVLAAYNGLSPAGKKAFWSRVLTKIIPRPETGDFTLLYTNGNITSDILPYVYKRLI

SEQ ID NO: 11197 - protein, 413 aa, Unknown
  Description of Unknown: Integrase B11198 sequence
  cd00338,PF13408,IPR011109,IPR038109,PF07508, PS51736,G3DSA:3.40.50.1390,IPR006119,IPR036162,PTHR30461, mobidb-lite,PS51737,IPR025827,PF00239,SM00857, G3DSA:1.10.10.2600,SSF53041
MAVRLIKTKSNRKKQRVCAYTRVSTTNSSQLDSLENQKAYFETFYVNREDVDFLGVYYDKGISGSKEKRPSFQAMLEACRQGQIDLIHTKSISRFARNTMTVLEVSRELKALGVGIYFEEQNINTLSNEGEGMLSVLASLAEEELQSMSDNQRWAFQRKFQRGEMVINTKRFMGYDVDDKGELVINEAEAQIVRRIFQLYLDGMGMHRIAKLLNQENVPTVTDAKWHDTTVRNILKNEKYKGTVLLQKYFHVGINGPKRLNQGQVEQYLIEDNHEPIVSKEVWQAVQDKLASKTWKQGVNKHYRFTSMLKCEYCGSTLKRQVTYKKQIVWCCSKYIKEGKASCRGMRVPEKAIEEWKLRTPVTVIERNEYGQKHYSYSSQESAADGHPSASNQNKSGSLLSGVHRPRRTAIKL

SEQ ID NO: 11198 - protein, 427 aa, Unknown
  Description of Unknown: Integrase B11199 sequence
  PF13408,IPR011109,IPR038109,PF07508,Coil, PS51736,IPR036162,PTHR30461,IPR006119,G3DSA:3.40.50.1390, PTHR30461:SF3,PS51737,IPR025827,PF00239,SM00857, cd03768,G3DSA:1.10.10.2600,SSF53041
MTRKKPAAVTPPPEVRRCAIYTRKSTSVGLDSDFNSLDAQREACAAYIERQQGWRLVEEHYDDGGFTGANTDRPAFQRLMADVEAKRVDVIVVYKVDRLSRSLLDFVKVMERLNASGASFVSVTQNFSTADAMGRLTMNMLMSFAEFEREMISERTRDKIAASRRRGKWTGGPTPFGYKLVEKKLVIDDVEAHVVRELFRLFLEHRQMAKVAQLLNDQALLPRGMKGRPGKHGLLWRKESVARILRSPVYVGQVPYHDEVHTGEHQALVDDETFQKAQRILEGKQGFSRQTGLNPDYLLRGLIRCKKCDGAMCPGSTVRGTRQHRYYRCSTRDRHGIKACSARPLPAEAIERFVVERIARHTTEGGFVPHVEQLLHARTESRRATAERLRAELPAKIAAAADQAKRLSEQATRLKGRARELVEAQLV

SEQ ID NO: 11199 - protein, 427 aa, Unknown
  Description of Unknown: Integrase B11200 sequence
  cd00338,PS51736,G3DSA:3.40.50.1390,IPR006119,IPR036162, PTHR30461,PF00239,SM00857,SSF53041
MERLRLGYCRVSTASDEQQQALPYQQSRVEREGCDLILSDVESGLNPLRPGYLELRRLVAAGRVAEVIATEFSRLGRDAMEADDLVRLCDQHATICRTLAEGPQTMATPEGLLLTRLRSSLSQGESMRLSARVRRGIDEGRRHGRPMRKPCWGYRLTADRQALEPDPAAWPVATRFIDALRRNGWRLQPTLQAFPEPVPLRHCRSVRAWLLNPTLRGGIGYQQGANHTFSTVLWGLHPALLSDADFQAYEAAAHGNRRNWGANASRRPRALTGLCRCEECGWRLKYISGRTIPSLRCSGLDCSQHYRGVREALVIGWALEQITAEAGVALARLATTTEPPEVISLRQQIASLERLADPDLEPALAAKRQRLDMLTRLPGLNPDLLRNIQDPRWAAAASYGEVQALLQQTVIEILIARQAPTAIRLKL

SEQ ID NO: 11200 - protein, 427 aa, Unknown
  Description of Unknown: Integrase B11201 sequence
  cd00338,PF13408,IPR011109,PS00397,IPR038109,PS51736, IPR036162,PTHR30461,IPR006119,G3DSA:3.40.50.1390, IPR025827,PS51737,PF00239,SM00857, G3DSA:1.10.10.2600,IPR006118,SSF53041
MKRAALYARVSTDEQARHGYSIGAQVTALRDYAKNHHYVIAGEYIDEGISARKSYKKRPALLQLLEAVQDDKIDVILFIKLDRWFRNVAAYYQVQPILDAHNVAWQATMEDYETVTASGRLKVNIMLSVSQDEADRTGERIKFIFADKKSRGEVLSGNLPYGYKAVNKHMVIDEHTGPIAQAIFQRFIDCRNITEICKWLMNEHDLIRNHSTIRKMLSNKLYLGGEFHPQLIDRETFQKTQEILATRSLRHPKFSNKIYLFGGMVFCKECGMRMKAYNPGKYEYYICRTHQDYGNRKCTNNVTIRQSYLEEYLLNHLVDALKDYNVTIMEKAKPIKDPEKIKRKMEKLKDLYLNDLISREIYERDYRALENDLSCLPYAPKIISVDTVQDAVNKYRSLSKVSQKAFWSRILKRIEIDSNRDIFLVFG

SEQ ID NO: 11201 - protein, 426 aa, Unknown
  Description of Unknown: Integrase B11202 sequence
  cd00338,PF13408,IPR011109,IPR038109,PF07508, Coil,PS51736,IPR036162,PTHR30461,IPR006119, G3DSA:3.40.50.1390,IPR025827,PS51737,PF00239,SM00857, G3DSA:1.10.10.2600,SSF53041
VRVKVINKRPASVLQKKRVCAYARVSTDSRRQEDSLENQMETYERLITGNPEYEFIGVFADQGISGYCENRPQFQRMMEKARAGEIDLIITKSISRFARNTVTVLKFARELKELGVGIFFEEQNINTLSGDGEMMLAVLASFAQEESRSMSENNKWSIRKKFERGEVMITTSRFLGYDKNEYGDLIVNRKEAEIVSLTFDLYLLNVGSSRIGELLDYLGVKTVTGTTWESGTINGMLCNEKYKGDFHLQKYYTPENKRNHTRKNNGEVQSYYISENHEPIVSPEVWEKVQEVREQRKRDRNIGQDSTMKFQNRYPLSGMLICPYCGKTLRRRQVYKKKIQWLCSTYIEKGVKACKGIRIDDAELQGLNIAEQTVIEEVVKNGKKHYCYTSKADFECGIRNSTVSAEIKDGSVLPSVNRPRRTVIKL

SEQ ID NO: 11202 - protein, 426 aa, Unknown
  Description of Unknown: Integrase B11203 sequence
  cd00338,PS51736,IPR036162,PTHR30461,IPR006119, G3DSA:3.40.50.1390,PF00239,SM00857,SSF53041
MTLTVAYARVSTASGEQLSALDAQIAWLQDQGPDVLLSDVESGRVITRPNYQQLRAMVERGQVGTVLATALSRLGRDATESDAFVALCDARGVVVTTRDEGRLSMATPEDLLLTRLRGSLNQGESMRISQRVRRGLEQGRAMRKPMRKPCWGYRLRADRLAMEPDPEAWLPAQRFIDALQAGGWRMLPVLQAHRATVPFRSARGVRAWLLNPTLRGGIGYQQGPNHTFAEVHWDQHPALLTHAQFAEFERQVQRNRRLWGANVTRKPRILTSLVVCAECGNVMKYISGRTIPSLRCYGDLCSQLYRGTREAVIVQFAIDAIREQAAERLAAMATNDEPPEARELRRQIESLEKLADPDLAPVIDAKRQRLEQVLTRPNVDGELVRKLADPRAWDGLDEHEIAGLLRAVVRRIVVAKQEPVAIDLIL

SEQ ID NO: 11203 - protein, 426 aa, Unknown
  Description of Unknown: Integrase B11204 sequence
  cd00338,PS51736,G3DSA:3.40.50.1390,IPR006119,IPR036162, PTHR30461,PF00239,SM00857,SSF53041
MRLRVAYGRVSTTSGEQLSALETQLSWLRNQACDLVLSDVESGRNVERPDYQRLRSLVEEGRVAEVIATRLDRLGRLASECDAFIELCDRKRAAVTTRDDGRLTMATPEDLLLTRLKASLAQGESMKISQRIHKAREQGKRDGRPMKKPCFGYRISRDRTRLELDPEQAPIAMELIDALRDSNWRMQPVLEEFIGQIPLNSVRALRSWLLNPTIRGALAYDQIKNHEFKQVLWDQHDALLSHEDFAAMQVVMECNRRLWGRHGHKSVRALTGLCVCSECGNKLVYIPGRRWPSLRCRGDVCSQRYKGIRESEVLGFATEAMAAQAAQRLAAMAESADKPEVALLRAQIETLQAQNDPDLIEVLERKKNRLESLVNAPALDQELARKIADPRWFDTLEYDELTLVLHQVVECIEITKQEPSGLRLKR

SEQ ID NO: 11204 - protein, 426 aa, Unknown
  Description of Unknown: Integrase B11205 sequence
  cd00338,PS51736,G3DSA:3.40.50.1390,IPR006119,IPR036162, PTHR30461,PF00239,SM00857,SSF53041
MRLRVAYGRVSTTSGEQLSALETQLSWLRNQACDLVLSDVESGRNIERPDYQRLRALVEEGRVAEVIATRLDRLGRLASECDAFIELCDRKRTAVTTRDDGRLTMATPEDLLLTRLKASLAQGESMKISQRIHKAREQGKRDGRPMKKPCFGYRISRDRTRLELDPEQAPIAMELIDALRASNWRMQPVLEGFIGRIPLNSVRALRSWLLNPTIRGALAYDQIKNHEFKQVLWDQHDALLSHEDFAAMQVVMECNRRLWGRHGHKSVRALTGLCVCGECGNKLVYIPGRRWLSLRCRGDVCSQRYKGIRDSEVLGFATEAMAAQAAQRLAAMAESADKPEVALLRAQIETLQAQNDPDLIEVLERKKSRLESLINAPALDQELARKIADPRWFDTLEYDELTLVLHQVVECIEITKQEPSGLRLRR

SEQ ID NO: 11205 - protein, 426 aa, Unknown
  Description of Unknown: Integrase B11206 sequence
  cd00338,PS51736,G3DSA:3.40.50.1390,IPR006119,IPR036162,PTHR30461 ,PF00239,SM00857,SSF53041
MRLRVAYGRVSTTSGEQLSALETQLSWLRNQACDLVLSDVESGRNIERPDYQRLRALVEEGRVAEVIATRLDRLGRLASECDAFIELCDRKRTAVTTRDDGRLTMATPEDLLLTRLKASLAQGESMKISQRIHKAREQGKRDGRPMKKPCFGYRISRDRTRLELDPEQAPIAMELIDALRASNWRMQPVLEGFIGRIPLNSVRALRSWLLNPTIRGALAYDQIKNHEFKQVLWDQHDALLSHEDFAAMQVVMECNRRLWGRHGHKSVRALTGLCVCGECGNKLVYIPGRRWLSLRCRGDVCSQRYKGIRESEVLGFATEAMAAQAAQRLAAMAESADKPEVALLRAQIETLQAQNDPDLIEVLERKKSRLESLINAPALDQELARKIADPRWFDTLEYDELTLVLHQVVECIEITKQEPSGLRLRR

SEQ ID NO: 11206 - protein, 426 aa, Unknown
  Description of Unknown: Integrase B11207 sequence
  PS00397,IPR038109,IPR006119,PS51737,PF00239,G3DSA:3.40.50.1390 ,PTHR30461,IPR025827,SM00857,G3DSA:1.10.10.2600, SSF53041,IPR011109,PF07508,PS51736,IPR006118, cd00338,PF13408,IPR036162,PTHR30461:SF3
MRVALYCRVSSEEQVRNGLSLGVQIDRLRQWAADKRATVVGEYIDAGVSGKLPYKKRPALSRFIQDIQSGLKVDSLVFIKLDRFYRNVKLYYQVVGIMEQYDVSWIATEENYDTATTDGRFKTNIMLAVAEQEADRVSDRIKFVFEDKKSRGEPTSGKIPYGYKVVDKHLVPDEETAPISQEIFQKYLDLRSIADTIRWLWDSHGISRCPSGIRQLLSNKLYLGSDNHPALVDRETFQRAQELLASRANRHSPSGKTYLFGGLVYCRDCGKRMKAYQPAKYEYYICRYHADYGSYKCINKVSTRQDKLEEYLLDNLVNEMVKYNATIEINDNPPKDKDRIRRKMEKLKDLYLDDLIDKQIYERDYTALQNELYEPEIASRTVDIGSLQDTIKLYRSLSKESQKAVWGRILKRIEIDHDGNIFLIPN

SEQ ID NO: 11207 - protein, 426 aa, Unknown
  Description of Unknown: Integrase B11208 sequence
  cd00338,PF13408,IPR011109,IPR038109,PF07508, PS51736,IPR036162,IPR006119,PTHR30461,G3DSA:3.40.50.1390, PTHR30461:SF3,IPR025827,PS51737,PF00239,SM00857, G3DSA:1.10.10.2600,SSF53041
MDQKRITKIDALPKLQKKTRVAAYARVSTGKDAMLHSLAAQVSYYNKMISEHEGWEFAGVYADEALTGTKDSREEFQRLISDCKAGKIDMVVVKSISRFARNTYMMLKTVRELKALGVDVFFEEQNLHTLTAEGEMVLTFLASFAQEEARSVSENMKWKIKRDYEKGILWGGKDMYGYKIVNRRLVLIPEQAELVKRVFKMYLDGCGVQMIANMLNKEGIRTLKDCTWNKSTVLNMIVNYNYTGGLVLQKTYREDYLSKKTKRNKGEKDMYVIDDDHEPIISLEDFLMAQELRKQRCELSNNKGHKNVRNRYTSLIKCSICGAKYKRKNRNKSKIWECSTYNTQGKNECASKAIPEEILNEVMSQVLGIDEVTDELVQNSIDYIEAFNGNKLVYHFKDGKIQEGYWKDRSRSESWTSEMREKARLN

SEQ ID NO: 11208 - protein, 413 aa, Unknown
  Description of Unknown: Integrase B11209 sequence
  cd00338,PF13408,IPR011109,IPR038109,PF07508, PS51736,G3DSA:3.40.50.1390,IPR036162,IPR006119,PTHR30461, mobidb-lite,IPR025827,PS51737,PF00239,SM00857, G3DSA:1.10.10.2600,SSF53041
MNIRKIEAKNNKRKKRICAYVRVSTTNGSQLDSLENQKVYFEKLYAERDDVEFLGVFCDKGISGSKYDRPDFQTMLDACRKGQIDVIHTKSISRFARDLINVLEISRELKTLGIDIFFEEQNIHTLSNEGEVVLTVLASLAEEELQSMSGNQRWSFRRKFQKGELLINAKRFLGYDLNEKGELVINKAEAQIVRTIFYSYLEGMGTHRIAKKLNEGKVPTVAGKKWYDSTIRNILKNEKYKGSLLLQKYFHDGVNGPKKLNQGQVEQYYIEDNHEGIVSKEIWEKVQVKMKSRSRIQGTNKTYKFSRMLKCQYCGSTLKRQVSYKKKIVWCCSKYIKEGKNSCKGMRVPERDIADWKLSLPVIVLERIEDGEKHYGYTGQKTSANGHISNSEKDQSSRLLSSVYRPRRTAIKL

SEQ ID NO: 11209 - protein, 424 aa, Unknown; identical to SEQ ID NO: 10037
  Description of Unknown: Integrase B11210 sequence
  cd00338,IPR011109,IPR038109,PF07508,PS51736, G3DSA:3.40.50.1390,IPR006119,IPR036162,PTHR30461,mobidb-lite, PTHR30461:SF3,PS51737,PF00239,SM00857,G3DSA:1.10.10.2600, SSF53041

SEQ ID NO: 11210 - protein, 423 aa, Unknown
  Description of Unknown: Integrase B11211 sequence
  IPR011109,PS51736,IPR036162,PTHR30461,IPR006119, G3DSA:3.40.50.1390,PS51737,PF00239,SM00857,cd03768, SSF53041
VRVSTASGEQLAALENQRARIEAAGVDLVLQDIQSGRATDRDGYQQLLELIATGRAREVVITRVDRLGRDAADTDAAIAFAARKGVIITALDGGTIESVTPTGFVMSRIMTTMAEMESRMLSQRIRSGLAERRKRRMPCRGKAPWGYRINDDRTALEPHPVEWERAQRFLRILAARDWRMNTALDVWASEGRGDIPLHSCRAVKAWLLNPVLRGGLGYGQQKNHVFVDIAWNTHAALISHTEFAAIERQLDANRRMWGRHSKSKQRLLTSLCRCGSCGKAMSYAGSRTIPSVMCRTRGCEQQYKSTHESLIAGAIAHTLAAHADSLATNAPIQDSPEVAELRASIATLQALGDPDLEDAIAAKQQRLQSLSQVPSVPAELLVALRDPRLYEHASYEELTELYHRFVERVVVTKQEVEQVVLRF

SEQ ID NO: 11211 - protein, 423 aa, Unknown
  Description of Unknown: Integrase B11212 sequence
  cd00338,PF13408,IPR011109,IPR038109, Coil,PS51736,G3DSA:3.40.50.1390,IPR006119, PTHR30461,IPR036162,IPR025827,PS51737, PF00239,SM00857,G3DSA:1.10.10.2600,SSF53041
MKVFIYERVSSEEQAKHGYSLDAQHDALIDFCQKHNHVILGEYRDEGISARKPYTKRPAMLQLLQDVETIKPDMILFTKLDRWFRNIKEYYKVQDILDRNKVDWKAINEEYDTSTASGRLYVNIKLSIAQDEADRTSERIKDIQAQQVAQGKVLGGSVPLGYAIKDKRVVFGDNIHITKDAIDHYLLHQSAHATTRYINDKYGLNMTHTHLIRLFRSPILKGEYRTNTAYCEPLISSEKWDKLQDTIQNNIKHSSRKRTYLFTGLIKCPVCGKRLGGSYDGERKYYRCPQHLYGTCNMKHIVNERKVEEWLVENVEEDFRVNVTMKPKQKTEDPKKYKDRLRRLNDMYLMGNITQKEYKDKSAELQRKIAELSKKPSLKTQNFASNWKALYYELDEEHRRLFWRSLISEVRVNLEGQAFQIMY

SEQ ID NO: 11212 - protein, 422 aa, Unknown
  Description of Unknown: Integrase B11213 sequence
  cd00338,PF13408,IPR011109,IPR038109,PS51736, G3DSA:3.40.50.1390,IPR006119,IPR036162,PTHR30461,PTHR30461:SF3, IPR025827,PS51737,PF00239,SM00857,G3DSA:1.10.10.2600, SSF53041
MRVFLYERVSSEEQVKHGYSLDAQDEALREFCERNNHVILGVYRDEGISGRKPYTKRPAMVQLLRDVETIKPQMILFTKLDRWFRNIKEYYKVQDILDKYKVDWKAINEEYDTSTASGRLYVNIKLSIAQDEADRTSERIRDVQAHQVAQGKILGGKPPLGYSFKDKKLVQNEDVRIVRDAIDHYKMHQSINATTRYINDLYGLKFDHRSILTLFRNPILKGEYRGNPNFCEPILSEAEWDALQEIIPRNIKQATSRVYLFSGLIICPYCGRKLGGCADHRRKYYRCVQHYYSTCPMKHTVNEKKLEGWLLDNIEDDFKVNVTMKPREKKESPAKYKQRLKRLNDIYLLGNISESEYKSKSAELQRIIADLSRIEPIKEDHFTAGWKDVYEMLDEEHRRSFWRNIIKAVRVDEDAQPIEVIY

SEQ ID NO: 11213 - protein, 422 aa, Unknown
  Description of Unknown: Integrase B11214 sequence
  cd00338,IPR011109,IPR038109,PF07508,Coil, PS51736,G3DSA:3.40.50.1390,IPR006119,IPR036162,PTHR30461, PS51737,PF00239,SM00857,G3DSA:1.10.10.2600,SSF53041
MSTEYAIYLRKSRADLEAEAHGEGDTLARHEHILMELAKSRALPIGAIYREIVSGERIANRPVMQQLLAEVEDGRWKGVLVTETSRLARGDTIDQGIVAQAFKFSGTLIVTPSKTYDPTQEADEEWMEFGLFMSRQEYRMIRRRQLAGTRASKKEGHYVPGRPPYGYERYKLDGRGWSLRPVEPQAGVIRTIYDMYLSGKGFSEIANELNAMKIRTPLDKKWVPATTRAILQNPHYAGFIPSAMKVNTKIVQKGKLITKRPVNKNCELYEGIHEAIIPRDVWYSVQQRMKDTVTPRVPRKYQQMNPLAGLVYCDQCGKLMSRHPYRREDKVRFGCENPSCSTVSSLFEDVESLVLQSLREFLHKIELSSPTLLDTKSEEIALQNIEKQLTDINHRLQRTYELLEDGVYSKETFLQRQSAISQ

SEQ ID NO: 11214 - protein, 421 aa, Unknown
  Description of Unknown: Integrase B11215 sequence
  cd00338,PF13408,IPR011109,IPR038109, PF07508,PS51736,IPR036162,IPR006119, G3DSA:3.40.50.1390,PTHR30461,PTHR30461:SF3,IPR025827, PS51737,PF00239,SM00857,G3DSA:1.10.10.2600,SSF53041
MPTKRCAIYTRKSIAKGLDQEYNSLDAQFDMCMDCIRRHEKDGWVFVASFVDAAVSGTTVHRDQLNMLRHQVRAGEIDCVVVYKLDRLSRDLGDFTTLMKEFSDHNVAFVSATQSIETHTPEGKLSMNMMAVVADYEAAIIRSRLRDKINACKAQGRWVCGSAPYGYKWHEKKLVVDRLESATVRYIHELYIGGKGPVVIARQLNKEKRLYRKNKDSGERIPWNSQTIKRILTHYVYAGYVKTDSGLIQGIHQPIIDQETYEKTCQRNNEARELRSGLDQKEHKVIYPLKGILKCGKCGRLYLGTYTIKRGVMRRYYTCAANRHDYLQGCASPHFGADQIEELLKGYILRFRDSPQVLAALIRQLPDEDAGRIADALYSIDSALGDSTPRELQKVFQAAFESIVINDNGEQLDVTLKKGLE

SEQ ID NO: 11215 - protein, 421 aa, Unknown
  Description of Unknown: Integrase B11216 sequence
  cd00338,Coil,PS51736,G3DSA:3.40.50.1390,IPR006119, IPR036162,PTHR30461,PF00239,SM00857,SSF53041
MRVGYCRVSTKTAEQAASIATQEQRLRDAGCVRVLVDHGISGFREAGRRGSEFPALIDLILDGTTTEVVVPNFDRTQRRMRWGIELLDALERTGARLLELDTGAWLDPANNPADVMMAQLRTVFQENESRTRRLKVRKALEARRAQGAYASGKVPFGYAHVDGQVVPHSVNWRLAQDRWAQLAEMDFNLAGWIKNYDASITPRGIRAWIENPTLRGEVNNRPGMRCEPLVTPEQWHHARRCLQARSLARGVSLDRQVRLFTGLVRCDACGKNLHTVTDRNVQRLKCKTRVCDRYGQGLRVSVVRDRVIQALVQANEAMAELASEGSPALTPEQLELMRRIEALEPFADDPDYAALIAKQRAQLAALREQPAGPDLELRRELLADPATLAMATEDELRAIVIEFVASIVWLGGLESLEITLR

SEQ ID NO: 11216 - protein, 421 aa, Unknown
  Description of Unknown: Integrase B11217 sequence
  cd00338,PF13408,IPR011109,PS00397, PS51736,G3DSA:3.40.50.1390,IPR006119,IPR036162, PTHR30461,PS51737,IPR025827,PF00239, SM00857,IPR006118,SSF53041
MRVALYARVSTEEQAIHGLSIEAQLADLRAWAKDKTVVGEYVDAGISARKSITKRPELQRLLRDIEAGKVDLVAFAKLDRWTRNIREYYKAQDVLDAHNVAWKALREDYETQTAAGRLKVNIMLAVAQDEADRTSERVKAVFEEKRRKGLTVNGHMPIGLQYREGVISPSEDAGKVKDLFSAYIATRSITATTARSRDILGKAYSSMGIRSLLMNERYLDAGVISPEAWETAQRILDTHGTRSVRTDRIYLFSGLLVCPECGGKLTVRTIVLHGREYVYYRCRRRTHDHTCPSKVSVREDVLEQYLLGHLLSLVSDKNLRIKKHAKKPVNVAAIQKKLDKLTDLYMEDAIDKADFDRRAAPLRDALKTARLTPQPADTEKIVSALDVYPGLSKAAQKAFWSALVGKITPEGEGYHVDLVLP

SEQ ID NO: 11217 - protein, 420 aa, Unknown
  Description of Unknown: Integrase B11218 sequence
  cd00338,PF13408,IPR011109,IPR038109,PF07508, PS51736,G3DSA:3.40.50.1390,IPR006119,PTHR30461,IPR036162, PTHR30461:SF3,PS51737,IPR025827,PF00239,SM00857, G3DSA:1.10.10.2600,SSF53041
MERKIITVTPSKDPTLQVKRVCAYARVSSGKDAMLHSLSAQISYYQELIQKQPGWKFYGIYADEAMTGTKENRKKFQEMLEECRKGNIDLIITKSISRFARNTVTLLSTVRELKTLGVDVYFEEQNIHSMSGDGELMLTILASYAQEESLSASENQKWRVRANFKEGKPWNCKMLGYRYDGEKFVIHPAEAEIVRFVFRAYLDGMGRQLIANTLFEQGYKGRDGKPFNRGSVEKILRNYAYTGNLLLQKTYRENHITKRGRKNDGVLPMYHATDTHEAIIPLEMFTQVQEEMARRREQFKSEGSLNRYPFTQLLVCGVCGKHYVRKTCRTGFRWMCATYNNKGKKYCDSKMIPEEKLIEMTSDIDMVQVDHIKVERGNTIIIVLKDGTEITRQWQDRSRAESWTDEMRQKAAEQTRKRYQ

SEQ ID NO: 11218 - protein, 419 aa, Unknown
  Description of Unknown: Integrase B11219 sequence
  cd00338,PF13408,IPR011109,IPR038109,PF07508, Coil,PS51736,IPR036162,IPR006119,G3DSA:3.40.50.1390, PTHR30461,PTHR30461:SF3,IPR025827,PS51737,PF00239, SM00857,G3DSA:1.10.10.2600,SSF53041
MRVSVNLNAQKPDTTTNAVIYARYSSHGQTEQSIEGQLAKGHEYAAAQGYTVVHEYIDRAMTGRNDNREAFQKMLSDTGKHQFQVVIVWKVDRFGRNREEIAFNKHTCKKNGVRVEYVAESLPNSPEAVILESVLEGMAEYYSIQLSQNIRRGQLESAKKCQCVGGSVPLGYTLDSDKHFVIDPQTAPVVKKIFDLYAEGATISEITGQLNEQGIRTARKQLFTKNSLTKLLKNEKYIGVYTYKDIVRVEGGVPAIVDKSTFDRVQELLKINRRAPSHTWTKVEYLLTDKLFCGHCGSPMVGESGFSHTGAKYSYYGCIKRRREKACDKKPVRQDWIEALVLDETVKLLHDDELMEYIIDRTWEYYQVTDKVQEEKAVLEAQLAEVDKAINNLVRAIEAGIFNAATKSRMDELDAQKAA

SEQ ID NO: 11219 - protein, 419 aa, Unknown
  Description of Unknown: Integrase B11220 sequence
  cd00338,IPR011109,PS51736,IPR036162,IPR006119, G3DSA:3.40.50.1390,PTHR30461,PS51737,PF00239,SM00857, SSF53041
MAAPEIVGYARVSTKTDEQAISVDAQVEQLKAAGCTRIIRERASAFKEGARRPGWEELQALVASGAVGKVIAVSQSRLSRREDVITFLRICSRKGVEVQFLDGTPGDISDPSARLMTGVMAAINEVDSQIKGINVRNGLARRRASGHYACGRVPFGYRYDGKEVIPHPEEFGQAQLLWQRLEANEFNLSKTVRLHDYDWSTRGLRRWVHNPILRGTVRGVTGKTEPLITPQQYADAAALMQSRASRGTRAPRRRRLLSGLVRCNQCQRWLHYVMAAGKPRLKCSNLHCGFYGRGLAEWKVRNQVLDVLRGRHEDLAQRAASQPQAAMTHQQLARRQQLDQLLEMRDQGVQGLDQAIEALEAAEQLPSPSAPNWTSLAELFGRPGVLELATDEELRAVLLEFVNEVVYVGDPDTVEVRLR

SEQ ID NO: 11220 - protein, 417 aa, Unknown
  Description of Unknown: Integrase B11221 sequence
  cd00338,PS51736,G3DSA:3.40.50.1390,IPR006119,IPR036162, PTHR30461,PF00239,SM00857,SSF53041
VPVTSYGYIRQSRRADLDVALSADAQLAAIRRLAARYGDDPEQLVILSDMGRSGAQSKTHLRTSYLQLIDAIKGNGHGTTIYAISMSRLARSLNELFSIFTLASEHGVRIVFEKEGEVRFDTPIGKLHATITGAVYEFERELAVERTRDNVAVRRARGDRMGRIPYGSKEGESPTAVVDAYKEAGSLNGAAVILNRKKIKSWSGRPWTPNGVQSVISRIDPHLVKRNPAKQGAKRGSGSFLLYRLLRCPCGTLMTGYHNREYVYYRCHRSDGNADHPRYGVVSERKMLPLFKEEVGDITNLVFALDKPLDIERHTALTEKRSRVVEAFLDGVISKDERTTHLESIDAELASLMTTETVIAVPDWDDDPKVVNEFLKGLFGEVSLDEHLAPIFDWKIDVRALRDRVPTQSLVRIAKTN

SEQ ID NO: 11221 - protein, 417 aa, Unknown
  Description of Unknown: Integrase B11222 sequence
  cd00338,PF13408,IPR011109,IPR038109,PF07508, PS51736,IPR036162,IPR006119,PTHR30461,G3DSA:3.40.50.1390, PTHR30461:SF3,IPR025827,PS51737,PF00239,SM00857, G3DSA:1.10.10.2600,SSF53041
VSTDQDEQLSSYENQVNYYREYILKHEDYVLVDIYADEGISATNTKKRDAFNRLIQDCRGGKVDRILVKSISRFARNTLDCIKYVRELKELGIGVTFEKENIDSLDSKGEVLLTILSSLAQDESRSISENSTWGIRKKFERGVVQVNTTNFMGYDKDEKGNLIINHEQANIVRYIFDRFLEGYSPEFISKELREQEIPGCTGKAKWCPSAIWKMLQNEKYKGDALLQKTYTVDFLTKKRIDNDGQVNQYYIENNHEPILDREKWEIVQLEIARRKKFREQHKLQFYIMQKENNPFTTKVFCAECGSAFGRKNWTTSRGKRKVWQCNNRYRIKGQIGCLNNHIDEEMLEKAFMKAVGQLQKHRSDVVAKWQKLEQGTNLLYKHYSKQMYQILDLDKFDGVIMNQVLDRISISEAGQIV

SEQ ID NO: 11222 - protein, 417 aa, Unknown
  Description of Unknown: Integrase B11223 sequence
  cd00338,PF13408,IPR011109,IPR038109,Coil, PS51736,G3DSA:3.40.50.1390,IPR006119,IPR036162,PTHR30461, PTHR30461:SF3,PS51737,IPR025827,PF00239,SM00857, G3DSA:1.10.10.2600,SSF53041
DALTRYVLDKPDYVLAGVYIDDGVSGTKMKRDELQRMLADVKKGLIDIICFTKLDRWFRSIRHYTATQEILDKYNVGWLAIWEPIYDTTTPQGRLIVNQMMSIAQFEAENTSQRIKQVLAYKASVKQAISGNQPPGYKIQDKKVVPDDTMKNVAIQMFEHYSRYGNLNGTLKYCSEVLGVDFNKKSLRHHLMNRKYIGEFRGIKNYCEPLISDDLFDDVQRKLSLNVKRSQKHTYVFSGLVVCTACGMKCSGKTSRGKYKFYYCDQHVKRTKKACSNNKIIMENRLEQYVIEHIKPEAEKYILEYTILQKEKPIDNSKRIATLKKRIDRLKELYLNELMTLEEYKEERIQLENDIEALTIQSKEVVQKDFSKLKETLNSGVIDTILSLSEEERRFIWRSIIKEIKFYPDRHIEIIFL

SEQ ID NO: 11223 - protein, 416 aa, Unknown
  Description of Unknown: Integrase B11224 sequence
  IPR011109,Coil,PS51736,G3DSA:3.40.50.1390,IPR006119, IPR036162,PTHR30461,PS51737,PF00239,SM00857, cd03768,SSF53041
MVLRIGYARTSTAQEEQDKSIEGQVVELKRAGCERVISERRSAFKGNARPGWDELWALVGRGGVDEVVVADQSRLSRSGDDMAFLELCAARGTKVVALVGGTIETESIGGFVQAGMMSVFSQMQSRLTAAKVRDGLRRRKAQGYYACGKVPFGYSYDGQYVVPCPDHWDAARQMWDELMELDFNVSGWIAKTQSKWTPKGVKSWIANPMLRGIVRGEHGGTKPLISWQEWAEAENKLKARSNMRGRAAHTVHLFTGLVRCESCGKSLHNIRDRAVPRLKCHNRICARYGQGIRVEVVRRKVIDALTTKAAELASAAISEKKEPAEAGPIRNQISALQAAQAAGVDGLEDKLAALHRQLQALQQVDSSARYELLVELFADRRTLELATDEELRAVILQFVSELVWPGGLESLEITLR

SEQ ID NO: 11224 - protein, 416 aa, Unknown; identical to SEQ ID NO: 10098
  Description of Unknown: Integrase B11225 sequence
  cd00338,PF13408,IPR011109,IPR038109, PF07508,PS51736,G3DSA:3.40.50.1390,IPR006119, IPR036162,PTHR30461,PTHR30461:SF3,PS51737, IPR025827,PF00239,SM00857,G3DSA:1.10.10.2600,SSF53041

SEQ ID NO: 11225 - protein, 416 aa, Unknown
  Description of Unknown: Integrase B11226 sequence
  cd00338,PF13408,IPR011109,IPR038109,Coil, PS51736,G3DSA:3.40.50.1390,IPR006119,PTHR30461,IPR036162, IPR025827,PS51737,PF00239,SM00857,G3DSA:1.10.10.2600, SSF53041
RVSSEEQAKHGYSLDAQHDALIDFCQKHNHVILGEYRDEGISARKPYTKRPAMLQLLRDVETIKPDMILFTKLDRWFRNIKEYYKVQDILDRNKVDWKAINEEYDTSTASGRLYVNIKLSIAQDEADRTSERIKDIQAQQVAQGKVLGGSVPLGYAIKDKRVVFGDNIHITKDAIDHYLLHQSAHATTRYINDKYGLNMTHTHLIRLFRSPILKGEYRTNTAYCEPLISSEKWDKLQETMQNNIKHSSRKRTYLFTGLIRCPVCGKRLGGSYDGERKYYRCPQHLYGTCNMKHIVNERKVEEWLVENVEEDFRVNVTMKPKQKTEDPKKYKDRLRRLNDMYLMGNITQKEYKDKSAELQRKIAELSKKPSLKTQNFASNWKALYYELDEEHRRLFWRSLISEVRVTLEGQAFQIMY

SEQ ID NO: 11226 - protein, 414 aa, Unknown
  Description of Unknown: Integrase B11227 sequence
  cd00338,IPR011109,IPR038109,Coil,PS51736, G3DSA:3.40.50.1390,IPR006119,PTHR30461,IPR036162,PS51737, PF00239,SM00857,G3DSA:1.10.10.2600,SSF53041
MSVDTQITALEAYCKANNLIVYKIYNDAGISARKAYKRRPALLEMLKDCQEKKIDIVLFTRLDRFFRSVPDYYACVSQMNEVPWKAILEDYETETPDGVFKVNIMLSVAQSEADKTSARLKDTFAYKRARGDYIGKAPMGYLVRGRDLIKDPEKQVPLSVMFKTYLSTFSSRKALEAGDEYGLSLDRSTFMKMLSNEAYCGHAKGGYQCEPYMTEEEWKRIQEVKRSRTPKPIYGPRTYLFSGLCKCGYCGNRMPAKLIYRTHADGEKVFYKKYVCENRLHPHLQLIETHLEEYLMQNLSKLIHNARLEAKLTQKGMDVSIKKKKRLEGKLERLREVYIDGDIEKEAYQARKKTLEEEINSIYIPQSIMPDVPEDWKEIYKDLTEERKAVFWKRLIKTIEFTNESKHKPKVIFL

SEQ ID NO: 11227 - protein, 413 aa, Unknown; identical to SEQ ID NO: 11183
  Description of Unknown: Integrase B11228 sequence
  cd00338,PF13408,IPR011109,IPR038109, PF07508,PS51736,IPR036162,IPR006119, G3DSA:3.40.50.1390,PTHR30461,PS51737,IPR025827, PF00239,SM00857,G3DSA:1.10.10.2600,SSF53041

SEQ ID NO: 11228 - protein, 413 aa, Unknown; identical to SEQ ID NO: 11191
  Description of Unknown: Integrase B11229 sequence
  cd00338,PF13408,IPR011109,IPR038109,PF07508, PS51736,G3DSA:3.40.50.1390,IPR006119,IPR036162,PTHR30461, mobidb-lite,PS51737,IPR025827,PF00239,SM00857, G3DSA:1.10.10.2600,SSF53041

SEQ ID NO: 11229 - protein, 413 aa, Unknown
  Description of Unknown: Integrase B11230 sequence
  cd00338,PF13408,IPR011109,IPR038109,PF07508, PS51736,G3DSA:3.40.50.1390,IPR006119,PTHR30461,IPR036162, mobidb-lite,PS51737,IPR025827,PF00239,SM00857, G3DSA:1.10.10.2600,SSF53041
MNIRKIEAKNNNRKKRICAYVRVSTTNGSQLDSLENQKVYFEKLYAERDDVEFLGVFCDKGISGSKYDRPDFQTMLDACRKGQIDVIHTKSISRFARDLINVLEISRELKTLGIDIFFEEQNIHTLSNEGEVVLTVLASLAEEELQSMSGNQRWSFCRKFQKGELLINAKRFLGYDLNEKGELVINKAEAQIVRTIFYSYLEGMGTHRIAKKLNEGKVPTVAGKKWYDSTIRNILKNEKYKGSLLLQKYFHDGVNGPKKLNQGQVEQYYIEDNHEGIVSKEIWEKVQVKMKSRSRIQGTNKTYKFSRMLKCQYCGSTLKRQVSYKKKIVWCCSKYIKEGKNSCKGMRVPERDIEDWKLSSPVIVLERIEDGEKHYSYTGQKTSANGHISNSEKNQSSRLLSSVYRPRRTAIKL

SEQ ID NO: 11230 - protein, 413 aa, Unknown; identical to SEQ ID NO: 11208
  Description of Unknown: Integrase B11231 sequence
  cd00338,PF13408,IPR011109,IPR038109,PF07508, PS51736,G3DSA:3.40.50.1390,IPR036162,IPR006119,PTHR30461, mobidb-lite,IPR025827,PS51737,PF00239,SM00857, G3DSA:1.10.10.2600,SSF53041

SEQ ID NO: 11231 - protein, 413 aa, Unknown; identical to SEQ ID NO: 11184
  Description of Unknown: Integrase B11232 sequence
  cd00338,PF13408,IPR011109,IPR038109,PF07508, PS51736,IPR036162,IPR006119,PTHR30461,G3DSA:3.40.50.1390, PS51737,IPR025827,PF00239,SM00857,G3DSA:1.10.10.2600, SSF53041

SEQ ID NO: 11232 - protein, 411 aa, Unknown
  Description of Unknown: Integrase B11233 sequence
  cd00338,PF13408,IPR011109,IPR038109,PF07508, PS51736,G3DSA:3.40.50.1390,IPR006119,IPR036162,PTHR30461, PTHR30461:SF3,PS51737,IPR025827,PF00239,SM00857, G3DSA:1.10.10.2600,SSF53041
VSTDQDEQLSSYENQVNYYREFILKHEDYELVDIYADEGISATNTKKRDAFNRLIQDCRDGKVDRILVKSISRFARNTLDCIKYVRELKELGIGVTFEKENIDSLDSKGEVLLTILSSLAQDESRSISENSTWGIRKKFERGVVQVNTTNFMGYDKDEKGNLIINHEQANVVRYIFDRFLEGYSPEFISKELRKQEIPGCTGKARWCPSAIWKMLQNEKYKGDALLQKTYTVDFLTKKRIDNDGQVNQYYIENNHEPILDKEKWEIVQLEIARRKRFREQHELQFYIMQKENNPFTTKVFCTECGSAFGRKNWTTSRGKRKVWQCNNRYRLKGQIGCLNNHIDEEMLEKAFMKAVGLLKEHRSDVVAKWQKLVQGANLLHKHYAKQMYQILDLDKFDGVIMNQVLDHISIS

SEQ ID NO: 11233 - protein, 413 aa, Unknown
  Description of Unknown: Integrase B11234 sequence
  cd00338,PF13408,IPR011109,PS00397,Coil, PS51736,G3DSA:3.40.50.1390,IPR006119,IPR036162,PTHR30461, PTHR30461:SF3,IPR025827,PS51737,PF00239,SM00857, IPR006118,SSF53041
MRVALYCRVSSEEQVRHGISIDAQEAALTEWANDKTVVGIYKDLGVSGRKPYTKRPEMMRLLDDVEAGRVDLIAFCKLDRWFRSIKEYYRVQDILDRHKVAWRAIQEDYETETSSGRFKVNIMLSVAQSEAEKTGERNKAVNAYKRAKGEFLCGNTPLGTKLENKILVPNDDAWKVREMFSVFLSTGSVYGSIPILAERGVKVGNRSLRYVLENENYLRVGIITPEEWHRAEELRGEKRPKAVNTRTYLFTGLVYCPECGNRLSGMYSKDTYYYRCPRFYQDRSCHMSSCIPEQKIESYFLDTLRQSMEDANIRLLSAKPVDPSPLKRKLDKLADMYLADMISKEKYEREYKATKAALAEAEAVKKPIDTEQVMSTMTAYSTLSREAKRAFWYRIIKKATVSKDGIDYTLSYT

SEQ ID NO: 11234 - protein, 413 aa, Unknown; identical to SEQ ID NO: 11197
  Description of Unknown: Integrase B11235 sequence
  cd00338,PF13408,IPR011109,IPR038109,PF07508, PS51736,G3DSA:3.40.50.1390,IPR006119,IPR036162,PTHR30461, mobidb-lite,PS51737,IPR025827,PF00239,SM00857, G3DSA:1.10.10.2600,SSF53041

SEQ ID NO: 11235 - protein, 413 aa, Unknown
  Description of Unknown: Integrase B11236 sequence
  cd00338,PF13408,IPR011109,IPR038109,PF07508, PS51736,IPR036162,IPR006119,PTHR30461,G3DSA:3.40.50.1390, mobidb-lite,IPR025827,PS51737,PF00239,SM00857, G3DSA:1.10.10.2600,SSF53041
MAVRLIKTKSNRKKQRVCAYTRVSTTNSSQLDSLENQKAYFENLYTNRVDVDFLGVYYDKGISGSKAERPSFQAMLEACRQGQIDLIHTKSISRFARNTMTVLEVSRELKVLGVGIYFEEQNINTLSNEGEVMLSVLASLAEEELQSMSDNQRWAFQRKFQRGEMVINTKRFMGYDVDDKGELVINEAEAQIVRRIFQLYLDGMGMHRIAKLLNQENVPTVTDAKWHDTTVRNILKNEKYKGTVLLQKYFHVGINGPKRLNQGQVEQYLIEDNHEPIVSKEVWQAVQDKLASKTWKQGVNKHYRFTSMLKCEYCGSTLKRQVTYKKQIVWCCSKYIKEGKASCRGMRVPEKAIEEWKLKTPVTVIERNEYGQKHYSYSSQESAADGHPSASNQNKSGSLLSGVHRPRRTAIKL

SEQ ID NO: 11236 - protein, 412 aa, Unknown
  Description of Unknown: Integrase B11237 sequence
  cd00338,PF13408,IPR011109,IPR038109,PF07508, PS51736,IPR036162,PTHR30461,G3DSA:3.40.50.1390,IPR006119, mobidb-lite,PS51737,IPR025827,PF00239,SM00857, G3DSA:1.10.10.2600,SSF53041
MRIKVIKPTVAAENKRLKVCAYVRVSTDSLEQEDSLDNQTAYFKDYIQSNPAWEFVGIYADQGISGFKENRPQFQKMIADARAGKIDLIVVKSVSRFARNTETVLKFSRELKSIGVGIFFELQNINTLSGPGELMLTIIAAFAQAESQGASDNANLTYKRKFEAGMPVHDLKYTFGFDTDEGGNTYIVEEQAKTVRLIFDLAHKGVWPSKIKQYLNKNGITSCAGGKWDDTGVHRVLRNPAYKGALVLQKTYLDSNRIRHKNEGQKDQWYIADNHPAIVPPEQWDEVQEILLARSESLAPRPPQKPSQPRSSRTQYPLTNKLFCPLCGQKLHHKWSNQGKSEYWACSTNVKVGASACKGIWLPAEIANSWGDITEPTTVIGYKDEYGMQHFTASPKAEYELSDDCPYTRKED

SEQ ID NO: 11237 - protein, 412 aa, Unknown; identical to SEQ ID NO: 10264
  Description of Unknown: Integrase B11238 sequence
  cd00338,PF13408,IPR011109,IPR038109,PF07508, PS51736,G3DSA:3.40.50.1390,IPR036162,PTHR30461,IPR006119, PTHR30461:SF3,IPR025827,PS51737,PF00239,SM00857, G3DSA:1.10.10.2600,SSF53041

SEQ ID NO: 11238 - protein, 411 aa, Unknown; identical to SEQ ID NO: 11232
  Description of Unknown: Integrase B11239 sequence
  cd00338,PF13408,IPR011109,IPR038109,PF07508, PS51736,G3DSA:3.40.50.1390,IPR006119,IPR036162,PTHR30461, PTHR30461:SF3,PS51737,IPR025827,PF00239,SM00857, G3DSA:1.10.10.2600,SSF53041

SEQ ID NO: 11239 - protein, 411 aa, Unknown
  Description of Unknown: Integrase B11240 sequence
  cd00338,PF13408,IPR011109,IPR038109,PF07508, Coil,PS51736,IPR036162,IPR006119,PTHR30461, G3DSA:3.40.50.1390,PTHR30461:SF3,IPR025827,PS51737,PF00239, SM00857,G3DSA:1.10.10.2600,SSF53041
MVKAVAYARYSSHNQREESIEGQLRKCHTFAEQNGFVIIEEYCDRAISGKTDNRAEFQRMIKDSEKGHFQAIIMYTLDRFARNRYDSAMYKAKLRKNGVRLYYTEQSITDEPEGIILESVLEGMAEYYSENLSRGVKRGMKENALKCMITGGYMPLGYRKTADKKFEIDPATAPIVQEIFDLYVNGKSQRQIVDILNEKGYRTAKGKPFRLGSISGILVNTKYIGLYTFDDVVIEGGIPAIINKDVFEKAQEMLKRNRRESGRMKAPMQYLLTGKVFCGLCGSPMAGESGTGSKGTIYNYYKCQDRKKKHTCVKANEKKDWLERVVVQATVERILQPEVIDEIACKVAELAESEFNDKSRLLSLQSELKSVQTAIRNLLRLVEQGIDTEDIGERLLDLNSQKADLQKQISR

SEQ ID NO: 11240 - protein, 411 aa, Unknown
  Description of Unknown: Integrase B11241 sequence
  cd00338,PF13408,IPR011109,IPR038109,PF07508, PS51736,G3DSA:3.40.50.1390,PTHR30461,IPR006119,IPR036162, PTHR30461:SF3,IPR025827,PS51737,PF00239,SM00857, G3DSA:1.10.10.2600,SSF53041
MEKKMWKIEQKVTEISKRKRVAAYARVSVESERMQHSLSAQISYYSSLIQKNPAWEYAGVYADYGITGTKIIKRKEFQRMLADAEARKIDIILTKSIQRFARNTVDLLKTVRHLKEIGVEVWFEKENICSLSGDGELMLTILASFAQEESRSISDNIKWRFQKKYEKGIPHAKFFIYGYRWKDGELVIQNEEAAIVRRVFKGYLAGKTRRDIQRELANIGAHTMYGNLFQDSTIKQMLQNPVYKGNLVIQKTFVIDPITKHQVINHGEKDKYVVENHHEAIIDAATFNQVQEEMAWRKEAGKQRGGYARNFLNTSCFTGIIKCGICGKSYIHNIRKYKGKPSEYWSCLSNKGKAEERCGAYGAIPQPALERACMSALEMAIFDKTEFLQHFTTFTLPRKLMKLVYTRPELS

SEQ ID NO: 11241 - protein, 405 aa, Unknown; identical to SEQ ID NO: 10902
  Description of Unknown: Integrase B11242 sequence
  cd00338,PF13408,IPR011109,IPR038109,PF07508, PS51736,G3DSA:3.40.50.1390,IPR006119,IPR036162,PTHR30461, mobidb-lite,IPR025827,PS51737,PF00239,SM00857, G3DSA:1.10.10.2600,SSF53041

SEQ ID NO: 11242 - protein, 408 aa, Unknown
  Description of Unknown: Integrase B11243 sequence
  cd00338,IPR011109,IPR038109,PF07508,Coil, IPR036162,PTHR30461,G3DSA:3.40.50.1390,IPR006119,PTHR30461:SF3, PS51737,PF00239,SM00857,G3DSA:1.10.10.2600,SSF53041
MYETNLTIFDVDDILIYLRKSRKDLEYGKEETIERTLQRHEEILQKFAIKVWGKKIPEKNIYREVVSGDTIADRPMIQQVLNKVESPKIKGVLVLELERLARGNTIDQGVIVQTFEFTNTIIITPQKAFDLKNDFDISFFEDGLYQARKYLTYIKKVLLRGRVTSVNEGKFVGSTCPYGYSKEKIKGDKGFKLIINEAEAKIVRIIFEMSTKGIGASNIANHLNKIGSKPRKAEVWVSASIRSIIENPVYIGKIRWNWRKTEKTMKNGKVIKSRPKHEEYILVNGLHEAIINKETFNIANKNKQDKNGKSVRKDLTIQNPLAGLVECGYCHRTMQRRPHRSYKIDGLICPLPHCQNIGSHLYLVENAILSSLEEHLSRYEQIVEDYKKNGLEQEIDTNTMDIINKELE

SEQ ID NO: 11243 - protein, 407 aa, Unknown
  Description of Unknown: Integrase B11244 sequence
  cd00338,PF13408,IPR011109,IPR038109, PF07508,PS51736,IPR036162,IPR006119, PTHR30461,G3DSA:3.40.50.1390,mobidb-lite,IPR025827, PS51737,PF00239,SM00857,G3DSA:1.10.10.2600,SSF53041
MKPEKKRVCAYARVSTMTEKQQDSLTNQQAYYSHLYQNKKDVDFIGVYYDQGISGKLAKRPGFQQMLEDCMAGKIDVIHTKSISRFARNTELLLEVSRELKAIQVDIFFEEQNLHTLSNEGEVMLTVLASYAEEELRNMSENQRWAFQKKFQRGELVINTKRFLGYDKDENGELIINPEEAKIVKRIYNLYLSGMGVHVIAKLFNEEKVSTVDGGKWYSSTITNILKNEKYKGDAILQKYYFAEIKAKQRLNQGQVQQYLITDNHEAIVSREDWEAVQKLLRQNSKRDARIDYNRRYPLSGLLKCEHCGSTLKRQKYYKGKVVWVCSKYIREGKVACIGMRVPDSVVQDWSIHEPTVVKEENIGGKKYYSYSSKENDTSRAEATHSENPNGGLLPSIHRPRRTAIKL

SEQ ID NO: 11244 - protein, 407 aa, Unknown
  Description of Unknown: Integrase B11245 sequence
  cd00338,PF13408,IPR011109,IPR038109,PF07508, PS51736,IPR036162,IPR006119,G3DSA:3.40.50.1390,PTHR30461, mobidb-lite,PS51737,IPR025827,PF00239,SM00857, G3DSA:1.10.10.2600,SSF53041
MKSGKIRVCAYARVSTMTEKQQDSLTNQQAYYSHLYQNKKDVDFIGVYYDQGISGKLAKRPGFQQMLEDCMAGKIDVIHTKSISRFARNTELLLEVSRELKAIQVDIFFEEQNLHTLSNEGEVMLTVLASYAEEELRNMSENQRWAFQKKFQRGELVINTKRFLGYDKDENGELIINPEEAKIVKRIYNLYLSGMGVHVIAKLFNEEKVSTVDGGKWYSSTITNILKNEKYKGDAILQKYYFAEIKAKQRLNQGQVQQYLITDNHEAIVSREDWEAVQKLLRQNSKRDARIDYNRRYPLSGLLKCEHCGSTLKRQKYYKGKVVWVCSKYIREGKVACIGMRVPDSAVQDWSIHEPTVVKEENIGGKKYYSYSSKENDTSRAEATHSENPNGGLLPSIHRPRRTAIKL

SEQ ID NO: 11245 - protein, 407 aa, Unknown
  Description of Unknown: Integrase B11246 sequence
  cd00338,PF13408,IPR011109,IPR038109,PF07508, PS51736,IPR036162,IPR006119,G3DSA:3.40.50.1390,PTHR30461, mobidb-lite,IPR025827,PS51737,PF00239,SM00857, G3DSA:1.10.10.2600,SSF53041
MKPEKKRVCAYARVSTMTEKQQDSLTNQQAYYNYFFKNKKDVEFVGVYYDQGISGKLAKRPGFQQMLEDCRAGKIDVIHTKSISRFARNTELLLAVSRELKTIQVDIFFEEQNLHTLSNEGEVMLTVLASYAEEELRNMSENQRWAFQKKFQRGELVINTKRFLGYDKDENGELIINPEEAKIVKRIYNLYLSGMGVHVIAKLFNEEKVSTVDGGKWYSSTITNILKNEKYKGDAILQKYYFAEIKAKQRLNQGQVQQYLITDNHEAIVSREDWESVQKILRQNSKRDARTDYNRRYPLSGLLKCEHCGSTLKRQKYYKGKVVWVCSKYIREGKAACIGMRVPDGVVQDWSIHEPTVVKEENIGGKKYYSYSSKENDTSRAEATHSENPNGGLLPSIHRPRRTAIKL

SEQ ID NO: 11246 - protein, 407 aa, Unknown
  Description of Unknown: Integrase B11247 sequence
  cd00338,PF13408,PS00397,Coil,PS51736, IPR036162,IPR006119,G3DSA:3.40.50.1390,PTHR30461,IPR025827, PF00239,SM00857,IPR006118,SSF53041
LRVALYARVSTQEQAQHGLSIGAQLAALEEWAKPHVIVGEYVDAGISARSPISKRPELQRLLRELDNVDCVVFTKLDRWTRNIREYYKAQDALDAHGVAWRAIHEDYETETAAGRLKVNIMLSVAQDEADRTSERIKAVFADKRRKGLIPSGKAPLGLEIVNGRYQITEKADITRAMFQDYIAKRSTTYVAEDFHMTPVGVRALLRNKNLVENGVVDEDTFKTANEILGTRSQRRVHSGEIYIFGGLIRCGKCGGATYCAKSKGYYYYRCVRHRDHGPCEGTSVNEAVVENYLLDNIVSKAEDMNLTITKKSGRAPDIGKLTARLDKLTDLYLNDLITREKYEADYKKTQEAILEAQRRPKTIDTEELTNILGAYQSLSRAAKKAFWSKLVKRIVIDDKKISFELYA

SEQ ID NO: 11247 - protein, 407 aa, Unknown
  Description of Unknown: Integrase B11248 sequence
  PS00397,IPR038109,IPR006119,PS51737, PF00239,G3DSA:3.40.50.1390,PTHR30461,IPR025827, SM00857,G3DSA:1.10.10.2600,SSF53041,IPR011109, PF07508,PS51736,IPR006118,cd00338,PF13408,Coil,IPR036162
MDTVLIYARVSTEDQLEKYGLSSQLRACREFAAARGWQILEEITDDGISGVILDRPGLDRVRRLVREGAATFVLMFDADRLSRELAHLLILKPEIEKHARLEFVAAKFEDSPSGRMFFGMRGVIAQYEREVIRERTMRGKKERARAGLISGGRIAYGYCYKEGKLLPDVERAPIVQRIFTAYDSGLSLRAVVQELRAAGLPTWGGKPWERSSVRRILANETYAGVAYYGTLRREGKSVRVRTSGERIPLSVPPLVDRAIWERVGARLAANPLVGRPSSAYLLRGLLFCAQCGRRMCGERGRSNAYRCVGRDPLRAPSGVLCKHSISVARLDAVVWRKLVEVCTNGEALRAILGRREEELKTSSGEVERLRSRLAKAKGREEAALSALLDPDLASTRGSIKEKYRAAT

SEQ ID NO: 11248 - protein, 407 aa, Unknown
  Description of Unknown: Integrase B11249 sequence
  cd00338,PF13408,IPR011109,IPR038109,PF07508, PS51736,G3DSA:3.40.50.1390,IPR006119,PTHR30461,IPR036162, mobidb-lite,PS51737,IPR025827,PF00239,SM00857, G3DSA:1.10.10.2600,SSF53041
MKPGKIRVCAYARVSTMTEKQQESLTNQQAYYNHFYQNKKDVDFIGVYYDQGISGKLAKRPGFQQMLEDCRAGKIDVIHTKSISRFARNTELLLAVSRELKAIQVDIFFEEQNLHTLSNEGEVMLTVLASYAEEELRNMSENQRWAFQKKFQRGELVINTKRFLGYDKDENGELIINPEEAKIVQRIYNLYLSGMGVHAIAKLFNQEKVPTVDGGRWYSSTITNILKNEKYKGDAILQKYYFAEIKAKQRLNQGQVQQYLITDNHEAIVSREDWEAVQKRLKQNRKANLSINCNRRYPLSGLLKCEHCGSTLKRQKYYKGKVVWVCSKYIREGKAACIGMRVPDSAVQDWSIYEPTVVKEENISGKKHYSYSCQENDTSRAGATHSENPNGGLLPSVHRPRRTAIKL

SEQ ID NO: 11249 - protein, 406 aa, Unknown
  Description of Unknown: Integrase B11250 sequence
  cd00338,PF13408,IPR011109,PS00397,Coil, PS51736,G3DSA:3.40.50.1390,IPR036162,PTHR30461,IPR006119, IPR025827,PS51737,PF00239,SM00857,IPR006118, SSF53041
MRVALYARVSTEEQALHGLSIDAQLSALREAYPNGVEYVDLGISARKPILKRPELQRLLHDVEQGKIDLICFCKLDRWTRNIREYYKAQDVLDAHNVPWRALHEDYETQTAAGRLKVNIMLAVAQDEADRTSERIKAVFEDKRRKGLVPTGSVPLGVMLENGKYAPSEDADRARELFQTFLLTRSVTETAKRYGWSGNGVRYALRNRLYADLGIVDAQTWETAQNVLQSRSQRHVRTDRVYLFSGLIICPECGSRMTCVRVSGHTYYRCPRHYDGGCPGCHVSELKLERYLLDHLLTGVDDINLKLKKKRKKTVDVAQLRKRMDKLTDLYMNDLISREKYADEYKSIQTAIEEAEREQKPVDRAEIKDALSGYKLLTANGKRVFWQTLIKSITPTEEGFDFALNYT

SEQ ID NO: 11250 - protein, 405 aa, Unknown
  Description of Unknown: Integrase B11251 sequence
  Coil,PS51736,IPR036162,IPR006119,G3DSA:3.40.50.1390, PTHR30461,mobidb-lite,PF00239,SM00857,cd03768, SSF53041
VVSVEVGESGRAETETPMREYHIAYLRVSRPDENVENQRLAIRSFLERSGVDPDEVAFFEDVGISGAVIPKARKGFRQLLDYIGEIKRRDPNAKINLYVYEISRLGRSFYETLSLIQKFERQNIRVVSASEKESFLNVQDESVRKLIIAIFAWLAERERELLIQRTKWGMQRALLEGKQIGRPKKVGLSDKQLRKAKQYLEKGLSLADVARLIGVPYDGLRRELIEHGVWKVGATPIGSVHARWDDEFLEQAFMEHVLSVLKKNEATVARLDADADVAVPLSMTLMREIAAKARLRRRRHDGDGGEDENGNGGPGTGADGGRNKNEDKDGDDGGVAGGDGSGGDDDAGSDDLPSDETIRKRFRQVAAKLKFETRFREDGGLSVLLTAKQARKLLRQAARQQEQKG

SEQ ID NO: 11251 - protein, 405 aa, Unknown; identical to SEQ ID NO: 10902
  Description of Unknown: Integrase B11252 sequence
  cd00338,PF13408,IPR011109,IPR038109, PF07508,PS51736,G3DSA:3.40.50.1390,IPR006119, IPR036162,PTHR30461,mobidb-lite,IPR025827, PS51737,PF00239,SM00857,G3DSA:1.10.10.2600,SSF53041

SEQ ID NO: 11252 - protein, 405 aa, Unknown
  Description of Unknown: Integrase B11253 sequence
  cd00338,IPR011109,IPR038109,PF07508,PS51736, G3DSA:3.40.50.1390,IPR006119,IPR036162,PTHR30461,mobidb-lite, PS51737,PF00239,SM00857,G3DSA:1.10.10.2600,SSF53041
MYCIYLRKSRADYEAEQRGEGETLSRHRSILTALAAHNRHPIGHIYEEIVSGETLSERPQARQLLADLAAGRWLGVYVMEVERLSRGDAMDQGYIAHAFKASGAKIITPTKTYNPADDQTDETFFEFSLFMSRQEFKTHHRRMQGGRAQSRQEGKWIVSKAPYGYRRVKLPREKGFTLEIFPEEAAVVRQVYDWYLHGINGQPAGITAIGNRLSDLHIPLGLYGSNWDGCRVHRMLTNPAYIGKIQWGKNKTERVITPTGLQKRTVHHTDYELTDGLHPAIIDEDTFYRVQSKLRGVSLDRHIPVRKDAQLANPLAGLVVCSECGHVMSHLPACGRQPAHIKCLTRGCPTVQTYRAPVEETVLNTLRSWLDDVGESSAPASDPATMTGPSSSLPSPVWNPSVTSS

SEQ ID NO: 11253 - protein, 403 aa, Unknown; identical to SEQ ID NO: 10210
  Description of Unknown: Integrase B11254 sequence
  cd00338,PF13408,IPR011109,IPR038109, PF07508,PS51736,IPR036162,IPR006119, PTHR30461,G3DSA:3.40.50.1390,PTHR30461:SF3,IPR025827, PS51737,PF00239,SM00857,G3DSA:1.10.10.2600,SSF53041

SEQ ID NO: 11254 - protein, 403 aa, Unknown
  Description of Unknown: Integrase B11255 sequence
  cd00338,PF13408,IPR011109,IPR038109,PF07508, Coil,PS51736,G3DSA:3.40.50.1390,IPR036162,IPR006119, PTHR30461,PTHR30461:SF3,IPR025827,PS51737,PF00239, SM00857,G3DSA:1.10.10.2600,SSF53041
MARRKKVSPGNRLVAYYRYSGGSQQTEQSIEGQRRDCEAYARQHGLTIVHEYIDRHISGRGVESRLAFQQMIADSSKHLFDLVICWKTDRFARNRYDSAVYKKKLRDNGVRILYAAESSVEGPEGIILEGLMESLAEYYSAELAQKMRRGMRESALKGKAINPNRPLGLTTDEHKRFIIDEKNAPTIRFIFEHYAAGESSASIVDQLNAAGLRTSKGNSFNKCSIPRIIQNEAYHGVYICKAYDVRIDGAIPAIIDDDLWKRAQKMLTLNKQHRAPHSSHADYLLSGKLFCGCCHSLMRGISGHNCRNDVYYYYACGNKADGGTCKKKNIPKDVAENLVVNAICENILRPDTLEDLADAIAAAQQADVNQPDPERAMLEQNLADVRRKINNIIESIENGTASS

SEQ ID NO: 11255 - protein, 402 aa, Unknown
  Description of Unknown: Integrase B11256 sequence
  cd00338,PF13408,IPR011109,IPR038109,PF07508, PS51736,IPR036162,IPR006119,PTHR30461,G3DSA:3.40.50.1390, PTHR30461:SF3,PS51737,IPR025827,PF00239,SM00857, G3DSA:1.10.10.2600,SSF53041
MKQIKTIQAQKVTTIKRLKVAAYTRVSHTSLLQSLSNQVSHYSQMIQANPKWDYVGVYSDSAISGRSQAHRRDFQQLLEDCRKGKIDIILTKSISRFGRNTVELLETVRELKRLGISVRFEKEKIDTLTAEGELLLTLLASMAQEESQSISQNIRWRVKKRFEEGKSYIPQDIFGYRWNGEEYVIEPHEASIVRQVFEWYMEGLSAPKIAKKLDDRGERTRLGNRFTKRIIYNMFDQEAYCGRLILQKTFRDHFGSRSIPNDGQMAKYIVENAHEAIVTPEYFQQVNQEKKRRARRRVSKHDALAKLQGKVYCEHCGLDMILTLETKSNQEKRVRYYCRTRDAKGVEACLGRTVTEEQLFQAFGERINTEDIHHISFNSVTNEAKATYRNGEEKHVIIQKGR

SEQ ID NO: 11256 - protein, 401 aa, Unknown; identical to SEQ ID NO: 10434
  Description of Unknown: Integrase B11257 sequence
  cd00338,PF13408,IPR011109,IPR038109,PF07508, PS51736,G3DSA:3.40.50.1390,IPR036162,IPR006119,PTHR30461, PTHR30461:SF3,PS51737,IPR025827,PF00239,SM00857, G3DSA:1.10.10.2600,SSF53041

SEQ ID NO: 11257 - protein, 400 aa, Unknown; identical to SEQ ID NO: 9981
  Description of Unknown: Integrase B11258 sequence
  cd00338,PF13408,IPR011109,IPR038109,PF07508, PS51736,IPR036162,IPR006119,G3DSA:3.40.50.1390,PTHR30461, IPR025827,PS51737,PF00239,SM00857,G3DSA:1.10.10.2600, SSF53041

SEQ ID NO: 11258 - protein, 822 aa, Unknown
  Description of Unknown: Integrase C1 sequence
  Coil,PS51736,IPR006119,PTHR30461,PS51737, IPR011109,PF07508,PF13408,SSF53041,PF00239, SM00857,G3DSA:3.40.50.1390,cd00338,IPR036162,IPR025827
MTVDALPLDTMQFTAQYELIRSQVINAARDAPHRDLGAQPRGVGLGLLLREGMPGWLGTIDSVIRASLSRRTMDAPLPKPADPLAECSIGSPWFSGVQRQDITTLLTSLVLSTRLVDPLLTDGRISVMPMNSEAHQKITAAHLSRMAYLYVRQSTLRQVFENTESTKRQYGLRDRAVALGWPLDRIVVIDSDLGQSGASAADREGFQRLVTEVSLGRVGIVLGLEVSRLARNNTDWHRLLELCALGDTLILDEDGLYDPAHFNDRLLLGLKGTMSEAELHVLRARLRGGILSRARRGELKQMVPVGFVHDVRDCVIMDPDAQVQAAVRLFFDTFRRTGSCLAVVKEFYAKDLLFPRRLRSGAHKGELVWTELLHCRARQIIHNPRYAGAFVFGRTKNRRLPNGKYSSRQVPSEDWILLRDTHPGYISWEDYLSNLERVKGNALAWSSERHHGPAREGPALLQGLVICGACGERMSVRYHSHRKAEIPSYWCGRRPMHRGEIGLCQTIHGGALDAAIGEILIEAMTPLSIEVALGVQQELATRQEEADRLRRQHVERAKYEAELAQRRFLKVDPDNRLVADVLEADWNAKLRAIAAAQEAYDKSAAADVSVVNDTERAELMALASDFPRLWRDPRTKMKDKKRMLRLLIDDVTLTKGDTVHVDIRFVGGATRSLDLPLPKSCVVLRTTDAAVVQEIDRLIDTYTDKEIADLLNERGVRTVVTTPWTAARIGRLRHIYQLTDRRTRLLAQGLLTPEDVATRYGVVISTVHLWRRRGLLRAHPVNDRGDFLYEIPQQDLPAKFAHKLVYQVDPVTSSSHSGRGAV

SEQ ID NO: 11259 - protein, 750 aa, Unknown
  Description of Unknown: Integrase C2 sequence
  PS51736,PTHR30461,IPR006119,mobidb-lite, PS51737,IPR011109,PF07508,PF13408, SSF53041,PF00239,SM00857,G3DSA:3.40.50.1390, cd00338,IPR036162,IPR025827
MTPSPKIEPRHQRLQAIVYIRQSTPKQVQNNQESTRRQYQLAERARQMGWAASQIRVIDEDLGLSGASSRRRTGFQSLVAAIGLGEVGIILVTEVSRLSRCNSDWHRVIELCGVFRTLIADEDGVYDARDPNDLLLLGVKGTLFAAELHILRGRMRGNLLNKARRGELALRLPVGFRRRPDGVVVQDPDDAVRLAIATVFERFAVLRSARAVHRHFLENRLALPRCAQTGATAGSITWVRPTYQMIQQILTNPAYAGVFVYGRRRREAVPGDPPEMVDRRVALAEWDIVVPDVYPGYLTYDAYLANRRALKDNLYNFAQKGRGAPREGIALLTGLVVCGRCGRRMAVSYGSEYHSYHCRRAQVDYGEPLCQSCPVGTLDTIVSAAFLDAMEPVAMEATLAALETLEREQEAVDRHWQLRLERARYEVALAQRQYDAVDPDNRLVARELERRWNTALGALEALDSEYALVRRTDLMPLSAAEREEVRRIAADLPGLWRAETTMPVDRKRLLRLAVAAVTVTVDRTTRRVDVVILWTGGATSTHAAFLPPIGIHATTDAAVIARIRELSRKLPDHAIAQALNVLGLRTRTGKDWTYERVRSMRKQHGIPTDCPIKTGPLEPRADGRISAKAAARRLGVTPSLVQVWVQHGVLACDQRCPCSKQWIRLTDADVARLDGSADVSGLPTLTEVAEDTGLERDAVWTRVRQGDYIPIRTPRGRGQWEWRLKERPAGNEPVPPCAIGAGRHRGEQYG

SEQ ID NO: 11260 - protein, 741 aa, Unknown
  Description of Unknown: Integrase C3 sequence
  Coil,PS51736,IPR006119,PTHR30461,PS51737, IPR011109,PF07508,PF13408,SSF53041,PF00239, SM00857,G3DSA:3.40.50.1390,cd00338,IPR036162,IPR025827
MTEHSKIAAGHQARLAVVYLRQSSASQVENNRESTERQYALSGRARELGWPDERVLVIDEDLGLSGSGSVMRAGFARLTSEVALARVGIVLGLEVSRLARNNADWHRLIELAGLTDTLIGDADGIYHPALFNDRLLLGLKGAMSEAELHVLRARLNGGIRNKAARGELRRGLPIGFVWGEADGEILIHPDEAVAHAIRTVFARFAELGSARRVWLWFREQAMKFPLWLNARTELRWGEASYHAVHSVLANPVYAGAYVYGKYRRETVLDETGARCKRIRKLPMEDWQVLIKDHHQGYIDWPTFEANRERMAANTQPRTHAKAQEQAGGAAREGGALLQGIARCGHCGRRLHTHYRGRTVTPGYHCPGKVVVEGRGVHCLNVGGGQIDEAVVAAFLEALEPVHLTATLEAAERLENDRDAALKQWRLDVERAAFAVNRAERRYCAVDPDNRLVARRLEQEWEEALRALEAAKAELARREEQRPRVLSATEREKLLALGADLASVWYAPTTTPRDRKELLRTLLDEVTLHVDRDEAAALLVLRWKGDATSRLTVALPRSRPATVRTDEDTLALLRRLAPHYPDAVIAGVLNRQGRRTAYGHRFDANRVGYLRKHWKIPACKAKPPAADGDIVTVRQAAAALGVAPSTLHRHVNDGLIPGEQVTPGAPWRIRLTAELKARFLATPGEGFEPIRDAMENLGLSRQVVLQRVKRGELEAVHVVRGQRKGLWIKTIDQNPSLFEQIP

SEQ ID NO: 11261 - protein, 741 aa, Unknown
  Description of Unknown: Integrase C4 sequence
  Coil,PS51736,IPR006119,PTHR30461, PS51737,IPR011109,PF07508,PF13408, SSF53041,PF00239,SM00857,G3DSA:3.40.50.1390, cd00338,IPR036162,IPR025827
MTEHSKIAAGHQARLAVVYLRQSSASQVENNRESTERQYALSGRARELGWPDERVLVIDEDLGLSGSGSVMRAGFARLTSEVALARVGIVLGLEVSRLARNNADWHRLIELAGLTDTLIGDADGIYHPALFNDRLLLGLKGAMSEAELHVLRARLNGGIRNKAARGELRRGLPIGFVWGEADGEILIHPDEAVAHAIRTVFARFAELGSARRVWLWFREQAMKFPLWLNARTELRWGEASYHAVHSVLANPVYAGAYVYGKYRRETVLDETGARCKRIRKLPMEDWQVLIKDHHQGYIDWPTFEANRERMAANTQPRTHAKAQEQAGGAAREGGALLQGIARCGHCGRRLHTHYRGRTVTPGYHCPGKVVVEGRGVHCLNVGGGQIDEAVVAAFLEALEPVRLTATLEAAERLENDRDAALKQWRLDVERAAFAVNRAERRYCAVDPDNRLVARRLEQEWEEALRALEAAKAELARREEQRPRVLSATEREKLLALGADLASVWYAPTTTPRDRKELLRTLLDEVTLHVDRDEAAALLVLRWKGDATSRLTVALPRSRPATVRTDEDTLALLRRLAPHYPDAVIAGVLNRQGRRTAYGHRFDANRVGYLRKHWKIPACKAKPPAADGDIVTVRQAAAALGVAPSTLHRHVNDGLIPGEQVTPGAPWRIRLTAELKARFLATPGEGFEPIRDAMENLGLSRQVVLQRVKRGELEAVHVVRGQRKGLWIKTIDQNPSLFEQIP

SEQ ID NO: 11262 - protein, 741 aa, Unknown
  Description of Unknown: Integrase C5 sequence
  Coil,PS51736,IPR006119,PTHR30461,PS51737, G3DSA:1.10.10.2600,IPR011109,PF07508,PF13408,SSF53041, PF00239,SM00857,G3DSA:3.40.50.1390,cd00338,IPR038109, IPR036162,IPR025827
MTEHSKIAAGHQARLAVVYLRQSSASQVENNRESTERQYGLAERARELGWPDERVLVIDEDLGLSGAGSVMRAGFARLTSEVALARVGIVLGLEVSRLARNNADWHRLIELAGLTDTLIGDADGIYHPALFNDRLLLGLKGAMSEAELHVLRARLDGGIRNKAARGELRRGLPIGFIWGDEDGEILIHPDEAVAHAIRTVFARFAELGSARRVWLWFREQGMKFPLWLNARTELRWGEASYHAIHSVLANPVYAGAYVYGKNRRETVLDETGARRKRMRKLPMEDWQVLIKDHHQGYLDWPTFEANRERMAANTQPRTHAKAQEQAGGAAREGGALLQGIARCGHCGRRLHTHYRGRTVTPGYHCPGKVVVEGRGVHCLNVGGGQIDEAVVAAFLEALEPVCLTATLEAAERLENDREAALKQWRLDVERAVFVVNRAERRYCAVDPDNRLVARRLEQEWEEALRALEAAKAELARREEQRPRVLSATEREKLLALGADLASVWHAPTTTPRDRKELLRTLLEEVTLHIDRGEAAARLVLRWKGDATSRLTVALPRSRPATVRTDEDTLALLRRLAPHYPDAVIAGVLNRQGRRTAYGHRFDANRVGYLRNHWKIPVCKAKPPAANGDIVTVRQAAASLGVAPSTLHRHINDGLIQGEQITPGAPWRIRLTPELKARFLTTPGHGFEPIRDAMDTLGLSRQSLLQRIKRGELDAVHIVRGQRKGLWIKTIDHDPTLFEHTS

SEQ ID NO: 11263 - protein, 741 aa, Unknown
  Description of Unknown: Integrase C6 sequence
  Coil,PS51736,IPR006119,PTHR30461,PS51737, IPR011109,PF07508,PF13408,SSF53041,PF00239, SM00857,G3DSA:3.40.50.1390,cd00338,IPR036162,IPR025827
MTEHSKIAAGHQARLAVVYLRQSSASQVENNRESTERQYALSGRARELGWPDERVLVIDEDLGLSGSGSVMRAGFARLTSEVALARVGIVLGLEVSRLARNNADWHRLIELAGLTDTLIGDADGIYHPALFNDRLLLGLKGAMSEAELHVLRARLNGGIRNKAARGELRRGLPIGFVWGEADGEILIHPDEAVAHAIRTVFARFAELGSARRVWLWFREQAMKFPLWLNARTELRWGEASYHAIHSVLANPVYAGAYVYGKYRRETVLDETGARCKRIRKLPMEDWQVLIKDHHQGYIDWPTFEANRERMAANTQPRTHAKAQEQAGGAAREGGALLQGIARCGHCGRRLHTHYRGRTVTPGYHCPGKVVVEGRGVHCLNVGGGQIDEAVVAAFLEALEPVRLTATLEAAERLENDREAALKHWRLDVERAAFAVNRAERRYCAVDPDNRLVARRLEQEWEEALRALEAAKAELARREEQRPRVLSATERETLLALGADLASVWYAPTTTPRDRKELLRTLLDEVTLHVDRDEAAALLVLRWKGNATSRLTVALPRSRPATVRTDEDTLALLRRLAPHYPDAVIAGVLNRQNRRTAYGHRFDANRVGYLRKHWKIPACKAKPPAADGDIVTVRQAAAALGVAPSTLHRHVNDGLIPGEQVTPGAPWRIRLTAELKARFLATPGEGFEPIRDAMENLGLSRQVVLQRVKRGELESVHVVRGQRKGLWIKTIDKNPSLFEQIP

SEQ ID NO: 11264 - protein, 737 aa, Unknown
  Description of Unknown: Integrase C7 sequence
  Coil,PS51736,IPR006119,PTHR30461, IPR011109,PF07508,PF13408,SSF53041, PF00239,SM00857,G3DSA:3.40.50.1390,cd00338, IPR036162,IPR025827
MILSPKIEARHQRLQAVVYIRQSTPKQVQSNQESTRRQYQLAERARQMGWPASQIRVIDEDLGLSGASSRQRTGFQKLVAAIGLGEVGIILVTEVSRLSRCNSDWHRVIELCGVFRTLIADEDGVYDARDPNDLLLLGVKGTLFAAELHILRGRMRGNLLNKARRGELAQRLPVGFRRRHDGVAVQDPDDAVRLAIATVFERFAVLRNARAVQRHFLENQLLLPRCAQTGATAGSISWARPTYQMILQILTNPAYAGVFVYGRRKWEVVPGEPPTTVNRRVALAEWDIVVPDVYPACLTYDVYQANRRALRGNLYNFARKGDGAPREGLALLAGLVVCGRCGRRMAVSYGSAYHSYHCRRAQAEYGEPQCQSCPTGALDALVTSAFLEAVAPVSLEATLAALETLEGERAATDRQWQFRLERARYEVVLAQRQYDAVDPDNRLVARELERRWNAALSTLETLESDYALMRRTDLLPLNAAEREEIRRVAADLPGLWQAETTTAVDRKRLLRLAIAAVTVTADRTTRRVDVVVLWTGGATSTHTASLAPGCLHATTDATVIARIRELSRDRPDHAVAQALNAAGMRTQTGKEWTYERVQSMRKRYRIATGCPIQTGSPDPRADGRVSAKAAAQRLGVSRSLVHLWIQHGIIPCDQRCSCSKLWVRLTEADVTRLDGSADVSGLPTLTEVAQATKLQREAVWARVRQGDYVAFRTPRGQGQWEWRLKIAPQSSQSGLSR

SEQ ID NO: 11265 - protein, 713 aa, Unknown
  Description of Unknown: Integrase C8 sequence
  PS51736,IPR006119,PTHR30461,PS51737,IPR011109, PF07508,PF13408,SSF53041,PF00239,SM00857, G3DSA:3.40.50.1390,cd00338,IPR036162,IPR025827
MTPPTNPGFGLSDKIQWPHLDRLAVVYVRQSTLQQVSDHQESTRLQYGLVTRAEALGWPPERILTIDEDLGKSGSSAAGRSGFQRLVSEVGLNHVGLILGVEMSRLARSCKDWHQLLEICALFGTLIADLDGIYDPSQYNDRLLLGLKGTMSEAELHLLKQRMMQGKRTKAQRGELGFNVPIGYICRPSGEVQFDPDEQVRQVVRLIFRKFEELGTLNATLRYLVSHDIQVGVRVLYGLDKGELQWRRPNRPTLQNLLKNPAYAGAYAYGRKQVDARRKQAGRPHTGCVVKPPEEWLVLIQDHHPAYISWEQYQRNGAQLKANRNRADELGHAREGVGLLSGLLVCGRCGCRLQVQYHRAGGYHRYVCNRAMSDYGGQFCQHVSGTCLDEYVTGQVLRALEPAALDLSLAAAAHLEQDRAELDILWQQRLERAQFEADRAQRHYQFVEPENRLVARQLAQAWEAALQAQHTLRDDYQRFCHDQPKGLSPDEKQQIQQLADSLPLLWAAPTTTMAQRKDVIRQMIDGILMTVVGDTEQVQVTIKWAGGDSSQAQITRPVAKWTQLSDYPQLCQRLEQLTQANLTTRDIIDCLHQDGFRPPKRRQTFNPEMVQTLIRKLGLRSHAATPAKAPLPPPEWWLPDLAAKLDMPTMTLYNWVQRGWVKARQPAEPPKHWIIWADEAELERLRTHRQCPTREILRQRWQGETPSIACPPD

SEQ ID NO: 11266 - protein, 705 aa, Unknown
  Description of Unknown: Integrase C9 sequence
  Coil,PS51736,SSF46955,IPR006119,PTHR30461,IPR009061,PS51737, IPR011109,PF07508,PF13408,SSF53041,PF00239,SM00857,G3DSA:3. 40.50.1390,cd00338,IPR036162,IPR025827
MNVHLKVQPHHLERGAYLYIRQSSMRQVVENVESARRQYALRGRAVALGWRDEQIIVIDNDQGESGASAAWREGFQRLVSDVGMGHAGIVMGLEVSRLARNNADWQRLLEICALADTLILDEDGVYDPASFNDRLLLGLKGTMSEAELHVIKARLRGGILNKVRRGEFRCLLPTGLVYDHFGNVTLDPDMQVRETIIHFFEMFSRLGSASQTVKVFRNEGLLFPSRLHNGGTLFRPLTASTAMRVLNNPRYAGAYTYGRRQFRRTIDGKKTLRARDIDDWPACIPDAHPGYISWERHQENLKILKANGRGFEAARASIPREGPALLQGRAVCGQCGSHLRVRYAARRGRQEAWYICNRARIYRGEPMCQSIAGPPVDEAIGMLIAEQMTPAAVELALEVRKEIQARHEEADRLRCRAIERAQTEAELAQRRFMLVDPSNRLVADTLEGEWNEKLRTLASAREERERGREHDQFILDKAVHERLVAMTADFNQLWKDPDTPSRERKRLLAHIIEDVTLLKLPAEGTTKLHVRFKGGKIQTLTTMNPKSSPQQIKTKPSILELVDRLLDDYIYPEIAEILNEQGHRPGGTARRGCQEARFTPLKVAYLIHEYKLRSRYDRLRQRGMLTRQEAAAHLNISEQTVARWAKFGLITRHAYNGHYSLYEIADGDLPQKQCSRWNPLEDRAAAYRQMQTEPRTSTGEERGVV

SEQ ID NO: 11267 - protein, 701 aa, Unknown
  Description of Unknown: Integrase C10 sequence
  Coil,PS51736,IPR006119,PTHR30461,PS51737, IPR011109,PF07508,PF13408,SSF53041,PF00239, SM00857,G3DSA:3.40.50.1390,cd00338,IPR036162,IPR025827
MLAVPGNSDERLTAVRRSKFAYVYVRQSSINQVRHHQESTELQYSLVDRAVRLGWPPDRVVVIDEDLGKSGNGQVERGGFQRLIAEIGLGNAGLVVSLDASRLARNNRDWHQLLELCSLFGVIIADGERLYDPCAYHDRLLLGLSGIMSEAELHQIRIRLHQGERQKAARGELRIPLPGGLAYNRSGQIVLNPDEEVQARLRLVFDKFRELGTARRVMRYLRTHDLRIPVRPLRGPGPHELVWRDATIAHVHYILHNPAYAGAYVYGRRRINAVRQGPGSHRATSKVAIDDWEVCIKDAHPGYIDWEEFMVNQRRLADNTNRYEAGHRGAPRKGIALLQGLAVCGQCGRRMTVRYSGPDSACPVYCCLADRNQTGSSLCQEVRAPAVDELVAQTLLKALEPDQIAIAIAALDEIAEETRSLEKQWTLRRERARYDAERARRQYDTVEPENRLVARTLEKAWEDKLRLVDEIEQEYRRWRDREPLVLQTQDHAALQQLAENLPAIWHSETTQPEDRKRILRFIVQEVVLDQKKIRGQVAIRILWQTGATSQHQIQRRVQSYDRDYGELELVRERITQLNAAGDMDRQIAKKLNDEGIRSARGRPFTYENVWLLRHRWGIPTAKINGVAANPTRWPDGTYSVQGAAAAIGVTAQTIFDYLAQGLINGRQSTKGQPWQISLSSDQIDQLQRRLQRTRRSRKGAS

SEQ ID NO: 11268 - protein, 701 aa, Unknown
  Description of Unknown: Integrase C11 sequence
  Coil,PS51736,PTHR30461,IPR006119, PS51737,IPR011109,PF07508,PF13408, SSF53041,PF00239,SM00857,G3DSA:3.40.50.1390, cd00338,IPR036162,IPR025827
MLAIPSSPDERLTAVRRSKFAYVYVRQSSINQVRHHQESTELQYSLVDRAVRLGWPPDRVVVIDEDLGKSGNGQVERGGFQRLIAEIGLGNAGLVVSLDASRLARNNRDWHQLLELCSLFGVVIADGERLYDPCAYHDRLLLGLSGIMSEAELHQIRIRLHQGERQKAARGELRIPLPGGLAYNRSGQIVFNPDEEVQARLRLIFDKFRELQTARRVMRYLRTHDLRVPVRPLRGPAPHELLWRDATIAHVHHILHNPAYAGAYVYGRRRINAVRQGPGSHRATSKVAIDDWDICIKDAHPGYINWEEFMANQRRLADNTNLYEAGHRGAPRRGIALLQGLAVCGQCGRRMTVRYSGPDSACPVYCCLADRNQTGSSLCQEVRAPAVDELVAQTLLKALEPDQIAIAIAALDEIAEETRSLEKQWALRRERARYDAERARRQYDTVEPENRLVARTLEKAWEDKLRLIDEIEQEYRRWRDREPLVLQAQDHAALQELAENLPAIWHSETTQPEDRKRILRFIVQEVVLDQKKIRGQVAIRILWQTGATSDHQIQRRVQSYDRDYGELELVRERITQLNAAGDMDRKIAKILNDEGVRSARGKLFSYENIWLLRHRWGIPTAKINGVAANPPRWPDGTYSVQGAAAAIGVTAQTIFDYLAQGLVHGRQSTKGQPWQISLSSDQIDQLQRRLQRTRRSRKGAS

SEQ ID NO: 11269 - protein, 696 aa, Unknown
  Description of Unknown: Integrase C12 sequence
  Coil,PS51736,IPR006119,PTHR30461,PS51737, IPR011109,PF07508,PF13408,SSF53041,PF00239, SM00857,G3DSA:3.40.50.1390,cd00338,IPR036162,IPR025827
MNTKITSDHLGRAAVVYVRQSTMAQVMGNLESQRRQYDLAGAAATTGFASVTVIDDDLGRSGSGSVERPGFERLVALVCSGNVGAVYCIEASRLARNGRDWHHLIDLCALTGTLVIDPDGAFDPRLVNDRLLLGLKGTMAEYELSLIRQRGIAARDSKAGRGEFRFMLPPGFCWSEAGKIEIDPDEHVAETIRLVFDKFRELGSGRQVFLWLRSADIKMPVVLHNVEVRKLVWKAPAYHSVMQILHNPLYAGAYAFGRRAQRTLIIDGRARKANGLRKPRDEWSVLLRDNHQGYITWREYEENQKLLTENAHMKRNCDRKSARGGRALLTGLMRCGRCGRMMRVFYGSAKGNAHRYQCRGDDARVGLGLCIGIGGVRVDRAVATQILEAVSDRAVEAAIFASDQVERSARDVIAAIERDLEGARYEASLAGRRYELVDPAKRHVARELEARWNDALERVSVLERKIEELSALSAARPAIDRGRLLQLAHDLPTAWNAPSTDTRTKQRLIHILVQEIICDLDDTTNEAVLLIHWTGGRHTEVRVARVKTGRYPSDMAPPAVEALRKLGGHWPDRELAVSLNRMLCKTGDGEGWTAVRVRDMRERLGIPEYDPTKAGSPVISLMKAAERLGICIGSAKSLVKKGILPATQILPGSQWMVPIEALTSEAVLIGVQGVVGRRPQIYEYYQYDKVVRLPGL

SEQ ID NO: 11270 - protein, 694 aa, Unknown
  Description of Unknown: Integrase C13 sequence
  Coil,PS51736,IPR006119,PTHR30461, PS51737,IPR011109,PF07508,PF13408, SSF53041,PF00239,SM00857,G3DSA:3.40.50.1390, cd00338,IPR036162,IPR025827
MSTDIAMKVDADHLRRDAFLYVRQSSLRQVFENTESTKRQYALRDRAVALGWPIERVHVIDSDLGLSGAQSQDRDGFQHLVSEVAMGHAGIVLGLEVSRLARNNADWHRLLELAALSRTLIMDEDGVYDPAYFNDRMLLGLKGTMSEAELHILKSRLQGGILNKARRGELEMPLPIGLVYTPDARVVLDPDRQIHETVRLLFDTFRETGSACAVVRRLRGEKILFPRRIRRGIGKGDVLWNEIDHSRVLQILHNPRYAGAFAYGRTRTAYNAKLKPVQLRVARSDWQVLIPDAHEGYISWAEYERNQAALEQNATGFSPGLRGRMPRQGNGLLQGRLLCGRCGARMRVHYEPFEGRLRPYYVCNEAVVRHAGKHCQWVRGAPVDEAVSALLLEVMAPAAIDVALAVQQEITQRVEQATALRGAQLQRARYEAELARRRYLKVDPDNRLVADALEADWNARLRDLDALQREHERQNEADHSLLDEPAQQRIRALTADFPRIWNDERTDPIERKRMLGLLIEDVTLLVDDEVNIHIRWRGGRTQSLSVARPRPMSVIRKTPAQVVALINELLETANDRQIAARLNDLGHRNWRGEPFTLKKVMLVRRTYGLKSRYERLRESGMLTGEEVAQQLGVCASTVHQLGRKGILKRHRYATNHRYLYEPPGNVRLEKGAGSRYGGRQPRLIVAQRLQQGAS

SEQ ID NO: 11271 - protein, 693 aa, Unknown
  Description of Unknown: Integrase C14 sequence
  PS51736,IPR006119,PTHR30461,PS51737,IPR011109, PF07508,PF13408,SSF53041,PF00239,SM00857, G3DSA:3.40.50.1390,cd00338,IPR036162,IPR025827
MSTDRYQKVTADHLRRDAFLYVRQSSLRQVFENTESTKRQYALRERAVSLGWPIERVHVIDSDLGLSGASAEHRDGFQQLVSEVAIGHAGIVLGLEVSRLARNNADWHRLIELAALTHTLILDEDGVYDPAYFNDRLLLGLKGTMSEAELHVLNARLQGGMRNKARRGELELPLPIGLAYHPNGSVVLDPDQQIHASLRLLFDTYRQTHSASMVVRRFRREGWVFPRRIRRGIGKGDVQWGGLNTSRVLQILHNPRYAGAFVYGRTRTGRKADLTSTQFKVAQSDWQVLIRSAHVGYIDWDEFERDQVTLRQSANGFGSLARGTVPREGDGLLQGRVICGLCGNRMRVRYQKVSGRLEPYYVCHDVAAHDAGKPCQSVRGRAIDDAISALLLQTVGPAAIEVALAVEDEIAERIEQANSMRLKQLERARYEAELARRRYMNVDSANRMVADTLEADWNDRLRRLDVLQQEHERQRRSDQDLLGDEARARIRALADDFAVVWNDRRIESVERKRMLRLLIEDVTLVKSEKVSIHVRFRGGRTISLAVDKPRSMALVRKTQPAVVTVIDGLLETCTDQQVATQLNELGYTNWQHQTFTARKVALVRTTYGLPSRYERLRARGLLTGAELATQLEVSQTTIHQWGRQGLLRRHVYGHDHRCLYEPPGNVLFVRGTGGRKATQPTFIAAPTTEQGAM

SEQ ID NO: 11272 - protein, 692 aa, Unknown
  Description of Unknown: Integrase C15 sequence
  PS51736,IPR006119,PTHR30461,PS51737, IPR011109,PF07508,PF13408,SSF53041, PF00239,SM00857,G3DSA:3.40.50.1390,cd00338, IPR036162,IPR025827
MPDLKVTADHLRRDAYLYIRQSTLRQVAENGESTQRQYGLRDRAIAAGWPTERIHVIDRDLGKSGSSAVARDGFQELVSEVALAKAGVVMGLEVSRLARNSADWHRLLELCALTSTLILDEDGIYDPESFNDRLLLGLKGTMSEAELHFLKARMRGGQLNKASRGDLKIGPPVGLVYLPDGTLALDPDAEVQAALRMVFTTFERLGSATRTVKFFLDEGILFPRRLRKGLHKGELMWAPPRHARILQVLHNPRYAGAFVYGRTRGRPRPGGGVSQIKVDMADWRFVMPDLHPGYIDWERFKANQERLATNAQAYGMQRRAGPVREGSALLQGRVLCGLCGGRMGVHYSQEHGQPVPTYICQETATRRGGKVCQSVPGKVVDPAVGALLVELMTPMTLEVTLAVQRELEARAAEMDTLRRQHIERTRHDAELARRRYMKVDPDNRLVADTLEAEWNEKLRLHTDVVEDYERRAPEEAAALDAETQQRVRDLAEQFPRIWSDARIDVRERKRILRLLVADVTLIKAETITANVRLSGGATRTLTLDRPLPIFQIRKSKPDLIAEVDRLLDRYCDREVADIFNERGLRTWDGKPFNLKKIAFIRRTYNLPGRRQRLRDCGMLTTQEVAEHFAIAETTVHQWGRQGLITKVCSDNLNRGLWDIPHDLEIIKGRPGRNAVPARRASITVPSTEQDSL

SEQ ID NO: 11273 - protein, 692 aa, Unknown
  Description of Unknown: Integrase C16 sequence
  Coil,PS51736,PTHR30461,IPR006119,PS51737, IPR011109,PF07508,SSF53041,PF00239,SM00857, G3DSA:3.40.50.1390,cd00338,IPR036162
MTNVDRLPADLLKRKAVVYVRQSTQAQVQLNVESQRRQYELVQEAKRRGFRDVEVIDDDLGRSASGTVARPGFDRLVALLCAGDVGAVLCLDASRRARNGRDWHHLLELCGLVEARVIDLDGVYDPCRANDRLLLGMKGSISEFELNVLRTRMLDAKREKAQRGELRISVPVGYVWHRDVGLGFDPDVRLQEVIRLIFTRFRQLGSARQVLLSMRAEQVHFPRPSDGRTLTHFDWTPIRYRNVISVLKNPFYAGVYAYGKSGKQMTIVEGRARKSYKHRKPFEAWDVMLREHHDGYIDWAEFERNQEKLAANAYGKAGDVKSGRGGRALLAGLLACARCGRRLSVAYTGRIPQAVYRCNRFDMPPRCMTFGGSRIDAAIGEELLRVVEPLAIEAAQQAEQMHMDTLNEQRRIMELELQQARYEATLAERRYAACDPENRLIAAQLEKNWEVALRRVQACQVRLETAGAPEGQAPMPDFTKLAEDLRAAWSAPGVTMRTRQQLVRALIVDIVADVDEPARAVTLTIHWQGGQHSELRIRKPKTGEHGCSTSDEALAVIRGMVGRWSDQDIAASLNRMGIRTGQGMTWTAKRVSAMRQVRDIHAYKSAQKDGEWLTMFEAAKRLGVTSHVIRRLIKERVLPAEQVMPDAPWQIRASDLQSEAVTAALARKHRPCRNDAEGQIPMFIEVSEGGAQ

SEQ ID NO: 11274 - protein, 690 aa, Unknown
  Description of Unknown: Integrase C17 sequence
  Coil,PS51736,IPR006119,PTHR30461, PS51737,IPR011109,PF07508,PF13408, SSF53041,PF00239,SM00857,G3DSA:3.40.50.1390, cd00338,IPR036162,IPR025827
MNTKITPQHQSKPAYIYIRQSTLAQVRHHQESTERQYALRDKALALGWPQTSIRILDRDLGQSGAQMTGREDFKTLVADVSMGHVGAVFALEVSRLARSNLDWHRLLELCALTHTLVIDADGCYDPGDFNDGLLLGLKGTMAQAELHFLRGRLQGGKLNKAQKGELRFPLPVGLCYDDEGHIVLDPDDEVRGAVQLVFRLFRETGSAYAVVKRFAEDGLRFPKRAYGGAWAGRLIWGRLSHERVIGLIKNPSYAGIYVFGRYQYRQRITPQGEVHKRVQPVPKADWRVHLPDHHEGYISPEEFERNQARLAGNRTNGEGTVLSGPAREGLALLQGMLICGCCGRALTVRYQGNGGIYPMYLCNAQRRQGLATRDCMSVRSDLLDNAIGEAMLAALRPAELELAVTALNELEQRDQAIMRQWHMRIERAEYEVALAERRYQECDPANRLVTGTLERRWNDAMLRLAAIKTEAAQFQSQKARVATPEQKAQILALARNLPRLWRAPATPAKDRKRMLRLLIRDITVEKLPATRQVVLHVRWQGGTCTDTTVTLPKPVADAMRYPTATVEHVRKLSQHLSDPQIAAHLNQEGLRSSTGKSFTLSMVKWIRFRYGIAATNFMRPDELTVQQLAHRLGISPHVVYYWIERQVVHARKLDGRGPWWITLDPVKEQQLRDWVRTSGHLRGQHSHTQL

SEQ ID NO: 11275 - protein, 690 aa, Unknown
  Description of Unknown: Integrase C18 sequence
  PS51737,PF12728,G3DSA:3.40.50.1390,G3DSA:1.10.1660.10,Coil, PS51736,IPR006119,SM00857,IPR025827,IPR011109, PF07508,PF13408,SSF53041,PTHR30461,mobidb-lite, IPR041657,PF00239,cd00338,IPR036162
MSKITHEHLGRQAIVYIRQSTADQVANNLESQRRQYGLADRARQLGWSDVAVIDDDLGRSGGGVARPGFEKLLAAICEGRVGAVVSIEASRLARNGRDWHTLLEFCGLVGTLILDEDGIYDARHPNDRLLLGMKGTMSEMELSVLRQRSLEALKQKARRGELFMTVAIGYVRIGNNRIEKDPDRRIVEAIALIFAKFAEMQSVRQVHLWFRHERIPLPAVIYGAEGRLIEWKLPVYNTILHILTNPIYAGAYAFGRTGSRVSIDAGRKKVVRGFKKERKDWEVLIPNHHEGYLSWAAYERNLGLIADNANGKNPMSRGALRRGEALLAGLLRCGHCGRKLHVAYSGTDGNTGRYHCRGGFLNHGGDRCISFGGMRVDRDIGAEVIVRLQPLGIEAALAAQTVRSRASEDKRRQVELALEQARYEVGRARRQYDAVDPDNRLVAAELETRWNERLTVVRDLETDLEELTTSSATEPMPVDHERLMLLGADLQRAWTSAGVTSEAKKRIVRTLIDEIVVRIEDSKLDLVIRWHGGAHSALKVKKNRSGQHRWSAEGETIDLVRVLARQMPDRAIASVLNRAGKTTGRGNGWTQSRVCSLRNHNEIPAYREGERQERGEVTLDEAATALSVSPSTVRRLIKDGQLSANQLCKGAPWIIRALDLDRSDVKGAATARRLRRPPSSNPRQKTLELQ

SEQ ID NO: 11276 - protein, 690 aa, Unknown
  Description of Unknown: Integrase C19 sequence
  Coil,PS51736,IPR006119,PTHR30461,PS51737, IPR011109,PF07508,PF13408,SSF53041,PF00239, SM00857,G3DSA:3.40.50.1390,cd00338,IPR036162,IPR025827
MSSTDLIPAALLARKAVVYVRQSTQSQVMTNLESQRRQYDLVDIARQRGFGDIEVIDDDLGRSASGTVARPGFDRLVALLCAGKVGAVLCFDASRLARNGRDWHHLLELCGLVEARVIDHDGVYNPCRPNDRLLLGMKGSISEFELGVLRARMLDAVRSKARRGELRLSVPFGYIWHREAGLGLDPDLRLQEVIRSIFTRFHELGSARQVLLSMTKDQVHFPRPSDEGRMTSFVWTPVRYRNVIGILKNPFYAGVYVYGKSEKRTAIVDGRARRTYGHGKPAGMWEVMIRDHHEGYITWDEYERNQQQLALNNYGRSGGTKSGRGGKALLSGLLTCGRCGRRLSVAYTGNPQSRPVYRCDKPNLMMGLPRCITFGGPRVDAAVARELLRAVEPLAIEATFEAERMHRERQEDQRHIHDLELRQARYEASLAERRYAACDPDNRLIAAQLEKNWETALRRVRDLDVRKPADSPSTIEVDPDTFTNLADNLQAAWDSPDVTMRARQQLLRTLIADIVVDVEDAVREVVLTIHWKGGQHSELKVRKPQSGEHGCATTEDALAVMRSMAGRWSDEHIAASLNRMGMPTGQGKTWTAHRVASVRRVRAIHAYKSADKDGEWMTMTEAAAALGVTNHRIRHLIKTKVLSAEQVVPGAPYQIRASDLASATVQAAIARKARPCRIADAETLPMFTDT

SEQ ID NO: 11277 - protein, 690 aa, Unknown
  Description of Unknown: Integrase C20 sequence
  Coil,PS51736,IPR006119,PTHR30461, PS51737,IPR011109,PF07508,PF13408, SSF53041,PF00239,SM00857,G3DSA:3.40.50.1390, cd00338,IPR036162,IPR025827
MSSTDLIPAELLARKAVVYVRQSTQSQVMTNLESQRRQYDLVDIARQRGFGDIEVIDDDLGRSASGTVARPGFDRLVALLCAGKVGAVLCFDASRFARNGRDWHHLLELCGLVEARVIDHDGVYNPCRPNDRLLLGMKGSISEFELGVLRARMLDAVRSKARRGELRLSVPFGYIWHREAGLGLDPDLRLQEVIRSIFTRFHELGSARQVLLSMTKDQVHFPRPSDEGRMTSFVWTPVRYRNVIGILKNPFYAGVYVYGKSEKRTAIVDGRARRTYGHGKPAGTWEVMIRDHHEGYITWDEYERNQQQLALNNYGRSGGTKSGRGGKALLSGLLTCGRCGRRLSVAYTGNPQSRPVYRCDKPNLMMGLPRCMTFGGPRVDAAVARELLRAVEPLAIEATFEAERMHRERQEDQRHIHDLELRQARYEASLAERRYAACDPDNRLIAAQLEKNWETALCRVRDLEVRKPADSPSTIEVDPDTFTNLADNLQAARGSPDVTMRARQQLLRTLIADIVVDVDDAVREVVLTIHWKGGQHSELKVRKPQSGEHGCATTEDALAVMRSMAGRWSDEHIAASLNRMGMPTGQGKTWTAHRVASVRRVRAIHAYKSADKDGEWMTMTEAAAALGVTNHRIRHLIKTKVLSAEQVVPGAPYQIRASDLASATVQAAIARKARPCRIADAETLPMFTDT

SEQ ID NO: 11278 - protein, 689 aa, Unknown
  Description of Unknown: Integrase C21 sequence
  PS51736,IPR006119,PTHR30461,PS51737,mobidb-lite, IPR011109,IPR041657,PF12728,PF07508,PF13408, SSF53041,PF00239,SM00857,G3DSA:3.40.50.1390,cd00338, IPR036162,IPR025827
MKITSDHLARGAYIYIRQSTVDQLANNHESRRRQYGLADRARALGWTDVTVIDDDLGRSGSGVSRPGFEKLLAAICEGRVGAVFAIEVSRLARNGRDWHTLIEFCGLVGTVIVDEDGTYEPRHPNDRLLLGMKGTMSELELSLLRARSMEALKQKARRGELFFTVAVGYVKVGRDKIEMDPDLRVREAIGLVFTRFAEMQSIRQVFLSLRSDQIALPYINPRISGQQHVLWKPPVYTTVSNLLTNPVYAGAYAFGRTGSRTIIENGRKRIVRGRRKARSDWAVLLVDHHEGYLSWADFERNQRLITDNANGKGMMVRGPVRKGEALLAGLLRCGHCGRRLLVGYNGAKGDVGRYKCDATRSNPDGDSCISFGALRVDEAVGAEIVRLLQPLGVEAAIQAIAQREHQSGEKQRQIELALEQARYEAIRARRQYDTVDPENRLVAHELERRWNGALAAVSALEEELEALVRQRPAALSAEERQRLLQMGADLEAAWHHPAATAVTRKRIIRVVLREVVAHVEGDQIHLLLHWQGGDHTRLTVRKNRRGQTRWSVEPETVELIRACARLMPDKAIAGLLNRAGKRTGRSNGWSQSRVRGFRNTHGIAVYRDGEWAERGEVTLTEAARMLNLSPATVLRQIRAGIIPAQQYCKGAPWVIKRRNIEDSHLIEHAGPRLNGPSSSNPEQKTFVFQ

SEQ ID NO: 11279 - protein, 689 aa, Unknown
  Description of Unknown: Integrase C22 sequence
  Coil,PS51736,IPR006119,PTHR30461,PS51737, IPR011109,PF07508,PF13408,SSF53041,PF00239, SM00857,G3DSA:3.40.50.1390,cd00338,IPR036162,IPR025827
MTSTDLFPTALLARKAVVYVRQSTQSQVMTNLESQRRQYDLVDVARQRGFSDIEVIDDDLGRSASGTVARPGFDRLVALLCAGKVGAVLCLDASRLARNGRDWHHLLELCGLVEARVIDHDGVYNPCRPNDRLLLGMKGSISEFELGVLRARMLDAARSKARRGELRLSVPFGYIWHREAGLGLDPDLRLQEVIRSIFARFHELGSARQVLLSMTKDQIHFPRPSDEGRMTNFVWTPVRYRNVIGILKNPFYAGVYVYGKSEKRTAIVDGRARRSYGHGKPAGTWEVMIKDHHEGYISWDEYERNQQQLALNNYGRWGGTKSGRGGKALLSGLLTCGRCGRRLSVAYTGNPQSPVYRCYKQNLMMGLPRCMTFGGPKVDAAVARELLRAVEPLAIEATFEAERMNRERQEDQRHIHDLELQQARYEASLAERRYAACDPDNRLIAAQLEKNWETALRRVRDLEVRRPTESPSTIEVDPGTFANIADNLLAAWESPDVTMRVRQQLLRTLIADIVVDVDDAVRDVVLTIHWKGGQHSELKVRKPRTGEHGCATTDDALAVMRSMAGRWSDEHIAASLNRMGMPTGQGKTWTAHRVASVRRVRAIHAYKSADKDGDWLTMTEAAAALGVTNHRIRHLIKTKVLSAEQVVRGAPYQIRAADLDSATVKAAIARKGSPCRIADAETLPMFTDT

SEQ ID NO: 11280 - protein, 689 aa, Unknown
  Description of Unknown: Integrase C23 sequence
  PS51736,IPR006119,PTHR30461,PS51737, IPR011109,PF07508,PF13408,SSF53041, PF00239,SM00857,G3DSA:3.40.50.1390,cd00338, IPR036162,IPR025827
MKITAEHLARGAYVYVRQSTADQLVNNPESRRRQYGLAERARSLGWKEAIVIDEDLGRSGSGISRPGFEKLLAAICEGRVGAVLAIEASRLARNGRDWHTLIEFCGLVGTLIIDEDGIYEPRHPNDRLLLGMKGTMSELELSILRARSIEALKQKARRGELFLTVAIGYVKSGRNRIEKDPDLRIREAIDLVFRRFDELQSIRQVHLWLRSEGIMLPAVNYTRAADRAIVWKLPVYNTVHHILTNPIYAGAYAFGRTCSKVTIEAGRKRILRGIRRDRADWEVLLIDHHEGYLSWHDFERNQRLITDNATSKGLVPRGALRRGELLLGGLLRCGHCGRKLHVSYSGSNGNTGRYHCRGAQLNHGTDPCIGFGSLRVDQAVSAEVLQRLQPLGIEAAIKAIETTTVQAGEKRRHVELALEQARYEAAHARRQYDAVDPDNRLVAGELERRWNAALVAVRERQDELDALDRHKPEALGEEERRSLLRMGGDLELAWHHANATATTRKRIIRAVIREIVVAIEDDHIKMLVHWQGGDHTALSVRKNKAGHHRWGAPPDIEELIRALARQLPDRAIASLLNRLGKTTGRQNGWTQSRVCTFRNQHDIAVYKKDERSERGEYTLQETAAKLGLRPMTVLRMIRAGDLKAEQYCKGTPWIIRHEDIEQLDIQHHSGRSGHSPLSQSQDQQIQLFQ

SEQ ID NO: 11281 - protein, 687 aa, Unknown
  Description of Unknown: Integrase C24 sequence
  Coil,PS51736,IPR006119,PTHR30461,mobidb-lite, IPR011109,PF07508,PF13408,SSF53041,PF00239, SM00857,G3DSA:3.40.50.1390,cd00338,IPR036162,IPR025827
MMHEKIAPHHLERKAILYVRQSSAHQVLHNRESGALQYAMRDRLAALGWSHIETVDDDLGRSAAGGVTRAGFDRMVAEVCLGKVGAVAAREVSRFARNSRDWQQLIEMCRVVDTVLVDQEAVYAPRQGNDRLLLGLKGSLNEYELDLLRQRSLSARYEKARRGELVVTVPAGFVKAGDRIEKDPNRRIQEAIALVFDKVTELGSARQALLWFLEQGLDLPVRCANGDVIWRRPNYATIHRMIANPIYGGAYAYGKSRSVPGYDGRSGIRRKARDEWLALIPDAHEGYISWERAEEIRKMVSDNVPASRHHGAPKHGGALLAGLFRCKRCGRKLTVRYTGANHNIPRYSCWRGLLDNGEPRCIAFGGLRVDDAIEEALLGVVEPGAIAAAVEAERNMANQRDQVQDALMRDLEAARYVADRAFRQYDAADPENRLVTSELEARWNKALTGVGEIEAKIAKHRTVTPHPFPMSASQVTALAGNLRAVWTAPTTDARLKKRIVRTLINEVVADLDDGTSEIVLVIHWVGGVHTELRLPKRHRGQRNATPDDIVDAVKQLVLIANDDVIAGVLNRNGLTTGNGNRWTRERVTALRSYRKIPVFRPQIDGVEPWLNLGGAAKLLGISPKTLRLAAEAGDIKGAHPLPDGPWIFSRSKLATPQARQILDRVRKNPRHPAGSPPDQENLFLSMT

SEQ ID NO: 11282 - protein, 687 aa, Unknown
  Description of Unknown: Integrase C25 sequence
  PS51736,IPR006119,PTHR30461,PS51737, mobidb-lite,IPR011109,PF07508,PF13408, SSF53041,PF00239,SM00857,G3DSA:3.40.50.1390, cd00338,IPR036162,IPR025827
MMHEKIGAHHLERKAILYVRQSSAHQVLHNRESSALQYAMRDRLAALGWSHIETVDDDLGRSAAGGVARAGFDRMVAEVCLGKVGAVAAREVSRFARNSRDWQQLIEMCRVVDTVLIDQEAVYAPRQGNDRLLLGLKGSLNEYELDLLRQRSLSARYEKARRGELVVTVPIGFLKAGDRIEKDPDRRIQEAIALVFDKVAELGSARQALLWFLEQGLDLPVRYANGDVTWRRPNYATIHRMIANPIYGGAYAYGKSRSVRGYDGRSGICRKARDEWLALIPDAHEGYVSWERAEEIRKMVSDNVPTSRHHGAPKHGDALLAGLFRCKRCGRKLTVRYTGSNHNIPRYSCWRGLLDNGEPRCIAFGGLRVDDAIEEALLGVVGPGAIAAAVEADRNMASQRDQVQDALLRDLEAARYAADRAFRQYDAADPENRLVTSELEARWNKALARVGEIEAKIAKHRTVAPQPIPMSASQLVALAGNLRAVWKAPSTDARLKKRIVRTLIHEVVADLDDVASQIVLVIHWVGGVHTELRLPKRRRGQRNATPDDIVEAVRQLVLIANDDVIAGVLNRNGLTTGNGNRWTRERVTALRSYRRIPVFRPQIDGFEPWLNLGGAAKLLGVTPKTLRLAAEAGEIEGTHPLPEGPWIFSRSKLASPEARQILDRARQNPRHPIGSPPNQESLFSSIT

SEQ ID NO: 11283 - protein, 687 aa, Unknown
  Description of Unknown: Integrase C26 sequence
  PS51736,IPR006119,PTHR30461,PS51737,mobidb-lite, IPR011109,PF07508,PF13408,SSF53041,PF00239, SM00857,G3DSA:3.40.50.1390,cd00338,IPR036162,IPR025827
MMHEKIGAHHLERKAILYVRQSSAHQVLHNRESSALQYAMRDRLAALGWSHIETVDDDLGRSAAGGVARAGFDRMVAEVCLGKVGAVAAREVSRFARNSRDWQQLIEMCRVVDTVLIDQEAVYAPRQGNDRLLLGLKGSLNEYELDLLRQRSLSARYEKARRGELVVTVPIGFLKAGDRIEKDPDRRIQEAIALVFDKVAELGSARQALLWFLEQGLDLPVRYANGDVTWRRPNYATIHRMIANPIYGGAYAYGKSRSVRGYDGRSGICRKARDEWLALIPDAHEGYVSWERAEEIRKMVSDNVPTSRHHGAPKHGDALLAGLFRCKRCGRKLTVRYTGSNHNIPRYSCWRGLLDNGEPRCIAFGGPRVDDAIEEALLGVVGPGAIAAAVEADRNMASQRDQVQDALLRDLEAARYAADRAFRQYDAADPENRLVTSELEARWNKALARVGEIEAKIAKHRTVAPQPIPMSASQLVALAGNLRAVWKAPSTDARLKKRIVRTLIHEVVADLDDVASQIVLVIHWVGGVHTELRLPKRRRGQRNATPDDIVEAVRQLVLIANDDVIAGVLNRNGLTTGNGNRWTRERVTALRSYRRIPVFRPQIDGFEPWLNLGGAAKLLGVTPKTLRLAAEAGEIEGTHPLPEGPWIFSRSKLASPEARQILDRARQNPRHPIGSPPNQESLFSSIT

SEQ ID NO: 11284 - protein, 687 aa, Unknown
  Description of Unknown: Integrase C27 sequence
  Coil,PS51736,PTHR30461,IPR006119, mobidb-lite,IPR011109,PF07508,PF13408, SSF53041,PF00239,SM00857,G3DSA:3.40.50.1390, cd00338,IPR036162,IPR025827
MMHEKIGPHHLERKAILYVRQSSAHQVLHNRESSTLQYAMRDRLTALGWSRIETVDDDLGRSAAGGVTRAGFDRMVAEVCLGKVGAVAAREVSRFARNSRDWQQLIEMCRVVDTVLIDQEAVYAPRQGNDRLLLGLKGSLNEYELDLLRQRSLSARYEKARRGELVVTVPVGFLKVGDRIEKDPDRRIQDAIALVFNKVAELGSARQALLWFLEHGLDLPVRRADGDVIWRRPNYATIHRMIANPIYGGAYAYGKSRSVPGYGGRSGIRRKARDEWLALIPDAHEGYISWERAEEIRKMVSDNVPASRHHGAPKHGDALLAGLFRCKRCGRKLTVRYTGANHNIPRYSCWRGLLDNGEPRCIAFGGLRVDDAIEEAVLGVVEPGAIAAAIEAERRMASQRDQVQDALLRDLEAARYAADRAFRQYDAADPENRLVTSELEARWNTALARAGEIEAKIAKHRTVAPQPIPMSASQVAALAGNLRAVWTAPTTDARLKKRIVRTLINEVVADLDDGTSEIVLVIHWVGGVHTDLRLPKRRRGQRNATPDDIVDAVRQLVLIANDDVIAGVLNRNGLTTGNGNRWTRERVTALRSYRKIPVFRPRADGVEPWLNLGGAAKLLGITPKTLRLAAEAGQIEGAHPLPDGPWIFSRSKLATPQAHQILDRARQNPRHPTGSHPDQENLFPSTT

SEQ ID NO: 11285 - protein, 686 aa, Unknown
  Description of Unknown: Integrase C28 sequence
  Coil,PS51736,PTHR30461,IPR006119,PS51737, IPR011109,PF07508,PF13408,SSF53041,PF00239, SM00857,G3DSA:3.40.50.1390,cd00338,IPR036162,IPR025827
MSKITPDHLARQAYVYVRQSSPDQLLHNHESRRRQYGLADRARQLGWSEVMVIDDDLGRSGGGTARPGFERLLGAICEGRVGIVLALEASRLARNGRDWHTLLEFCGLVGCLLADEDGVYDVRFPNDRLVLGMKGTMSEMELAVLRQRSLEALRQKARRGELFFSVAVGYVKTRHDRIEMDPDARVREAIALVFRKFAEFQSIRQVHLWLRQEQIRLPATDPVADSPRTVWKLPVYNTVHHMLTNPVYGGAYAFGRTGSRVTVRDGRKRVVRGHRRTRDDWEVLIPEHHEGYISWTEFERNQQLIADNANSKGLMARGAVRRGDALLAGLLRCGHCGRRLHVSYSGTEGFCVRYNCRGAHINHGTERCISFGGLRVDAAVAAEALRFLAPLGLQAALQAIEAREANAGETRRQAELALSQARYEAELARRQYDAVDPDYRLVAAELERRWNDRLVEVHRLEEQLAALDSGQAAALTAEERARLMTLGADVEALWHHPGATAETRKRILRTIIVEIVTKVVGETIELVIHWQGGDHTRLSVAKSRTGQHRWGADAETGDLIRALARQQPDAGIAAILNRAGRRTGKGNTWTEARVRTFRNAHGIAVYRAGEQAERGELTLEQTAERLKVSKMTVLRLIGSGILQARQVCKGAPWAIPEAQLAGLEVRGVPSRRPVTQDPDQRTLDFQ

SEQ ID NO: 11286 - protein, 668 aa, Unknown
  Description of Unknown: Integrase C29 sequence
  PS00397,SSF53041,PTHR30461:SF3,IPR006118,SM00857,Coil,PF00239, PS51736,IPR036162,G3DSA:3.40.50.1390,PS51737,IPR011109,IPR006119 ,PTHR30461,cd00338
MRTKTLPRKTKTLRVAIYLRVSTSKQLDGYGLDVQDERCRAWVDYQLKGTPHTIVDVYCDGGVSGKLAHREDLDRLTADIEAGLIDVVVFAKLDRIGRTMRNIHRWVYDVTDHGVRIATADGRIDSDDQMFGIQLSLLAYMAEVEHALILERTMGGRIQKIAGGGWASGTPPYGYMLDEEGEPVINPAELEVILKAAEFLVDQRMSRGQAAAELNELQYRTRTGKLWEGNNLVLRLRLAVRGYVDFSFSGMNEDGEEITTSYRVELPPLFEDESRRKALEEALEDMKGNPRTSYSNHLLSGHLYSLCGSSRYGVSRADQGDFIYRCSNHATAAEGHTCKQIDGKETETVVWDEVEKLLTDPEAIKGVIDDWLGTIPDRADSYRARLKEIDDKLHRLRNTRRKKIAMLVASLDEDDEEDQKLIAELKEEIAGKEKELREEQERITEWLEEAEHKEERADNLRSIIDRVGVNMQGLTKADKKGVLELLRIRVDIVGDSVSGQKGGTKDPMLEWHREHGISIPLAVSDEQWARIESILAGGRKPKLEDRPCFEMLLEKLREKKGWHDYDHDERMGGKGWGFVYRLGRRWFTEGMYAAALEAMGPYEGVPAPDGYTLPPMKIYGVIDDSTEDVVHTSGDAVKAEAGGRTPSTKGIRATTSGFEFEIASTKAS

SEQ ID NO: 11287 - protein, 668 aa, Unknown
  Description of Unknown: Integrase C30 sequence
  SSF53041,PS00397,IPR036162,PTHR30461:SF3,IPR006118, Coil,SM00857,PS51736,PF00239,G3DSA:3.40.50.1390, PS51737,IPR011109,IPR038109,IPR006119,PTHR30461, cd00338,G3DSA:1.10.10.2600
MRTKTLPRQRKALRVAIYLRVSTSKQLDGYGLDVQDERCRAWIEYQLKGTPYTIVDVYTDGGVSGKLAHRDDLDRMTADIEAGLIDVVVFAKLDRIGRTMRNIHRWVYDATDVVADQATGRKVRIATADGRIDSDDQMFGIQLSLLAYMAEVEHALILERTMGGRIKKISGGGWASGTPPYGYMLDDEGEPVVNPTEKELVEKAAELLIDKRMSRGEAAKELNELKYRTRTGKLWEGNNLVLRLRLAVRGYVDFSFSGVNEDGEEITTSYQVELPELLPEGRRKALETALEDMKGTPRTTYSNHLLSGHLISLCGSSRYGAARAQQGDSVYRCSNQATTAEGHTCKQIPAEPTEKFVWDEVAKLLTDPDAIKGLIDDWLGGVPERAESYRARLVEIDDKLNRLRNTRRKKIAALVASLDEDDENDQELINEIKEQIAEKEKELREEQERITEWLEESEQKEAKADTMRAVIDRVGSSLHDLGTAEKKGILELLRVRVQIVGDSVSGQAGGTKDPMLEWHRKNKITIPLAVSDEQWARVEGILAGGRKPKPEDRACFEMLLEKLRNAAGWHDYDRDERMGGKGWGFFYRLARRWFSDGMYAEALEGMGPYVGAAAPSGYTLPPMKIYGAIDDSPEDVVKTEAEERTASTKGIRGTTSGFEFEIASSKTA

SEQ ID NO: 11288 - protein, 661 aa, Unknown
  Description of Unknown: Integrase C31 sequence
  PS00397,SSF53041,PTHR30461:SF3,IPR036162,SM00857, Coil,PF00239,IPR006118,PS51736,IPR011109, PS51737,G3DSA:3.40.50.1390,cd06460,IPR006119,PTHR30461, cd00338
MSKKALPRQRKVLRVAIYLRVSTSKQLDGYGLDVQDERCRAWVDYQLKNIPHTIVDVYCDGGVSGKLAHREDLDRLTADIEADLIDVVVFAKLDRIGRTMRNIHRWVYDVTDHGVRVATADGRIDSQDDMFGIQLSLLAYMAEVEHALILERTMGGRVKKISGGGWASGTPPYGYMLDEDGEPVVNPAELKQIELFANLAIDRKLSRGEAAKAMNEAGNRTRTGKLWEGNNLILRMRLAIRGYVDFNFSGMNEDGEEVTTSYRLELPPLFENEARRKALEAVLEDMKGAPRTTYSNHLLSGHLMSQCGHSRYGVARSEHNDVIYRCSNTATLDEGHTCKQIPGKETEGYVWGEVAKLLANPDEIMGLVDEWLGSVPDRAESYRARLQEIDSKLNKLQTTKRKKIALLVAALDGDDDEDQALVEELKEEIASKIKELREEQERITEWLEEAEHKEEKAQGMRSVIDRIGANVLDLSTPDKKRVLELLQVRVDIVGESKSGRAGGSKDPMQEWHREKGTDIPLGVSDEQWGRVEGILAGGRKPKPEDRACFEMLLEKLRENKGWHDYDRDDRMGGKGWQFFYRLARRWFMDGMYAAALEALAPYVGVATPVGYTLPPMKIYGAIDDSPEDVVKTEVGGRTASTKGIRATASGFEFEIGSAKTA

SEQ ID NO: 11289 - protein, 621 aa, Unknown
  Description of Unknown: Integrase C32 sequence
  PF07508,SSF53041,IPR036162,SM00857,PF00239, IPR011109,PS51737,G3DSA:3.40.50.1390,IPR038109,IPR006119, PTHR30461,cd00338,G3DSA:1.10.10.2600
MTPHIEEIPHILAAGYDRQSDARASGSVASPITQRTANYDCAHRLKAEAEAKGGHFKWIGHYSERPGTSAFGKDERPEFDRLLADCRAGKVNTVIVMYVSRFSRLDPMEAFAIVSELFALGVTIISTTEGTFRRGNIMDIFHILMRLDASHKESANKSVAVRTAHTLARTLGGFVGKTPFGFKLVARTVTYMENGKPRPVVIQVLQHNDDEFEETGWSEMAIVMHIWRTVRENKDKLYDPKTDKFHPGSINHICDWLDVENVPTRGRMVGKLKADSKWDVSTVRRILMDPLIAGMDRIPIYGKKKDGTPGKKVIGYEIKRDPETMEPVELECGPMVPRNEWYEVQAWLGERGRGKGLYNGESLLTQMDILWCSCDWYMVSSGNSDGADYRKPPYRCKRKKSQRTAPNHLGDNTIGKERLDEYVARRLFALMATAEGDEEIADVMDEATKRFAATQQAPEIGEERKALIRTKDATTRALNALYDQFDKIVEEGGFPNEIAEQRYKQTEKTLSDRLSATNAALSALDVAAAPALPIEQWTAAYDEEGAPLAEPLPGADPIGKHSWWGRASMAERRHLVKLFVHRVTVGPNFGKGSAITPPEERVTIQWVHTQKYRKAMAEAVA

SEQ ID NO: 11290 - protein, 614 aa, Unknown
  Description of Unknown: Integrase C33 sequence
  Coil,IPR006119,PTHR30461,IPR025378, G3DSA:1.10.10.2600,PS51737,IPR011109,cd03770, PF07508,PF13408,SSF53041,PF00239, SM00857,G3DSA:3.40.50.1390,PF14287,IPR038109,IPR036162,IPR025827
MKIKDKRFKITALYERLSKDDEVQGESNSIVNQKRMLTQYAEQHGYENIEHYTDDGWTGTNFDRPDWKRMLADIEAGKVGTVIVKDMSRIGRDYLQVGFYTEVMFREKGVHFIAISNGVDSERRESAEFAPFLNIMNEWYVRDTSRKITTVLKARGMSGKAHTTNRCCYGYKKSADNPDKWVIDEEAAEVVRRIFNMCLNGKGPYQIARELAEDKVERPEYYLGIRGRGVNIKSFDMEHPYMWRGGTVKTILTRMEYTGCTVNFRTKKESYKDKRPTKVDSSEWIIFEDTQEPIIDKHTWETVQKLVDTPRRKGVFDENNPLTGKVFCADCGAKMYHHRNAQGIWKKNYFKAGEMIYHAPEDRYDCSNNIRGRQRYEKLCCSHSVTTKALETLVLETIKRTCDYAVENEAEFREKVCSISEEQQGELSVRLEKRLAKKQKRVSEVNRLIKKLYEDNISGKLNDKRFNAMLSDYESELETLEADIDRDNAELEGMSAKKTDVDVFMELVKKHTTFEELTPAMLNEFVDKIMVYKAVGSGANRTQDVDIYLNYIGRFVVPEVVVELTEEEKLAEAKRQEKLEKKRASNRKYMARKREEARKAWAEIEAEKAKAVGQ

SEQ ID NO: 11291 - protein, 601 aa, Unknown
  Description of Unknown: Integrase C34 sequence
  PF07508,SSF53041,IPR025827,PTHR30461:SF3,SM00857, PF00239,Coil,PS51736,IPR036162,IPR011109, PS51737,G3DSA:3.40.50.1390,IPR038109,IPR006119,PTHR30461, cd00338,G3DSA:1.10.10.2600,PF13408
MKTNNVEIIKADSLVRRRGVKVERHLKRVAAYCRVSSDSEDQKNSYESQVRHYKDYISQRSDWELAGIYADEGISGTQVGKRQDFQRLINDCVNGEIDYIVTKAIARFARNTLDTLKYVRMLKDMQIGVYFEEENIDTLTMDGELLLTILSSVAQQEVENTSAHVKKGLKMKMQRGELIGFQGCLGYDYDVETKQLSINKKEAKIVRYIFERYLEGIGGKVIARELDELGYKSPRGLDHWNDTTVLGIIKNEKYKGDILMGKTFTVDPISKRRLSNFGEEDKYYIKDNHEPIISKEDFEKAQEIRLRRAGNKKTVANVNGKRERYSKMYAFSSMLECGFCGSILSRRSWHCRSDYRKVVWHCVTSIKKGKKFCKHSKGLEELAIEGAFMEAYRQLYHSNENLMTDLLETIESELNDNSLNKELKRITNKLRTLLKKEENLVNLRLEGKISDTIYNEKYNEISSEKEFLAEEKVNIETTLKSEIDVKKRLTEFKHLLSSQKMLTEFDRAVFESIVEKIIVGGVNSDGEIDPAMLTIIFKTGETQNKDGKQFKSKRKNAKLETDKLCPQNSDEDKKLYSQGTDYTRGVCCSACKSLETFERKG

SEQ ID NO: 11292 - protein, 590 aa, Unknown
  Description of Unknown: Integrase C35 sequence
  PF07508,SSF53041,PTHR30461:SF3,IPR036162,SM00857, Coil,PF00239,IPR025827,PS51737,IPR011109, G3DSA:3.40.50.1390,IPR038109,IPR006119,PTHR30461,cd00338, G3DSA:1.10.10.2600,PF13408
MRKPNTKKPTRFASYLRCSTDDQSFGDFTTIDTQRAINAEHIEQLGGELVAEYNDEGRTGTNLSRKEWKRMLADAGTKRFDAVVVTYMSRLARGQAYYVAEYLLGESKVSVEMVKEKFSPDMIGQMHKQMTIMMDGNYPLQVSRWTKTKQAEMVRMGYHTGGNCPYGYQAETVPGMQATVLASGKVKPAPKRLIPHPDEAHHVRRAFEIFAHGRSISDAQKHLRAVDPTRRWPSTLVRYLLTNEKYRGVQRFGEQVNFAAHEAIISEQLWDATQLLLSAPERQIDPVAEGRVRGREKDPVAYWLRGLVFCSCGSRMTPAEATGRGGRVPYYECIQAAKNGKACETKRVNANSLHAAVIGEIVQCSMHPSRLIRMWEDAAKKIPQPTEAREELGRVRRNLRETQKKSARVVEAIKQAGALPALVSEVRQLEELAASQTAKILELENSQVCRTMSRPDAAKIAAVWTDLLDLWEDMTNEERTRLLRLVVHRIEVQKGSGVTWLCLAAHQMTPLDPANSQELDGMFTYRDRRSAADASLLNNITTGFALLASFHSIPPFRRRSGNDNQNALVKHLRFGLAKNAPAKTTSETLV

SEQ ID NO: 11293 - protein, 590 aa, Unknown
  Description of Unknown: Integrase C36 sequence
  IPR025378,PF07508,SSF53041,IPR036162,cd03770, SM00857,Coil,PF00239,PTHR30461:SF3,PS51736, G3DSA:3.40.50.1390,PS51737,IPR011109,IPR038109,IPR006119, PTHR30461,G3DSA:1.10.10.2600,PF14287
MAGIRTENKIYEVGIYCRLSKDDGTDNESASIATQKSILTDYVKRQGWHLAKTYVDDGYSGTNFQRPSFQNMIKDIENGLINCVITKDLSRLGRNYLDCGLYLEVFFPEHNVRYIAVNDGVDTLNKSAMDITPFRNILNEMYSADVSVKIKSAYRARFQQGKFMGTTAPYGYVKDPADHNHLLIDDKVAHVVREIFDLALAGNGIAKIRKHINKQHILRPAAYAVEQGATGYERYFEDNEENRYIWSENSVRGILRSPIYAGNLAGYKRIAANMKSKKRPSKLPEEWEVIPDTHEGIVTQEEFDTVQQLMTSRRREQNAGGFENIFSGVIKCADCGYAMRAASANRRKRPDINRFADMAVNDEKAVRAIERRLTETDQSRAKSLEKEKKKLNKRLAELDRLFSSLYEDKVMERITERNFEMMSGKYQKEQLEIEARLKEVTETLNDSYEKSQGVRDFLSLIRNYQGLKELDATIINALIDKILVSEREKLADGTVRQEIKIYYKFIGFVGELHITPTKRWTALKPKNCTVCGVEYVPSSGISKYCPACAKRIQREKSNESKRRSRERNRRACIELSAKNDRLTLSSEMDD

SEQ ID NO: 11294 - protein, 584 aa, Unknown
  Description of Unknown: Integrase C37 sequence
  PTHR30461:SF3,PF00239,PS51736,G3DSA:3.40.50.1390,IPR038109, IPR006119,G3DSA:1.10.10.2600,PF13408,PF07508,SSF53041, mobidb-lite,PS51737,cd00338,IPR036162,SM00857, IPR011109,IPR025827,Coil,PTHR30461
MKKNNVEIIKADSLVRRRGDNFERESKRVAAYCRVSSDSEDQKNSYESQVRHYKDYISQRSDWELAGIYADEGISGTQVGKRQDFQRLINDCVNGEIDYIVTKAIARFARNTLDTLKYVRMLKDMQIGVYFEEENIDTLTMDGELLLTILSSVAQQEVENTSAHVKKGLKMKMQRGELIGFQGCLGYDYDVETKQLSINKKEAKIVRYIFERYLEGIGGKVIARELDELGYKSPRGLDHWNDTTVLGIIKNEKYKGDILMGKTFTVDPISKRRLSNFGEEDKYYIKDNHEPIISKEDFEKAQEIRLRRAGNKKTAANVNGKRERYSKMYAFSSMLECGFCGSILSRRSWHCRSDYRKVVWHCVTSIKKGKKFCKHSKGLEELAIEGAFMEAYRQLYHSNENLMTDLLETIESELNDNSLNKELKRITNKLRTLLKKEENLVNLRLEGKISDTIYNEKYNEISSEKVFLAEEKVNIETTLKSEIDVKKRLTEFKHLLSSQKMLTEFDRAVFESIVEKIIVGGVNSDGEIDPAMLTIIFKTGETQNKDGKQFKSKRKNAKLETDKLCPQNSDEDKKMYSQGPDNTR

SEQ ID NO: 11295 - protein, 559 aa, Unknown
  Description of Unknown: Integrase C38 sequence
  PS51737,PTHR30461:SF3,G3DSA:3.40.50.1390,Coil,PS51736, IPR006119,SM00857,IPR025827,IPR011109,PF07508, PF13408,SSF53041,PTHR30461,G3DSA:1.10.10.2600,PS00397, PF00239,IPR006118,cd00338,IPR038109,IPR036162
MRAAIYARVSTERQERQQTIDSQLDVLRAWANTANHELTDAHVFRDEGYSGSRLDRPGLDALRDAVRDGEVDVVAVLAPDRLARRYAYQVLLLEEFRRVECAVEFLNRAISDDPGDQLLLQIQGAVAEYERALLGERFRRGKLQKARAGQFIGPRAPYGYRYLPRHDGAAGQLVVDEAEAELVGLLYGWLADEGLTLRQILRRLNFGPWFPRCGRRPWSPSTVHHILSDPVYTGTAYSNRYEYLPSRKPRSRKPSYSGKGTRRLRPREQWIAIPVPPLIDQDTWDRAQAQLARNAVLSFRNNRKHNYLLRCLLTCGECGLAMYGITRKAADGREFGYYRCAGKDCVSTARSSPCPRAQVKADDLEKTVWDHVVGLLSDPDRLFAQFQEFAGEAGQAAARGSDAERKLRTRLDGLARADRRLLDAYQLEVISLEELQERRRQLADQRKALDLQIEQQRRLCEQRAKAQAVMTDLTAFCQRVRPGGTIGNSVLGGAGSLSGGHRLCEPVAEDDSHLGFGGRPFPGRHLPVFLRAVQDEKQELQRGFVIGEMPPGPDRPAQL

SEQ ID NO: 11296 - protein, 557 aa, Unknown
  Description of Unknown: Integrase C39 sequence
  PF07508,SSF53041,IPR025827,IPR036162,SM00857, Coil,PF00239,PTHR30461:SF3,PS51736,G3DSA:3.40.50.1390, PS51737,IPR011109,IPR038109,IPR006119,PTHR30461, cd00338,G3DSA:1.10.10.2600,PF13408
MIKKRAYIYTRVSTGMQVEGYSLAAQEERIKQYANAFNIEIVQTYQDAGRSGKSILGREQFLEMLNNIESERDNIDCVLVFKLSRFGRNSADTLKSLEIMENHNVHLICVDDGLDSSKDAGKLVITILSAVAEMERENILAQTMAGRKQKAREGKWNGGFAPMGYSISQGVLQINEEEAELIKMIFDLYANTDMGSNKVAQHLVKLGVTKPIRQNGKTPYFSANVIRNILKNPVYNGKIAFGRRTSKFDSKTNKIRIVPSDSYMVVEGQHEALVDDALWEKTQAKLKAQSKKYEKVNRPKGEHIYLLSGIVKCPYCEASLYGNISKKKNKNKDGEYYKHYFYYSCKHRKMMDGHKCTFTKQIKMEALDREVLTIISKIVSEPSFAKKLQEKINIQIDTEEIDKILEQYETQLRKYLSTKLSLMRQIDNLDYEDRHYNQKFQDLNERLDSIYDMIEEVESLIEENKERKEVIQREKMTAENVYSILLKFETLLAVMEDIDKKRFCQLLIEKVVIRDEKNDSGRWVKSIIFKLPIIEKDLEISLDNNEHVECVALLVKN

SEQ ID NO: 11297 - protein, 552 aa, Unknown
  Description of Unknown: Integrase C40 sequence
  PTHR30461:SF3,PF00239,PS51736,G3DSA:3.40.50.1390,IPR038109, IPR006119,G3DSA:1.10.10.2600,PF13408,PF07508,SSF53041, mobidb-lite,PS51737,cd00338,IPR036162,SM00857, IPR011109,IPR025827,Coil,PTHR30461
MINKDRNTMKWTAGIYARVSTDKDNQKLSNEHQISSMEEWATGQKNVEIYDTYIDEGISGTKIDKRYSFQRMIKDAKNGVINFIIVKSVTRFARNQIDSIKLASELKEKGVRIFFYQEGIDTFEDSKMLGLWAWLAENESRVTSERRSLGGREAQKKGRFTNNRPPFGYRTVNGKLVINEEESPIVTRIFNLYAEGNGFAKIASILNEEGMKTRRGFNFRSDKIKYMLLNESYKGTFTGNRYTKADMLSKQVIEKPKEDWIIIEDNHDSIINKELFDTVHALMNEKSFTLGKRSKSYFAGVVKCAKCGCGYNRSITKKKTKGGYKEHIYYRCSGRTQKGESTCNSKPIKEELLLEVVQNEMNLLKRNPDIIENIKKQTLAQITDKINNIDSDIINIENRVTEIESDRKMLAKKNIKGVIDDDIFMEMDAELKAELKSLNQRKNKTRIVDSAKIFEKRYDDFVNTLLHFDDIRNLNNIEVRRLLEVVEINDDEISIEIKINAVDFGIEESLNIAPIISTIGMKLQLIKNANKPIHNKASTEYFKNVNVSVKYA

SEQ ID NO: 11298 - protein, 546 aa, Unknown
  Description of Unknown: Integrase C41 sequence
  PF07508,SSF53041,IPR036162,IPR025827,SM00857, PF00239,Coil,G3DSA:3.40.50.1390,IPR011109,PS51737, IPR038109,IPR006119,PTHR30461,cd00338,G3DSA:1.10.10.2600, PF13408
MSEIVWSGTDDRSGEIKYVDLLCRKSKVLSEHDRLREVSTDEQERQGRLWAARNGYIVRHVWTELGSAYKERQRKEFEGALEAITSGKSQALWVYMLDRFSRKGAEDVLKVIGKARVIFDWDRLDSMDDRDRERIISEAERARTYSARLSARVSDVKRSQRDRGEWVSGWPPFGLVVGKDRRLYPDTSPAAPGMTETRADVMRELFRLSAEGASAKDLAKALEAKGIPHCSYKGGEWVPDGATWVPTTLRRWILNPVYAGWQVIHLRPENGKNGRNKTVAYRNDRGERVRVIPEGLEIVTDEQQAAAIAGKGAEGRAFDSPKPFGGSPGPRQRGVAVHILTGLLECAECGRNMFFTGESYVCGSTQGGAVCPRPARVTGKAIEPYVYNRWRAYVTNSAEDDDLLAIISERWSRIIRPVESAEAEAARTALKVAERRLREVIQDKRDGVYDGPAAKFFRPDHRDALSAVAEAEKVLARFGGTRVDISFLMDAEQVDEYWAGLRDDKPKQRELLGVAIDRIYVKPSPYVGARFNGEQRVRIRWADEDD

SEQ ID NO: 11299 - protein, 545 aa, Unknown
  Description of Unknown: Integrase C42 sequence
  PF07508,SSF53041,IPR036162,IPR025827,PTHR30461:SF3, Coil,PF00239,SM00857,IPR011109,PS51737, G3DSA:3.40.50.1390,IPR038109,IPR006119,PTHR30461,cd00338, G3DSA:1.10.10.2600,PF13408
MSEIVWTGTSDDASEIKYVDLLCRKSKVLSEGDRLREVSTDEQERQGRAWAARNGYTVRHVWTELGSAYKERKREEFEGALKAITSGLSQALWVYMLDRFSRKGAEDVLKVIGKARVIFDWDRLDSMDDRDRERIISEAERARTYSARLSARVTDVKRSQRDRGEWVSGWPPFGLVVGKDRHLYLDHSPAAKGMKESRADVMRELFRLSTLGASAKDLAKALEAKGIPHCSYKDGAWVPDGANWVPTTLRRWITNPAYAGWQVVHLRPEDGKGRHKTVVYRNAKGERVRLGDALVTDEEQAAAIAGKGAEARSFDGKTHLGPFGGSKGPRERGKAVHILTGLLECANCGRNMFFTGESYVCGSQQGGRPCPKPARVTGKAIEPYVFQQWRAYVTNSAEDDDLLAIISERWAKITRPEETAEAEKARETFRIAEKELGALLQDKRDGLYDGPAAQFFRPAHREAMSAVREAEAALTKFGGTRIDISFLMDAEQVTEYWEGLSGDKDKRRELLGCAIDRIYVSESPYVGARFNGEKRVRFAWADQDA

SEQ ID NO: 11300 - protein, 544 aa, Unknown
  Description of Unknown: Integrase C43 sequence
  PF07508,SSF53041,IPR036162,PTHR30461:SF3,SM00857, Coil,PF00239,PS51736,G3DSA:3.40.50.1390,IPR011109, PS51737,IPR038109,IPR006119,PTHR30461,cd00338, G3DSA:1.10.10.2600
MELKNIVNSYNITNILGYLRRSRQDMEREKRTGEDTLTEQKELMNKILTAIEIPYELKMEIGSGESIEGRPVFKECLKDLEEGKYQAIAVKEITRLSRGSYSDAGQIVNLLQSKRLIIITPYKVYDPRNPVDMRQIRFELFMAREEFEMTRERMTGAKYTYAAQGKWISGLAPYGYQLNKKTSKLDPVEDEAKVVELIFDLFLNGLNGKDYSYNAIATHLTNLQIPSPAGKKKWNRFTVKAILENEAYIGTVKYKVREKEKDGKRTIRPENEQIIVPDAHTPIIDKDQFQEANKKIENKIPLLPNRSDYKLNELAGVCICADCGGPLSKYEAKRKRQNKNGTESLYHVKVLRCLNNKCMNVRYNDVEEAILDYLKYLQALNDNDLTKHLGSVIQSHENKNNIRSKKQMNEQFEQREKELKNKLNFIFDKYESGIYSDEIFLQRKSVLDKELQELKKAKDEINGLVDFKGGLDINQLKENIKNAIELYESSENREEKNKLLRIMLQKVIVKMTAKRKGPIPAQFEITPILRYNFLIGETVSSYES

SEQ ID NO: 11301 - protein, 540 aa, Unknown
  Description of Unknown: Integrase C44 sequence
  PF07508,SSF53041,IPR036162,IPR025827,SM00857, Coil,PF00239,PS51736,PTHR30461:SF3,IPR011109, G3DSA:3.40.50.1390,PS51737,IPR038109,IPR006119,PTHR30461, cd00338,G3DSA:1.10.10.2600,PF13408
MEPTAVIYARVSDRKQAENEVSVPAQIEAGQRKAHDLGATVLRVFADEGRSAFKDGNRPQFEAAIDFATTVGVTHFITWSSSRFARNQLEAVLFKRQLDRAGVALVYVSASIDRATDEGWMLDSMLGLFDEMSSRQNAKDTKRSMIRVAQEGYFCGGRAPFGFRSAPCPVNPKRKRLQVEPLEAETVREIFEERGRGIGAFLIASRFNAEGRRARGRTWTKRAVLEILRSDAVIGLTVFNRRDSRTGQLRSQADWVSVKSHDALVPQPLWDRVQALMNEAAEVSQSGSPKSTHPFTGLLRCSCGSGMVTETGKGKGGTVYHYYRCRRARLGEPCPAPQRIPAHKMDAWLSDVILQRVLTPANLQEIADQIAAEASRWTVERSRRRQALASRAAELRQRNSRLYDLLELHGRDAPNLADLTERLRSNSAELKTLEAEMQELAAATAAPATATAPPIDVEQIAAFMRGALKGGQNAARAREFYRQFIDSIEIASHSVLITYDPARLAVAAPGGVRSRVNWRPEGAMLRTIGASWSPFSQSAS

SEQ ID NO: 11302 - protein, 539 aa, Unknown
  Description of Unknown: Integrase C45 sequence
  PF07508,SSF53041,IPR036162,SM00857,Coil, PF00239,IPR011109,G3DSA:3.40.50.1390,IPR006119,PTHR30461, cd00338
MLPRPRPPADDAPAYIGYIRVSTWKEEKISPELQETAIRAWADRRGVRLLEPLVADLDATGRNFRRKIMGAIRRVEGGEAQGIAVWKYSRFGRSRDGVSINLKRLEDAGGQLQSATEEVDAATATGRLQRGILFEFAAYESDVRGEQWREAHDHRRYKLHLPASGRPRFGYIWTPRRVADPAAPSGWRLQDEAYTAHPETGPVMADRYRQYVDGQPFYALMADLNAAGWRTVRGGPWSQQTLMRYMDSGFCAGLLRVHNPACKCPQEERGNCGNTLFIPGAQEELIDAELWQMYRERRTAVKATPPRARAPLYPCTNLMRCGGCRGTTPAQSAQRASQGVVTNIRGYSYACGRRSITGTHGCPGVWATRAHVEAEVRRWVEREVAPAVDAAGPIPAPRTAEVDQRAAAARERARLEVESSRLADGLANLRADHAMNPADYGPGEYEAARDKIRQQQQVTTAALERVSAVETAPHRADYDQLLIGLLDAWHEMHDSEKNALLKQVIRRVVLVRTDGTAKVEVHPVWEPDPWAATEVATTA

SEQ ID NO: 11303 - protein, 539 aa, Unknown
  Description of Unknown: Integrase C46 sequence
  PF07508,SSF53041,IPR036162,SM00857,Coil,PF00239,IPR011109 ,G3DSA:3.40.50.1390,IPR006119,PTHR30461,cd00338
MLPRPRPPADDAPAYIGYIRVSTWKEEKISPELQETAIRAWADRRGVRLLEPLVADLDATGRNFRRKIMGAIRRVEGGEAQGIAVWKYSRFGRSRDGVSINLKRLEDAGGQLQSATEEVDAATATGRLQRGILFEFAAYESDVRGEQWREAHDHRRYKLHLPASGRPRFGYIWTPRRVADPAAPSGWRLQDEAYTAHPETGPVMADRYRQYVDGQPFYALMADLNAAGWRTVRGGPWSQQTLMRYMDSGFCAGLLRVHNPACKCPQEERGNCGNTLFIPGAQEELIDAELWQMYRERRTAVKATPPRARAPLYPCTNLMRCGGCRGTTPAQSAQRASQGVVTNIRGYSYACGRRSITGTHGCPGVWATRAHVEAEVRRWVEREVAPAVDAAGPIPAPRTAEVDQRAAAARERARLEVESSRLADGLANLRADHAMNPADYGPGEYEAARDKIRQQQQVTTAALERVSAVETAPHRADYDQLLIGLLDAWHEMHDSEKNALLKQVIRRVVLVRTDGTAKVEVHPVWESDPWAATEVATTA

SEQ ID NO: 11304 - protein, 538 aa, Unknown
  Description of Unknown: Integrase C47 sequence
  PTHR30461:SF3,PF00239,PS51736,G3DSA:3.40.50.1390,IPR038109, IPR006119,G3DSA:1.10.10.2600,PF13408,PF07508,SSF53041, PS51737,cd00338,cd18039,IPR036162,IPR006118, SM00857,IPR011109,PS00397,IPR025827,PTHR30461
MKIGAIYARASTDKQGDTVEHQVQMIKEYVKRINDSIKETEDKITIDDKFIYIDEGESGFKTTLLQRDEMRKLMSDIDNKLVDVVFFKGISRFARDAEESFRAARKFKEKNIRVISLEENYDSLHSDPMMFQFYSIMAEQESRKTSIRVSLGNKQKARNGLFVGSVTPYGYSRVKDIKDDKLRKEVLSQGRHEQSLWPDKFESEIVKFIFEKVISENLGRKKIAMLLNQKGIRTRDGNRPDEMFIKRILENEVYTGDIIYGKTRYEYIEDEKTNRKVQKTIDISKDEWIISRNSHPAIIERGEFMEAHRILHKRSGKHKGRRFNNARHPLTGILKCGKCGAPMICQKRSNKRSDGTKIEYRYYVCSTYHRQGRDVCAQANINADSLEEHIHQAVSREVLKLKEDGYFDNELQVYNQNEEINKEITQIDDTLDKYIIKLDNLLDHVGLYDKDTFRELNNKIKTEIVELRTRKEYLLEQLSFGDIRNNEEELRELFDSFLNLNLNDLEESRNMFHSLLNEVTVDGNKIKIDAKFNLIKNN

SEQ ID NO: 11305 - protein, 537 aa, Unknown
  Description of Unknown: Integrase C48 sequence
  PS51737,PTHR30461:SF3,G3DSA:3.40.50.1390,Coil,IPR006119, SM00857,IPR025827,IPR025378,IPR011109,PF07508, PF13408,SSF53041,PTHR30461,G3DSA:1.10.10.2600,cd03770, PF00239,PF14287,IPR038109,IPR036162
MKQQIYNTALYLRLSRDDELQGESSSITTQRSMLRLYAKEHHLNVIDEYIDDGWSGTNFDRPSFQRMIEDIEAGKINCVVTKDLSRLGRNYIMTGQYTELYFPSHNVRYIAIDDGVDSEKGESEIAPFKNIINEWVARDTSRKVKSAFKTKFAEGAHYGAYAPLGYKKHPDIKGKLLVDDETKWIIEKIFSLAYQGYGSAKITKQLRAEKVPTASWLNFTRYGTFAHIFEGKPESKRYEWTIAHVKAILKSEVYIGNSVHNMQSTVSFKSKKKVRKPESEWFRVENTHEPIIDKEVFYRVQEQIKSRRRQTKEKATPIFAGLVKCADCGWSMRFGTNKTNKTPYSYYACSYYGQFGKGNCSMHYIRYDVLYQAVLERLQYWAKAVQQDEEKVLNKIQKAGNAERIREKKKKASTLKKAENRQNEIDRLFAKMYEDRACEKITERNFVMLSSKYQKEQIELEQQITSLREELSKMEQDMIGAEKWIELIKEYSVPKELTAPLLNAMIEKILIHEATTNEDNERIQEIEIYYRFIGRVE

SEQ ID NO: 11306 - protein, 535 aa, Unknown
  Description of Unknown: Integrase C49 sequence
  PS51736,PTHR30461,IPR006119,PS51737,mobidb-lite, G3DSA:1.10.10.2600,IPR011109,PF07508,PF13408,SSF53041, PF00239,SM00857,G3DSA:3.40.50.1390,cd00338,IPR038109, IPR036162,IPR025827
MSHDQQERTAGNEPNDQATAQASPSLRAVVYVRISDDPEGTERGVDRQEADCRAYAAAHGWEVAQVYRENDTSAFKQRTITLPTGERVRRVVRPEFRAMLKHLSEQRAGVMIAYDLDRAVRDPRDLEDLIDAKVLNGFSVRSVTGSLRLDTDSDVAMARVLVAMANKSSADTARRVARAAKQQAIEGTWHGGQVPFGYRAENHTLVIDPEAAELVREAARRVLAGETLYRILTDWNRRGIRTTHGCRWSDRTLKLVLRNPSIKGVREYRPLLPDGTRSKTSLMQTTAAWPAILDEDTWQQVSDVLDARKQARNFHQPGSGAAKRLYPFSGLIRCSTCGRAMLHRGQVYQCVQQVPGGCNRSIRSGDLTKLVEEAVLATFEQITLNPAKRQSPGADQAARVGLAATLDADRERLARLDDDYYDGLIDKSMWVRQRSRIAERIERTRREYAATVPEHTGPSIDMTTVAQEWADRTPMWQHQAASLVLEAVLVHALPRGMNGATPARRRNETVEAFHARREVYRAGILAHRVEFVWRA

SEQ ID NO: 11307 - protein, 534 aa, Unknown
  Description of Unknown: Integrase C50 sequence
  PS51736,IPR006119,PTHR30461,mobidb-lite,G3DSA:1.10.10.2600, PS51737,IPR011109,PTHR30461:SF3,PF07508,SSF53041, PF00239,SM00857,G3DSA:3.40.50.1390,cd00338,IPR038109, IPR036162
MEDLMVASVFPGAALYMRASTERQIYSTAHQESALKEYAKQHGFEVIAEYRDEGRSGLTLEGREGLLSLLNDIQSGQASYVTVLVYDVSRWGRFQDVDESAYYEYACRKEGISVTYCAEPFTNDGSPLATLLKGLKRVMAAEYSRELSRKVFNAHCRLTADGYKQGGTAGYGLRRQCQSNDGSIRRTLEMGERKHLPTERVGLILGPDEEVAVVRRIFEMCTNKHMTDMKIAETLNAEGLRNQNGRLWNYRTIKEILTNEKYAGNLVFNRYTRRLGSPRRANEVDKWITVKGALPSIVSMEVFDQARHVRLRRARRWTDDEIWEGLDEIVEKHGTISVDLVEESDLPLEMRYAGHFRGLVNTVAAAGLAGPSLFHSTMVRRKLLVVTKQMANEMKRCAIETSINIEKVSTLTYQINGSTVHLLCTKCRHGKRYPRWKVTLRYCPAADFVLWVRMNENNDEIAQIYLLPVQEFSTYKCLWPSTHTLHFYQRFGYASLRQLWKEKLTNNQDMKSNECANQSATGEVEAGTPTGRRK

SEQ ID NO: 11308 - protein, 529 aa, Unknown
  Description of Unknown: Integrase C51 sequence
  PF07508,SSF53041,IPR036162,IPR025827,PTHR30461:SF3, PF00239,SM00857,PS51737,IPR011109,G3DSA:3.40.50.1390, IPR006119,PTHR30461,cd00338,PF13408
MSNRLHEYDVEAEWSPADLALLAQLEQHESLLPEDAPRALLSVRLSVFTEDTTSPVRQELDLRQLARDKGMRVVGVASDLNVSATKVPPWKRKSLGAWLNDRVPEFDALLFWKVDRFIRNMSDLSRMIDWSHRYEKNLISKNDPIDLSTPLGKMMVTLLGGIAEIEAANTKARVESLWDYNKTQSEWLVGKPPYGYTTARDEHGKNRLVIDRQASEALHLARERVMAGQSTSATAVELKELGLMSAGLTAATLARRLRNPALLGYRVEEDKNGGVRRSKVVTGHDGNPIVIAEPIFTQEEFDSVGAKLDERGKNQPTRHIGGATKFRGVMVCVECGTNMIVHHTRNKFGEYAYLRCQGCKSGGRGAPHPQEVYDELVRLVLTAVGDMPVEKREYARGAESRAETKRLEETIALYMKGLEPGGRYTKTRFTMEHAEATLDTLIAELEAIDPDTTTDRWVYVAGGKTFREHWEEGGMDAMAMDLLRVGIKCTVKREKIPKVRAPKVTLELKVPKDVRERLIVREDDFAERF

SEQ ID NO: 11309 - protein, 528 aa, Unknown
  Description of Unknown: Integrase C52 sequence
  PF07508,SSF53041,IPR025827,PTHR30461:SF3,IPR036162,SM00857, PF00239,PS51737,IPR011109,G3DSA:3.40.50.1390,IPR038109, IPR006119,PTHR30461,cd00338,G3DSA:1.10.10.2600,PF13408
MSDRAATYDIEAEWSPADLALLQSLKRDEDLLPEDAPRALLSVRLSVFTDDTTSPVRQELDLRQLARDKGMRVVGVASDLNVSATKVPPWKRKSLGEWLNNRVPEFDALLFWKVDRFIRNMGDLSRMIDWSNRYEKNLISKNDPIDLSTTLGKMMVTLLGGIAEIEAANTKTRVESLWNYNKTQAEWLVGKPPYGYTTARGEDGKTRLVFDQPAYEALHYARRRILEGVSSRAVAAELIEAGMVTGVTASTLIRRLRNPGLRGWRVEEDKQGGLRRSKVVLGHDGQPIRVGEPIFNDEEWDTLQRELDARGKNQPPRQPSGATKFRGVLKCVECQTNMIVHHTRNKHGEYAYLRCQGCKSGGLGSPHPQAVYDALVQRVLDSIGDLPVMKREYARGEEMRKETARLEASIAYYMAGLEPGGRYTKTRFTQEQAEQTLDKLIAELEAIDPDTTKDRWTEVAGGKTFREHWEEGGIDAMAADLLRVGVVCEVSREKIPKVRAPRVQLRLIIPEDVRDRLLIREDSFAEAF

SEQ ID NO: 11310 - protein, 527 aa, Unknown
  Description of Unknown: Integrase C53 sequence
  PF07508,SSF53041,IPR036162,PTHR30461:SF3,SM00857, Coil,PF00239,PS51736,IPR011109,G3DSA:3.40.50.1390, PS51737,IPR006119,PTHR30461,cd00338
MGVAVMTCVFVVCLVNHRGLSGVRYKPMRALVVIRLSRVTDATTSPERQLESCQQLCAQRGWDVVGVAEDLDVSGAVDPFDRKRRPNLARWLAFEEQPFDVIVAYRVDRLTRSIRHLQQLVHWAEDHKKLVVSATEAHFDTTTPFAAVVIALMGTVAQMELEAIKERNRSAAHFNIRAGKYRGSLPPWGYLPTRVDGEWRLVPDPVQRERILEVYHRVVDNHEPLHLVAHDLNRRGVLSPKDYFAKLQGREPQGREWSATALKRSLISEAMLGYATLNGKTVRDDDGAPLVRAEPILTREQLEALRAELVKTDRTKPAVSAPSLLLRVLFCAVCGEPAYKFTGGGRKNARYRCRSWGWAQRCGNGTVAMAEWDAFCEEQVLDLLGDAERLEKVWVAGSDSAVELAEVNAELVDLTSLIGSPAYRAGSPQREALDARIAALAARQEELEGLEARPSGWEWRETGQRFGDWWREQDTAGKNTWLRSMNVRLTFDVRGGLTRTIDFGDLQEYEQHLRLGSVVEQLHTGMS

SEQ ID NO: 11311 - protein, 527 aa, Unknown
  Description of Unknown: Integrase C54 sequence
  PF07508,SSF53041,IPR036162,PTHR30461:SF3, SM00857,PF00239,PS51736,G3DSA:3.40.50.1390, PS51737,IPR011109,IPR006119,PTHR30461, cd00338
MGMAVMTCVFVVCLVNHRGLSGVRYKPMRALVVIRLSRVTDATTSPERQLESCQQLCAQRGWDVVGVAEDLDVSGAVDPFDRKRRPNLARWLAFEEQPFDVIVAYRVDRLTRSIRHLQQLVHWAEDHKKLVVSATEAHFDTTTPFAAVVIALMGTVAQMELEAIKERNRSAAHFNIRAGKYRGSLPPWGYLPTRVDGEWRLVPDPVQRARILEVYHRVVDNHEPLHLVAHDLNRRGVLSPKDYFAKLQGREPQGREWSATALKRSLISEAMLGYATLNGKTVRDDDGAPLVRAEPILTREQLEALRAELVKTDRTKPAVSTPSLLLRVLFCAVCGEPAYKFAGGGRKHPRYRCRSMGFPKHCGNGTVAMAEWDAFCEEQVLDLLGDSERLEKVWVAGSDSAVELAEVNAELVDLTSLIGSPAYRVGSPQREALDTRIAALAARQEELEGLEARPSGWEWRETGQRFGDWWREQDTAAKNTWLRSMNVRLTFDVRGGLTRTIDFGDLQEYEQHLRLGSVVERLHTGMS

SEQ ID NO: 11312 - protein, 527 aa, Unknown
  Description of Unknown: Integrase C55 sequence
  PF07508,SSF53041,IPR036162,PTHR30461:SF3,SM00857, Coil,PF00239,PS51736,IPR011109,G3DSA:3.40.50.1390, PS51737,IPR006119,PTHR30461,cd00338
MGMAVMTCVFVVCLVNHRGLSGVRYKPMRALVVIRLSRVTDATTSPERQLESCQQLCAQRGWDVVGVAEDLDVSGAVDPFDRKRRPNLARWLAFEEQPFDVIVAYRVDRLTRSIRHLQQLVHWAEDHKKLVVSATEAHFDTTTPFAAVVIALMGTVAQMELEAIKERNRSAAHFNIRAGKYRGSLPPWGYLPTRVDGEWRLVPDPVQRERILEVYHRVVDNHEPLHLVAHDLNRRGVLSPKDYFAKLQGREPQGREWSATALKRSLISEAMLGYATLNGKTVRDDDGAPLVRAEPILTREQLEALRAELVKTDRTKPAVSTPSLLLRVLFCAVCGEPAYKFAGGQRKNPRYRCRSMGFPKHCGNGTVALAEWDAFCEEQVLDLLGDSERLEKVWVAGSDSAVELAEVNAELVDLTSLIGSPAYRVGSPQREALDARIAALAARQEELEGLEARPSGWEWRETGQRFGDWWREQDTAAKNTWLRSMNVRLTFDVRGGLTRTIDFGDLQEYEQHLRLGSVVEQLHTGMS

SEQ ID NO: 11313 - protein, 526 aa, Unknown
  Description of Unknown: Integrase C56 sequence
  PF07508,SSF53041,PTHR30461:SF3,IPR036162, SM00857,PF00239,IPR025827,G3DSA:3.40.50.1390, PS51737,IPR011109,IPR006119,PTHR30461, cd00338,PF13408
MISEPEPYIGYIRVSMWREEAISPELQRTAIQAWATRTGRRIIDWVIDLDKTGRNFKRRIMGAIERVERSEARGIAVWKYSRFGRTDSGIAVNLARIEHVGGQLQSATEEIDARTAVGKFYRKILFDLAVFESDRAGEQWKETHQWRRDHGLPATGGNRLGYIWTPRRIPAPDRPGQWIIQDERYDPDPAAVGDVKELFSRKTYGRAGYGALAGWLNELGHTTSRGRPWETSSLRRYMDAGFAAGLLRIHDPACGCDYTAANHGCRRNRWTYIPAAHPAIISPDLWEAYTTHRAEQRARTPRSRNPVYPLTGLMRCGTCRRDVGATSARRRGKQVLGYAYSCASQYKSGTTICTSGVWVQRAVVEDEVLRWLETEAAPGIDAAPPTATTPPVDRTKADAARAHAHALAQHEKVTTALQRLAVAAAMDPDRFPPGVFEAARDQLVAEQQQWAREMQKYQQIEAAPTRATFEPVAVGLVAEWDVLNVSEKNALLRRLLRRVVVTREGRGSSMTRVECHPVWDPDPWSA

SEQ ID NO: 11314 - protein, 525 aa, Unknown
  Description of Unknown: Integrase C57 sequence
  PF07508,SSF53041,PTHR30461:SF3,IPR036162,SM00857, PF00239,PS51736,IPR011109,PS51737,G3DSA:3.40.50.1390, IPR006119,PTHR30461,cd00338
MAVMTCVFVVCLVNHRGLSGVRYKPMRALVVIRLSRVTDATTSPERQLESCQQLCAQRGWDVVGVAEDLDVSGAVDPFDRKRRPNLARWLAFEEQPFDVIVAYRVDRLTRSIRHLQQLVHWAEDHKKLVVSATEAHFDTTTPFAAVVIALMGTVAQMELEAIKERNRSAAHFNIRAGKYRGSLPPWGYLPTRVDGEWRLVPDPVQRERILEVYHRVVDNHEPLHLVAHDLNRRGVLSPKDYFAKLQGREPRGREWSATALKRSLISEAMLGYATLNGKTVRDDDGAPLVRAEPILTREQLEALRAELVKTDRAKPAVSTPSLLLRVLFCAVCGEPAYKFTGGGRKNARYRCRSWGWAQRCGNGTVAMAEWDAFCEEQVLDLLGDAERLEKVWVAGSDSAVELAEVNAELVDLTSLIGSPAYRVGSPQREALDSRIAALAARQEELEGLEARPSGWEWRETGQRFGDWWREQDTSGKNTWLRSMNVRLTFDVRGGLTRTIDFGDLQEYEQHLRLGSVVEQLHTGMS

SEQ ID NO: 11315 - protein, 525 aa, Unknown
  Description of Unknown: Integrase C58 sequence
  PF07508,SSF53041,IPR036162,PTHR30461:SF3,SM00857,PF00239,Coil, PS51736,IPR025827,G3DSA:3.40.50.1390,PS51737,IPR011109,IPR038109 ,IPR006119,PTHR30461,cd00338,G3DSA:1.10.10.2600,PF13408
MKNNNKNIRAAVYVRFSSQRQNDSFSIEYQLQETTKYIELKGYQFIESYVDAAKSGKKTAGRDAFYKMIDDAKRGKFDRIVVFSFSRSFRNTRDALNYNHDLMENYGVVIESVIEPIDFTNPHGKFSGTNLFAMHELQSDIIAAHVRSGMYVAAKHGYFMGGHVPYGYELYGTGEFSRGKERRKYKLHPTESKIIKNAFEMYADGFPLLHVLKTLHADGVTGRDGKKLSKSTLQKILHNPFYTGTRIYNVKDYETLKIENCVPAIIDAATWARVQKRQSEYTGNRPTPRQTKRLYTLTGKIVCGCCGAHLTGTARKSKGHVYEYYRCNSKDKYICKMRNVRRDLLEKYCMQQIRAHILNTDAIKNISVNIAASVNAAPDDLTETAEKLRKRRDKINGIIENLERDIYENEIPRERGKKMISNYENELSEIEIKLFETETALSDAITPDKVNDYLNELLALASDADEQIIKLIFEKLIDKIVVTENQIELFLLVSPFGRVVLNDSIGQPHYAQRLTFDRDTLQKHV

SEQ ID NO: 11316 - protein, 525 aa, Unknown
  Description of Unknown: Integrase C59 sequence
  PF07508,SSF53041,IPR036162,PTHR30461:SF3,SM00857, Coil,PF00239,PS51736,IPR025827,IPR011109, PS51737,G3DSA:3.40.50.1390,IPR038109,IPR006119,PTHR30461, cd00338,G3DSA:1.10.10.2600,PF13408
MKNNNKNIRAAVYVRFSSQRQNDSFSIEYQLQETTKYIELKEYQFIESYVDAAKSGKKTAGRDAFYKMIDDAKRGKFDRIVVFSFSRSFRNTRDALNYNHDLMENYGVVIESVIEPIDFTNPHGKFSGTNLFAMHELQSDIIAAHVRSGMYVAAKHGYFMGGHVPYGYELYGTGEFSRGKERRKYKLHPTESQIIKKAFEMYADGFPLLHVLKTLHADGVTGRDGKKLSKSTLQKILHNPFYTGTRIYNVKDYETLKIENCVPAIIDAATWARVQKRQSEYTGNRPTPRQTKRLYTLTGKIVCGCCGAHLTGTARKSKGHVYEYYRCNSKDKYICKMRNVRRDLLEKYCMQQIRAHILNTDAIKNISVNIAASVNAAPDDLSVTAEKLRKRRDKINGIIENLERDIYENEIPRERGKKMISNYENELSEIEIKLFETETALSDAITPDKVNDYLNDLLALASDADEQIIKLIFEKLIDKIVVTENQIELFLLVSPFGRVVLNDSIGQPHYAQRLTFDRDTLQKHV

SEQ ID NO: 11317 - protein, 525 aa, Unknown
  Description of Unknown: Integrase C60 sequence
  PF07508,SSF53041,IPR036162,PTHR30461:SF3,SM00857, Coil,IPR025827,PS51736,PF00239,PS51737, IPR011109,G3DSA:3.40.50.1390,IPR038109,IPR006119,PTHR30461, cd00338,G3DSA:1.10.10.2600,PF13408
MNANVTIIPPRKIAGNTVDKHEDKPRLRVVAYCRVSTDSEEQATSYDTQVQHYTDYISRNPLWEFAGIYADDGISGTSTKKRVGFNDMIHDCMSGKVDMVITKSISRFARNTIDCLKFVRQLKDKNIPIIFEKENINTMEASGELLLTIMASLAQQESASLSQNVKLGLKFRYQEGKVQINHNWFLGYTKDDEGNLVILEQEAKVVRRIYREYLEGASLRDIAEGLEKDGIKNGAGHLKWNLSNIKGILQNEKYIGDALLQKTITTDFINHVRIKNDGTEPQYYVKDSHTPIIPRDIFFKVQEEMLRRANMFSGEENKKRRVYSSKYALSSLCVCSKCGDVYRRIAWNNRGVHSVVWRCCTRVENGPSACDAPTVQENELQSAIVKAINKVFSISDEVLDTLKNNIREIIAGNNLSEIETVDKKIADKQATLLTLLKAKKDYTKIADEIDELKVKKQQLLIEKAGQEDAKRRIREMEDFLKSERHDISEYDEKLVRKYIKKIKVYEDKFSVTFKSEISVDVERAS

SEQ ID NO: 11318 - protein, 524 aa, Unknown
  Description of Unknown: Integrase C61 sequence
  PF07508,SSF53041,IPR036162,PTHR30461:SF3,SM00857, Coil,PF00239,IPR011109,PS51737,G3DSA:3.40.50.1390, IPR038109,IPR006119,PTHR30461,cd00338,G3DSA:1.10.10.2600
MIKNLENIQHVAIYLRISQEKKGENVETLENHRQILIEFCEEHGFTYEEFGEVISGGKSEITQRVALKRLLDNIEKYDAIACFELTRISRNGLISQTVKQYCIDYDKPILTPYQSYDLANSETDRLLFDVGSMISSHEHSTIGKRSKANKMQMSKAGLHVSGNVPFGYKRNNDTKKLEIDEEAAPTIRYIFQLHSEGYGSFKIRDILNNEGYKSATGKAFNLPSIKRIIRNPAYKGTLIFNNRKKIKRNGKFEYDNVETITVENAHPAIIPPDVWEKANQDREFRALKSINIREKPATKSGVTLLKDLIFCGVCGRKMIIRKDTKSSTGYTLKKCEYLLPNGEKCPNCGKKLDAVIARVLTGLTKYADDLSQMEEQLRKNNASDLNEKNQLKLNQIDKAIMEIEQKQKNLIELAMEGLFSHEEIREKKQELVKRMDELKAKREEVINSINSLSVEEEIELIQEKRKLILSLREDMDQEYGNELLKRFIKKIHFTRVIPEDILKRSTRNSERQNYPFNIKFEFFD

SEQ ID NO: 11319 - protein, 524 aa, Unknown
  Description of Unknown: Integrase C62 sequence
  Coil,PS51736,IPR006119,PTHR30461,PS51737,G3DSA:1.10.10.2600, PTHR30461:SF3,IPR011109,PF07508,SSF53041,PF00239,SM00857, G3DSA:3.40.50.1390,cd00338,IPR038109,IPR036162
MTMIRPLRIAIYARYSSDLQNPSSIEDQVALCRQLVDDQFHGRADPRAVLVFSDSAISGSTLQRPGLIRLMNAIKAGRVDVVVAEGLDRLSRNLKDIAGIYETLDYHHVMIWTAHEGRISELHIGLKGTMNALVLRDLKARIKRGHRSRIAAGYAASSCAYGYRVVRGVVDEKGANINGLREIDEAAAPVISRIYDEYIAGRKIPEIIAGLNKDGIPAPNGGLWKRNAIMGGAKKQEGILRNEIYTGKLIFNRSHVVRDPVSNKKKFIHNPESDWTKVDVPHLRIISDAQWAAVRVIDQPKPQQPRQRKTPVGLTVYNQHALTGWVKCGWCGGSKSLANETRYLCSTHRYAKSCANSRGTKEPVLMARTFGTLYHRIETGPDFTPGLTEFFAHQSRRRTELENQEQDIQARIVRLLDAVEHGVDHENARDRILRLQDELGQIRAELTHDLPAPLPVEAAIRARLMNAVQSVELSNDVPTQRLMFQCLLSEIVLTPIPDKHQGETVVIKLREEGWAEFWSSISSE

SEQ ID NO: 11320 - protein, 523 aa, Unknown
  Description of Unknown: Integrase C63 sequence
  PF07508,SSF53041,IPR036162,PTHR30461:SF3,SM00857, PF00239,Coil,PS51736,G3DSA:3.40.50.1390,IPR011109, PS51737,IPR006119,PTHR30461,cd00338
MMTCVFVVCLVNHRGFSGVRYKPMRALVVIRLSRVTDATTSPERQLESCQQLCAQRGWDVVGVAEDLDVSGAVDPFDRKRRPNLARWLAFEEQPFDVIVAYRVDRLTRSIRHLQQLVHWAEDHKKLVVSATEAHFDTTTPFAAVVIALMGTVAQMELEAIKERNRSAAHFNIRAGKYRGSLPPWGYLPTRVDGEWRLVPDPVQRERILEVYHRVVDNHEPLHLVAHDLNRRGVLSPKDYFAKLQGRDPQGREWSATALKRSLISEAMLGYATLNGKTVRDDDGAPLVRSEPILTREQLEALRAELVKTDRTKPAVSTPSLLLRVLFCAVCGEPAYKFAGGGRKHPRYRCRSMGFPKHCGNGTVAMAEWDAFCEEQVLDLLGDAERLEKVWVAGSDSAVELAEVNAELVDLTSLIGSPAYRVGSPQREALDARIAALAARQEELEGLEARPSGWEWRETGQRFADWWAQQDIAAKNTWLRSMNVRLTFDVRGGLTRTIDFGDLQEYEQHLRLGSVVERLHTGMS

SEQ ID NO: 11321 - protein, 523 aa, Unknown
  Description of Unknown: Integrase C64 sequence
  PF07508,SSF53041,IPR036162,PTHR30461:SF3,SM00857,PF00239,Coil, PS51736,PS51737,IPR011109,G3DSA:3.40.50.1390,IPR006119,PTHR30461 ,cd00338
MMTCVFVVCLVNHRGLSGVRYKPMRALVVIRLSRVTDATTSPERQLESCRQLCAQRGWDVVGVAEDLDVSGAVDPFDRKRRPNLARWLAFEEQPFDVIVTYRVDRLTRSIRHLQQLVHWAEDHKKLVVSATEAHFDTTTPFAAVVIALMGTVAQMELEAIKERNRSAAHFNIRAGKYRGSLPPWGYLPTRVDGEWRLVPDPVQRERILEVYHRVVDNHEPLHLVAHDLNRRGVLSPKDYFAKLQGREPQGREWSATALKRSLISEAMLGYTTLNGKTVRDDDGAPLVRAEPILTREQLEALRAELVKTDRTKPAVATPSLLLRVLFCAVCGEPAYKFAGGQRKNPRYRCRSMGFPKHCGNGTVAMAEWDAFCEEQVLDLLGDAERLEKVWVAGSDSAVELAEVNAELVDLTSLIGSPAYRVGSPQREALDARIAALAARQEELEGLEARPSGWEWRETGQRFGDWWREQDTAAKNTWLRSMNVRLTFDVRGGLTRTIDFGDLQEYEQHLRLGSVVERLHTGMS

SEQ ID NO: 11322 - protein, 522 aa, Unknown
  Description of Unknown: Integrase C65 sequence
  PF07508,SSF53041,IPR036162,PTHR30461:SF3,SM00857, PF00239,PS51736,IPR011109,G3DSA:3.40.50.1390,PS51737, IPR006119,PTHR30461,cd00338
MTCVFVVCLVNHRGLSGVRYKPMRALVVIRLSRVTDATTSPERQLESCQQLCAQRGWDVVGVAEDLDVSGAVDPFDRKRRPNLARWLAFEEQPFDVIVAYRVDRLTRSIRHLQQLVHWAEDHKKLVVSATEAHFDTTTPFAAVVIALMGTVAQMELEAIKERNRSAAHFNIRAGKYRGSLPPWGYLPTRVDGEWRLVPDPVQRERILEVYHRVVDNHEPLHLVAHDLNRRGVLSPKDYFAKLQGREPQGREWSATALKRSLISEAMLGYATLNGKTVRDDDGAPLVRAEPILTREQLEALRAELVKTDRTKPAVSTPSLLLRVLFCAVCGEPAYKFTGGGRKNARYRCRSWGWAQRCGNGTVAMAEWDAFCEEQVLDLLGDAERLEKVWVAGSDSAVELAEVNAELVDLTSLIGSPAYRVGSPQREALDSRIAALAARQEELEGLEARPSGWEWRETGQRFGDWWREQDTSGKNTWLRSMNVRLTFDVRGGLTRTIDFGDLQEYEQHLRLGSVVEQLHTGMS

SEQ ID NO: 11323 - protein, 522 aa, Unknown
  Description of Unknown: Integrase C66 sequence
  PF07508,SSF53041,IPR036162,PTHR30461:SF3,SM00857,PF00239,Coil, PS51736,G3DSA:3.40.50.1390,IPR011109,PS51737,IPR006119, PTHR30461,cd00338
MTCVFVVCLVNHRGLSGVRYKPMRALVVIRLSRVTDATTSPERQLESCQQLCAQRGWEVVGVAEDLDVSGAVDPFDRKRRPNLARWLAFEEQPFDVIVAYRVDRLTRSIRHLQQLVHWAEDHKKLVVSATEAHFDTTTPFAAVVIALMGTVAQMELEAIKERNRSAAHFNIRAGKYRGSLPPWGYLPTRVDGEWRLVPDPVQRERILEVYHRVVDNHEPLHLVAHDLNRRGVLSPKDYFAKLQGREPQGREWSATALKRSLISEAMLGYATLNGKTVRDDDGAPLVRSEPILTREQLEALRAELVKTDRTKPAVSTPSLLLRVLFCAVCGEPAYKFTGGGRKNARYRCRSWGWAQRCGNGTVAMVEWDAFCEEQVLDLLGDSERLEKVWVAGSDSAVELAEVNAELVDLTSLIGSPAYRVGSPQREALDARIAALAARQEELEGLEARPSGWEWRETGQRFGDWWRGQDTSGKNTWLRSMNVRLTFDVRGGLTRTIDFGDLQEYEQHLRLGSVVERLHTGMS

SEQ ID NO: 11324 - protein, 522 aa, Unknown
  Description of Unknown: Integrase C67 sequence
  PF07508,SSF53041,IPR036162,IPR025827,SM00857, Coil,PF00239,PS51736,PTHR30461:SF3,IPR011109, PS51737,G3DSA:3.40.50.1390,IPR038109,IPR006119,PTHR30461, cd00338,G3DSA:1.10.10.2600,PF13408
MKEIIKIDSTIRKTGFEKKTRVAAYARVSSDSDEQLLSLEVQKEHYENYIKSNPCWEYAGLYFDEGISGTKIGKRESLKQLLKDCQSGQIDRIITKSISRLARNTVDCLEIVRKLTGLGIYLYFEKENIDTEHMSSELMLSILSSIAQSESRSISENSMWSIQKRFENGSFVISCPAYGYKNENKKMIIVPEQARVVKEIFNMALSGMGGEAMARVLTDKKIPTKKGGSWTSSTVNAILTNKTYTGDVIFQKTYTDDSFNRHKNCGEKKQYVIENHHEAIISHETFNLVKEIIAWRRSENNIVCGSGKYNKLYAFSGKIRCGECGSKCKRRIIYQHNKAYGIWVCITHLEDIHACSQKSVMESYLKISFLQMLNKLKATSAQILTPFIKSLRNVNSKDGLNKVIELEEKIAKLQEQEQVLSKLFAGGYIEMDSYYLESNQLKAEIDTCLKEKLQLSNSLNGNLTHLNEAQKLQRFVSVTEVFSEFKDEDFLDFVDDVVVKSRTRFLFILKCGLELEEEVKET

SEQ ID NO: 11325 - protein, 522 aa, Unknown
  Description of Unknown: Integrase C68 sequence
  Coil,PS51736,IPR006119,PTHR30461,PS51737, G3DSA:1.10.10.2600,IPR011109,PF07508,PF13408,SSF53041, PF00239,SM00857,G3DSA:3.40.50.1390,cd00338,IPR038109, IPR036162,IPR025827
MTEKNIMVIPARKRVGSTAAKEKIKKLRVAAYCRVSTETEEQNSSYEVQVSHYTEFIKKNNEWEFAGIFADDGISGTNTKKRDEFNRMIAECMDGNIDMVITKSISRFARNTLDCLQYIRQLKDKNISVYFEKENINTTDAKGEVLLTIMASLAQQESQSLSQNVKLGLQYRYQQGKVQVNHKRFMGYTKDEDGNLTIVPEEAEIIKRIYREYLEGASLLQIARGLEADGILTAAGKAKWRPETLKKILQNEKYIGDALLQKTYTVDFLSKKRVKNNGIVPQYYVENSHEPIIPRELFMQVQEEMVRRANLRGGKGGKKRVYSSKYALSSIVYCGQCGDIYRRVHWNNRGYKSIVWRCVSRLEEKGSECTAPTINEETLQAAVVKAINELLDNKEPFLSTLQKNIATVLNEENDNATVDIDGKLEELQQQLLIQAKSKNDYEDVADEIHRLRELKQNALVENAEREGKRQRIAEMTDFLNEQSCELEEYDEQLVRRLIEKVTIYEDKLTVEFKSGIEIDEEI

SEQ ID NO: 11326 - protein, 521 aa, Unknown
  Description of Unknown: Integrase C69 sequence
  PTHR30461:SF3,PF00239,PS51736,G3DSA:3.40.50.1390,IPR038109, IPR006119,IPR037285,G3DSA:1.10.10.2600,PF13408,PF07508, SSF53041,PS51737,cd00338,IPR036162,SM00857, IPR011109,IPR025827,Coil,SSF140560,PTHR30461
MIPNRNVVIIPAMKRAGNNGNKNEVPKLRVAAYCRVSTDSEEQSSSYDVQIEHYTEFIKKNNEWAFAGIFADDGISGTNTKKREEFNKMIDECMAGKIDMIITKSISRFARNTLDCLHYIRKLKEKNVAVYFEKENINTLDAKGEIMITIMASLAQQESQSLSQNVKLGYQYRYQQGQVMVNCSRFLGYTKDENKKLVIVPEEAEIIKRIYREYLEGSSMDKIKKGLEADGVLTGAGGKRWHTSSIRKILSNEKYIGDALLQKTYTVDFLTKKRVKNNGIVPQYYVENNHEAIIPREIYMQVQEELVRRSRGHISSSGKRRNFSSSHAFSQIVFCGECGEIFRRVHWNNSGKKSIVWRCVSRLESTGLSCNARTVAEDILYEKSVEAINILLGQKSDFLPQLKKNIETVVFETSNEAVEKIDKKMLELQKELLQKANAKEDYNDVAGKIYRLREERHRALTEQAERKGSKQKLEEMEKFLNEQDGLLEEYDERLVRMLIDKVTVFDDMLTVEFKSGAEIEV

SEQ ID NO: 11327 - protein, 521 aa, Unknown
  Description of Unknown: Integrase C70 sequence
  PF07508,SSF53041,PTHR30461:SF3,IPR036162,SM00857, PF00239,Coil,PS51736,IPR011109,G3DSA:3.40.50.1390, PS51737,IPR006119,PTHR30461,cd00338
MTCVFVVCLVNHRGLSGVRYKPMRALVVIRLSRVTDATTSPERQLESCQQLCAQRGWDVVGVAEDLDVSGAVDPFDRKRRPNLARWLSFEEQPFDVIVAYRVDRLTRSIRHLQQLVHWAEDHKKLIVSATESHFDTTSPFAAVVIALMGTVAQMELEAIKERNRSAAHFNIRAGKYRGSLPPWGYMPARVDGEWRLVPDPVQRERILEVYHRVVDNHEPLHLVAHDLNRRGVLSPKDYFAKLQGREPRGREWSATALKRSLISEAMLGYATLNGKTVRDDDGAPLVRAEPILTREQLEALRAELVKTDRMKPAVSTPSLLLRVLFCAVCGEPAYKFDAGRKIPRYRCRSFGFAQRCGNGTIPIAEWDAFCEEQVLDLLGDAERLEKVWVAGSDAAVELAELNAELVDLTSLIGSPAYRAGSPQREALDARIAALAARQEELEGLEARPSGWEWRETGQRFGDWWREQDTAAKNTWLRSMNVRLTFDVRGGLTRTIDFGDLQEYEQHLRLGSVVEQLHTGMS

SEQ ID NO: 11328 - protein, 521 aa, Unknown
  Description of Unknown: Integrase C71 sequence
  PF07508,SSF53041,IPR036162,IPR025827, SM00857,Coil,PF00239,PS51736, PTHR30461:SF3,IPR011109,PS51737,G3DSA:3.40.50.1390, IPR038109,IPR006119,PTHR30461,cd00338,G3DSA:1.10.10.2600,PF13408
MKKVITIEPAKQVSHKVDLPSFTKRRVAGYARVSTDHEDQTTSYEAQMKYYTDYINNRSDWEFVKMYSDEGISGTNTKARIGFQRMVEDALDGKIDLILTKSVSRFARNTVDSLSTVRKLKEAGVEIYFEKENIWTFDSKGELLITIMSSLAQEESRSISENVTWGRRRQLAEGQVTFSYSQVLGFKKSDTGGFEIDHEEAKIVRYIFHQVLLGNNPNKIARELTAQGIPTPQGKRQWSYGTVKRMLRNEKYKGDALLQKSFTTDFLTKSTKPNEGELPQYYVENNHEAIIKREVFDLVQVELDKLEKKRQTSNIFTGRLFCGDCGSAFGSKVWHSTSKYKRTIYQCNAKYKGEHKCRTPHVTEEEIKGWFLSAINQLLSNRDEIIANTELLIDMAKDTSPLESRIDDLEHHLETIRQDIEDLVDRNARKAQNQDLYQEQYDTLVTAYQEIQKELQEATSSLEEQKSRSISLDGFIQELKQQDSLITDFNQELWQTSVERLDIKVDKHISLTFKNGVRIDL

SEQ ID NO: 11329 - protein, 520 aa, Unknown
  Description of Unknown: Integrase C72 sequence
  PF07508,SSF53041,IPR025827,PTHR30461:SF3,IPR036162, Coil,PF00239,PS51736,SM00857,IPR011109, G3DSA:3.40.50.1390,PS51737,IPR038109,IPR006119,PTHR30461, cd00338,G3DSA:1.10.10.2600,PF13408
MKKVITIEATPTIIRSSSDDFTLKKRRVAGYARVSTDHEDQATSYESQMRYYSEYINGRDDWEFVKMYSDEGISGTNTKLRTGFKAMVEDALNGKIDLIITKSVSRFARNTVDSLTTVRQLKEVGVEIFFEKENIWTLDSKGELLITIMSSLAQEESRSISENVTWGLRKQFAEGKVHFPYTNVLGFKAGEDGAIVVDQDEAKTVRYIFQQALIGKSPYHIAKDLSEQGIPSPSGKSHWNATTIKRMLRNEKYKGDALLQKTYTIDFLTKKKNINRGELPQYYVENNHEAIVDRETFDAVQQVLDNKGRKSSTTIFSSKLVCGDCGHFFGSKVWHSTSKYRRVIYQCNEKYKGISKCSTPHVTEEEVKQWFVSAVNQVLDNRLEVIDNLYVLLSIGNLEVIDEQIKVLETEAEVVSQLVANLVSENAIISQDQDKYLKKYNQLTSKYEGILQEIESLELHRMKKSKRNKELQVFINALEKQEGLLLEFDEFLWETMIEHVTVSGAKEIFIKFKNGQIVRV

SEQ ID NO: 11330 - protein, 520 aa, Unknown
  Description of Unknown: Integrase C73 sequence
  PF07508,SSF53041,IPR025827,PTHR30461:SF3,SM00857, Coil,PF00239,IPR036162,PS51736,IPR011109, PS51737,G3DSA:3.40.50.1390,IPR038109,IPR006119,PTHR30461, cd00338,G3DSA:1.10.10.2600,PF13408
MKKVITIEATPSIIRSSSDDFSLKKRRVAGYARVSTDHEDQATSYESQMRYYSEYINGRDDWEFVKMYSDEGISGTNTKLRTGFKAMVEDALNGKIDLIITKSVSRFARNTVDSLTTVRQLKEVGVEIYFEKENIWTLDSKGELLITIMSSLAQEESRSISENVTWGLRKQFAEGKVHFPYTNVLGFKAGEDGAIVVDQDEAKTVRYIFQQALIGKSPYHIAKDLSEQGISSPSGKSHWNATTIKRMLRNEKYKGDALLQKTYTIDFLTKKKNINRGELPQYYVENNHEAIVDRETFDAVQQVLDNKCRKSSTTIFSSKLVCGDCGHFFGSKVWHSTSKYRRVIYRCNEKYNGSSKCSTPHVTEEEVKQWFVSAVNQVLDNKLEVIDNLSVLLSIGSPEVIDEKIKILETEAEVVSQLVANLVSENAIISQDQDKYLNKYNQLTSKYEVIVQEIESLELQRMKKSKRNKELQVFMEVLKKQEGLLTDFDELLWETMIGSVTINPGKKIIIKFKNQTVVTI

SEQ ID NO: 11331 - protein, 519 aa, Unknown
  Description of Unknown: Integrase C74 sequence
  PS51736,IPR006119,PTHR30461,G3DSA:1.10.10.2600,PTHR30461:SF3, IPR011109,PF07508,SSF53041,PF00239,SM00857, G3DSA:3.40.50.1390,cd00338,IPR038109,IPR036162
MDKATTPPEFERRRARAAQYLRMSTERQIYSIDNQRDAIRNYAEVMGYDIVATYEDPGRSGLSILGRPGLKRLIEDIESRRADFETVVVYDVSRWGRFQNTDESASYEYRCQRAGVRIEFCAELFVNDGSIGSDVLKAIKRSMAAEYSRMLSNRVFAGQSRIVKLGFSGGGPAGYGLRRLLVDGSGNPKAILHRDERKGLASDRVVLVPGPENEVSTVRWIFNQFVKKGKTAVEIASALNARGLVTEFGRPWTGACVGTILASEKYVGNIVWNRISHRLLQNRLRNPPSALVRADNVIEPLVPRALFDRAQAIRRARTYLRPDEELLADLTKLLKERGRLSSPIIDAAPGCHSASIYAHRFGSMNAAYQLIGYDGSANYRKLDIRRRLIQIRQQTIENLMSDIDGVGGSALYDPQTKIMRVNDEFSVAIWTAQYRMNVTGFPRWPFWKRGLIGPEVTILIRMESDNQTVRDFLIAPAHEAQSALHMLKADNGVRLDAFLFASLDPVVEMARREPMPANI

SEQ ID NO: 11332 - protein, 519 aa, Unknown
  Description of Unknown: Integrase C75 sequence
  PS51736,IPR006119,PTHR30461,G3DSA:1.10.10.2600, PTHR30461:SF3,IPR011109,PF07508,SSF53041, PF00239,SM00857,G3DSA:3.40.50.1390,cd00338, IPR038109,IPR036162
MDRATTPPEFERRRARAAQYLRMSTERQIYSIDNQRDAIRNYAEVMGYDIVATYEDPGRSGLSILGRPGLKRLIEDIESRRADFETVVVYDVSRWGRFQNTDESASYEYRCQRAGVRIEFCAELFVNDGSIGSDVLKAIKRSMAAEYSRMLSNRVFAGQSRIVKLGFSGGGPAGYGLRRLLVDGSGNPKAILHRDERKGLASDRVVLVPGPENEVSTVRWIFNQFVKKGKTAVEIASALNARGLVTEFGRPWTGACVGTILASEKYVGNIVWNRISHRLLQNRLRNPPSAVVRADNVIEPLVTRALFDRAQAIRRARTYLRPDEELLADLTKLLKERGRLSSPIIDAAPGCHSASIYAHRFGSMNAAYQLIGYDGSANYRKLDIRRRLIQIRQQTIENLMSDIDGVGGSALYDPQTKIMRVNDEFSVAIWTAQYRMNVTGFPRWPFWKRGLIGPEVTILIRMESDNQTVRDFLIAPAHEAQSALHMLKADNGVRLDAFLFASLDPVVEMARREPMPANI

SEQ ID NO: 11333 - protein, 517 aa, Unknown
  Description of Unknown: Integrase C76 sequence
  PF07508,SSF53041,IPR036162,PTHR30461:SF3,SM00857, Coil,PF00239,PS51736,IPR011109,G3DSA:3.40.50.1390, PS51737,IPR006119,PTHR30461,cd00338
MRVLGRIRLSRATDESTSVERQREIIELWAQQNGHEIVGWAEDQDVSGSVDPFKTPALGPWLKEDKAWEWDILCAWKLDRLGRDSIRINNLFGWCQENGKTLVSTSEGIDLSTPVGRLIAQVIAFLAEGEREAISERTLASQKKLRELGRWGGGKIFYGYKAEEREGAGWELVPDEHASKVLKGIIDKVLAGQSTESISRDLNESGELAPLDYQRQRAGKPVKGVRWSNAHLRQQLKSKALLGHMTHGGKTVRDEDGLPILKGPPLVTQDTYDQLQQVLEVRSFKVSRRSTNASPLLGVAFCGLKMGDAVCGKPLHLRQHHRNGKVYRYYQCTGGVGIGHPKTHDYANIIKADELEESFESTFLRTYGGEKVKERVFVPAESHQEELEEAVRAAGEIAPLLGTATSDTMRKMYQTQLESIDRRIAALEKLPTSSARYEWREQPATYADAWEQASTEERRQLLIKRKVHAEVSVPKGESRYRDSLPLIHMFTLDIDPEEFEAWEERAAEERLKHGVPS

SEQ ID NO: 11334 - protein, 515 aa, Unknown
  Description of Unknown: Integrase C77 sequence
  PF07508,SSF53041,IPR025827,IPR036162,SM00857,PF00239, PTHR30461:SF3,PS51737,IPR011109,G3DSA:3.40.50.1390, IPR006119,PTHR30461,cd00338,PF13408
MQVRALVGARVSHVQGEEKTSHLTQRTKGESYAESQGWTVVGGFEDLDVSAIKLSPWDRPDLKQWLDEKADDWDALIFSKTDRVFRSANDCVKLAEWCKDHRKILVLVDDGIKLDYFNPEDSKDAFAGAMSKVFLILASVFAEIEGQRFVQRARDRVAYLRPTDRWGYGNPPYGFVVVDHPTGVGKALGHDEGDQAVLHRIADEVLSGNSLVSICVKLNDEGVLSPSDRTRVRAKKEPEGSKWRPLTMKRLLTSPSTQGIKMAKERPVLDAQGEPVRVGPESFDAETWKQLGIELADRATEPSKRRHSTNPLLGVAKCAICGLNMRQHGKTTKYGSYRYYNCIGHPIACPKVSIVAETAEDAVYSIFLNSHSGRRVKERVWQAGSDHSAELDQTLRTIESLREDRAAGLFNDPEDAKMYQQQMAALLSKRTALSDAPIIKAGWVEMETDRTYGEVWESSTEEEKRKMLVDAGVVLWVTNRNDYYVGDLDKLLGEGDGGEEFLASTVLAKAGITSR

SEQ ID NO: 11335 - protein, 514 aa, Unknown
  Description of Unknown: Integrase C78 sequence
  PTHR30461:SF3,PF00239,PS51736,G3DSA:3.40.50.1390,IPR038109, IPR006119,G3DSA:1.10.10.2600,PF13408,PF07508,SSF53041, PS51737,cd03768,SSF109709,IPR036162,SM00857, IPR011109,IPR025827,Coil,PTHR30461
MECVIKMGAEEEKMLKEVRCAIYTRKSNEDGLEQKFNSLDAQRVACEKYIKSKEGWVVLAKRYDDGGFSGKNLERPAIKELFEDVKKGEVDCVVVYTLDRLSRETKDSIEVTSFFRRHRVNFVAVTQIFDNNTPMGKFVQTVLSGAAQLEREMIVERVKNKIATSKEQGLWMGGTLPLGYDVKDKELIINEKEAKTVKHIFERYVELKSMAELARELNSQGYRTKSDIFKKATVRRIITNPIYMGKIRHYEKEYEGKHEAIIEEEKWQKAQELIRNQPYRKARYEEALLKGIIKCKSCDVNMTLTYSKKENKRYRYYVCNNHLRGKGCESENRNVIAGEVEKEVMKRAEQLYENWKEKTEEKIEKLWENLSFGKQKEVVKKLIRTVLVKEDGIEMSLENKVEFIPIWLKKKGNKCTVVEPEGKTNNALLKAVVRAHLWKRQLEEGKYESVKELSAKINIGTRRVQQILRLNYLAPKIKEDIVNGRQPRDLKLVDLREIPMLWSEQREKFYGSAS

SEQ ID NO: 11336 - protein, 513 aa, Unknown
  Description of Unknown: Integrase C79 sequence
  PF07508,SSF53041,PTHR30461:SF3,IPR036162,SM00857, PF00239,IPR011109,PS51737,G3DSA:3.40.50.1390,IPR006119, PTHR30461,cd00338
MSSAPRALVGARVSVVQGPQKVSHLAQIETATNWAISKGYNIVGTFEDLGVSAEKRPEDRPDLGPWLTPEGAAQWDVIVWSKMDRAFRSTRHCVDFARWAEEQHKVVAFADDGLTLDYRPKRPGAVKGIDEMMAELFVYLGSFFAQLELNRFKTRAQDSHRALRGMDRWASGVPPLGFKVVDHPSGKGRGLATDEVGKELLHEMARRLLDGWSFIRIAAWLNEQGVLTNMDRARAAAGKPPKARPWNVNVVIDGLTSPRTQGFKMTGRGKHARTVLDSEGDPIRMAPPTFDDATWAQIQKAAQLRKIGRRNPSRSANPVLGVAFCGCTGCPACGVTEGICGASLAQQHTKNRSGGEDYRYYRCGRTPLNCNGVTAKAEDVDFQLAHEFTYFRGDEPMTRKVFVPGEDRSAELEQVNATIERLRMESDAGLLTTPEDERMWLERMKAQVAKRDQLAATPSRAAGWAIEETGQTKADAWKAADESERRQLYLDAGLRYLLCRKGERSYFDRSYDG

SEQ ID NO: 11337 - protein, 512 aa, Unknown
  Description of Unknown: Integrase C80 sequence
  PF07508,PS00397,SSF53041,IPR036162, IPR006118,SM00857,PF00239,PTHR30461:SF3, PS51736,IPR011109,PS51737,G3DSA:3.40.50.1390, IPR038109,IPR006119,PTHR30461,cd00338,G3DSA:1.10.10.2600
MTAAAIYVRVSSEMQLDGHSLDAQERLCREYCQRHGLAITSVYREEAESASSTERPELQRMLTDARAHVFAAIVFYHTWRFSRSIEDSALMTRLERSGIRLMSVTDAIDSATPAGRLQRNITLAVGQHYLDQLRAETTRGKRERALQGYSNASHPPFGYVRVSDRQNAPGPEAGTVREMFERYAAGAHTDIQIAEWLNAQGKRTAGHWGHRAFSKDTVRAILINPYYIGLVGYRGLSDRETETGKRARASKRTWQWIPGKHEALITPELFDRCRAVRAKRGSRYVGRRASQSHGYILSKMAKCARCGGPLRCMTDNQGEPKYTCTAHDRAVACDATRRSVRETRLLEDLDALVSELSLTEPVKARAIELLESGDETVAADRRRIALDAEMRRLNRMYQAGNIGDGEYDQEIGRVKGELASLAKPADAFDLRAAIAALDDIAGLWRNATGPERAEILRTVFEAVRVDLDAGAVTGYEPKNEYTAVLRAAYSQEDAISGSDGRRFRNWRPRRKS

SEQ ID NO: 11338 - protein, 512 aa, Unknown
  Description of Unknown: Integrase C81 sequence
  PF07508,SSF53041,IPR036162,SM00857,Coil, PF00239,PS51736,IPR011109,G3DSA:3.40.50.1390,PS51737, IPR006119,PTHR30461,cd00338
MIDYVLEDGDTPLTCASLCTCCAPCAHMWHDGYTPRHREEPPLGKRAVIYTRVSRDDTGEGRSNDRQEAECRRLTDYKRLDVVAVEADISISAYSGKARPAWKRVLNMVRAGEVDYVIAYHMDRMTRSMLDLEELILLCEEHNVGIATAVGDIDLTSDMGRMVARILAAVARAEVERKSARQKLANAQRAAEGKPHVSGIRPFGYADDHLTLVPEEADAIRDAARRALAGETMISIAKSWTKAGLISARARRGHDKGKRATEAGWSARGVRNVLISPRYAGIRTYNGEPVGEGDWEPILDRETHLALVDTLGDPARRKGAVKMGRRPTSLLTAFALCEVCDGPVRASAIRGRQTYTCRAGHGHADRAIADAEVSAATIALLASPQWMTLIVPSGDERVEEAKAEVDDLKLKLKTYAELLANDVMDVEQFTQATATARAKLKGAEELLSRAGMGPMFTGLSLGTPAVAGQWEGLGLDRQRAIVQGLLSVKVRRKAKGMSFEDQVVVEPRYVAA

SEQ ID NO: 11339 - protein, 511 aa, Unknown
  Description of Unknown: Integrase C82 sequence
  PF07508,SSF53041,IPR036162,PTHR30461:SF3, SM00857,Coil,PF00239,IPR011109, PS51737,G3DSA:3.40.50.1390,IPR006119,PTHR30461, cd00338
MAQPLRALVGARVSVVQGPQKVSQQAQLETARKWAEAQGHEIVGTFEDLGVSASVRPDDRPDLGKWLTDEGASKWDVIVWSKMDRAFRSTKHCVDFAQWAEERQKVVMFAEDNLRLDYRPGAAKGIDAMMAELFVYLGSFFAQLELNRFKSRAQDSHRILRQTDRWASGLPPLGYKTVPHPSGKGFGLDTDPEGKDLLYQMAGKLLDGGSLIGIAKWLNETGAMSNRARARVAKGKPADQRPWTVGTVKDALTSLKTQGIKMSGKGKNSKPVLDAKGEQIVLAPPTFDWDTWKQIQDAVALREQAPRSRVHTKNPMLGVGICGKCGSTLAQQHSKKKPAKSDPPGSPDRIYRYYRCSRTPVNCDGVFIVADEADTLLEEAFLFEWADQPVTRRVFVPGEDHTYELEQINETIARLRRESDAGLIVGEADEQEYMERMRSLITRRTKLEAMPLRSAGWVEETTGQTYGEAWETEDHQQLLKDAKVKFILYSNKPRNIEVVVPQDRVAVDLAI

SEQ ID NO: 11340 - protein, 510 aa, Unknown
  Description of Unknown: Integrase C83 sequence
  PF07508,SSF53041,PTHR30461:SF3,IPR036162,SM00857, PF00239,Coil,G3DSA:3.40.50.1390,IPR011109,PS51737, IPR006119,PTHR30461,cd00338
MPQPLRALVGARVSVVQGPQKVSQQAQLETARKWAEAQGHEIVGTFEDLGVSASVRPDERPDLGKWLTDEGASKWDVIVWSKMDRAFRSTKHCVDFAQWAEERQKVVMFAEDNLRLDYRPGAAKGIDAMMAELFVYLGSFFAQLELNRFKSRAQDSHRVLRQTDRWASGLPPLGYKTVPHPSGKGFGLDTDEDTKAVLYDMAGKLLDGWSLIGIAKDLNDRGVLGSRSRARLAKGKPIDQAPWNVSTVKDALTNLKTQGIKMTGKGKHAKPVLDDKGEQIVLAPPTFDWDTWKQIQDAVALREQAPRSRVHTKNPMLGIGICGKCGATLAQQHSRKKPAKSDVPGQVVVYRYYRCSRTPVNCDGVFIVADEADTLLEEAFLYEWADQPVTRRVFVPGEDHTYELEQINETIARLRRESDAGLIVSDEDERIYLERMRSLITRRTKLEAMPRRSAGWVEETTGQTYGEAWETEDHQQLLKDAKVKFILYSNKPRNIEVVVPQDRVAVDLAI

SEQ ID NO: 11341 - protein, 508 aa, Unknown
  Description of Unknown: Integrase C84 sequence
  PF07508,SSF53041,IPR036162,SM00857,PF00239,PS51736,G3DSA:3.40. 50.1390,IPR011109,PS51737,IPR006119,PTHR30461,cd00338
MFPQRIRRAPRRQGYARDPWWSQCDTYPILAVTPLIVGMGSYCQCMRAIIYCRVSSDPHARGKSVTEQEADCRATSKAHGWDIGEVLVDNDRGASRYSRKDRPAYRRLAETLAPGDVLVTWEASRAQRDLSAYLQLRDLCAERGVLWSYSGRTYDLARGDDRFTTGLDALLSEKEVEVTRERVLRSMRANAAAGRPHGKLPYGYMIVRDPHTGKTLDRVANPDTAPTFREAVQRVLDGDSLYAVCQDFNARGVPAPRPRRDGTPAKWIPVTLRKILESPTYAGLRLSNGEVIGQATWEPLISMEEHERLKALFADPHRLTHRGSEPQWLLAGIARCGVCGATVKRIKSRGVQTYTCRDGFCAARMVTTVEDYVVEAMMRRLEGQDLVGQIDSDNAEYASAVEAVRALRQRLDSFTDAAADGEVTPAALARIEAKLLPQIERAEGRVRALAHSPAVAKIAGAGARERWEALTVRDRRDLVRALVDVQIHRVGKGRRNVPIGEGIGLTWL

SEQ ID NO: 11342 - protein, 508 aa, Unknown
  Description of Unknown: Integrase C85 sequence
  Coil,PS51736,IPR006119,PTHR30461,PS51737, G3DSA:1.10.10.2600,PTHR30461:SF3,IPR011109,PF07508,PF13408, SSF53041,PF00239,SM00857,G3DSA:3.40.50.1390,cd00338, IPR038109,IPR036162,IPR025827
MKKAIAYMRFSSPGQMSGDSLNRQRRLIAEWLKVNSDYYLDTITYEDLGLSAFKGKHAQSGAFSEFLDAIEHGYILPGTTLLVESLDRLSREKVGEAIERLKLILNHGIDVITLCDNTVYNIDSLNDPYSLIKAILIAQRANEESEIKSSRVKLSWKKKRQDALESGTIMTASCPRWLSLDDKRTAFVPDPDRVKTIELIFKLRMERRSLNAIAKYLNDHAVKNFSGKESAWGPSVIEKLLANKALIGICVPSYRARGKGISEIAGYYPRVISDDLFYAVQEIRLAPFGISNSSKNPMLINLLRTVMKCEACGNTMIVHAVSGSLHGYYVCPMRRLHRCDRPSIKRDLVDYNIINELLFNCSKIQPVENKKDANETLELKIIELQMKINNLIAALSVAPEVTAIAEKIRVLDKELRRASVSLKTLKSKAVSSLGDFHAIDLTSKNGRELCRTLAYKTFEKIIINTDNKTCDIYFMNGIVFKHYPLMKTISAQQAISTLKYMVDGEVYF

SEQ ID NO: 11343 - protein, 507 aa, Unknown
  Description of Unknown: Integrase C86 sequence
  PF07508,SSF53041,IPR036162,IPR025827,SM00857, Coil,PF00239,PTHR30461:SF3,PS51737,IPR011109, G3DSA:3.40.50.1390,IPR006119,PTHR30461,cd00338,PF13408
METMPQPLRALVGARVSVVQGPQKVSQQAQLETARKWAEAQGHEIVGTFEDLGVSASVRPDERPDLGKWLTDEGASKWDVIVWSKMDRAFRSTKHCVDFAQWAEERQKVVMFAEDNLRLDYRPGAAKGIDAMMAELFVYLGSFFAQLELNRFKSRAQDSHRVLRQTDRWASGLPPLGYKTVPHPSGKGFGLDTDEDTKAVLYDMAGKLLDGWSLIGIAKDLNDRGVLGSRSRARLAKGKPIDQAPWNVSTVKDALTNLKTQGIKMTGKGKHAKPVLDDKGEQIVLAPPTFDWDTWKQLQDAVALREQAPRSRVHTKNPMLGIGICGKCGATLAQQHSRKKSDKSVVYRYYRCSRTPVNCDGVFIVADEADTLLEEAFLYEWADQPVTRRVFVPGEDHTYELEQINETIARLRRESDAGLIVSDEDERIYLERMRSLITRRTKLEAMPRRSAGWVEETTGQTYGEAWETEDHQQLLKDAKVKFILYSNKPRNIEVVVPQDRVAVDLAI

SEQ ID NO: 11344 - protein, 504 aa, Unknown
  Description of Unknown: Integrase C87 sequence
  PF07508,SSF53041,IPR036162,PTHR30461:SF3,SM00857,PF00239,Coil, PS51736,G3DSA:3.40.50.1390,IPR011109,PS51737,IPR006119,PTHR30461 ,cd00338
MRALVVIRLSRVTDATTSPERQLESCQQLCAQRGWDVVGVAEDLDVSGAVDPFDRKRRPNLARWLAFEEQPFDVIVAYRVDRLTRSIRHLQQLVHWAEDHKKLVVSATEAHFDTTSPFAAVVIALMGTVAQMELEAIKERNRSAAHFNIRAGKYRGSLPPWGYMPARVEGEWRLLVDPVQRERILEVYHRVVDNHEPLHQIAHDLNQRGLPSPKDYFAQLQGREPKGREWSATALKRSLISEAMLGYTTLNGKTVRDDDGAPLVRAEPILTREQLESLRAELVKTSRAKPAVSTPALLLRVLFCAVCGEPAYKFTGGGRKNARYRCRSWGWAQRCGNGTVAMAEWDAFCEEQVLDLLGDAERLEKVWVAGSDSAVELAEVNAELVDLTSLIGSPAYRAGSPQREALDARIAALAARQEELEGLEARPSGWEWRETGQRFGDWWREQDTAAKNTWLRSMNVRLTFDVRGGLTRTIDFGDLQEYEQHLRLGSALDLVNAEKPPTGR

SEQ ID NO: 11345 - protein, 504 aa, Unknown
  Description of Unknown: Integrase C88 sequence
  PF07508,SSF53041,PTHR30461:SF3,IPR036162,SM00857, PF00239,IPR025827,Coil,G3DSA:3.40.50.1390,PS51737, IPR011109,IPR006119,PTHR30461,cd00338,PF13408
MPQPLRALVGARVSVVQGPQKVSQQAQLETACKWAEAQGHEIVGTFEDLGVSASVRPDERPDLGKWLTDEGASKWDVIVWSKMDRAFRSTKHCVDFAQWAEERQKVVMFAEDNLRLDYRPGAAKGIDAMMAELFVYLGSFFAQLELNRFKSRAQDSHRVLRQTDRWASGLPPLGYKTVPHPSGKGFGLDTDEDTKAVLYDMAGKLLDGWSLIGIAKDLNDRGVLGSRSRARLAKGKPIDQAPWNVSTVKDALTNLKTQGIKMTGKGKHAKPVLDDKGEQIVLAPPTFDWDTWKQIQDAVALREQAPRSRVHTKNPMLGIGICGKCGATLAQQHSRKKSDKSVVYRYYRCSRTPRNCDGVFIVADEADTLLEEAFLYEWADQPVTRRVFVPGEDHTYELEQINETIARLRRESDAGLIVSDEDERIYLERMRSLITRRTKLEAMPRRSAGWVEETTGQTYGEAWETEDHQQLLKDAKVKFILYSNKPRNIEVVVPQDRVAVDLAI

SEQ ID NO: 11346 - protein, 504 aa, Unknown
  Description of Unknown: Integrase C89 sequence
  PF07508,SSF53041,IPR036162,PTHR30461:SF3, SM00857,IPR025827,PF00239,Coil, G3DSA:3.40.50.1390,IPR011109,PS51737,IPR006119, PTHR30461,cd00338,PF13408
MPQPLRALVGARVSVVQGPQKVSQQAQLETARKWAEAQGHEIVGTFEDLGVSASVRPDERPDLGKWLTDEGASKWDVIVWSKMDRAFRSTKHCVDFAQWAEERQKVVMFAEDNLRLDYRPGAAKGIDAMMAELFVYLGSFFAQLELNRFKSRAQDSHRVLRQTDRWASGLPPLGYKTVPHPSGKGFGLDTDEDTKAVLYDMAGKLLDGWSLIGIAKDLNDRGVLGSRSRARLAKGKPIDQAPWNVSTVKDALTNLKTQGIKMTGKGKHAKPVLDDKGEQIVLAPPTFDWDTWKQIQDAVALREQAPRSRVHTKNPMLGIGICGKCGATLAQQHSRKKSDKSVVYRYYRCSRTPVNCDGVFIVADEADTLLEEAFLYEWADEPVTRRVFVPGEDHTYELEQINETIARLRRESDAGLIVSDEDERIYLERMRSLITRRTKLEAMPRRSAGWVEETTGQTYGEAWETEDHQQLLKDAKVKFILYSNKPRNIEVVVPQDRVAVDLAI

SEQ ID NO: 11347 - protein, 501 aa, Unknown
  Description of Unknown: Integrase C90 sequence
  PF07508,SSF53041,PTHR30461:SF3,IPR025827,SM00857, PF00239,IPR036162,PS51736,IPR011109,PS51737, G3DSA:3.40.50.1390,IPR006119,PTHR30461,cd00338,PF13408
MSIGELRRSGLDLLRYPRHMTNRAVFYLRLSSTDDASTSISRQEDDLRQHAEREGWEVVRVLTDDGISGRKARANAAEALRMLREGEADVLAVWKFDRWSRQGLGAVADLVATLDAVPRASFVALRDGLNSGQPAWRIIASVLAEVARMEADNTATRVKSSIAALKKASRYSGGVVPFGYRTAPAPDGPGRILEPNPDEAAVVREIADRILAGESLARLALELTARGIPTSRSDAREARNAGKPYEDLDPGRWKATTIRTVWTGDHLLGRVTHKGSPLTDPDGVPVRVWEPILDLPTLTRLRARLTAPGKPRRVKAARLLSGVVYCAHCGSKCYVRTSGGYPIYGCSAVALGRECSQPRITAAGLEEYVTERFLSVVGDAPEVEEVELVADSGTAEALAEIEGALQEASAALLADDADPAAIVARIGALKARRAELRALPAELTREIRPTGRTLREAWHATDDVDARRALLLEGLDHVAVSMRRKHGKLFEPERVDIKWYS

SEQ ID NO: 11348 - protein, 500 aa, Unknown
  Description of Unknown: Integrase C91 sequence
  PF07508,SSF53041,IPR036162,PTHR30461:SF3,SM00857,PF00239,Coil, PS51736,G3DSA:3.40.50.1390,IPR011109,PS51737,IPR006119,PTHR30461 ,cd00338
MRALVVIRLSRVTDATTSPERQLESCQQLCAQRGWDVVGVAEDLDVSGAVDPFDRKRRPNLARWLAFEEQPFDVIVAYRVDRLTRSIRHLQQLVHWAEDHKKLVVSATEAHFDTTTPFAAVVIALMGTVAQMELEAIKERNRSAAHFNIRAGKYRGSLPPWGYLPTRVDGEWRLVPDPVQRERILEVYHRVVDNHEPLHLVAHDLNRRGVLSPKDYFAKLQGREPRGREWSATALKRSLISEAMLGYATLNGKTVRDDDGAPLVRSEPILTREQLEALRAELVKADRTKPAVSTPSLLLRVLFCAVCGEPAYKFAGGQRKNPRYRCRSMGFPKHCGNGTVAMAEWDAFCEEQVLDLLGDAERLEKVWVAGSDSAVELAEVNAELVDLTSLIGSPAYRVGSPQREALDARIAALAARQEELEGLEARPSGWEWRETGQRFGDWWREQDIAGKNTWLRSMNVRLTFDVRGGLTRTIDFGDLQEYEQHLRLGSVVEQLHTGMS

SEQ ID NO: 11349 - protein, 500 aa, Unknown
  Description of Unknown: Integrase C92 sequence
  PF07508,SSF53041,PTHR30461:SF3,IPR036162,SM00857, PF00239,Coil,PS51736,IPR011109,G3DSA:3.40.50.1390, PS51737,IPR006119,PTHR30461,cd00338
MRALVVIRLSRVTDATTSPERQLESCQQLCAQRGWDVVGVAEDLDVSGAVDPFDRKRRPNLARWLAFEEQPFDVIVAYRVDRLTRSIRHLQQLVHWAEDHKKLVVSATEAHFDTTTPFAAVVIALMGTVAQMELEAIKERNRSAAHFNIRAGKYRGSLPPWGYLPTRVDGEWRLVPDPVQRERILEVYHRVVDNHEPLHLVAHDLNRRGVLSPKDYFAKLQGREPQGREWSATALKRSLISEAMLGYATLNGKTVRDDDGAPLVRAEPILTREQLEALRAELVKTDRTKPAVSTPSLLLRVLFCAVCGEPAYKFAGGGRKHPRYRCRSMGFPKHCGNGTVAMAEWDAFCEEQVLDLLGDAERLEKVWVAGSDSAVELAEVNAELVDLTSLIGSPAYRAGSPQREALEARIAALAARQEELEGLEARPSGWEWRETGQRFGDWWREQDTAAKNTWLRSMNVRLTFDVRGGLTRTIDFGDLQEYEQHLRLGSVVERLHTGMS

SEQ ID NO: 11350 - protein, 500 aa, Unknown
  Description of Unknown: Integrase C93 sequence
  PF07508,SSF53041,IPR036162,PTHR30461:SF3,SM00857,PF00239,Coil ,PS51736,IPR011109,PS51737,G3DSA:3.40.50.1390,IPR006119, PTHR30461,cd00338
MRALVVIRLSRVTDATTSPERQLESCQQLCAQRGWDVVGVAEDLDVSGAVDPFDRKRRPNLARWLAFEEQPFDVIVAYRVDRLTRSIRHLQQLVHWAEDHKKLVVSATEAHFDTTTPFAAVVIALMGTVAQMELEAIKERNRSAAHFNIRAGKYRGSLPPWGYLPTRVDGEWRLVPDPVQRERILEVYHRVVDNHEPLHLVAHDLNRRGVLSPKDYFAKLQGREPRGREWSATALKRSLISEAMLGYATLNGKTVRDDDGAPLVRSEPILTREQLEALRAELVKADRTKPAVSTPSLLLRVLFCAVCGEPAYKFAGGQRKNPRYRCRSMGFPKHCGNGTVAMAEWDAFCEEQVLDLLGDAERLEKVWVAGSDSAVELAEVNAELVDLTSLIGSPAYRVGSPQREALDARIAALAARQEELEGLEARPSGWEWRETGQRFGDWWREQDIAAKNTWLRSMNVRLTFDVRGGLTRTIDFGDLQEYEQHLRLGSVVERLHTGMS

SEQ ID NO: 11351 - protein, 500 aa, Unknown
  Description of Unknown: Integrase C94 sequence
  PF07508,SSF53041,PTHR30461:SF3,IPR036162,SM00857, PF00239,Coil,PS51736,IPR011109,G3DSA:3.40.50.1390, PS51737,IPR006119,PTHR30461,cd00338
MRALVVIRLSRVTDATTSPERQLESCQRLCAQRGWDVVGVAEDLDVSGAVDPFDRKRRPNLARWLAFEEQPFDVIVAYRVDRLTRSIRHLQQLVHWAEDHKKLVVSATEAHFDTTTPFAAVVIALMGTVAQMELEAIKERNRSAAHFNIRAGKYRGSLPPWGYLPTRVDGEWRLVPDPVQRERILEVYHRVVDNHEPLHLVAHDLNRRGVLSPKDYFAKLQGREPQGREWSATALKRSLISEAMLGYATLNGKTVRDDDGAPLVRAEPILTREQLEALRAELVKTDRTKPAVATPSLLLRVLFCAVCGEPAYKFTGGGRKNARYRCRSWGWAQRCGNGTVAMAEWDAFCEEQVLDLLGDAERLEKVWVAGSDSAVELAEVNAELVDLTSLIGSPAYRAGSPQREALDARIAALAARQEELEGLEARPSGWEWRGTGQRFGDWWREQDTAAKNTWLRSMNVRLTFDVRGGLTRTIDFGDLQEYEQHLRLGSVVEQLHTGMS

SEQ ID NO: 11352 - protein, 500 aa, Unknown
  Description of Unknown: Integrase C95 sequence
  PF07508,SSF53041,IPR036162,PTHR30461:SF3,SM00857,PF00239,Coil, PS51736,IPR011109,PS51737,G3DSA:3.40.50.1390,IPR006119, PTHR30461,cd00338
MRALVVIRLSRVTDATTSPERQLESCQQLCAQRGWEVVGVAEDLDVSGAVDPFDRKRRPNLARWLAFEEQPFDVIVAYRVDRLTRSIRHLQQLVHWAEDHKKLVVSATEAHFDTTTPFAAVVIALMGTVAQMELEAIKERNRSAAHFNIRAGKYRGSLPPWGYLPTRVDGEWRLVPDPVQRERILEVYHRVVDNHEPLHLVAHDLNRRGVLSPKDYFAKLQGREPQGREWSATALKRSLISEAMLGYATLNGKTVRDDDGAPLVRSEPILTREQLEALRAELVKTDRTKPAVSTPSLLLRVLFCAVCGEPAYKFTGGGRKNARYRCRSWGWAQRCGNGTVAMAEWDAFCEEQVLDLLGDAERLEKVWVAGSDSAVELAEVNAELVDLTSLIGSPAYRVGSPQREALDARIAALAARQEELEGLEARPSGWEWRETGQRFADWWAQQDIAAKNTWLRSMNVRLTFDVRGGLTRTIDFGDLQEYEQHLRLGSVVERLHTGMS

SEQ ID NO: 11353 - protein, 500 aa, Unknown
  Description of Unknown: Integrase C96 sequence
  PF07508,SSF53041,IPR036162,PTHR30461:SF3,SM00857, Coil,PF00239,IPR011109,PS51737,G3DSA:3.40.50.1390, IPR006119,PTHR30461,cd00338
MTQTLRALVGARVSVVQGPQKVSHIAQQESGTRWATERGHEIVGTFKDLDVSASVSPFERPDLGPWLSPERQDEWDILVFSKIDRMFRSTRDCVKFAEWAEERKKILVFAEDSMTLNYRDKSDSLEKMMSELFIYIGSFFAQLELNRFRSRAKDSHRVLRGTDRWASGVPPLGFKVIDHPSGKGKGLATDPEGKELLYDMAGKLLEGWSFIRISQYLNEKKIPTQLDKARMAKGKPAYENPWSVNTVIESLTSLRTQGLKMTRSGKKFVTVLDEAGEPIRMAPPTFDAATWKQIQEAAALRQNNRRSRSYTANPMLGVGFCGQCGASLAQQFSRSKLKDGTVNEHRYYRCGRTPVNCQNVFLRADDGDDLLEQTFLEAYGDEPVTRRVFVPGEDHTEELEQVRATIERLRRESDAGLIVSAEDERIYLERMKSLIDRRTQLEAVPRRAAGWVTEETGQTYREAWETEDHRTLLSEAGIRFELKSSKPMNFALHVPQKEAG

SEQ ID NO: 11354 - protein, 500 aa, Unknown
  Description of Unknown: Integrase C97 sequence
  PF07508,SSF53041,IPR036162,IPR025827, SM00857,PF00239,PS51736,IPR011109, PS51737,G3DSA:3.40.50.1390,IPR038109,PTHR30461:SF21, IPR006119,PTHR30461,cd00338,G3DSA:1.10.10.2600,PF13408
MPFNHKELYRRMTPMTATLESPPRHEAPPRLRAAIYLRMSTDKELGIERQREDCVALCERLGWEPVLYIDNDRSAVKENVRRESYEEMCADIREGLLDAIITWRSDRLYRKMRDLLPLIDLIEGVNRNGKRIPIETCQTGLIDLTTDAGRMTAKILAAVAENEGEVRTARQMRAYEQIATSGRPLGAPAFGYTYDKQAKKRHVVPEEAAAIREAYDDILAGGTVYSIAKKWNELGLKTPRGNVFIDTAVAKILRSPRYAGLYSFRGEIIGKGDWEPIVDVETWEAVSAILDRKNKGPTGPRVRVTLLSGIARCGNCGFKMAASSNATGGRVYRCRNFGVCHHGVTRMRHKVDKYVEAMVVAKLEERKWVVGTQADAEKAKALHAEAETLRMRKLSFTDALADGTLTPAQVKEATNKVDTKLEQIETQLARLTKSRVYDGLLSHDNIEAVWVELPLDRKRAIIQQLCDKIVVRHVGVTGRAASKLPLGHNIDIHWHNPSDN

SEQ ID NO: 11355 - protein, 500 aa, Unknown
  Description of Unknown: Integrase C98 sequence
  PF07508,SSF53041,IPR036162,PTHR30461:SF3,SM00857, PF00239,Coil,PS51736,G3DSA:3.40.50.1390,PS51737, IPR011109,IPR006119,PTHR30461,cd00338
MRALVVIRLSRVTDATTSPERQLESCQQLCAQRGWDVVGVAEDLDVSGAVDPFDRKRRPNLARWLAFEEQPFDVIVAYRVDRLTRSIRHLQQLVHWAEDHKKLVVSATEAHFDTTTPFAAVVIALMGTVAQMELEAIKERNRSAAHFNIRAGKYRGSLPPWGYLPTRVDGEWRLVPDPVQRERILEVYHRVVDNHEPLHLVAHDLNRRGVLSPKDYFAKLQGREPQGREWSATALKRSLISEAMLGYATLNGKTVRDDDGAPLVRSEPILTREQLEALRAELVKTDRTKPAVSTPSLLLRVLFCAVCGEPAYKFAGGGRKHPRYRCRSMGFPKHCGNGTVAMAEWDAFCEEQVLDLLGDAERLEKVWVAGSDSAVELAEVNAELVDLTSLIGSPAYRVGSPQREALDARIAALAARQEELEGLEARPSGWEWRETGQRFADWWAQQDTAGKNTWLRAMNVRLTFDVRGGLTRTIDFGDLQEYEQHLRLGSVVEQLHTGMS

SEQ ID NO: 11356 - protein, 500 aa, Unknown
  Description of Unknown: Integrase C99 sequence
  PF07508,SSF53041,IPR036162,PTHR30461:SF3,SM00857,Coil,PF00239 ,PS51736,IPR011109,G3DSA:3.40.50.1390,PS51737,IPR006119, PTHR30461,cd00338
MRALVAIRLSRVTDATTSPERQLESCQQLCAQRGWDVVGVAEDLDVSGAVDPFDRKRRPNLARWLAFEEQPFDVIVAYRVDRLTRSIRHLQQLVHWAEDHKKLVVSATEAHFDTTTPFAAVVIALMGTVAQMELEAIKERNRSAAHFNIRAGKYRGSLPPWGYLPTRVDGEWRLVPDPVQRERILEVYHRVVDNHEPLHLVAHDLNRRGVLSPKDYFAKLQGREPQGREWSATALKRSLISEAMLGYATLNGKTVRDDDGAPLVRAEPILTREQLEALRAELVKTDRTKPAVSTPSLLLRVLFCAVCGEPAYKFTGGGRKNARYRCRSWGWAQRCGNGTVAMAEWDAFCEEQVLDLLGDSERLEKVWVAGSDSAVELAEVNAELVDLTSLIGSPAYRAGSPQREALDARIAALAARQEELEGLEARPSGWEWRETGQRFGDWWREQDTAAKNTWLRSMNVRLTFDVRGGLTRTIDFGDLQEYEQHLRLGSVVERLHNGMS

SEQ ID NO: 11357 - protein, 499 aa, Unknown
  Description of Unknown: Integrase C100 sequence
  PF07508,SSF53041,PTHR30461:SF3,IPR036162,SM00857, Coil,PF00239,PS51736,IPR011109,PS51737, G3DSA:3.40.50.1390,IPR006119,PTHR30461,cd00338
MIRLSRVTDATTSPERQLESCQQLCAQRGWEVVGVAEDLDVSGAVDPFDRKRRPNLARWLSFEEQPFDVIVAYRVDRLTRSIRHLQQLVHWAEDHKKLIVSATEAHFDTTSPFAAVVIALMGTVAQMELEAIKERNRSAAHFNIRAGKYRGSLPPWGYMPARVDGEWRLLVDPVQRERILEVYHRVVDNHEPLHQIAHDLNQRGLPSPKDYFAQLQGREPKGREWSATALKRSLISEAMLGYTTLNGKTVRDDDGAPLVRAEPILTREQLESLRAELVKTSRAKPAVSTPALLLRVLFCAVCGEPAYKFTGGGRKNARYRCRSWGWAQRCGNGTVAMAEWDAFCEEQVLDLLGDSERLEKVWVAGSDSAVELAEVNAELVDLTSLIGSPAYRVGSPQREALDARIAALAARQEELEGLEARPSGWEWRETGQRFADWWRDQDTAGKNTWLRSMNVRLTFDVRGGLTRTIDFGDLQEYEQHLRLGAALDLVNAEKPPTGR

SEQ ID NO: 11358 - protein, 499 aa, Unknown
  Description of Unknown: Integrase C101 sequence
  PF07508,SSF53041,IPR036162,PTHR30461:SF3, SM00857,PF00239,PS51736,G3DSA:3.40.50.1390, IPR011109,PS51737,IPR006119,PTHR30461, cd00338
MIRLSRVTDATTSPERQLESCQQLCAQRGWEVVGVAEDLDVSGAVDPFDRKRRPNLARWLAFEEQPFDVIVAYRVDRLTRSIRHLQQLVHWAEDHKKLVVSATEAHFDTTTPFAAVVIALMGTVAQMELEAIKERNRSAAHFNIRAGKYRGSLPPWGYLPTRVDGEWRLVPDPVQRERILEVYHRVVDNHEPLHLVAHDLNQRGVLSPKDYFAKLQGREPQGREWSATALKRSLISEAMLGYATLNGKTVRDDDGAPLVRAEPILTREQLEALRAELVKTDRTKPAVSAPSLLLRVLFCAVCGEPAYKFAGGGRKHPRYRCRSMGFPKHCGNGTVAMAEWDAFCEEQVLDLLGDAERLEKVWVAGSDSAVELAEVNAELVDLTSLIGSPAYRVGSPQREALDARITALAARQEELEGLEARPSGWEWRETGQRFGDWWRDQDTAGKNAWLRSMNVRLTFDVRGGLTRTIDFGDLQEYEQHLRLGAALDLVNAEKPPTGR

SEQ ID NO: 11359 - protein, 499 aa, Unknown
  Description of Unknown: Integrase C102 sequence
  PF07508,SSF53041,IPR036162,PTHR30461:SF3,SM00857, Coil,PF00239,PS51736,IPR011109,PS51737, G3DSA:3.40.50.1390,IPR006119,PTHR30461,cd00338
MRALVVIRLSRVTDATTSPERQLESCQQLCAQRGWDVVGVAEDLDVSGAVDPFDRKRRPSLARWLAFEEQPFDVIVAYRVDRLTRSIRHLQQLVHWAEDHKKLVVSATEAHFDTTTPFAAVVIALMGTVAQMELEAIKERNRSAAHFNIRAGKYRGSLPPWGYLPTRVDGEWRLVPDPVQRERILEVYHRVVDNHEPLHLVAHDLNRRGVLSPKDYFAKLQGREPQGREWSATALKRSLISEAMLGYATLNGKTVRDDDGAPLVRSEPILTREQLEALRAELVKTDRTKPAVSTPSLLLRVLFCAVCGEPAYKFDAGRKIPRYRCRSFGFAQRCGNGTVPIAEWDAFCEEQVLDLLGDAERLEKVWVAGSVSAVELAEVNAELVDLTSLIGSPAYRVGSPQREALDARIAALAARQEELEGLEARPSGWEWRETGQRFGDWWREQDTSAKNTWLRSMNVRLTFDVRGGLTRTIDFGDLQEYEQHLRLGSVVERLHTGMS

SEQ ID NO: 11360 - protein, 499 aa, Unknown
  Description of Unknown: Integrase C103 sequence
  PS51736,PTHR30461,IPR006119,PS51737, G3DSA:1.10.10.2600,PTHR30461:SF3,IPR011109,PF07508, SSF53041,PF00239,SM00857,G3DSA:3.40.50.1390, cd00338,IPR038109,IPR036162
MSSSQPIQAAIYVRMSTESQNYSTDHQRAKIHEYALSKRIEVVREYVDEGKSGLDIRRRTGLRSLIDDVQSGNADFQLIIVYDVSRWGRFQDVDEAAYHEHTCRRAGIKVVYSGEQFSDDATPLGALMKSIKRMMAAEYSRELSTKTFNAQCRFTEIGFKQGGHAGYGLRRLALTKDGTPRRVLEYGEAKGAVTDRVILIPGPAHEAITIRRVYALYLEQKLSEPAIARLLNAEGIASEFDRPWTHSMVNSLLTNLKYCGTLAFNRKSCKLSSRRKSNPHAEWVVNEGAVEPLISLSLFAQARDERARRVRRYTLDELLVLLQRCHETHGRVNAKIIAADPSMPDPQLFVRGFGSLIAAYDAAGLIPCPSHVFVETKKLIAAKLRDLFAEVKRLALSSGATVHEVKAPHTLVINQCVRVRIEIATRRRPKRGLVNWRVMPLLDADFVLTARLHGDTHELIDYFLIPAVKLANGPLYLKESNLERLAELRYLSLASMFGP

SEQ ID NO: 11361 - protein, 499 aa, Unknown
  Description of Unknown: Integrase C104 sequence
  PS51736,IPR006119,PTHR30461,G3DSA:1.10.10.2600,PTHR30461:SF3, IPR011109,PS00397,PF07508,SSF53041,PF00239, SM00857,G3DSA:3.40.50.1390,IPR006118,cd00338,IPR038109, IPR036162
MARLVSRGAALYVRASTEHQNYSTDHQESALREYAVQHDFEVIAIYRDEGRSGLTLNRRNGLLQLLNDVQSGQAGYVAVLVYDVSRWGRFQDVDESAYYEYACRKAGIMISYCAEPFTNDGSPLATLLKGLKRAMAAEYSRELSAKVFRAQCRLTAAGYKQGGSAGYGLRRQCHSADGLTLRTLEIGERKSLPTDRVGFVLGPSEEVAVVCRIFDMCTDREMPDTKIAEILNAEGLTNQFGRTWSAHNVKGILTNEKYAGTLIFNRSTQRLRSSRRPNDTDKWVRVEDAFPGIVSNEMFNKTKQVRLCRGKHWTDDEMLDGLREILVEHGNVSADLIDNSCLPSAKSYALRFRGLVAAYEAAGVSGPSLSRATIARFRIRCVTKDMAIELERCALRAKAKVEQLTTRTYRINGVIVRLLCTRCRYERSHPCWKVTVRHSPPADFVVWIRMNEANEEVAQIYLLPVQSFPEHQYLWPSTRTLLRYQQFAYASMSRVFGLD

SEQ ID NO: 11362 - protein, 498 aa, Unknown
  Description of Unknown: Integrase C105 sequence
  PF07508,SSF53041,IPR025827,IPR036162,SM00857, PF00239,PTHR30461:SF3,PS51736,PS51737,IPR011109, G3DSA:3.40.50.1390,IPR038109,IPR006119,PTHR30461,cd00338, G3DSA:1.10.10.2600,PF13408
MRHWCQRNGVPEPVAYTDAAISGASDNRPGYRALVADITGGRVDLVVVDDLSRLSRDSSEIGQLLKRVRFAGARLVGASDGVDTARKGHKIDVGLRGLMGEMYLDELADKTHRGLTGRALAGASAGGLPYGYRVAGTGQRTIDPDHAQVVRRIYNMAAAGHTPRQIAAALNADGVPSPRGSSWAMSVIYGDRKRGIGILANPIYRGRQIWNRSTWTKHPDTGRRLRSERPENEWIITEHPELRIITDAQWQAADATLQNRRSRSGAPPGRSPRHMLSGLLKCCDCGGPMVAVDAYRYGCARAKDRGPTVCASRLRVARTHVESALLAGIKRDLLSEAAYHAFEREARRLLTQAAPDTGNIEKRIRDAERTRENIMAALKAGIITAGTRQALIDAEQGVTDASAELKAARNYQPAQILPRARETWRRLVEQLADARDTPEIRSAVRELLGDEIVLGEDAGGVFAEARNGSQILVVAGARSEQYLSIPYRIMIPTNGRGV

SEQ ID NO: 11363 - protein, 498 aa, Unknown
  Description of Unknown: Integrase C106 sequence
  PF07508,SSF53041,PTHR30461:SF3,IPR036162,SM00857, PF00239,PS51736,PS51737,IPR011109,G3DSA:3.40.50.1390, IPR006119,PTHR30461,cd00338
MPTYDRSMRVIGRLRISRQTEESTSIERQRELIQNWADTHDHEIVGWAEDKDVSGSVDPFDTPGLGPWLKRDRLDDWDILVAWKLDRIARRAIAINRVFHLCQEHDKTLVCISDNIDLSTWVGRLIANVIAGVAEGELEAIRERTLASHRKLRELGRWPGGRPAYGYKAVENENGPGWKLVHDEYSATIMREIVDRTLQGEAGNAIAQDLQARGVLPPAEYRRQMNGEKLRGGEWMGQVIRRMLKSRTLLGHVTHQKVTVIHETEGTPILKGEPLVTLEEFEELQAILGGSSRPKNHNRSTGASPMLDVALCGECGKPLHLRTQRTERKTKVHVHRYYYCPDKHGQALRAEIVERTVEEQFLDMFGDKPAMERVFREGENHEIEIKQAIQSIEALTPLLGAATSGTVLKSLTDQISAISNRVTYLESLPKAESGYILRATGKTYREEWESRDEQGRRSLLKRSGVTVKFLLQGKTRTTEGALQTEIKFPGDVEERLAS

SEQ ID NO: 11364 - protein, 497 aa, Unknown
  Description of Unknown: Integrase C107 sequence
  PTHR30461:SF3,PF00239,PS51736,G3DSA:3.40.50.1390, IPR038109,IPR006119,G3DSA:1.10.10.2600,PF13408, PF07508,SSF53041,PS51737,cd03768,IPR036162 ,IPR006118,SM00857,IPR011109,PS00397,IPR025827,Coil,PTHR30461
MYPFYHFLGNFERGTTMITTNKVAIYVRVSTTNQVEEGYSIDEQKDKLSSYCDIKDWNVYKVYTDGGFSGSNTDRPALESLIKDAKKRKFDTVLVYKLDRLSRSQKDTLHLIEDVFIKNGIEFLSLQENFDTSTPFGKAMIGLLSVFAQLEREQIKERMQLGKLGRAKSGKSMMWAKTSYGYDYHKETGTVTINPAQALTIKFIFESYLRGRSITKLRDDLNEKYPKHVPWSYRAVRTILDNPVYCGFNQYKGEIYPGNHEPIISKEEYDKTQSELKIRQRTAAENVNPRPFQAKYILSGIAQCGYCGAPLKIMLGVKRKDGSRLKKYECHQRHPRTLRGVTTYNDNKKCDSGFYYKDKLEAYVLKEISKLQDDADYLDKIFSGDNAETIDRESYKKQIEELSKKLSRLNDLYIDDRITLEELQSKSAEFISMRGTLETELENDPALRKNKRKADMRKLLNAEKVFSMDYENQKVLVRRLINKVKVTAEDIVINWKI

SEQ ID NO: 11365 - protein, 497 aa, Unknown
  Description of Unknown: Integrase C108 sequence
  PTHR30461:SF3,PF00239,PS51736,G3DSA:3.40.50.1390,IPR038109, IPR006119,G3DSA:1.10.10.2600,PF13408,PF07508,SSF53041, PS51737,cd03768,IPR006118,IPR036162,SM00857, IPR011109,PS00397,IPR025827,Coil,PTHR30461
MYPFYHFLGNFERGTTMITTNKVAIYVRVSTTNQVEEGYSIDEQKDKLSSYCDIKDWNVYKVYTDGGFSGSNTDRPALESLIKDAKKRKFDTVLVYKLDRLSRSQKDTLHLIEDVFIKNGIEFLSLQENFDTSTPFGKAMIGLLSVFAQLEREQIKERMQLGKLGRAKSGKSMMWAKTSYGYDYHKETGTVTINPAQALTIKFIFESYLRGRSITKLRDDLNEKYPKHVPWSYRAVRTILDNPVYCGFNQYKGEIYPGNHEPIISKEEYDKTQSELKIRQRTAAENVNPRPFQAKYILSGIAQCGYCGAPLKIMLGVKRKDGSRLKKYECHQRHPRTLRGVTTYNDNKKCDSGFYYKDKLEASVLKEISKLQDDADYLDKIFSGDNAETIDRESYKKQIEELSKKLSRLNDLYIDDRITLEELQSKSAEFISMRGTLETELENDPALRKNKRKADMRKLLNAEKVFSMDYENQKVLVRRLINKVKVTAEDIVINWKI

SEQ ID NO: 11366 - protein, 497 aa, Unknown
  Description of Unknown: Integrase C109 sequence
  PTHR30461:SF3,PF00239,PS51736,G3DSA:3.40.50.1390,IPR038109, IPR006119,G3DSA:1.10.10.2600,PF13408,PF07508,SSF53041, PS51737,cd03768,IPR006118,IPR036162,SM00857, IPR011109,PS00397,IPR025827,Coil,PTHR30461
MYPFYHFLGNFERGTTMITTNKVAIYVRVSTTNQVEEGYSIDEQKDKLSSYCDIKDWNVYKVYTDGGFSGSNTDRPALESLIKDAKKRKFDTVLVYKLDRLSRSQKDTLHLIEDVFIKNGIEFLSLQENFDTSTPFGKAMIGLLSVFAQLEREQIKERMQLGKLGRAKSGKSMMWAKTSYGYDYHKETGTVTINPAQALTIKFIFESYLRGRSITKLRDDLNEKYPKHVPWSYRAVRTILDNPVYCGFNQYKGEIYPGNHEPIISKEEYDKTQSELKIRQRTAAENVNPRPFQAKYILSGIAQCGYCGAPLKIMLGVKRKDGSRLKKYECHQRHPRTLRGVTTYNDNKKCDSGFYYKDKLEAYVLKEISKLQDDADYLDKIFSGDNAETIDRESYKKQIEELSKKLSRLNDLYIDDRITLEELQSKSAEFISMRGTLETELENDPALRKNKRKADMRKLLNAEKVFSMDYESQKVLVRRLINKVKVTAEDIVINWKI

SEQ ID NO: 11367 - protein, 495 aa, Unknown
  Description of Unknown: Integrase C110 sequence
  PF07508,SSF53041,PTHR30461:SF3,IPR036162,SM00857, PF00239,PS51736,PS51737,IPR011109,G3DSA:3.40.50.1390, IPR006119,PTHR30461,cd00338
MRVIGRLRISRQSEESTSIDRQRELIQNWADTHDHEIVGWAEDIDVSGSVDPFEAPGLGPWLKRDRLGEWDILVAWKLDRIARRAIAINRVFHLCQEHDKTLVCISDNIDLSTWVGRLIANVIAGVAEGELEAIRERTLASHRKLRELGRWPGGRPAYGYKAVERTDGPGWKLVHDEYSATIMREIVDRTLQGEAGNAIAQDLQERGVLPPAEYRRQMNGEKLRGGEWMGQVIRKMLKSRTLLGHVTHQQVTVINEKEGTPILKGEPLVSLEEWEELQAMLGGSSRPKNHNRTTAASPMLDVALCAECEKPLHLRTQRTQRKEKLHVHRYYYCPDKHGSAIRGEDVENAVENQFLEDFGDVPAMERVFREGENHEIEIKQAIRSIEALTPLLGTATSGTVLKSLTDQISALSNRVTYLESLPKAESGYILRPTGKTYREEWEERDEQGRRALLRRSGITATFRLTGKGRGGRNPAPGALEFNLRVPEDAHARMAS

SEQ ID NO: 11368 - protein, 494 aa, Unknown
  Description of Unknown: Integrase C111 sequence
  PF07508,SSF53041,IPR036162,PTHR30461:SF3, SM00857,PF00239,IPR025827,PS51736, G3DSA:3.40.50.1390,IPR011109,PS51737,IPR006119, PTHR30461,cd00338,PF13408
MVRMKPRAVLYLRLSAVVDDSTSIDRQERDLRAHAERQGWTVERVLVDEGISGRKARAKAAEAVRLIADGEADVLAVWKLDRFTRQGWDGLGALSRALDARKHDGKPALFVALQDGLTSDQSAFRLIAGVLSEVARSEADNTAARVKHSIAYRKTTTSKYTGGAAVPFGYRSVPAPDGTGRVLVHDPEESAVVREVADRLLAGVEPLSRIAADLQARNVPTSKSPARRALRAGEPADGLDRGLWRSSTLRSLFTSDLLLGRVKHHGDLIRDADGLPASVWPPLLDLATLEALRARLGATGAPQPRKGRASRLLSGVAYCAVCDSRMYVTTSSGRPIYACASSWNSGSCPSPKINALGLEEYVAARFLAFAGDWPEVETIVETDATTTDAARREVEAALREASAHMLDDGADVAALAARIGALKARRAELRALPASSTSRTVLTGRTLAEAWAEADDDTVKRSLLLETLDSVTVAPTTSRRAPIEPERVTFRWNS

SEQ ID NO: 11369 - protein, 494 aa, Unknown
  Description of Unknown: Integrase C112 sequence
  PF07508,SSF53041,IPR036162,IPR025827,SM00857, PF00239,PTHR30461:SF3,PS51736,IPR011109,G3DSA:3.40.50.1390, PS51737,IPR006119,PTHR30461,cd00338,PF13408
MAPMKPRAVLYLRLSAVVDDSTSIDRQERDLRAHAERQGWAVERVLVDEGISGRKARAKAAEAVRLIADDEADVLAVWKLDRFTRQGWDGLGALSRALDARKRDGKPALFVALQDGLTSDQSAFRLIAGVLSEVARSEADNTAARIKSSITYRKLTTSKYTGGAAVPFGYRSIPAPDGVGRVLIHDPEEAAIVREVSARLLEGVEPLSRIAADLQARGIPTSKSPARRALRSGEPADGLDPGLWRSSTLRSLFTSDLLLGRVKHHGDLIRDADGLPASVWPPLLDLATLEALRARLGASGAPQARKGRASRLLSGLAYCAVCESRMYVTTSSGRPIYACASSWNSGSCPSPKINAIGLEDHVAVRFLAFAGDWPEVETIVETDATATDASLREVEAALREASGHMLDDGADVAALAARIGVLKARRAELRALPASSTSRTVLTGRTLAEAWGETGDETVKRSLLLEALDSVTVAPATSRRAPIDPERVTFRWNS

SEQ ID NO: 11370 - protein, 493 aa, Unknown
  Description of Unknown: Integrase C113 sequence
  PTHR30461:SF3,PF00239,PS51736,G3DSA:3.40.50.1390, IPR038109,IPR006119,G3DSA:1.10.10.2600,PF13408, PF07508,SSF53041,PS51737,cd03768,IPR036162 ,IPR006118,SM00857,IPR011109,PS00397,IPR025827,Coil,PTHR30461
MYLFYQKRGTNSMKTMNKVAIYVRVSTTNQVEEGYSIDEQKDKLSSYCDIKDWNVYKVYTDGGFSGSNTDRPALESLIKDAKKRKFDTVLVYKLDRLSRSQKDTLHLIEDVFIKNGIEFLSLQENFDTSTPFGKAMIGLLSVFAQLEREQIKERMQLGKLGRAKSGKSMMWAKTSYGYDYHKETGTVTINPAQALTIKFIFESYLRGRSITKLRDDLNEKYPKHVPWSYRAVRTILDNPVYCGFNQYKGEIYPGNHEPIISKEEYDKTQSELKIRQRTAAENVNPRPFQAKYILSGIAQCGYCDAPLKIMLGVKRKDGSRLKKYECHQRHPRTLRGVTTYNDNKKCDSGFYYKDKLEASVLKEISKLQDDADYLDKIFSGDNAETIDRESYKKQIEELSKKLSRLNDLYIDDRITLEELQSKSAEFISMRGTLETELENDPALRKNKRKADMRKLLNAEKVFSMDYESQKVLVRRLINKVKVTAEDIVINWKI

SEQ ID NO: 11371 - protein, 486 aa, Unknown
  Description of Unknown: Integrase C114 sequence
  PF07508,SSF53041,PTHR30461:SF3,IPR036162,SM00857, Coil,PF00239,IPR011109,PS51737,G3DSA:3.40.50.1390, IPR006119,PTHR30461,cd00338
MRVLGRVRLSRFSDESTSVERQREIIAKWAADNDHTVVGYAEDVDVSRSVDPFDTPALGPWFTPEQRGEWDIVACWKLDRIATGSIYLNKVMAWCGEHEKSLVSVTENFDLGTWVGRLIANVIAGVAEGELEAIRERTQASRRKLVAVGRWTGGRPTYGYRAVEQDGGGWTLEPDPESSAILRRIVDRALAGESTLSIVRGLNDEGVLSPADYVRYRNGKPTLGAKWTTTATLDLMRSRTLLGQIVHNGAVVRDDSGKPVLGGPPLIDYDTFTRLQAALDARSRTQKVERVDASPLLGVAVCWECGSNLFHQRQMNRGKPYRYYKCPNKCSQAVKADDAEAVVEDMFLDKVGGHDELERVFIPGADHSTELREAQEAVDELTKVLGTMSSNTVRTAVLGQLEALDKRIQELESLPLTEARVELQPTGRLYRDAWGSLDSDGRRELLVKAGITARLKVEGRPVGGRAPGAFYFDLVVPEDLRERMSL

SEQ ID NO: 11372 - protein, 484 aa, Unknown
  Description of Unknown: Integrase C115 sequence
  PF07508,SSF53041,IPR036162,IPR025827,SM00857,PF00239,Coil, PS51736,PS51737,IPR011109,G3DSA:3.40.50.1390,IPR038109, IPR006119,PTHR30461,cd00338,G3DSA:1.10.10.2600,PF13408
MKYGVYVRVSTDRDEQVSSVENQIDVCRYWLDQHGYDWDENSIYFDDGITGTVLLERHAMQLILEKAKKRELQMVLFKSIHRLARDLKDALEIKEILIANGIRLVTIEEGYDSHYEGKNDMKFEMFAMFASQYPKTLSVSISAALSAKVRRGEHTGGRLPFGYSDRDKKYVINEEEAEIVREIYDMYSKGIGYIGIAKILNERGVPSKTGGKWQMSSVQRIIKNPIYKGDYILNQYTTVKISGRKKQIKNPEEKWTIFKNHHPAIVPEEQWELVNRPRSAKKRRPALWNEFRGVMFCAHCGSAMQVVYSAKKKKDGTKEEWRYLKCSRYKRYGRDECVRHAPIQYHEFREFILDNLKEKEKQLETKFNLNEETSNADKKNKLQREIQRIEEKRKKLIDLYMEELIEKEEFLSRRNELEKIIKEKEVQFVSMEDKNEVKRTQDEFRKAFALLDESKNLYEEFKRIIDRIEIFENGDIKIVYRIEM

SEQ ID NO: 11373 - protein, 484 aa, Unknown
  Description of Unknown: Integrase C116 sequence
  PF07508,SSF53041,IPR025827,IPR036162,SM00857, PF00239,Coil,PS51736,IPR011109,PS51737, G3DSA:3.40.50.1390,IPR038109,IPR006119,PTHR30461,cd00338, G3DSA:1.10.10.2600,PF13408
MKYAVYVRVSTDRDEQVSSVENQIDVCRYWLDQHGYDWDENSIYFDDGITGTVLLERHAMQLILEKAKKRELQMVLFKSIHRLARDLKDALEIKEILIANGIRLVTIEEGYDSHYEGKNDMKFEMFAMFASQYPKTLSVSISAALSAKVRRGEHTGGRLPFGYSDRDKKYVINEEEAEIVREIYDMYSKGIGYIGIAKILNERGIPSKTGGKWQMSSVQRIIKNPIYKGDYILNQYTTVKISGRKKQIKNPEEKWTIFKNHHPAIVSEKQWELVNKPRSAKKRRPALWNEFRGIMFCAHCGSAMQVIYSAKKKKDGTKEEWRYLKCSRYKRYGRDECVRHAPIQYHEFREFILENLKEKEKQLETEFNLNEETSSAEKKNKLQREIQRIEEKRKKLIDLYMEELIEKEEFLSRRKELEKTIKEKEVQFVSMEDKSEVKRTQDEFRKAFSLLDESKNLYEEFKRIIDRIEIFENGDIKIVYRIEM

SEQ ID NO: 11374 - protein, 484 aa, Unknown
  Description of Unknown: Integrase C117 sequence
  PF07508,SSF53041,IPR025827,IPR036162,SM00857, PF00239,PS51736,G3DSA:3.40.50.1390,IPR011109,PS51737, IPR038109,PTHR30461:SF21,IPR006119,PTHR30461,cd00338, G3DSA:1.10.10.2600,PF13408
MTATLERHLDTPQQEALRVGVYLRMSTDKELGIDRQREDCLALAERLGWVPVEYIDNDRSATKENVKREGFDALSDDIRDGRIDSIITWRSDRLYRKMKDLLPLIDLIQGVNKTGKRIPIETCQTGLIDLTTDAGRMTAKILAAVSENEGEVRTARQMRAYEQIADSGRRLGAPAFGWTRDPRDPQIVPEEAAAIREGYADVLAGCTLYSIAKKWSDAGLRTTRGNAFVGSVVGKILRSPRNAGLLTFRDEIVGEGTWEPIVDRETWEAACAVLDQKNTGQKGPRVRSTLLSGIVRCGACGNKMAAGKNSNGEPIYKCKRYEVCKHGVTRVRKKVDKYVEMSMVAKLEQRKWIVGTQVDAEQAKGLHAEAEALRARKASFGEALADGTLTPAQVKDATDRVNVKLEEIDAKLARLTRSRVFDGLLGHDDLEKVWLGLDLERKRAIIESLCDKIVIQHVGQTGRSAAKLPLGHAIKIHWHDPSND

SEQ ID NO: 11375 - protein, 484 aa, Unknown
  Description of Unknown: Integrase C118 sequence
  Coil,PS51736,IPR006119,PTHR30461,PS51737, G3DSA:1.10.10.2600,IPR011109,PF07508,PF13408,SSF53041, PF00239,SM00857,G3DSA:3.40.50.1390,cd00338,IPR038109, IPR036162,IPR025827
MKILKYAVYVRVSTDRDEQVSSVQNQVDICRYWLEKNGYEWDSNAVYFDDGISGTAWLERHAMQLILEKARRNELDTVVFKSIHRLARDLRDALEIKEILIGHGIRLVTIEENYDSLYEGGNDIKFEMFAMFAAQLPKTLSVSVSAAMQAKARRGEYIGKPGLGYHVIDKKLVINEEEAEVVREIFDLSHKGYGFKKIANILNDKGTYTKFGQLWSHATVGKILKNQKYKGDLVLNSYKTVKVDGKKKRVYTPKERLTIIEDHYPAIVSKELWNAVNSDRTSKKKTKQDTRNEFRGMMFCKHCGGPITAKYTSRFAKGSKKEWVYMKCSNYVRFNRCVNFDPVKYDDIREVIIYRLKQQEKELEIHFNPKMHQKRKDKSTEIKKQIKLLKVKKEKLIDLYIEGLIDKEMFSKRDFNFENEIKEQELALLKLTDQNKRNKEEQQIKKAFSMLDEEKDMHEVFKTLIKKITLSKDKYIEIEYTFSL

SEQ ID NO: 11376 - protein, 481 aa, Unknown
  Description of Unknown: Integrase C119 sequence
  PF07508,SSF53041,IPR036162,IPR025827,SM00857, Coil,PF00239,PS51736,G3DSA:3.40.50.1390,PS51737, IPR011109,IPR038109,IPR006119,PTHR30461,cd00338, G3DSA:1.10.10.2600,PF13408
MKYAVYVRVSTDRDEQVSSVENQIDICRYWLEKNGYEWDPNAVYFDDGISGTAWLERHAMQLILEKARRNELDTVVFKSIHRLARDLRDALEIKEILIGHGIRLVTIEENYDSLYEGGNDIKFEMFAMFAAQLPKTISVSVSAAMQAKARRGEFIGKPGLGYDVIDKKLVINEKEAEIVREIFDLSYKGYGFKKIANILNDKGTYTKFGQLWSHTTVGKILKNQTYKGNLVLNSYKTVKVDGKKKRVYTPKERLTIIEDHYPAIVSKELWNAVNSDRASKKKTKQDTRNEFRGMMFCKHCGEPITAKYSGRYAKGSKKEWVYMKCSNYIRFNRCVNFDPVHYDDIREAIIYGLKQQEKELEIHFNPKMHQKRNDKSTEIKKQIKLLKVKKEKLIDLYVEGLIDKEMFSKRDLNFENEIKEQELALLKLTDQNKRNKEEKKIKEAFSMLDEEKDMHEVFKTLIKKITLSKDKYIDIEYTFSL

SEQ ID NO: 11377 - protein, 481 aa, Unknown
  Description of Unknown: Integrase C120 sequence
  IPR006119,PTHR30461,PS51737,IPR011109,PF07508, SSF53041,PF00239,SM00857,G3DSA:3.40.50.1390,cd00338, IPR036162
MTIRAVVGARVSHVQGPEKTSHHSQRSKGEAYAESQNWDVVGAFEDLDVSAIKLSPWDRPDLKEWLDRADDWDALIFAKTDRVFRSAADCVKLAEWCRNHKKILVLVDDGIKLDYYNPEDAKDAFAGAMSKVFLILASVFAEIEGQRFVQRARDRVTFLRDTDRWASGTPPYGFVTAPHPGGKGKTLIHDIEAQKVVHDAAKRLLGGDSLTRIAKDFNEEGVLTNRGGRWVTSTVRRVLSHPGMQGIKTYKGKVVLGPDGEPVRVGPASFDTETWDRLQAELAQRGMEPRQRRHSTNPLLGVVKCYSCGGNLAQRTHVSKGREYRYYACGRAPLACPGVSISALDAEGLVEQGFLETHRDRRIKVRVWRDGSDNSAELEQTKKTIESLREDRAMGLFTTPADELMFRQQMKALIAKRDLLAEQPVIRAGWTEVVSEETYGEVWPSATVEEKRKMLTDAGVTLTVTNPRQWHLHVESLLGQD

SEQ ID NO: 11378 - protein, 480 aa, Unknown
  Description of Unknown: Integrase C121 sequence
  PF07508,SSF53041,IPR036162,SM00857,PF00239,PS51736,PS51737, IPR011109,G3DSA:3.40.50.1390,IPR006119,PTHR30461,cd00338
MLRFHLKLSDRDCTVQLVRAIIYCRVSSDPNLRERSVQEQESECRAVAFANGWDVGEVLVDNDRGASRYSRGDRPAYRRLAEILQPGDVLVTWEASRAQRDLGAYLQLRTLCEQRGVPWSYAGKTHDLTRGDDRFTTGLDALLSEKEVEQTRERVLRSVRANAAAGRPHGKLAYGYMIVRDPHTGQSLDRVPNPDTAPIVREAVQRVLNGEALYAVCHDFNARGIPGPRPRRDGTPAKWIPVTLRKILESPTYAGLRWSNGEVIGQATWEPLVTMEEHERLKAMFADPHRLTHRGSEPQWLLAGIARCGVCGATVKRIKSRGNQTYTCRDGFCAARLVTTVDDYVTEAVMRRLEGQDLVGQIDSDNAEYATAIDAVRALRQRLDSFTDAAAEGEVTPAALARIEAKLLPQIERAEGRVRALAHSPAVAKIAGAGARERWDALAVRDRRDLVRALVDVQIFRVGKGRRNVPIGEGIGLTWL

SEQ ID NO: 11379 - protein, 479 aa, Unknown
  Description of Unknown: Integrase C122 sequence
  PF07508,SSF53041,IPR025827,IPR036162,PTHR30461:SF3, Coil,SM00857,PS51736,PF00239,G3DSA:3.40.50.1390, PS51737,IPR011109,IPR006119,PTHR30461,cd00338, PF13408
MERQREFIETWARQNDHEIVGWAEDLDVSGSVDPFDTQGLGPWLKEPKLREWDILCAWKLDRLARRAVPLHKLFGMCQDEQKVLVCVSDNIDLSTWVGRLVASVIAGVAEGELEAIRERTLSSQRKLRELGRWAGGKPAYGFKAQEREDSAGYELVHDEHAANVMLGVIEKVLAGQSTESVARELNEAGELAPSDYIRARAGRKTRGTKWSNAQIRQLLKSKTLLGHVTHNGSTVRDDDGIPIRKGPALISEEKFDQLQAALDARSFKVTNRSAKASPLLGVAICGLCGRPMHIRQHRRNGNLYRYYRCDSGSHSGGGGAAPEHPSNIIKADDLEALVEEHFLDEVGRFNVQEKVYVPASDHRAELDEAVRAVEELTQLLGTMTSATMKSRLMGQLTALDERIARLENLPSEEARWDYRATDQTYAEAWEEADTEGRRQLLIRSGITAEVKVTGGDRGVRGVLEFHLKVPEDVRERLSA

SEQ ID NO: 11380 - protein, 479 aa, Unknown
  Description of Unknown: Integrase C123 sequence
  PTHR30461:SF3,PF00239,PS51736,G3DSA:3.40.50.1390,IPR038109, IPR006119,G3DSA:1.10.10.2600,PF13408,PF07508,SSF53041, PS51737,cd03768,IPR036162,IPR006118,SM00857, IPR011109,PS00397,IPR025827,Coil,PTHR30461
MNKVAIYVRVSTKGQAEEGYSIDEQIALLTSYCSIHKWKIHDTYVDAGISGATIERPELSRLSRDAQKKKFNTMIVYDLKRLGRSQRNNIAFIEDVLEKNGIGFISLTENFDTSTPLGKAMVGILSAFGQLDRDTIRERMMMGKIGRAKSGKPMMTSTIAFGYTYDKVTSSLNINPAEAIIVKTIFNEYLSGRSLTKLRDYLNENDLFRNGKPWNYQGVSRILRNPVYMGMVRFRGEVYQGNHDPIIDSETFEAVQKELKKRQLETYEFNKNTRPFRAKYMLSGIIKCGYCGSPMGVTLGTKRKDGTRNIRYQCVNRFPRTTKGITVYNNGQKCNSGFYEKDDIEIYVLGQVRLLQLNKAKLNKMFETPEIINVEEIENQINSLNNKMKRLNDLYLNDMISLDELKTQTYTFLKQKDLLENELNNNPAIHQEENRKQFQKLLGTKDITQLSYEEQSFAIKNLIDKVFVKPGIIDINWRI

SEQ ID NO: 11381 - protein, 478 aa, Unknown
  Description of Unknown: Integrase C124 sequence
  PF07508,SSF53041,IPR036162,PTHR30461:SF3,SM00857, Coil,IPR025827,PS51736,PF00239,PS51737, IPR011109,G3DSA:3.40.50.1390,IPR038109,IPR006119,PTHR30461, cd00338,G3DSA:1.10.10.2600,PF13408
MRVCKYRRVSTDMQREEGVSLSTQDERLDAFIKSQGWTVVADYADEGFSAKNMNRPAIQQLIQDLKRDKFDVVLVYRLDRLVRSVSDLHELLQIMDKHDVKFKSCTEVFDTTSATGRMFITIIATLAQWERETIAERVFDNMLARSEKGMRNGAPAPYGYIYKDGSLELVKEEAKWVKFIFDKYKTTGSQNIAKTLNKRGIKTRKGEVWSDFSIRYLLRNPIYAGYVRWNYRSLAKGKCTGDEVIQKIDQDNFQAIITKEEFDEIQILIKERSTVAFRSDNFYPYSGVAKCAKCGNSLTGAFKNKKSGGIYRFYKCAGRFRTGICDAPVISEEAIDIALMKCLDLPEFDLKYEEQNKIDREQLEKELTKIELKKSRIKELYLDGDISKNEYRKRMDSLIDDEIRIQKKLEIEEIEATYEEVLEWMSLIKESWNELSFETRKAAIRTIFSSLTVKIIKDPVFGRYPQLPVVEITNYKLK

SEQ ID NO: 11382 - protein, 477 aa, Unknown
  Description of Unknown: Integrase C125 sequence
  PF07508,SSF53041,IPR036162,PTHR30461:SF3,SM00857, PF00239,Coil,PS51736,G3DSA:3.40.50.1390,IPR011109, PS51737,IPR006119,PTHR30461,cd00338
MAGQRVLGRIRLSRLTEESTSAARQRELIQQWADMNEHTVVGWAEDLDVSGSIDPFDSPSLGPWFREDKRDEWDILVAWKLDRIGRRAIALNRVFGWMMDHNKTLVCVSDNIDLSTWVGRLVANVIAGVAEGELEAIRERTRAGRKKILESGRWPGGVVPYGLRPVPNPGGGWKLEVDPEPASVIHRIVDEIIAGSAVEAVANRLDEDGIPAPKGGTWLPSTIWKLCGSNHLLGHARYGGKSVRDAEGRPVLNAEPILTWDQWDALQRALEARRRGGSRTRDTSPLLGVAVCYECDKPLFHKIYKRDYGRRLYRYYHCRDKTHNQQVEAEVVETLLEESFLQRIGDLPVLERVFIPSENHEIELEEARRAIEELTPLLATVTSATMRKSLLEQLSALDSRLTELEALPTREAHWEYRETGQTYAEAWKEADTEGRRQILLRSGITLAVILTGKTRNSGGALKFDFRVPEDIEKRLSA

SEQ ID NO: 11383 - protein, 476 aa, Unknown
  Description of Unknown: Integrase C126 sequence
  PF07508,SSF53041,IPR036162,SM00857, PF00239,PS51737,IPR011109,G3DSA:3.40.50.1390, IPR038109,IPR006119,PTHR30461,cd00338, G3DSA:1.10.10.2600
MHFMQNRGSGPDAECDIYVRISQDLTGDELGVQRQEKRCRALAEQLGLKVRHVWVDNDLSATKKNVVRPDFEAMLQSKPQAIVCWHTDRLIRVTRDLERVIELGVNVYAVEAGHLDLSTPAGRAVARTVTAWATYEGEQKAARQKLANQQAAQQGRPYTAGIRPFGYADDHMTLIAEEAAAIVDGANMILAGESLSAVARKWTEAGLQSPRSKVRGAKAWTLRGVKKVLTSPRYIGQSTYHGEVMGEGQWPPILDPEVHYGVVAILNNPERFSGGRRTGRTPGTLLAGIGLCGYDGCTDTVNGRGYRGVPVYGCGLTHTRTPRSIADDRASKATLARLMFPDFLGQILESQNAQDGRSGAQLQSQAQELRERLDGLAVAYAEGTISLSQMTAGSAALQKKLEAIESELVSTAGIPPLDPVKGVAGLIEGWPSLPLPTRRAWVDFCCIVTLNPARGRHMSSMSVDDHVTIEWRDVSE

SEQ ID NO: 11384 - protein, 475 aa, Unknown
  Description of Unknown: Integrase C127 sequence
  PS51736,IPR006119,PTHR30461,PS51737,G3DSA:1.10.10.2600, IPR011109,PF07508,PF13408,SSF53041,PF00239, SM00857,G3DSA:3.40.50.1390,cd00338,IPR038109,IPR036162, IPR025827
MTPRPAIGCTRLSTGPQARMYGQEVQAQEITRYAEAQGYDLLEIVPEVISGKTDPENRATVQRYLRLAEERPGLTFIFPRVDRVGRGAERILKIVRELHERHADVQVIGIPGDLRTKEGMLLLTMLAGVAEYDHTNLRGNMQAGMRQKAQAGLWPHGSPPWGYAMERDDRGKALRPVPVPEQAAAVRRLYELAIDHGETVTLQTMQAEGWPAPTEAGWKRRTVHNLLNNSLYSGVRVYQGITVTYEPIVPPELVARVQQLRQARRSGGRIPREPLLFSGHLRCVCGAAMGRDVDMSSYKGKRYATYETYRCWRKKNQRLDNPSVEQMHAPTLQARALEPLLWEALVEHLTSSELLAGIVAPQGAPPSGPDPLRVAELEAAIARAYEPLTAGAVGYTLAIAESLAQPYAQELERLRRQARAQAAPPPPDFEAQATAFRGALSKPLELGERRELLDVLAVQIVIGAEGWQEIRVQLP

SEQ ID NO: 11385 - protein, 474 aa, Unknown
  Description of Unknown: Integrase C128 sequence
  PF07508,SSF53041,IPR036162,PTHR30461:SF3,SM00857, Coil,PF00239,PS51736,G3DSA:3.40.50.1390,PS51737, IPR011109,IPR006119,PTHR30461,cd00338
MGRTRISRSTEESTSIERQREFIAAWAEQNGHEVIGWAEDIDVSGSLDPFETPSLGEWLKDERLHEWDIIVSWKLDRITRRAIPMGKLFGWLMENQKTLVCTSDSIDLSTPMGRLIAYVIATIAEGELEAIRERSKVSHKKLKELGRYAGGRVLYGQRPVAHEDAGWKLDIDEHAAEILNLIIDKLFAGQSVDSIAFDLNEMGELSPSDYQRQWYGNKVRGTKWSSTAIRRLLRSKSLLGYATEDGATMRDSKGAAILRAPALVTREKYDRIQSELEARSRVPQRTLRASPLLGIVLCLDCGQRMYYYCSTRNPDRKYYYCQRDHGRVSIRAERAADDVESLFLEKYGDMKIREKVFIQAENHEVELEDARKAVEEISSFLSTASSATVRSRLMEQLGALDSRITELEALPSRDARWEFVDGKQTYGEAWKAANTDERRALLLKWGITVSFRRRGNAVESVLNEPEDALNRLTA

SEQ ID NO: 11386 - protein, 473 aa, Unknown
  Description of Unknown: Integrase C129 sequence
  PF07508,SSF53041,IPR036162,SM00857, PF00239,IPR011109,PS51737,G3DSA:3.40.50.1390, IPR038109,IPR006119,PTHR30461,cd00338, G3DSA:1.10.10.2600
MNHRSSQADAECDIYVRISQDLTGDELGVQRQEERCRALCTQLGLKVRHVWVDNDLSATKKNVVRPDFEAMLLSKPQAIVCWHTDRLIRVTRDLERVIELGVNVYAVEAGHLDLSTPAGRAVARTVTAWATYEGEQKAARQKLANQQAAQQGRPYTAGIRPFGYGDDHMSIMADEAAAIVEGAQMILAGESLSAVARKWDAAKLQSPRSKVTGAKGWTLRGVKQVLTSPRYAGMATYHGEVMGQAQWPPILDPEVHYSVVAILNNPERFSGGKRTGRTPGTLLAGIGQCGYDDCTDTVNGRGYRGVLVYGCAATHTRTPRSIADDRASKATLARLMFPDFLGQILETQNAQDGQSGAQLQSQAQELRDRLDGLAVAYAEGAISLSQMTAGSTALQKKLEEIESQMVNSAGIPPLDPVKGIAGLIEGWPSLPLPTRRAWVDFCCIVTLNPAKGRHMSSMTVDDHVTIEWRDVSE

SEQ ID NO: 11387 - protein, 473 aa, Unknown
  Description of Unknown: Integrase C130 sequence
  PTHR30461:SF3,PF00239,PS51736,G3DSA:3.40.50.1390,IPR038109, IPR006119,G3DSA:1.10.10.2600,PF13408,PF07508,SSF53041, PS51737,cd03768,IPR006118,IPR036162,SM00857, IPR011109,PS00397,IPR025827,Coil,PTHR30461
MKCIAYVRVSTEEQAKHGYSIAAQTEKLEAYCVSQSWDLVETVVDDGYSAKDMDRPYFQKMINRIKQGGIDVLLVYRLDRLTRSVLDLYNILQILDDHNCKFKSATEVYDTTNAMGRLFITLVAAIAQWERENLAERVKMGIEKKVKLGKWKGGTPPYGYNYENDLLTINEDEEPVVKKIFKLAKQLGFYTIAKMLTELGYPTKKGGDWHVDTVRDIANNPVYAGYVTNNTKEESKKPPREQNLYEGIHPRIIPREDFWALQDELDKRRTFGGKRETSNYYFSSILKCARCGSSMSGHKGSNGIKTYRCSGKKAGKKCTSHIISEKNLTQNILTSLDRLIKGSIKSSNTSLRNISELEKELKSIQRLIDKQKTMFKKDIIDIDELISETDALRVQEKKIAKELNAYYQSRNSNQDDLNYVIENIDALWEAADDHDKKELMTRLFKQIVVDTKDEYKRGTGKAREIIIVSASAK

SEQ ID NO: 11388 - protein, 473 aa, Unknown
  Description of Unknown: Integrase C131 sequence
  PF07508,SSF53041,IPR025827,IPR036162,SM00857, PF00239,PTHR30461:SF3,PS51736,PS51737,IPR011109, G3DSA:3.40.50.1390,IPR038109,IPR006119,PTHR30461,cd00338, G3DSA:1.10.10.2600,PF13408
MLRMRIIGYVRLSRASREESTSVVRQREIIAKTCAARDFELVDIVEDVDVSATKTRLERPGLSEVRERIKSGEADAVMVWRLDRIARSVVDFGVLLDDGLDIVSATEPLDTASPMGRAMAEVLQVFARLEAKTIGVRISASQEHLRRVGRFPGGVIPYGYRAVPHPDGVGRALEPHPEEAAIVRRMADEVLAGSSVYAVTTGLNRDGIRPRRASEWTATSVQRILRSNTVLGRVKVRGELLRDDATGLPLQVWEPLLSVGEVERLRAITDWSPTPGRSEATKEGQRRKATRLLSGLIFCPGCGYPLIAKSRKSSTGAPLYACGARSRGRVCPGGVAIECERIEEEVARQFLRVVGRLRVVEPRVSVREVAGLAAVEEALRATTDALRAPDADLPVLFERLTKLRAERDRLAALPEEPVVEMTESGRTFSEAWAEADTAARRSLLANSGAVISIAKAPQRGKWSPERVRVDFHG

SEQ ID NO: 11389 - protein, 473 aa, Unknown
  Description of Unknown: Integrase C132 sequence
  PF07508,SSF53041,IPR025827,IPR036162,PTHR30461:SF3, PF00239,SM00857,PS51736,PS51737,IPR011109, G3DSA:3.40.50.1390,IPR038109,IPR006119,PTHR30461,cd00338, G3DSA:1.10.10.2600,PF13408
MLRMRIIGYVRLSRASREESTSVVRQREIIAKTCAARDFELVDIIEDVDVSATKTRLERPGLSEVRERIKSGEADAVMVWRLDRIARSVVDFGVLLDDGLDIVSATEPLDTASPMGRAMAEVLQVFARLEAKTIGVRISASQEHLRRVGRFPGGVIPYGYRAVPHPDGVGRALEPHPEEAAIVRRMADEVLAGSSVYAVTTGLNRDGIRPRRASEWTATSVQRILRSNTVLGRVKVRGELLRDDATGLPLQVWEPLLSVGEVERLRAITDWSPTPGRSEATKEGQRRKATRLLSGLIFCPGCGYPLIAKSRKSSTGAPLYACGARSRGRVCPGGVAIECERIEEEVARQFLRVVGRLRVVEPRVSVREVAGLAAVEEALRATTDALRAPDADLPVLFERLTKLRAERDRLAALPEEPVVEMTESGRTFSEAWAEADTAARRSLLANSGAVISIAKAPQRGKWSPERVRVDFHG

SEQ ID NO: 11390 - protein, 473 aa, Unknown
  Description of Unknown: Integrase C133 sequence
  PF07508,SSF53041,IPR036162,SM00857,PF00239, IPR011109,PS51737,G3DSA:3.40.50.1390,IPR038109,IPR006119, PTHR30461,cd00338,G3DSA:1.10.10.2600
MQNRGSGQVAECDIYVRISQDLTGDEYGVQRQEKRCRALAAQLGLNVRHVWVDNDLSATKKNVVRPDFEAMLQSKPQAIVCWHTDRLIRVTRDLERVIELGINVYAVEAGHLDLSTPAGRAVARTVTAWATYEGEQKAARQKLANQQAAQQGRPYTAGIRPFGYGDDHMTIIADEAAAIVKGAQMILAGESLSAVARKWDEAKLQSPRSKVTGAKGWTLRGVKQVLTSPRYAGMATYLGEVMGQAQWPPILDPEVHYSVVAILNSPERFSGGKRTGRTPGTLLAGIGQCGYDGCTDTVNGRGYRGVLVYGCKDTHTRTPRSIADDRASKATLARLMFPDFLGQILESQNAQDGQSGAQLQSQAQELRDRLDGLAVAYAEGAISLSQMTAGSTALQKKLEEIESQMVSSAGIPPLDPVKGIAGLIEGWPTLPLPTRRAWVDFCCIVTLNPAKGRHLTSMTVDDHVTIEWRDVSE

SEQ ID NO: 11391 - protein, 473 aa, Unknown
  Description of Unknown: Integrase C134 sequence
  PF07508,SSF53041,IPR036162,PTHR30461:SF3, SM00857,Coil,IPR025827,PS51736, PF00239,G3DSA:3.40.50.1390,PS51737,IPR011109, IPR038109,IPR006119,PTHR30461,cd00338,G3DSA:1.10.10.2600,PF13408
MSPDKPLRAVGYVRLSKATDTSTSPERQRRDIARFIEARGWETVATVEDIDVSATRRRLDRPGIHELRRIFSRGAADVVVVSRLDRIARNVADVSTLLDEGIAIVSASEAFDTSTAQGRAMAQVAQVFAELEAKTIGLRVSSSRGHLPAVGRWPGGPTPYGFTTDELPGGGGRTLVHHPDEAPVVRRMVTRAIEGAGPSAIARELNADGIPSRRGVEWNVRTVGRILRHGSLRGYATVKGDKVRDEIGLPVVIWPPLITPEEARQLDAALARTPHPGSYGDGGPEPLLQGLALCSSCGSPMTPRHFRRPDLAAMYVCQSRNRGRLCDRPQTANAARLEGVAERLFLASYGRIPVVETVEEATVPDGLPEVLQAIEETTDAMRAPGADVMALAERLVALNGERERLKALPHTTTRSKATGELYADLWERSGTVERRELMRGLQAFVIVHPARARGHWNDDRVELVDYMAGQLDD

SEQ ID NO: 11392 - protein, 472 aa, Unknown
  Description of Unknown: Integrase C135 sequence
  PF07508,SSF53041,IPR025827,IPR036162,SM00857, Coil,PF00239,PS51736,PS51737,IPR011109, G3DSA:3.40.50.1390,IPR006119,PTHR30461,cd00338,PF13408
MYARISDDTEGRAAGVARQVEDSLALAKRAGWSLSPYEPFVDNDISASTRSKARRPAFERLIELIEAGEIDGIVFYSNSRLTRRPREFEDIIDLVERTGLKLNSVVSGQADLSTADGRQIARMLAAADAAEAERTSERVTRAFVQRRQEGKPNPSSRAFGFEKGGMTVRQDEAELIREAATRIADEGWSLGQVVADWNRRKVPTVRAAGGWTRITLARALKNPRSAGLVAHDGEVLGRGSFEQIITPELQERVKAALTGNRNGHTVSYSQRKHALAGFLVCGKCGKPMKVNGLYNPDGSYRKDSYIVCSRSQFGCGNVKRNLLHVEEHIDSIIRARIELAVPTGDVEQEDAAASEVAELQAALDEVEEDIAEHQAEFKSNPRMRLKDYNATLAMLRDRQDAIESALASVETGHRIDPDFDLLAAWEDGSVEERRAVLEWAVDHIKLHPIGRVGPTKAKALVPTSTEVVPRRR

SEQ ID NO: 11393 - protein, 472 aa, Unknown
  Description of Unknown: Integrase C136 sequence
  PF07508,SSF53041,IPR036162,IPR025827, SM00857,PTHR30461:SF3,PF00239,PS51736, IPR011109,G3DSA:3.40.50.1390,PS51737,IPR038109, IPR006119,PTHR30461,cd00338,G3DSA:1.10.10.2600,PF13408
MIPMKIIGYVRLSRASREESTSVVRQREIIEKTCAARDFELVDIVEDVDVSATKTRLDRPGLSEVRERIRAGHADAVMVWRLDRIARSVVDFGVLLDDGLDIISATEPLDTASPMGRAMAEVLQVFARLEAKTIGVRISASQEHLRKVGRFPGGVIPYGYRAVPHPDGVGRALEPHPAEAAVVRRMADEVLAGDSVYAVTTRLNRDGIPARRGTKWSTTSVQRILRSNAVLGRVKVRGELLRDDATGLPSVVWEPLLSVAEVERLRALTDWTPTPGRSEATAEGKRRKASRLLSGLIFCPGCGYPLTAKSRHTTGAPIYVCEARARGRVCPGGIAIECERVEEEVARQFLAVVGRWSLVEPRISVREVSGLAAVEEALRSTTDALRAPDADLPALFERLTKLRTERDRLAALPEEPVVEMLETGRTFAEAWAETDTAGRRSLLLNSGVSISIARAPQRGKWNPERVSVAFHG

SEQ ID NO: 11394 - protein, 472 aa, Unknown
  Description of Unknown: Integrase C137 sequence
  PF07508,SSF53041,IPR036162,PTHR30461:SF3,SM00857, PF00239,IPR025827,PS51736,G3DSA:3.40.50.1390,IPR011109, PS51737,IPR006119,PTHR30461,cd00338,PF13408
MIRMRIIGYVRLSRASREESTSVVRQREIIAKTCAARDFELVDIVEDVDVSATKTRLERPGLTEARERIKAGEADAVMVWRLDRIARSVVDFGVLLDEGLDIISATEPLDTASPMGRAMAEVLQVFARLEAKTIGVRISASQEHLRRVGRFPGGVIPYGYRAVPHPEGIGRALEPDPVEAGIVRRMADEVLSGASIYAVTVGLNRDGVPPRRGAKWSTTAVQRILRSNAVLGRVKVRGELLRDDATGLPLQVWEPLLSVEEVERLRALTDWTPTPGRSEATAEGRRRKASRLLSGLIHCPGCGYPLTAKSRHTTGAPIYVCEARARGRVCPGGVAIECERVEAEVERKFLAVVGRWLVVEPRVSVREVAGLAAVEEALRATTDALRDPDADLPVLFERLTRLREERDRLGALPEEPVVEMVESGRTFSEAWAEADTAARRSLLSNSGASISIERAPQRGKWSPERVRVDFHG

SEQ ID NO: 11395 - protein, 472 aa, Unknown
  Description of Unknown: Integrase C138 sequence
  PF07508,SSF53041,IPR036162,IPR025827, SM00857,PTHR30461:SF3,PF00239,PS51736, PS51737,IPR011109,G3DSA:3.40.50.1390,IPR006119, PTHR30461,cd00338,PF13408
MLGMRIIGYVRLSRASREESTSVVRQREIIAKTCAARDFELVDIVEDVDVSATKTRLERPGLSEVRERIKAGEADAVMVWRLDRIARSVVDFGVLLDDGLDIISATEPLDTASPMGRAMAEVLQVFARLEAKTIGVRISASQEHLRRVGRFPGGVIPYGYRAVPHPDGVGRALEPHPEEAAVVRRMADEVLGGSSVYAVTTGLNRDGIRPRRASEWTATSVQRILRSNAVLGRVKVRGELLRDDATGLPLQVWEPLLSVGEVERLRALTDWTPTPGRSEATKEGRRRKAARLLSGLIFCPGCGFPLIAKSRRATGAPLYVCDARARGRVCPGGVAIECERVEEEVARQFLRVVGRWSVVEPRVSVREVAGLAAVEEALRATTDGLRAPDADLPLLFERLTKLRAERDRLAALPEEPVVEMTESGRTFSEAWAEADTAARRSLLSNSGASITIERAPQRGKWSPERVRVDFHG

SEQ ID NO: 11396 - protein, 472 aa, Unknown
  Description of Unknown: Integrase C139 sequence
  PF07508,SSF53041,IPR036162,IPR025827,SM00857, PF00239,PTHR30461:SF3,PS51736,G3DSA:3.40.50.1390,IPR011109, PS51737,IPR006119,PTHR30461,cd00338,PF13408
MIPMKIIGYVRLSRASREESTSVVRQREIIEKTCAARDFELVGIVEDVDVSATKTRLDRPGLTEARERIRAGEADAVMVWRLDRIARSVVDFGVLLDEGLDIISATEPLDTASPMGRAMAEVLQVFARLEAKTIGLRISASQEHLRKVGRFPGGVIPYGYRAVPHPDGVGRALEPDPAEAAVVRRMADEVLGGSSVYAVTVGLNRDGVLPRRGSKWSTTAVQRILRSNAVLGRVKVRGELLRDDATGLPSVVWEPLLSVEEVERLRALTDWTPTPGRSEATIEGKRRKASRLLSGLIHCPGCDHPLTAKNRHTTGAPIYVCEARARGRVCSGGVAIECERVEAEVERRFLAVVGRWLVVEPRVSVREVAGLAAVEEALRATTDALRDPDADLPALFERLTRLREERDRLGALPEEPVVEMIESGRTFAEAWADHDTAGRRALLANSGAVISIARAPQRGKWNPERVRVDFHG

SEQ ID NO: 11397 - protein, 470 aa, Unknown
  Description of Unknown: Integrase C140 sequence
  PF07508,SSF53041,IPR036162,SM00857, Coil,PF00239,PS51736,IPR011109, PS51737,G3DSA:3.40.50.1390,PTHR30461:SF21,IPR006119, PTHR30461,cd00338
MNKSPRVVVYLRQSEDRADDGLGVDRQREECMRLLTARGWTLQREYVDNDVSATKSKPRPQFEEMMRAVDGGEVDVIVSRHLDRLLRRLAELERTLERCAPVGAAIITASDGIDTSTDGGRTTARILASVAQGEIERKSARQLSQARQAAKAGKWVGGRRPFGYESDGVTIRDREAELVRQGYADILAGESLGEVARRWNAAGSTSTQNGTPWTRIGVRHVLTNARHAGLRRHGVHPDEQRRNPELGVVAAAEWPPLVDESTWRAAVRIIADPSKRRGPTRGSGMLTGVCVCGVCEAPVRREAARRGIPAYKCQTGKHVSRRCELVDRYVSGVVLRVLKRPDAVDLWTPERPDAPELLSKADVLRRRIEDIGADYADGLIDRAEFRAMRERAMSNLAEVESKIAAAGATSPLSIVASADIDTDWKAMSIAQKRAVIGALCTVVLRPAGQGARTFDTQTVAFRPKNPALQM

SEQ ID NO: 11398 - protein, 469 aa, Unknown
  Description of Unknown: Integrase C141 sequence
  PF07508,SSF53041,IPR036162,IPR025827,SM00857, PF00239,PTHR30461:SF3,PS51736,PS51737,IPR011109, G3DSA:3.40.50.1390,IPR006119,PTHR30461,cd00338,PF13408
MRIIGYVRLSRASREESTSVVRQREIIEKTCAARDFELVDIVEDVDVSATKTRLERPGLTEARERIKAGEADAVMVWRLDRIARSVVDFGVLLDEGLDIISATEPLDTASPMGRAMAEVLQVFARLEAKTIGVRISASQEHLRRVGRFPGGVIPYGYRAVPHPEGIGRALEPDPVEAGIVRRMADEVLSGASIYAVTVGLNRDGVPPRRGAKWSTTAVQRILRSNAVLGRVKVRGELLRDDATGLPLQVWEPLLSVEEVERLRALTDWTPTPGRSEATAEGRRRKASRLLSGLIHCPGCGYPLTAKSRHTTGAPIYVCEARARGRVCPGGVAIECERVEAEVERKFLAVVGRWLVVEPRVSVREVAGLAAVEEALRATTDALRDPDADLPVLFERLTRLREERDRLGALPEEPVVEMVESGRTFAEAWAEADTAARRSLLSNSGASISIERAPQRGKWSPERVRVDFHG

SEQ ID NO: 11399 - protein, 467 aa, Unknown
  Description of Unknown: Integrase C142 sequence
  Coil,PS51736,IPR006119,PTHR30461,PS51737,G3DSA:1.10.10.2600, PTHR30461:SF3,IPR011109,PF07508,PF13408,SSF53041,PF00239, SM00857,G3DSA:3.40.50.1390,cd00338,IPR038109,IPR036162,IPR025827
MKCVIYRRVSTDMQVEEGISLDMQQLRLEQYAKSQGWVVVNDYCDEGYSAKNTERPAFQKMIKDMKKKQFDIILVYRLDRFTRSVSDLHSILKIMDEYNVKFKSSTEIFDTTTATGRMFITLVATLAQWERETTAERVRDSMHKKAELGLRNGAKSPMGYDLNKGNLYINPTEAEIVKYIFEMFKTKGIISIVKSLNSRGVKTKRGKIFNYDAVRYIINNPIYIGKIRWGDDILTDIAQKDFETFIDKDTWYTVQQVQDSRKRGKVRLHNFFVFSNVLKCARCGKHFLGNKQVRSHNRIVMSYRCSSRHHKGTCDMPQVPEDVIEKEFLNLLEDAIVDLDDTEEKPIELSNLQEQYNRIQDKKARLKYLFIEGDIPKNEYKKDMLTLTQEENIIQKQLANITDTASSLEIKELLNQLKDEWYNLNNESKKAAVNAIVSSITVEVTKPARVGKNPIAPVIKVTDFKIK

SEQ ID NO: 11400 - protein, 465 aa, Unknown
  Description of Unknown: Integrase C143 sequence
  Coil,PS51736,IPR006119,PTHR30461,PS51737, PTHR30461:SF3,IPR011109,PS00397,PF07508,PF13408, SSF53041,PF00239,SM00857,G3DSA:3.40.50.1390,IPR006118, cd00338,IPR036162,IPR025827
MRTQHLRAVSTPQTLQVALYARVSSDQQAERHTIDSQLAELTAQAVQDGHCIRNDLRFIDNGHSGASLIRPALERLRDLVALSAIDLVYVQSPDRLARSYAHQVLLLEEFTHAGTQVIFLNRPIGTTPEDSLLLQLQGMFAEYERAKVLERSRRGKRHRAQTGAVSVLTRAPFGYHYITREAGGGAARYEIDEEAARIVRQIFTWVGHERLTLAAVCRRLRHNAIASPSGQPHWSRTVIHTMLRNPAYAGQAVYGRRQCVPWQPPLHPPRGHDGLPRKPYRQVPAAAERHISIAVPAIIDEDLFASVAERLEENRKRNRERLAGVQYLLRGLLVCQKCGYGFTGYHPYGPWRYYRCCGTDRTRFHGERRCDARLVAVDRLDEAVWSEVYRLLDDPTRVIEEYQRRLDAIQATPHQLELDALGRQLAKARRAIERLIDSYTEGLIEKPEFEPRLTGLASERWRALL

SEQ ID NO: 11401 - protein, 464 aa, Unknown
  Description of Unknown: Integrase C144 sequence
  PF07508,SSF53041,IPR036162,PTHR30461:SF3,SM00857, Coil,PF00239,PS51736,IPR011109,PS51737, G3DSA:3.40.50.1390,IPR038109,IPR006119,PTHR30461,cd00338, G3DSA:1.10.10.2600
MSRLTEESTSVDRQRELIEKWSEMNDHTIVGWAEDVDVSGSIDPFEAPQLGPWFQEDKRGDWDILVAWKLDRIGRRAIPLNKVFGWMLEHEKTLVCVSDNIDLSTWVGRLVANVIAGVAEGELEAIRERTKASRKKLLESGRWTGGPVPYWLIPEKLPEGGWVLSLNTETAPILRRAIDEVLDGTAVHTVAERLNDQGVPSPGGKKWTSQTLWRILQHKYLKGHSTDRGKTVRDSSGVPISNCEALLTPSEWDRLQAVLTQWKLPETSNRVKNTSPLLGVVVCYICDKPLYYRSYTRNYGKGLYRSYYCRNHRTPGIKADMLDEYLEENLMREVGDKNVLERYFVPAENHQIELDEAIRATEELTALLGTMTSATMRSSLTAQLAALDSRIASLEKLPTSESRWEYRELPRTYREMWESDDDPQFRRELLLKSGITLAATMTGGQKLHLHIPDDILERMALKGE

SEQ ID NO: 11402 - protein, 464 aa, Unknown
  Description of Unknown: Integrase C145 sequence
  PF07508,SSF53041,IPR036162,SM00857,PF00239, PS51736,G3DSA:3.40.50.1390,IPR011109,PS51737,IPR038109, IPR006119,PTHR30461,cd00338,G3DSA:1.10.10.2600
MRAIIYNRVSSDPTGRARSVADQERENRAVCERNDWPVAEVLTDNDRSATRFATRDRPEYLRLAEILRKGDVLVTWEASRAQRDLDAYVALRNLCAERGVMWCYSGKLYDLTAGDDRFTTGLDALLAEKEAEQTRERIMRGHRANLDAGRPHGHVPYGYRIVRDPTTGRPERRVPDEAQAPIVQDAARRILGGESLRSVVAGLNERTPEKRWSPSTLRRILVNPTYAGYRTHRGQIVREGTWDPLLSQDDHDRLVALFEGKRTVPRGSAPKYLLTGIAVCGVCDAPLQMRQQGSVPAAKKRPGGKLWFYGCEHGHVGRDRAKVDQAVSDVVVALLSDPAALATLAEPIEESDAEPVDDVQELRDRLSAAADAYDSGKLSIDMLAKVEARLLPRIEAAEARQRERFTSPVVARVATAPDPLTVWNDEMLLEDRREFLRATVRVVVYRVRSRWELGVEVYPKRLAQ

SEQ ID NO: 11403 - protein, 463 aa, Unknown
  Description of Unknown: Integrase C146 sequence
  PF07508,SSF53041,IPR036162,SM00857, PF00239,PS51736,IPR011109,G3DSA:3.40.50.1390, PS51737,IPR006119,PTHR30461,cd00338
MRAIIYCRVSSDPHARGKSVTEQESDCRATAKAHGWDVGEVLVDNDRGASRYSRKDRPAYRRLAETLTPGDVLVTWEASRAQRDLSAYLQLRDLCSERGVLWSYSGRTYDLARGDDRFTTGLDALLSEKEVEVTRERVLRSMRANAAAGRPHGKLAYGFMIVRDPHTGQSLDRVPNPETAPTFKEAADRVLDGESLYAVCNDFNARGIPAPRPRRDGTPAKWIPVTLRKILESPTYAGLRQSHGEVTGPATWEPLISMEQHERLKALFADPNRLTQRGSEPRWLLAGIARCGVCGATVKRIKSRGIQTYMCRDKFCAARMVATVDDYVVEAVMRRLEGQDLVGQIDSDNAEYGAAIENVRALQQRLDSFTDAAAEGEVTPAALARIEAKLLPQIERAEGRVRALAHSPAVARIAGAGARERWELLAVRDRRDIVRALVDVQIHRIGKGRRNVPIGEGIELSWL

SEQ ID NO: 11404 - protein, 460 aa, Unknown
  Description of Unknown: Integrase C147 sequence
  PF07508,SSF53041,PTHR30461:SF3,IPR036162,IPR025827, Coil,PF00239,PS51736,SM00857,IPR011109, G3DSA:3.40.50.1390,PS51737,IPR038109,IPR006119,PTHR30461, cd00338,G3DSA:1.10.10.2600,PF13408
MKCAIYRRVSTDEQAEKGFSLENQLLRLQAFAESQGWEVVHDYMDDGYSGKNMNRPQIKRMLHDLKLNKFDIVLVYRLDRFTRSVKDLNDLLEVFKDHEVDFKSATESIDTATATGRMILNMMVSTAQWERETISERVKDVVRKKKDLGLISTGYPPYGYVMNDGVISQVPHEVEIVKFIFEKAKVYGFQKISKLLNEQGLVTRNGTKWLISTASRIAHNPFYSGEMRYKRDGETSTVPINVEGYEPVITKEEHREILKAIKKRNRNQTRSKSDELYPFSGILLCPDCGHHMKGTRVSSRGYYYKYYRCDRASDHFCNGKLIRYEKVDKAFAEYIHDAFQIDRIEIKEETNTKDIQREIKRGKSKIERLKDLYVDGDISKKKYKNDVGELNEKIYDLEQKLLSAENKISHDHIRENLKRLSEFWGLIDDKTKMESIRGVFDTITIEIQGKDFVITDHTLL

SEQ ID NO: 11405 - protein, 459 aa, Unknown
  Description of Unknown: Integrase C148 sequence
  PS51736,IPR006119,cd03768,PTHR30461,PS51737, G3DSA:1.10.10.2600,IPR011109,PF07508,SSF53041,PF00239, SM00857,G3DSA:3.40.50.1390,IPR038109,IPR036162
MRLEANKKRRRCAVYTRKSSEEGLDQDFNSIDAQRDAGHAYIASQRAEGWIPVADDYDDPAYSGGNMDRPGLKRLLADIERGLVDIVVVYKIDRLTRSLADFSKMVEVFERHDVSFVSVTQQFNTTTSMGRLMLNVLLSFAQFEREVTGERIRDKIAASKRKGMWMGGVPPLGYDVVHRKLVVNEAEAAVVRRLFAEFPHAASTTLFVQQLRHEGVMTKSWVARSGNDRVGKLLDKGALYKILNNPVYLGQIRHKGVSHPGEHEAIVTREQWDAVQTALTSKPTGVGRGQIRSERPALLKGLIFTTDGRAMTPHATKGRGSRLYRYYLSTRDAKEGHGASGVSMLPAGEVEEAVMAQLRGILRAPEMVARVWREVARGNDAHDMTEMQVAIALSRIDTVWENLFPLEQHRIVQLLVERIVVSPQELRVQLHRNGIEHFALDVVRATGRTPAQAAGEVLA

SEQ ID NO: 11406 - protein, 458 aa, Unknown
  Description of Unknown: Integrase C149 sequence
  PF07508,SSF53041,IPR036162,PTHR30461:SF3,SM00857,PF00239,Coil, PS51736,G3DSA:3.40.50.1390,cd03768,PS51737,IPR011109,IPR038109 ,IPR006119,PTHR30461,G3DSA:1.10.10.2600
MKVAIYTRVSTLEQKEKGHSIEEQERKLRAYSDINDWTIQGVYVDAGYSGAKTDRPELNRLKENLSKIDLVLVYKLDRLTRNVKDLLDLLEIFERENVSFRSATEVYDTSTAMGRLFVTLVGAMAEWERETIRERAMMGKQAAIRKGMILTPPPFYYDRVDNKYIPNKYKDVVVWAYEEVKKGNSAKGIARKLNASDIPPPNGIQWEDRTITRALRSPLSKGHYFWGDIFIENSHEPIITDEMYNEIKERLNERVNAKTITHTSVFRGKLICPNCNGRLCLNTSYRKLKRGDVIHKNYYCNNCKVNKNGAFSFTEKEALKVFYDYLSKLDLSKYKTKEKEDKKIVTIDINKVMEQRKRYHKLYANGMMQEEELFELIKETDEKISEYEKQKERVPKKRLDVSKIKKFKNILLDSWNAFTLEDKADFIKMAIKSIEIEYIHVKRGKTKHSIKIKNIDFY

SEQ ID NO: 11407 - protein, 458 aa, Unknown
  Description of Unknown: Integrase C150 sequence
  PF07508,SSF53041,IPR036162,PTHR30461:SF3,SM00857, Coil,PF00239,PS51736,IPR011109,PS51737, cd03768,G3DSA:3.40.50.1390,IPR038109,IPR006119,PTHR30461, G3DSA:1.10.10.2600
MNYERSYLRSCQVSTLEQKEHGYSIEEQERKLKSFCEINDWSVSDVFIDAGFSGAKRDRPELQRMMNDIKRFDLVLVYKLDRLTRNVRDLLDLLEVFEQNNVAFRSATEVYDTSTAMGRLFVTLVGAMAEWERETIRERVMMGKRAAIKQGMILTPPPFYYDRVDNTYIPNDYKKVVLWAYDEVLKGNSSKAIARKLNDSDIPPPNGKRWEDRTITRALRNPITRGHYTWGDVFIENSHEPIITEEMYQQIKERLEERINTKIVSHVSVFRGKFICPRCGGTLTMNTATRKRKKGYVTYKTYYCNTCKTKKQSFGFSENEALRVFRDYLSKLDLDKYEVKTKQKDDVVTIDIDKIMEQRKRYHKLYAKGLMQEEELFELIKETDETIAEYEKQKELVPRKSLDIDKIKKFKNALLESWKIFSLEDKADFIKMAIKSIDIDYVKLKNRHSIKINDIEFY

SEQ ID NO: 11408 - protein, 458 aa, Unknown
  Description of Unknown: Integrase C151 sequence
  PF07508,SSF53041,IPR036162,PTHR30461:SF3,SM00857, Coil,PF00239,PS51736,IPR011109,PS51737, cd03768,G3DSA:3.40.50.1390,IPR038109,IPR006119,PTHR30461, G3DSA:1.10.10.2600
MNYERSYLRSCQVSTLEQKEHGYSIEEQERKLKSFCEINDWSVSDVFIDAGFSGAKRDRPELQRMMNDIKRFDLVLVYKLDRLTRNVRDLLDLLEVFEQNNVAFRSATEVYDTSTAMGRLFVTLVGAMAEWERETIRERVMMGKRAAIKQGMILTPPPFYYDRVDNTYIPNDYKKVVLWAYDEVMKGNSSKAIARKLNDSDIPPPNGKRWEDRTITRALRSPITRGHYTWGDVFIENSHEPIITEEMYQQIKERLEERINTKIVSHVSVFRGKFICPRCGGTLTLNTVTRKRKKGYVTYKTYYCNTCKAKKESFGFSENEALRVFRDYLSELDLDKYKVKTKQNDDVVTIDIDKIMEQRKRYHKLYAKGLMQEEELFELIKETDETIAEYEKQKELVPRKSLDIDKIKKFKNALLESWEIFSLEDKADFIKMAIKSIDIEYVKLKNRHSIKINDIEFY

SEQ ID NO: 11409 - protein, 458 aa, Unknown
  Description of Unknown: Integrase C152 sequence
  PF07508,SSF53041,PTHR30461:SF3,IPR036162,SM00857, Coil,PF00239,PS51736,IPR011109,cd03768, G3DSA:3.40.50.1390,PS51737,IPR038109,IPR006119,PTHR30461, G3DSA:1.10.10.2600
MNYERSYLRSCQVSTLEQKEHGYSIEEQERKLKSFCEINDWSVSDVFIDAGFSGAKRDRPELQRMMNDIKRFDLVLVYKLDRLTRNVRDLLDLLEVFEQNNVAFRSATEVYDTSTAMGRLFVTLVGAMAEWERETIRERVMMGKRAAIKQGMILTPPPFYYDRVDNTYIPNDYKKVVLWAYDEVLKGNSSKAIARKLNDSDIPPPNGKRWEDRTITRALRSPITRGHYTWGDVFIENSHEPIITEEMYQQIKERLEERINTKIVSHVSVFRGKFICPRCGGTLTLNTTTRKRKKGYVTYKTYYCNTCKGKKKSFGFAENEALRVFHDYLSKLDLEKYEVKTKQKDDVVTIDIDKIMEQRKRYHKLYAKGLMQEEELFELIKETDEIIAEYEKQKELVPSKTLDVDKIKNFKNVLLESWEIFSLEDKADFIKMAIKSIDIEYVKLKNRHSIKINDIEFY
